United States Patent Application Publication US 2010/0251416 A1 - sequence listing, part 3

SEQ ID NO: 5929 - protein, 322 aa, Brucella melitensis
MWEKVDQLTPSRYSPYRFFSAQEWAAFRADTPLTLTYEEVKRLRSLGDPIDLDEVRRIYLSLSRLLYAHVEASQLLFRQRQQFLNMEESYKTPFIIGVAGSVAVGKSTMARILKELLARWPSSPKVDLVTTDGFLYPNAVLREQNMMERKGFPESYDIGAVLRFLSAIKAGMSRVRAPLYSHLSYDVLPGEYQIVDKPDILIFEGINVLQVRDLPEDGKMVPFVSDFFDFSIYIDADPRLIHKWYIDRFMRLRETAFRDPQSFFHRYSQLSQEAARSIAEGLWQNINLKNLNENILPTRPRADLILRKGSDHLIEEVALRKI

SEQ ID NO: 5930 - DNA, 987 bp, Corynebacterium efficiens
  CDS (1)..(987): transl_table=11
atggcagctccgctcaatgctcagacccgtgcaccccaggcaaccggtcgcgccccggatttcagtccgtacctcgacttcgaccgtgcccagtggcgggaactgcgcaaatccatgccccaggtcctcaccgaggaggaggtcgtggcgctgcgcggactgggtgagaacatcgacctggatgaggtcgccgaggtctacctgccactgtcgcgtctgatccacctgcaggtcaatgcccgccaggaactgaccgtggccacggagaccttcctgggcacctcctccgctcgcatgttcccgggcagccatgtgccgtttgtcatcggtgtcgccggttcggtggcggtgggtaaatcaaccaccgcgcgtctgctgcaggtgctgctgcaacgctggagttcccacccgcgggtggatctggtgaccaccgacggtttcctctacccaggtgaggaactgcaacgccgcggcatcatgaaccgcaagggtttccccgagagctatgaccagcgggccctgctgcgtttcgtcaccgacgtgaaatccggcaagttcaatgtgcgggcaccggtgtattcgcacaccgcctacgaccgggtgcccggcaagtacatcaccgtggatcaacccgacatcctcatcgtcgaagggctcaacgtcctgcagaccggtcccaccctcatggtcagtgacctgtttgatttcagcgtgtatgtcgatgcccgcaccgaggacatcgaacgctggtacatcgagcgcttcctgcagctgcgcgacaccgccttccgtcaccccgacgcgcacttccggcactacgccgacatcggcgatgagaaggccaccgccgtggcccgcgagatctggcagtccatcaacctgcccaacctggtggagaacatcctgcccacccgggtgcgcgcctccctggtgctgcgcaagagcgccgaccacctcgtcgagcgggtgcggatgcgcaaactctga

SEQ ID NO: 5931 - protein, 328 aa, Corynebacterium efficiens
MAAPLNAQTRAPQATGRAPDFSPYLDFDRAQWRELRKSMPQVLTEEEVVALRGLGENIDLDEVAEVYLPLSRLIHLQVNARQELTVATETFLGTSSARMFPGSHVPFVIGVAGSVAVGKSTTARLLQVLLQRWSSHPRVDLVTTDGFLYPGEELQRRGIMNRKGFPESYDQRALLRFVTDVKSGKFNVRAPVYSHTAYDRVPGKYITVDQPDILIVEGLNVLQTGPTLMVSDLFDFSVYVDARTEDIERWYIERFLQLRDTAFRHPDAHFRHYADIGDEKATAVAREIWQSINLPNLVENILPTRVRASLVLRKSADHLVERVRMRKL

SEQ ID NO: 5932 - DNA, 939 bp, Corynebacterium glutamicum
  CDS (1)..(939): transl_table=11
gtgaaaccttccccacgcacaccagatttcagcccctaccttgatttcgaccgcgcacaatggcgcgagctgagaaactcaatgcctcaggtgctgacccaaaaagaagtcattgaacttcgaggcatcggagaaaacattgacctcgctgaagtggcagaagtctaccttccgctgtcccgtctgattcacctccaggtagcggcccgacagcaacttactgcagccaccgaaaccttcctcggaacttccccctctatctctgtgccgtttgtcattggtgtcgcgggatccgtcgccgtcggtaaatcaaccaccgcccgactcctccaagttctgcttcagcgctggaattcccacccccgcgtggacctcgtcaccaccgacggattcctctatcccggcgcggaactaatccgccgcggattaatgtcccgaaaaggattccccgaaagctacgaccaacgtgcactcctccgctttgtcaccgacgtaaaatccggaaaactcgaagtcaacgcacctgtctactcccacaccgcgtacgaccgagttccaggcgaattcaccacagtccgccaacccgacattttgatcgtcgaaggcttaaacgtcctccaaactggcccaacattgatggtcagtgaccttttcgacttcagcgtctacgtagatgcccgcaccgaagatatcgaaaaatggtacatcgaccgcttcctcaaactccgcgacactgcattccgtcgccccggtgcccacttctcccattacgccgacatggctgatccagagtccatcgccgtcgctcgagaactgtggcaatcgatcaacctgcccaacttggtggagaatattcttcccacccgagttcgcgcgtcgttggtactgaaaaaaggtagcgatcacttggtggaacgggtgaggatgcgcaagatctag

SEQ ID NO: 5933 - protein, 312 aa, Corynebacterium glutamicum
MKPSPRTPDFSPYLDFDRAQWRELRNSMPQVLTQKEVIELRGIGENIDLAEVAEVYLPLSRLIHLQVAARQQLTAATETFLGTSPSISVPFVIGVAGSVAVGKSTTARLLQVLLQRWNSHPRVDLVTTDGFLYPGAELIRRGLMSRKGFPESYDQRALLRFVTDVKSGKLEVNAPVYSHTAYDRVPGEFTTVRQPDILIVEGLNVLQTGPTLMVSDLFDFSVYVDARTEDIEKWYIDRFLKLRDTAFRRPGAHFSHYADMADPESIAVARELWQSINLPNLVENILPTRVRASLVLKKGSDHLVERVRMRKI

SEQ ID NO: 5934 - DNA, 957 bp, Coxiella burnetii
  CDS (1)..(957): transl_table=11
atgacggtcaaacctgaattaaacgaaataacaccttatttgcaatttaaccggcagcaatggggtaattttcgtaaagacacgccactgacgctcacagagtccgaccttgataaactccagggtcagattgaaatcgtttcgctcaaagaggtcaccgaaatttatttaccgttatcccggctgttgagtttttatgtaacggccagacaaactttacagcaagcgacatatcaatttttaggaaaaccagaacccaaggtgccttacattataggcattgccggcagtgtagccgtggggaaaagcacgacctcacgggtgttgaaggcattattgtcccgctggcccgatcatcccaatgtggaagtgatcacaacggatggatttttatattccaatgcgaagcttgagaaacaagggcttatgaaacgtaaagggtttcctgaaagctacgatatgcccagtttgctgcgtgtgctcaatgccattaaatcgggacagcgcaacgtacgcatcccggtttattctcatcattattacgatatcgttcgtggtcaatacgaaattgtcgatcaaccggatattgtaatcttagaaggactgaatattttgcaaaccggtgttagaaaaacacttcagcaactccaggtatttgtttccgatttttttgatttttctttattcgttgacgcgcaagcgcaagtgatccaaaaatggtatatcgaccgcgttttaagtttttggcggaccacgtttaaagacccgcattcctatttccattatttgacacaaatgtctgaaactgaggttgccgcatttgcgaaacacgtatggaatgaaattaacaaagtgaatttaatggagaatattttaccctacaaaaatcgagctcaattaattttggaaaaggcggctgaccactcgattcaaaaggtttacttgcgaaaaatttaa

SEQ ID NO: 5935 - protein, 318 aa, Coxiella burnetii
MTVKPELNEITPYLQFNRQQWGNFRKDTPLTLTESDLDKLQGQIEIVSLKEVTEIYLPLSRLLSFYVTARQTLQQATYQFLGKPEPKVPYIIGIAGSVAVGKSTTSRVLKALLSRWPDHPNVEVITTDGFLYSNAKLEKQGLMKRKGFPESYDMPSLLRVLNAIKSGQRNVRIPVYSHHYYDIVRGQYEIVDQPDIVILEGLNILQTGVRKTLQQLQVFVSDFFDFSLFVDAQAQVIQKWYIDRVLSFWRTTFKDPHSYFHYLTQMSETEVAAFAKHVWNEINKVNLMENILPYKNRAQLILEKAADHSIQKVYLRKI

SEQ ID NO: 5936 - DNA, 924 bp, Enterococcus faecalis
  CDS (1)..(924): transl_table=11
atggacgataaaatgaattactacccaatttccagagaagaatggcatgggttttatcatgacggcaaagcaccgttaaccgaagcagaattggataacattaaaagtgtgaacgaccaaatttcactaaaagatgtacaagaaatttatgtacccttaacgcatcttattcatttgtacatgaaagaatttgaatcgctaacacttagcaaaggattattcctacatgaatatgtctctgtaccaccattcatcattggaattgccggcagtgtcgccgttggtaaaagcaccaccgctcgtcttttgcaaagaattctggcccgaacgtttaaacgaagaaacgttcaactcattacaacggatggatttttgtatcccaataaagtgttagaagaacagggaattatggaccgaaaagggtttcctgaaagttatgacatggagaagctaattaatttcttaaacgaagtcaaaagcggcaaagacgaaattaaagcacccgtctattctcacagtgtctacgatgttatcgaaggcgaatatgagttgatacaacaaccagatattctgattgttgaaggcattaacacattacagttacccgccaatcaacaaatttatgtgagtgatttttttgatttttctatttttgtagatgccgatccagccttaattgaaaaatggtacctagaacgttttggggccttattagatacggctttcttagatcctaataattattattaccaatatgcaattggcaaacgagaagatgctttcgccatggcacggaatgtttggaaaaccgtgaacttaccgaacttggaggaatatatcttgccaacgcgcggacgtgcggacattattttgcataaaacggaaaatcatttgattgaccaaatctatctacgtaaatattaa

SEQ ID NO: 5937 - protein, 307 aa, Enterococcus faecalis
MDDKMNYYPISREEWHGFYHDGKAPLTEAELDNIKSVNDQISLKDVQEIYVPLTHLIHLYMKEFESLTLSKGLFLHEYVSVPPFIIGIAGSVAVGKSTTARLLQRILARTFKRRNVQLITTDGFLYPNKVLEEQGIMDRKGFPESYDMEKLINFLNEVKSGKDEIKAPVYSHSVYDVIEGEYELIQQPDILIVEGINTLQLPANQQIYVSDFFDFSIFVDADPALIEKWYLERFGALLDTAFLDPNNYYYQYAIGKREDAFAMARNVWKTVNLPNLEEYILPTRGRADIILHKTENHLIDQIYLRKY

SEQ ID NO: 5938 - DNA, 951 bp, Haemophilus ducreyi
  CDS (1)..(951): transl_table=11
atgggcctgcaaacaacaaaaaaaatcacaccttttttgacttttgaccgtcaacagtgggctaaattgcgtaaatcagttccattaaaattaacggaacaagatttaaaaccattacttagctttaatgaagaactttctttagaagaagtgagtactatttatttaccgcttgcacgtttgatcaattattatattgaagaaaacattaaacgtcagacggtattacaccgctttttaggtgtgaaatcacctaaagtgccttatattattagtcttgctggcagtgtttctgttggtaaaagcacttcagcgcgtattctgcaagcgttgctttgccagtggccggttgagcgtaaggtggatttaattacaacggatggttttctttatccgttagctattttgcaagcaaaaaatttacttaatcgtaaaggttttccggaatcatatgatattcatcggttaattaagtttgtttctgatcttaaatcgggcgagcggaatattaaagcgccaatctattcacatttaacgtacgatattatccctgatcgctatagcgtagttgatcaacctgaaattgttattttagaagggctaaatgtattacaaagcgggatgaattatccatctagtccgcataatgtatttgtttctgattttgttgatttttcaatttatgttgatgcagatgaagcattattaaaaagttggtatatccatcgtttcttgaaatttcgctgtagtgctttttctgatcccaattcttactttcatcactatgctaagttatctgaagaacaagcagttaaaacggcaacgaccatttgggatgagattaatggattgaacttgaaacaaaatattgtgccaagccgtgaacgtgcagatttaattttggtaaaaggtgaagatcatgcaattcaaacggttaaattacgtaagtaa

SEQ ID NO: 5939 - protein, 316 aa, Haemophilus ducreyi
MGLQTTKKITPFLTFDRQQWAKLRKSVPLKLTEQDLKPLLSFNEELSLEEVSTIYLPLARLINYYIEENIKRQTVLHRFLGVKSPKVPYIISLAGSVSVGKSTSARILQALLCQWPVERKVDLITTDGFLYPLAILQAKNLLNRKGFPESYDIHRLIKFVSDLKSGERNIKAPIYSHLTYDIIPDRYSVVDQPEIVILEGLNVLQSGMNYPSSPHNVFVSDFVDFSIYVDADEALLKSWYIHRFLKFRCSAFSDPNSYFHHYAKLSEEQAVKTATTIWDEINGLNLKQNIVPSRERADLILVKGEDHAIQTVKLRK

SEQ ID NO: 5940 - DNA, 936 bp, Haemophilus influenzae
  CDS (1)..(936): transl_table=11
gtggaattttcaactcagcaaacaccttttttaagctttaatcgtgaacaatgggcggaattacgtaaatccgttccattaaaattgacagaacaggatctcaaaccactcttaggctttaatgaagacctttcattagatgaagtaagtacaatttacctaccattaactcgtcttattaactattacattgatgaaaatttacatcgccaaacggtactacatcgttttttaggcagaaataatgccaaaacaccttacataattagtattgctggcagtgtcgctgttgggaaaagcacttctgcacgtattctacaatctctactttctcattggccaactgaaagaaaagttgatctcatcacaacagatgggtttctttatccattaaacaagcttaaacaagataatcttttacaaaagaaaggttttcccgtttcttatgacacacctaaactcattcgctttttagcggatgtaaaatcaggtaaaagcaatgttacagcaccaatttactctcatttaacatacgatattattcccgataaatttgatgtggtagataaacctgacattcttattttagaaggcttgaatgtacttcaaacgggtaataataaaaccgatcaaacattcgtatcagattttgtggatttctctatttatgttgatgctgaagaaaaattattgaaagaatggtatatcaaacgatttctgaaattccgcgaaagtgcattcaacgatcctaattcttactttaaacattacgcaagcttatcaaaagaagaggctatcgcgacggcaagtaaaatctgggatgaaattaacggattaaatctcaatcaaaacattcttccaacccgtgagcgagcaaatttaattctaaaaaaaggtcataatcaccaagtagaattaataaaattaagaaaataa

SEQ ID NO: 5941 - protein, 311 aa, Haemophilus influenzae
MEFSTQQTPFLSFNREQWAELRKSVPLKLTEQDLKPLLGFNEDLSLDEVSTIYLPLTRLINYYIDENLHRQTVLHRFLGRNNAKTPYIISIAGSVAVGKSTSARILQSLLSHWPTERKVDLITTDGFLYPLNKLKQDNLLQKKGFPVSYDTPKLIRFLADVKSGKSNVTAPIYSHLTYDIIPDKFDVVDKPDILILEGLNVLQTGNNKTDQTFVSDFVDFSIYVDAEEKLLKEWYIKRFLKFRESAFNDPNSYFKHYASLSKEEAIATASKIWDEINGLNLNQNILPTRERANLILKKGHNHQVELIKLRK

SEQ ID NO: 5942 - DNA, 921 bp, Lactococcus lactis subsp
  CDS (1)..(921): transl_table=11
atgaatgaattcattaattttgacgaaattagccgaaaaacatggcaaaatctttataatacttcgattgctcccttaactcatgatgagttagagtcaatccgctcactcaatgatgaaatcagcttacaagatgtggaggacgtctatttaccactgattcatcttcttcgcttatataaaaaaaatttagaagacatgagttactctaaaggacttttcctacaaaaaattgtcaaaactcccccactcatcattgggatttccggctcagtcgccgttggaaaatcaacgactgcaagacttctccagcttctcctttcacgtgcctttccaaaattaaccgttgatttagtgacaaccgacggatttttgtacacgactaatgatttaaaaaatatggggattctcgaccgcaaaggttttcccgaaagctatgatatggaaaaattaacaagttttctttatcacgtcaaaaatggtgaaaaatttgaagttccgatttactcacatgaaacttacgatattttgcctaaccaaagtcaaatcattgacagccctgatattcttattgtagaaggaattaatgtgcttcaaaatccacaaaatcaactactttatatcagtgatttttacgatttttcaatttatgtcgatgctgacgaaaaactcattgaaaaatggtacctcgaacgttttgacagccttttaaaactagctaaatatgaccagacaaacttctatcatcaatttacaaaaatgccagaagataaagtaatcaatctagcccgtgaaatatgggcacgtgtcaatcgtgtcaatctcagagaatatattgagcccacaagaaatcgggcagaaattattctccacaaaacagaaaatcactatattgacaaaatttacctgaaaaaattctaa

SEQ ID NO: 5943 - protein, 306 aa, Lactococcus lactis subsp
MNEFINFDEISRKTWQNLYNTSIAPLTHDELESIRSLNDEISLQDVEDVYLPLIHLLRLYKKNLEDMSYSKGLFLQKIVKTPPLIIGISGSVAVGKSTTARLLQLLLSRAFPKLTVDLVTTDGFLYTTNDLKNMGILDRKGFPESYDMEKLTSFLYHVKNGEKFEVPIYSHETYDILPNQSQIIDSPDILIVEGINVLQNPQNQLLYISDFYDFSIYVDADEKLIEKWYLERFDSLLKLAKYDQTNFYHQFTKMPEDKVINLAREIWARVNRVNLREYIEPTRNRAEIILHKTENHYIDKIYLKKF

SEQ ID NO: 5944 - DNA, 930 bp, Lactobacillus plantarum
  CDS (1)..(930): transl_table=11
atggaagatcagatgaactattatcgcttctcacgtgaacagtggaagcaattttatcgtaacaatcagcatcaagtaccattgaccgcagccaatttgcacgaaattgaggcgtttaatgaccggattagtctcgacgatgtccgtgatatttatatgccgtttgcgcatttgttgcaggccaagtatgaacactacttgtcatggcgggaaacggagtccgtttttttacaccgtcagaaccgccaatcaccctttattattggagtgtctggaagtgtggcagttggcaagaccaccacagcaaggttattagagattctatttaaatatttatatccagaccggcggacgcaattgattacgacggatggtttcttatacccgaatgccgagctcaaaaagatgcaattgatggaacgcaaagggtttccggaaagctatgatatgacgcggctgatccaattcttgaacgatgtgaagagcggaaagccgttagcgaaggccccggtgtactctcatcagacttatgatattgtgccaaaccgttttgacgtgatcacgcatcctgatattttgattattgaaggaatcaacgtgttgcaattgccaagcaatcaggcgatctacattagtgattttacggacttctcagtgtatgtcgatgcggatgccgatttaattgaagattggtacttagaacgcttcaaggccctgatgaaaacggctttccaggatccgacgaattatttctatccttgggcgatcggtgatccgaaggacgcgatggcgatggccgagcgtgtttgggaagaggttaacttgaaaaacttgaatgattatatcttgccaacccgtaatcgtgcggatttaattttgcacaaagttgcgcatcatgtgattgatgccgtgtatttccgcaaatattag

SEQ ID NO: 5945 - protein, 309 aa, Lactobacillus plantarum
MEDQMNYYRFSREQWKQFYRNNQHQVPLTAANLHEIEAFNDRISLDDVRDIYMPFAHLLQAKYEHYLSWRETESVFLHRQNRQSPFIIGVSGSVAVGKTTTARLLEILFKYLYPDRRTQLITTDGFLYPNAELKKMQLMERKGFPESYDMTRLIQFLNDVKSGKPLAKAPVYSHQTYDIVPNRFDVITHPDILIIEGINVLQLPSNQAIYISDFTDFSVYVDADADLIEDWYLERFKALMKTAFQDPTNYFYPWAIGDPKDAMAMAERVWEEVNLKNLNDYILPTRNRADLILHKVAHHVIDAVYFRKY

SEQ ID NO: 5946 - DNA, 969 bp, Leifsonia xyli subsp
  CDS (1)..(969): transl_table=11
atggctgagaacggcgccgctcgcggcggaacgagtgccggcggcgactcgagcacccctttcgtggagctgggccgcgcggattgggcagaactcgcccagagcgcccggctccccctccaggaagctgagatcgtgcagttgcgcggtctcggcgatcccctggacatgcgcgaggtgggagaggtctacctcccgctcagccggctgctcaacctctatgtgggcggcacccgtcagctccaccgggtcaccagcgacttcctcggcgagcgagcgcaggcgaccccgttcgtgatcggcgtcgccggctccgtcgcggtcggcaagtcgacgatcgcccgtctgctgcgcgagctgctgtcgcgctgggacgacactccgcgcgtcgagctggtcaccaccgacggcttcctcctgccgaacgccgagctggaacgccgtggcctgatgcggcgcaagggattcccggagtcctacgaccgccgcgccctgctacggttcgtcaccgccgtcaagagcggagcgcgggaggtccgcgcaccgttctactcgcatctgagctacgacatcgtgcccggcgccgagatcgtcgtccggcagcccgatgtcctcatcgtcgaggggctcaccgtgctgcagcccgcgggcggcggcacccggctcgcggtgagcgatctgttcgacttcagcgtctacgtggacgcgcggacccgggacatcgcccactggtaccaggagcggtttctcaccttgcagcgcggcgcgttcgccaacccgaagtcctacttccatcgttacgcctcgctcaccgaggaggaggcgcgggcacgggcggcagccatctgggcggacatcaacgaaccgaacctcacacagaacatccggccgacgcgttcgcgggcgaagctcgtgttgcggaaggacgccgatcacaccgtctcctccgttctgctgcgaaagatttag

SEQ ID NO: 5947 - protein, 322 aa, Leifsonia xyli subsp
MAENGAARGGTSAGGDSSTPFVELGRADWAELAQSARLPLQEAEIVQLRGLGDPLDMREVGEVYLPLSRLLNLYVGGTRQLHRVTSDFLGERAQATPFVIGVAGSVAVGKSTIARLLRELLSRWDDTPRVELVTTDGFLLPNAELERRGLMRRKGFPESYDRRALLRFVTAVKSGAREVRAPFYSHLSYDIVPGAEIVVRQPDVLIVEGLTVLQPAGGGTRLAVSDLFDFSVYVDARTRDIAHWYQERFLTLQRGAFANPKSYFHRYASLTEEEARARAAAIWADINEPNLTQNIRPTRSRAKLVLRKDADHTVSSVLLRKI

SEQ ID NO: 5948 - DNA, 921 bp, Listeria innocua
  CDS (1)..(921): transl_table=11
atgaatgattacaaccactactttcatttcccacgagaagaatggcgcaagctggaagtgagtaaggaccaaattttaactgcagaggaactggaagaaatacgtggtttaaatgaccgaatttctttacaagacatctctgaaatctatttaccacttataaaactaattgcaatccaataccatgaagcaatttttattcatggtgaaaaaatggaatacttaaagaaaaaagaatcacgtgcccctttcatcattgccttagcaggtagtgtggcagtagggaaaagtacaaccgcgcgtgtttttaaattaatgctagatcgttggttttctaaaacaaggcaagtcgagcttgtaacaacagacggatttctctatcctaataaggttttagaagaacggggtatcatggataaaaaaggtttccccgaaagctacgaccgcgaccgctttgctaagtttctaaccgacttaaaagcaaataaagaagatgttgaagtaccactttattcgcatttcacctacgatgttttagacgaaactcgcatgatgcataatccggatattgttattattgaagggattaatgtccttcaagctgaccaacatgagagcctatatccgagtgatttctttgatttctccgtgtatatggatgctaatgaagcagatattaagaactggtatttagaacgtttcttcatgcttcgcgaaacagctttccaagacgaaagctcgtatttccacccatatacgaaaatcagtaaaaaagaagcagaaacatttgcgttaggtgtttgggatacaatcaatggcgtcaatttaaaagaaaacatcgagaaaacaaagtaccgagcggatttagttcttcataaaggaacagatcaccttatttcagatatttatttacgaaaataa

SEQ ID NO: 5949 - protein, 306 aa, Listeria innocua
MNDYNHYFHFPREEWRKLEVSKDQILTAEELEEIRGLNDRISLQDISEIYLPLIKLIAIQYHEAIFIHGEKMEYLKKKESRAPFIIALAGSVAVGKSTTARVFKLMLDRWFSKTRQVELVTTDGFLYPNKVLEERGIMDKKGFPESYDRDRFAKFLTDLKANKEDVEVPLYSHFTYDVLDETRMMHNPDIVIIEGINVLQADQHESLYPSDFFDFSVYMDANEADIKNWYLERFFMLRETAFQDESSYFHPYTKISKKEAETFALGVWDTINGVNLKENIEKTKYRADLVLHKGTDHLISDIYLRK

SEQ ID NO: 5950 - DNA, 921 bp, Listeria monocytogenes serotype 4b
  CDS (1)..(921): transl_table=11
atgaatgattacaaccactactttcatttcccacgagaagaatggcgcaagctggaagtgagtaaggaccaaattttaactgcagaggaactggaagaaatacgtggtttaaatgaccgaatttctttacaagacatctctgaaatctatttaccactaataaaactaattgcgattcaataccatgaagcgatttttattcatggcgaaaaaatggaatacttaaagaaaaaagaatcgcgagcaccatttattattgcattagcaggaagtgtggctgttgggaaaagtacgacagcacgtgttttcaaattaatgcttgatcgctggttctccaaaactagacaagtagagcttgtaacgacagacggctttctttaccctaacaaagttctagaagagcgcggcatcatggataaaaaaggctttcctgaaagctacgaccgtgaccgttttgccaagtttttaaccgacttaaaagcaaataaagaagatgtcgaaataccactttattcgcatttcacttatgatgttttagacgaaactcgcgtgattcataatccagatatcgttattattgaaggaatcaatgttcttcaagcagatcaacatgagagcctgtttccaagtgacttctttgatttctccgtttacatggatgccaatgaagcggatattaagaaatggtatttagaacgtttcttcatgcttcgcgaaacagctttccaagatgaaagttcttatttccacccatatactaaaattagcaaacaagaagcagaaacatttgcactcggggtttgggatacaatcaacggcgtcaacttaaaagaaaacattgagaaaacaaaatatcgagccgacttagtgcttcaaaaaggcacagatcatctcatttcagacatttatttacgcaaataa

SEQ ID NO: 5951 - protein, 306 aa, Listeria monocytogenes serotype 4b
MNDYNHYFHFPREEWRKLEVSKDQILTAEELEEIRGLNDRISLQDISEIYLPLIKLIAIQYHEAIFIHGEKMEYLKKKESRAPFIIALAGSVAVGKSTTARVFKLMLDRWFSKTRQVELVTTDGFLYPNKVLEERGIMDKKGFPESYDRDRFAKFLTDLKANKEDVEIPLYSHFTYDVLDETRVIHNPDIVIIEGINVLQADQHESLFPSDFFDFSVYMDANEADIKKWYLERFFMLRETAFQDESSYFHPYTKISKQEAETFALGVWDTINGVNLKENIEKTKYRADLVLQKGTDHLISDIYLRK

SEQ ID NO: 5952 - DNA, 939 bp, Mycobacterium bovis
  CDS (1)..(939): transl_table=11
atgtcgcggcttagcgagccgagcccatatgtcgagttcgaccgaaggcagtggcgcgcgctccgtatgtcgactccgctagccctcaccgaagaagaactggttggcctgcgcggtctcggtgagcagatcgacctgttggaggtcgaagaggtctacctaccgctggcccggctgattcacctgcaagtcgccgcccgccaacggctgttcgcggccaccgcggaatttctcggcgagccccaacaaaacccggaccggccggtgccgttcatcatcggtgtggccggcagtgtggcggtcggcaagtccaccaccgcccgcgtgctgcaggcgctgctggctcgctgggatcaccacccccgggtagatctggtgaccaccgacggctttctctaccccaacgccgagctgcagcggcgaaacctcatgcatcgcaaaggttttccggaaagctataaccgccgggcactgatgcggtttgtcacctcggtgaagtccggctccgactacgcatgtgcgccggtgtattcgcatttgcactacgacatcatcccgggggcagaacaagtggtccgccatcccgacatcctgatcctggaggggctcaacgtcttgcagaccggccccacgctcatggtgtcggatctgttcgatttttcgttgtatgtagacgcccggatcgaggacatcgagcagtggtacgtatcacggtttttggccatgcgcaccacggcgttcgccgacccggaatcacacttccaccactacgcggctttttctgactcgcaggccgtcgtcgccgcgcgcgagatctggcggaccatcaaccggcccaacctcgtggagaacattctgccgacccgtccccgggccaccctggtgctgcgcaaggacgccgatcattccattaaccggctgcggctgcgcaagctgtaa

SEQ ID NO: 5953 - protein, 312 aa, Mycobacterium bovis
MSRLSEPSPYVEFDRRQWRALRMSTPLALTEEELVGLRGLGEQIDLLEVEEVYLPLARLIHLQVAARQRLFAATAEFLGEPQQNPDRPVPFIIGVAGSVAVGKSTTARVLQALLARWDHHPRVDLVTTDGFLYPNAELQRRNLMHRKGFPESYNRRALMRFVTSVKSGSDYACAPVYSHLHYDIIPGAEQVVRHPDILILEGLNVLQTGPTLMVSDLFDFSLYVDARIEDIEQWYVSRFLAMRTTAFADPESHFHHYAAFSDSQAVVAAREIWRTINRPNLVENILPTRPRATLVLRKDADHSINRLRLRKL

SEQ ID NO: 5954 - DNA, 939 bp, Mycobacterium leprae
  CDS (1)..(939): transl_table=11
atgccacggcttagcgagccgagcccgtatgtcgagtttgaccgaaagcagtggcgcgcgcttcgcatgtcgacgccactagccctcaccgaagaggaactgatcggcttacgtggtcttggtgaacagatcgacctgctcgaagttgaagaggtttacctaccactagcccggctgattcatcttcaggtagccgcccgccagcgcttgtttgccgccaccgcggaattcctcggcgagccacaacaaaaccctggccggccggtgccgttcatcatcggggtggctggcagcgtggcagtcggcaaatcaaccaccgcccgcgtgctgcaagcactgttggctcgctgggatcaccatacccgggtcgatctggtgaccaccgacggttttctctatcccaacgccgaattgggtaggcgcaatcttatgcaccgcaaaggttttccagaaagttataaccgccgggcactgatgcggttcgtgacctcggtgaagtccggtgccgattacgcgtgcgcaccagtgtattcacatctgcgctacgacaccatccccggtgccaagcacgtggtccgccatcccgatatcctgatcttggagggtctcaacgtattgcagaccggccccaccctgatggtgtctgacttattcgacttctcgctctacgtggacgcccggatccaagacatcgagcagtggtacgtgtcgcggtttttggccatgcgcggtacggcattcgccgacccagagtcacacttccaccactactcggctctgaccgattcgaaggcaatcatcgccgcccgagaaatctggcggtcgatcaaccggcccaacctggtagagaacattctgccgacccgcccccgcgccaccctggtactacgcaaagacgctgaccactccattaaccggctacgcttgcgcaagctgtag

SEQ ID NO: 5955 - protein, 312 aa, Mycobacterium leprae
MPRLSEPSPYVEFDRKQWRALRMSTPLALTEEELIGLRGLGEQIDLLEVEEVYLPLARLIHLQVAARQRLFAATAEFLGEPQQNPGRPVPFIIGVAGSVAVGKSTTARVLQALLARWDHHTRVDLVTTDGFLYPNAELGRRNLMHRKGFPESYNRRALMRFVTSVKSGADYACAPVYSHLRYDTIPGAKHVVRHPDILILEGLNVLQTGPTLMVSDLFDFSLYVDARIQDIEQWYVSRFLAMRGTAFADPESHFHHYSALTDSKAIIAAREIWRSINRPNLVENILPTRPRATLVLRKDADHSINRLRLRKL

SEQ ID NO: 5956 - DNA, 951 bp, Pasteurella multocida
  CDS (1)..(951): transl_table=11
gtggacttaacaaattcaacttttttatcaaatcaattaaccccttttttatcttttagccgcgagcagtgggctgaattaagaaagtctgtaccgttaaccttaactgaacaggatttaaaacccctgcttgggattaatgaagaactttctttagatgaagtgcgaactatttatttgccgttagtacgtttaattaattattacatcgaagaacgtatccagcgtcagcaagtgatgaatcgctttttaggcgtcaaccctgacaaagtaccttatattattagtattgcagggagtgttgccgttggaaaaagcacttcagcacgtattctgcaatcgttactttcccaatggccagaacgtcgtaaagtggatttgatcacgacagatggttttttatatccgttggctaagttgcaacaagacaatcttttacataaaaaaggttttccagtttcttacgatacggcgcgtttagtgcgttttttagctgatattaaatcaggtaaaccaaaggtgagtgcgcctgtttattcccatttaatttatgatatcgtaccggatcaatttgatgtggtggatcaacctgatattctcattttagaaggcttaaatgtcctacaaacaggcgatcgttctagtcaaactttcgtttctgattttgttgatttttctatttatgtggatgcagatgaagatctcttaaaagcgtggtatatcagccgttttttgaaattccgtcaaagcgcatttagcgatccgaattcgtattttaaacattatgctactttatcagaacctgaagcgatcagtacggcggggcggatttgggatgaaattaacgggttaaatttaagagaaaatattttaccgacaagagaacgtgccaatttaattctgaccaaaggcacagatcatgccgtagagttggtgaaattacgtaaatag

SEQ ID NO: 5957 - protein, 316 aa, Pasteurella multocida
MDLTNSTFLSNQLTPFLSFSREQWAELRKSVPLTLTEQDLKPLLGINEELSLDEVRTIYLPLVRLINYYIEERIQRQQVMNRFLGVNPDKVPYIISIAGSVAVGKSTSARILQSLLSQWPERRKVDLITTDGFLYPLAKLQQDNLLHKKGFPVSYDTARLVRFLADIKSGKPKVSAPVYSHLIYDIVPDQFDVVDQPDILILEGLNVLQTGDRSSQTFVSDFVDFSIYVDADEDLLKAWYISRFLKFRQSAFSDPNSYFKHYATLSEPEAISTAGRIWDEINGLNLRENILPTRERANLILTKGTDHAVELVKLRK

SEQ ID NO: 5958 - DNA, 951 bp, Photorhabdus luminescens subsp
  CDS (1)..(951): transl_table=11
atgaataaaaaagaaccttttttggctactccatatttgcaattcaatcgtgaacaatgggcaaccttacgtgattcagttccactgacattaacaaaagaagaattaattgatttaaaaggaattaatgaagaaatttctttagaagaagttgttgagatttaccttcctttatctcgcttactcaatttttatattagttcaaatttacgtcgtcaagcagtgctggaacaatttttaggtactgatggacaaaaagtcccttatgtcataggaattgctggcagtgttgctgttggtaaaagcactactgcacgtctattacaagctctgctgagtcgttggcctgaacacagaagcgtagaattaattactacagatggttttctacattctaacagcgtgctgaatgaacgtggactgatgaaaaagaaagggttcccacagtcatatgatatgcatagcttagtgaaatttgtatctgatattaaatcgggctctaaacaagtatccgcaccagtatactctcatcttacctatgatatcgtaccaaatgagcaaaaattcattaaacaaccagacattttgattctagagggtttgaatgtattacaaagcggtatggattatccccatgatccacaccatgtatttgtctctgattttgtcgacttttctatctacgtcgatgcaccagaaaaattactcaaaagttggtatatcagtcgtttcttaaaattccgccaaggtgccttttccgatccagattcttatttccacagttactccaaactatcagaagaagaagccataaatactgcatccgatatctggcaagagatcaatggactgaatttgcgacaaaatattttaccaactcgagaacgcgcaagcctaatcatgacaaaaggtactaatcacactattgaaagcgtaaggctacgtaagtaa

SEQ ID NO: 5959 - protein, 316 aa, Photorhabdus luminescens subsp
MNKKEPFLATPYLQFNREQWATLRDSVPLTLTKEELIDLKGINEEISLEEVVEIYLPLSRLLNFYISSNLRRQAVLEQFLGTDGQKVPYVIGIAGSVAVGKSTTARLLQALLSRWPEHRSVELITTDGFLHSNSVLNERGLMKKKGFPQSYDMHSLVKFVSDIKSGSKQVSAPVYSHLTYDIVPNEQKFIKQPDILILEGLNVLQSGMDYPHDPHHVFVSDFVDFSIYVDAPEKLLKSWYISRFLKFRQGAFSDPDSYFHSYSKLSEEEAINTASDIWQEINGLNLRQNILPTRERASLIMTKGTNHTIESVRLRK

SEQ ID NO: 5960 - DNA, 960 bp, Rhizobium loti
  CDS (1)..(960): transl_table=11
atggatcagctcgcgcaaaccgagaaatattccccctttcgtttcttttcggccgagcaatggtcgcgattccgcgccgacacgccactgacgctgagcgaggacgagttccgccgcttgcgttcgcttaacgacccggtcgacctcgaggaggtcaagcgcatctatttgtcgctgtcgcggcttctgtccgcccatgtcgaggcgagccagctcttgttccggcagcgccaggccttcttcaacgccgtcgatatcgtcaagacgccgttcatcatcggcatcgccggctccgtcgccgtcggcaaatcgaccaccgcgcgcgtgctgaaggagcttctggcgcgctggccgtcgagccccaaggtcgatctcatcaccaccgacggcttcctgctgcccaacgaggtgctgcgccgtgagaacctgatggaacgcaagggttttcccgacagttacgatgtcggcgcgctgctgcgcttcctctcgggcatcaagtcggcgctgcccgatgtccgcgcgccggtctattcgcacctcacctatgacgtcattccgggcgagttcgtcaccatcgaccggcccgacatattgatcttcgaaggcatcaatgtcctgcagccgggcaagctgccgcaggacggcaagatcgtgcccttcctgtccgactttttcgactttgccatctatatcgatgccgacgagaagctgatccatgagtggtatatctcgcgcttcatgcggctgcgcgagaccgccttccgcaatccggactccttcttccaccgctactcgcagctttcggaggaagcggcgcgcgccatcgccgaaggcctgtggtccaacatcaatctgaagaatttgcgcgagaacatcttgccgacgcgcgcccgcgccgacctcatcctgcgcaagggcgccgaccatctggtcgaggaagtggcgctgcgcaaactttag

SEQ ID NO: 5961 - protein, 319 aa, Rhizobium loti
MDQLAQTEKYSPFRFFSAEQWSRFRADTPLTLSEDEFRRLRSLNDPVDLEEVKRIYLSLSRLLSAHVEASQLLFRQRQAFFNAVDIVKTPFIIGIAGSVAVGKSTTARVLKELLARWPSSPKVDLITTDGFLLPNEVLRRENLMERKGFPDSYDVGALLRFLSGIKSALPDVRAPVYSHLTYDVIPGEFVTIDRPDILIFEGINVLQPGKLPQDGKIVPFLSDFFDFAIYIDADEKLIHEWYISRFMRLRETAFRNPDSFFHRYSQLSEEAARAIAEGLWSNINLKNLRENILPTRARADLILRKGADHLVEEVALRKL

SEQ ID NO: 5962 - DNA, 996 bp, Rhizobium meliloti
  CDS (1)..(996): transl_table=11
atgagcatcgccgcgaaagacatcgaaccggccgacattccgggaaatctccaggggggcgaatattcgccctatcacgtcttctccgcggaggaatggtcgcgctttcgcgccgacacgccgctgacgctgacggccgacgaggtgcagcgcctgcgctctctcaacgatccggtcgatctcgacgaggtgcgacggatctatctctcgctctcacgactcctctcggcccatgtggaggcgtcgcagatcctcttcaggcagcgcacgcgcttcctcagcatgtcgaacgagacgaagacgcccttcgtcatcggcgtcgccggctcggtcgccgtcggcaagtcgacgaccgcgcgcatccttgccgagcttctcgcgcgctggccctcgagcccgaaggtcgacctcgtcaccaccgacggctttctttatccgaatgcggttctccagcgcgaaaacctgatggaccgcaagggttttccagcgagctacgatatcggtgcgctgctcagattcctctcggcgatcaaggcgggccggccgaacgtcaaggctccgacctattcgcacctgacctatgacgtgatccccgaccagttccaggtgatcgaccggccggacatcctgattttcgaagggataaacgtactgcagtcgcgcgatcttccggccgacggcaagatcgtgccgatggtctccgatttcttcgacttttcgatctatatcgatgccgaggagagtctgatccacagctggtacgtgaaccgcttcatgcgactgcgcgaaaccgcgttccagagcccgcagtccttcttccatcgctatgcgacgatcagcgaggatgcggcgcgcgcgatcgccgagggcctctggcacaatatcaacctgaagaacctgcatcagaacatcctgccgacgcggccgcgcgccgatctcatcctgcagaagggtcccaaccacctgacgcagacggtggcgctcaggaagctctga

SEQ ID NO: 5963 - protein, 331 aa, Rhizobium meliloti
MSIAAKDIEPADIPGNLQGGEYSPYHVFSAEEWSRFRADTPLTLTADEVQRLRSLNDPVDLDEVRRIYLSLSRLLSAHVEASQILFRQRTRFLSMSNETKTPFVIGVAGSVAVGKSTTARILAELLARWPSSPKVDLVTTDGFLYPNAVLQRENLMDRKGFPASYDIGALLRFLSAIKAGRPNVKAPTYSHLTYDVIPDQFQVIDRPDILIFEGINVLQSRDLPADGKIVPMVSDFFDFSIYIDAEESLIHSWYVNRFMRLRETAFQSPQSFFHRYATISEDAARAIAEGLWHNINLKNLHQNILPTRPRADLILQKGPNHLTQTVALRKL

SEQ ID NO: 5964 - DNA, 951 bp, Shewanella oneidensis
  CDS (1)..(951): transl_table=11
atgacgtcaaagaatccaattcaaaaagcactctatcttgcctttgagcgcgcacaatggtctgttttgagggacgctgtgccaatgacgctgagtgagcaagacttggagaatcttcgagggattaatgaaaaggtttccctctcagaagtcaccgatatctatctgccgctcagcaggctgcttaacttaattgtcaaagccaaacagcaacgaggtttagtcctcgatgaatttcttggtcagaagccgtcaagtagcccttatattattagccttgcaggtagcgtcgctgttggtaaaagcaccactgcacgtattttacaggcgttactaagccagtggcccgagcatcctaaagtcgatttagttacgactgacggttttctatatccgttggccgacttaaagcgtaaaggcttattacagcgcaaaggctttcctgaaagttacgatatgaagatgttggttgaatttatttcgggcgtaaaatcaggacaacctcatgttaatgcgcctatctattcccacgtaacctacgaccgcattcgtggccagcatcaaaccgtctcgcagcccgatatattgatccttgaaggtctcaatgtactgcaaactggattagattcgccagtcgatatacgcaggccctttgtatctgactttgtcgacttttcgatttatgtcgatgcagaagaacatttattgaaacagtggtatcaagagcgctttttgcaatttcgcaaaggggcatttagtgatgaaaagtcctatttccatcactatgcaagcctaaccgatgatgaggctaataccatagccgcaaaaatttgggatacaatcaacggccccaatttgcaactcaacattcagccgacaagagaacgagcacatctgatcctacaaaaaggacaagatcatttgatgtcccacgtattgctacgtaaataa

SEQ ID NO: 5965 - protein, 316 aa, Shewanella oneidensis
MTSKNPIQKALYLAFERAQWSVLRDAVPMTLSEQDLENLRGINEKVSLSEVTDIYLPLSRLLNLIVKAKQQRGLVLDEFLGQKPSSSPYIISLAGSVAVGKSTTARILQALLSQWPEHPKVDLVTTDGFLYPLADLKRKGLLQRKGFPESYDMKMLVEFISGVKSGQPHVNAPIYSHVTYDRIRGQHQTVSQPDILILEGLNVLQTGLDSPVDIRRPFVSDFVDFSIYVDAEEHLLKQWYQERFLQFRKGAFSDEKSYFHHYASLTDDEANTIAAKIWDTINGPNLQLNIQPTRERAHLILQKGQDHLMSHVLLRK

SEQ ID NO: 5966 - DNA, 921 bp, Streptococcus agalactiae serotype III
  CDS (1)..(921): transl_table=11
atgaataatgaatttattaatttcgaccgtatttccagagaaaattggaaggacttacatcagcaatcccaagctttactaactgaaaaagagcttgaatctatcaaaagcttaaacgataatattaatattcaagatgttattgacatctaccttcctttaattaaccttattcaaatctataaacgtagtcaagaaaatttatctttttctaaagcaatatttcttaaaaaggaaaattatcaacgtccttttattatcggcatatcagggtcagttgctgttggaaaatcaactaccagtcgcttactacaattactaatttcacgaacttttaaagatagtcacgtcgaattagtcactactgatggctttttatatcctaacgagaaactcatacaaaatggaattttaaaccgtaaaggtttcccggaatcctatgatatggagtcacttctaaatttcttagatactataaagaacggtataaccgcgaaaatcccaatttattctcatgaaatctacgatatcgttccaaatcaattgcaaactattgaaacaccagattttttaattttagaaggaataaatgtctttcaaaaccaacaaaaccatcgactttacatgaatgattattttgatttttcaatatacatcgatgctgaaaataaacaaattgaagaatggtatttacaacgatttaacagtcttctacaattagccgaagcagaccctagtaattactatcataaattcacacaaataccgccacataaagctatggaactagctaaagatatttggaaaactattaatttagtcaaccttgaaaaatatatagaaccaaccagaaatagggctgattttattattcataaagggaaacatcataaaattgatgaaatttatctcaaaaagtga

SEQ ID NO: 5967 - protein, 306 aa, Streptococcus agalactiae serotype III
MNNEFINFDRISRENWKDLHQQSQALLTEKELESIKSLNDNINIQDVIDIYLPLINLIQIYKRSQENLSFSKAIFLKKENYQRPFIIGISGSVAVGKSTTSRLLQLLISRTFKDSHVELVTTDGFLYPNEKLIQNGILNRKGFPESYDMESLLNFLDTIKNGITAKIPIYSHEIYDIVPNQLQTIETPDFLILEGINVFQNQQNHRLYMNDYFDFSIYIDAENKQIEEWYLQRFNSLLQLAEADPSNYYHKFTQIPPHKAMELAKDIWKTINLVNLEKYIEPTRNRADFIIHKGKHHKIDEIYLKK

SEQ ID NO: 5968 - DNA, 990 bp, Streptomyces avermitilis
  CDS (1)..(990): transl_table=11
gtgatctctccggtctcctcgataccccggagcgcccaccggtccaggccggaggcgactccctacctcgacctcacccgtgccgagtggagcgctctgcgcgaaaagacgccgctcccgctgaacgccgaggaggtcgagaagctgcgcggcctgggcgacgtcatcgacctcgacgaagtacgggacatctatctgccgctgtcgcgcctcctcaatctgtacgtgggagcgaccgacggcctgcgcggcgcgctgaacaccttcctcggcgagcagggctcccagtccggcaccccgttcgtcatcggggtcgccggctcggtggcggtcgggaagtccaccgtcgcccgccttctccaggccctcctgtcccgctggcccgaacacccgcgcgtcgaactggtgacgacggacgggttcctcctccccaccaaggagctcgaggcccgcggcctgatgtcgcggaagggattccccgagtcgtacgaccgccgcgcgctcacccgcttcgtcgccgacatcaaggcgggcaaggacgaggtgacggccccggtctactcccacctgatctacgacatcgtccccggccagaagctcacggtccgccgcccggacatcctgatcgtcgagggcctgaacgtgctccagcccgccctgccgggcaaggacggccgcacccgcgtcggactcgccgactacttcgacttcagcgtgtacgtcgacgcccgccccgaggacatcgagcgctggtacctgaaccgcttccgcaagctgcgcgccaccgccttccagaacccgtcctcgtacttccgcaggtacacccaggtctccgaggacgaggcgctcgactacgcgcgcacgacctggcggaccatcaacaaggtgaacctgctggagaacgtggccccgacccgcggccgggccgccctcgtcgtccgcaagggccccgaccacaaggtgcagcgcctgagcctgcgcaaactgtga

SEQ ID NO: 5969 - protein, 329 aa, Streptomyces avermitilis
MISPVSSIPRSAHRSRPEATPYLDLTRAEWSALREKTPLPLNAEEVEKLRGLGDVIDLDEVRDIYLPLSRLLNLYVGATDGLRGALNTFLGEQGSQSGTPFVIGVAGSVAVGKSTVARLLQALLSRWPEHPRVELVTTDGFLLPTKELEARGLMSRKGFPESYDRRALTRFVADIKAGKDEVTAPVYSHLIYDIVPGQKLTVRRPDILIVEGLNVLQPALPGKDGRTRVGLADYFDFSVYVDARPEDIERWYLNRFRKLRATAFQNPSSYFRRYTQVSEDEALDYARTTWRTINKVNLLENVAPTRGRAALVVRKGPDHKVQRLSLRKL

SEQ ID NO: 5970 - DNA, 990 bp, Streptomyces coelicolor
  CDS (1)..(990): transl_table=11
gtgatctctccggtcccctcgattccccggagcgcccaccggcagcggccggaggcgactccctacgtcgacctcacccgtcccgagtggagcgcgctgcgcgacaagacgccgctgccgctgaccgccgaggaggtcgagaagctgcgcggcctcggcgacgtcatcgacctcgacgaggtgcgggacatctacctcccgctctcccggctcctcaacctctacgtcggcgccaccgacggcctgcgcggcgcactgaacaccttcctcggcgaacagggctcccagtccggcacccccttcgtcataggggtcgccggctcggtcgcggtcggcaagtccaccgtcgcccgcctgctccaggcgctgctgtcccgctggcccgagcacccgcgcgtggagctggtcaccaccgacggcttcctgctgccgacacgggagctggaggcgcgcggcctgatgtcgcggaaaggtttccccgagtcgtacgaccgccgggcgctcacccggttcgtcgccgacatcaaggcgggcaaggcggaggtgaccgcccccgtctactcccacctcatctacgacatcgtcccggaccagcggctcgtcgtccgccgccccgacatcctgatcgtcgagggcctcaacgtgctccagcccgcgctccccggcaaggacggccgcaccagggtcggactcgccgactacttcgacttcagcgtgtacgtcgacgcgcgcaccgaggacatcgagcgctggtacctcaaccgcttccgcaagctgcgcgcgaccgccttccagaacccctcctcgtacttccgcaagtacacgcaggtgtccgaggaggaggccctcgactacgcccgcaccacctggcgcaccatcaacaagcccaacctggtggagaacgtggcccccacccggggccgggccaccctggtgctgcgcaagggccccgaccacaaggtccagcgcctgagcctgcgcaagctctga

SEQ ID NO: 5971 - protein, 329 aa, Streptomyces coelicolor
MISPVPSIPRSAHRQRPEATPYVDLTRPEWSALRDKTPLPLTAEEVEKLRGLGDVIDLDEVRDIYLPLSRLLNLYVGATDGLRGALNTFLGEQGSQSGTPFVIGVAGSVAVGKSTVARLLQALLSRWPEHPRVELVTTDGFLLPTRELEARGLMSRKGFPESYDRRALTRFVADIKAGKAEVTAPVYSHLIYDIVPDQRLVVRRPDILIVEGLNVLQPALPGKDGRTRVGLADYFDFSVYVDARTEDIERWYLNRFRKLRATAFQNPSSYFRKYTQVSEEEALDYARTTWRTINKPNLVENVAPTRGRATLVLRKGPDHKVQRLSLRKL

SEQ ID NO: 5972 - DNA, 921 bp, Streptococcus mutans
  CDS (1)..(921): transl_table=11
atggcaaacgagtttattaattttgaaaaaatttcccgtaaaacttggcagcacttgcatcaagaatcacaaccacctttaaatgaaaatgaattaaattccattaaaagtctcaacgatagaataagcattaaagatgtgactgacatttatttaccgcttattagcttgattcaaatttataaaaaatctcaagaaaatctttctttttctaaaagtattttcttacaaaaaaatatcagcaaccgccctttcatcatcggagtatctggttccgttgctgtaggaaaatcaacaaccagtcggcttttacaattactgttagccagaacttttaaggactctagtgttgaattgatgacaacagatggttttttatatcctaatgctgttttatcttcaaggcatatgttgaataaaaaaggtttccctgaaagttatgatatggaacgtctattagactttttagatactattaaaaatggccagtctgctgaaattcctgtttattcacacgaaatttacgatattgtaccgaacaaaagtcaaataattgaagtacctgactttcttatcatagaaggaattaatgtttttcaaaaccctcagaataatcgtctttatatgagtgatttttttgatttctctatttacatcgatgctgacagtgactatattgagaattggtatctagagcgctttgcaaccctgcttgatttagctaaaaatgataagcaaaattactacaatcgtttcttaaaattaggggaaaaaggtgctcttgactttgccagagacatttggaaagatattaatttagttaatctagaaaaatatattgaaccgacacgaagccgtgctgagcttattcttcataagactaaaaatcataaaatagatgaaatttaccttaaaaagtga

SEQ ID NO: 5973 - protein, 306 aa, Streptococcus mutans
MANEFINFEKISRKTWQHLHQESQPPLNENELNSIKSLNDRISIKDVTDIYLPLISLIQIYKKSQENLSFSKSIFLQKNISNRPFIIGVSGSVAVGKSTTSRLLQLLLARTFKDSSVELMTTDGFLYPNAVLSSRHMLNKKGFPESYDMERLLDFLDTIKNGQSAEIPVYSHEIYDIVPNKSQIIEVPDFLIIEGINVFQNPQNNRLYMSDFFDFSIYIDADSDYIENWYLERFATLLDLAKNDKQNYYNRFLKLGEKGALDFARDIWKDINLVNLEKYIEPTRSRAELILHKTKNHKIDEIYLKK

SEQ ID NO: 5974 - DNA, 921 bp, Streptococcus pneumoniae
  CDS (1)..(921): transl_table=11
atgaccaacgaatttttacattttgaaaaaatcagccgccagacttggcaatctttacatcgaaagacaacacctcctttgacagaagaagaattggaatctatcaagagttttaatgaccaaatcagtctccaagacgttacagatatctatctccccttggctcatttgattcagatttacaagcgaactaaggaagatttagccttttcaaaaggaattttcctccaacgtgaaagtaaatctcaaccttttattattggggtttctgggagtgttgccgttggaaaatccacaaccagtcgcctacttcaaatcctactgtcccgtacgtttacagatgctacggttgagttggttacaactgatggttttctctatcccaatcaaaccttgattgagcaggggattttaaatcgtaaaggatttcctgaaagctatgatatggaagctcttctcaacttcttggaccgcatcaaaaatggacaagatgtagatattcctgtctattctcatgaagtttacgacatcgtacccgaagagaaacaaagtgtcaaagctgctgattttgtaattgttgagggaatcaatgtctttcaaaatccacaaaacgatcgtctctatatcactgacttctttgacttttccatctatgtagatgctggagtggatgatattgaaagttggtatctggaccgtttcttgaaaatgctgagtctagcccaaaacgaccctgatagctactattatcgttttactcagatgccgattggggaagtggagtcctttgcccatcaggtctggatcagtatcaatctcacaaatctgcaaaattatattgaaccaaccagaaatcgtgcagaagtgattcttcataaaagcaagaaccatgaaatcgatgaaatttacttaaaaaagtaa

SEQ ID NO: 5975 - protein, 306 aa, Streptococcus pneumoniae
MTNEFLHFEKISRQTWQSLHRKTTPPLTEEELESIKSFNDQISLQDVTDIYLPLAHLIQIYKRTKEDLAFSKGIFLQRESKSQPFIIGVSGSVAVGKSTTSRLLQILLSRTFTDATVELVTTDGFLYPNQTLIEQGILNRKGFPESYDMEALLNFLDRIKNGQDVDIPVYSHEVYDIVPEEKQSVKAADFVIVEGINVFQNPQNDRLYITDFFDFSIYVDAGVDDIESWYLDRFLKMLSLAQNDPDSYYYRFTQMPIGEVESFAHQVWISINLTNLQNYIEPTRNRAEVILHKSKNHEIDEIYLKK

SEQ ID NO: 5976 - DNA, 924 bp, Vibrio vulnificus
  CDS (1)..(924): transl_table=11
atgagcccatttttgtcatttagtcgcgcgacttggtctgaattacgtaattcagtgccaatgacgttgtctgaagaagacttaaaagcattgcaagggatcaatgaaaatctcaccatgcaagaagccgtggaagtgtatctccctctttcccgattattgaatctttatgtgcaggcaaggcagagccgcaattcggtgctccatcagtttttgaataatgatgaacacgctcctcctttcgtcatcggtatcgcaggcagtgtggctgtaggtaagagcaccaccgctcgggtcttatgtgctctactctctcgctgggaaaatcatccaaaagtcgaactggtcaccactgatggttttctctatccaaagaaagagctggatcaacgcggtatcatgcataagaaaggctttccagaatcttatgatatgaagaagctggtgcaatttgtctctgatgtcaaagcaggtaaaccggagcttgaggttcctgtttactcgcatattacttacgacattacggaggaagtaaagaaagtagatcgccccgatgttttgatcatcgaaggattgaatgtgctgcaaagtggcatggactatccacacgatcctcatcgtgtttttgtttctgatttcctcgatttctcaatttacgttgatgctgaaagcaatacgatagaacaatggtatgtggagcgctttctcaagttccgtaaaggcgcgtttactcaacctggctcgtactttagtcactatactcaacttagcgagcagcaagccatcgagaaagcgcaacagatttggcgagacattaacggcattaatttaacggaaaacattttgccaaccaaagagcgagctcagctgattctgcgcaagggcccaaatcacttggttgaagagattctgctacgtaaatag

SEQ ID NO: 5977 - protein, 307 aa, Vibrio vulnificus
MSPFLSFSRATWSELRNSVPMTLSEEDLKALQGINENLTMQEAVEVYLPLSRLLNLYVQARQSRNSVLHQFLNNDEHAPPFVIGIAGSVAVGKSTTARVLCALLSRWENHPKVELVTTDGFLYPKKELDQRGIMHKKGFPESYDMKKLVQFVSDVKAGKPELEVPVYSHITYDITEEVKKVDRPDVLIIEGLNVLQSGMDYPHDPHRVFVSDFLDFSIYVDAESNTIEQWYVERFLKFRKGAFTQPGSYFSHYTQLSEQQAIEKAQQIWRDINGINLTENILPTKERAQLILRKGPNHLVEEILLRK

SEQ ID NO: 5978 - DNA, 924 bp, Vibrio vulnificus
  CDS (1)..(924): transl_table=11
atgagcccatttttgtcatttagtcgcgcgacttggtctgaattacgtaattcagtgccaatgacgttgtctgaagaagacttaaaagcattgcaagggatcaatgaaaatctcaccatgcaagaagccgtggaagtgtatctccctctttcccgattattgaatctttatgtgcaggcgaggcagagccgcaattcggtgctccatcagtttttgaataatgatgaacatgctcctcctttcgtcatcggtatcgcaggtagtgtggctgtaggtaagagcaccaccgctcgggtcttatgtgctctactctctcgctgggaaaatcatcccaaagtcgaactggtcaccactgatggttttctctatccaaagaaaatgctgaatcaacgcggtatcatgcataagaaaggctttccagaatcttatgatatgaagaagctggtgcagtttgtctctgatgtcaaagcaggtaaaccggagcttgaggttcctgtttactcgcatattacttacgacattacggaggaagtaaagagagtagatcgccccgatgttttgatcatcgaaggattgaatgtgctgcaaagtggcatggactatccacacgatcctcatcgtgtttttgtttctgatttcctcgatttctcaatttacgttgatgctgaaagcaatacgatagaacaatggtatgtggagcgctttctcaagttccgtaaaggcgcgtttactcaacctggctcgtactttagtcactatactcaacttagcgagcagcaagccatcgagaaagcgcaacagatttggcgagacattaatggcattaatttaacggaaaacattttgccaaccaaagagcgagctcagctgattctgcgcaagggccaaaatcacttggttgaagagattctgctacgtaaatag

SEQ ID NO: 5979 - protein, 307 aa, Vibrio vulnificus
MSPFLSFSRATWSELRNSVPMTLSEEDLKALQGINENLTMQEAVEVYLPLSRLLNLYVQARQSRNSVLHQFLNNDEHAPPFVIGIAGSVAVGKSTTARVLCALLSRWENHPKVELVTTDGFLYPKKMLNQRGIMHKKGFPESYDMKKLVQFVSDVKAGKPELEVPVYSHITYDITEEVKRVDRPDVLIIEGLNVLQSGMDYPHDPHRVFVSDFLDFSIYVDAESNTIEQWYVERFLKFRKGAFTQPGSYFSHYTQLSEQQAIEKAQQIWRDINGINLTENILPTKERAQLILRKGQNHLVEEILLRK

SEQ ID NO: 5980 - DNA, 951 bp, Yersinia pestis
  CDS (1)..(951): transl_table=11
atgacaaaaagagaacaatctttagcgacgccttatctacagttcgatcgtacccaatgggcggcattacgcgactcagtgccattgacactgacagaagaagaaatcgttaaactcaaagggattaacgaagacctttcattagatgaagtggcacaaatttaccttccactttcacgcctacttaatttttatattagctctaatttgcgtcgtcaggctgttcttgagcaattccttgggactgatggccaacgtattccttatgtcatcggcattgctggcagcgtagctgtcggtaaaagtactaccgcccgtttattgcaagctttgcttagccgttggccggaacatcgtagcgtagaactcattacaaccgatggtttccttcatcctaataaggtgctcaacgaacgtgggctaatgaagaaaaaaggattcccggaatcctatgatatgcataatctagtgaaatttgtctctgaggttaaatcaggagcggattatgttactgcacccgtttattctcatttaatatatgatgttgtccctgacggtaataaggtaatcaagcaacccgacatcctaatattagaaggcttaaatgtgctacagagtgggatggactacccacatgatccccatcacgtatttgtatcagactttgtagatttctctatatatgtggatgcacctgaggatttacttcagagttggtatattaatagatttcttaaatttcgtcagggtgcattctcaaatccagactcttactttcataattatgcaaaactaccagagacagaggctattaagatcgccactcaattatggaatgagatcaatggattgaatttaaagcaaaatattttaccaactcgtgaaagagcaagtttaataatgacgaaaagtgccaatcatgcagtagaaagtgtacgcttaagaaaataa

SEQ ID NO: 5981 - protein, 316 aa, Yersinia pestis
MTKREQSLATPYLQFDRTQWAALRDSVPLTLTEEEIVKLKGINEDLSLDEVAQIYLPLSRLLNFYISSNLRRQAVLEQFLGTDGQRIPYVIGIAGSVAVGKSTTARLLQALLSRWPEHRSVELITTDGFLHPNKVLNERGLMKKKGFPESYDMHNLVKFVSEVKSGADYVTAPVYSHLIYDVVPDGNKVIKQPDILILEGLNVLQSGMDYPHDPHHVFVSDFVDFSIYVDAPEDLLQSWYINRFLKFRQGAFSNPDSYFHNYAKLPETEAIKIATQLWNEINGLNLKQNILPTRERASLIMTKSANHAVESVRLRK

SEQ ID NO: 5982 - DNA, 27 bp, Artificial sequence
  primer
atgagtataaaagagcaaacgttaatg

SEQ ID NO: 5983 - DNA, 24 bp, Artificial sequence
  primer
ttatttgcgtagtctgacctcttc

SEQ ID NO: 5984 - protein, 311 aa, Artificial sequence
  consensus sequence
  Variant (2)..(3): Xaa in position 2 to 3 is any amino acid
  Variant (5)..(6): Xaa in position 5 to 6 is any amino acid
  Variant (8)..(14): Xaa in position 8 to 14 is any amino acid
  Variant (15)..(16): Xaa in position 15 to 16 is any or no amino acid
  Variant (18)..(33): Xaa in position 18 to 33 is any amino acid
  Variant (35)..(36): Xaa in position 35 to 36 is any amino acid
  Variant (38)..(40): Xaa in position 38 to 40 is any amino acid
  Variant (45)..(46): Xaa in position 45 to 46 is any amino acid
  Variant (48)..(63): Xaa in position 48 to 63 is any amino acid
  Variant (64)..(64): Xaa in position 64 is any or no amino acid
  Variant (67)..(70): Xaa in position 67 to 70 is any amino acid
  Variant (71)..(79): Xaa in position 71 to 79 is any or no amino acid
  Variant (81)..(82): Xaa in position 81 to 82 is any amino acid
  Variant (84)..(85): Xaa in position 84 to 85 is any amino acid
  Variant (99)..(99): Xaa in position 99 is any amino acid
  Variant (101)..(102): Xaa in position 101 to 102 is any amino acid
  Variant (105)..(112): Xaa in position 105 to 112 is any amino acid
  Variant (113)..(113): Xaa in position 113 is any or no amino acid
  Variant (115)..(115): Xaa in position 115 is any amino acid
  Variant (117)..(117): Xaa in position 117 is any amino acid
  Variant (124)..(124): Xaa in position 124 is any amino acid
  Variant (126)..(128): Xaa in position 126 to 128 is any amino acid
  Variant (130)..(137): Xaa in position 130 to 137 is any amino acid
  Variant (146)..(148): Xaa in position 146 to 148 is any amino acid
  Variant (150)..(151): Xaa in position 150 to 151 is any amino acid
  Variant (153)..(156): Xaa in position 153 to 156 is any amino acid
  Variant (158)..(158): Xaa in position 158 is any amino acid
  Variant (160)..(164): Xaa in position 160 to 164 is any amino acid
  Variant (165)..(165): Xaa in position 165 is any or no amino acid
  Variant (167)..(167): Xaa in position 167 is any amino acid
  Variant (171)..(172): Xaa in position 171 to 172 is any amino acid
  Variant (175)..(184): Xaa in position 175 to 184 is any amino acid
  Variant (185)..(185): Xaa in position 185 is any or no amino acid
  Variant (188)..(189): Xaa in position 188 to 189 is any amino acid
  Variant (191)..(191): Xaa in position 191 is any amino acid
  Variant (194)..(194): Xaa in position 194 is any amino acid
  Variant (199)..(205): Xaa in position 199 to 205 is any amino acid
  Variant (206)..(213): Xaa in position 206 to 213 is any or no amino acid
  Variant (217)..(217): Xaa in position 217 is any amino acid
  Variant (221)..(221): Xaa in position 221 is any amino acid
  Variant (226)..(232): Xaa in position 226 to 232 is any amino acid
  Variant (235)..(236): Xaa in position 235 to 236 is any amino acid
  Variant (239)..(244): Xaa in position 239 to 244 is any amino acid
  Variant (247)..(248): Xaa in position 247 to 248 is any amino acid
  Variant (250)..(250): Xaa in position 250 is any amino acid
  Variant (252)..(252): Xaa in position 252 is any amino acid
  Variant (254)..(263): Xaa in position 254 to 263 is any amino acid
  Variant (264)..(264): Xaa in position 264 is any or no amino acid
  Variant (266)..(268): Xaa in position 266 to 268 is any amino acid
  Variant (270)..(272): Xaa in position 270 to 272 is any amino acid
  Variant (274)..(275): Xaa in position 274 to 275 is any amino acid
  Variant (278)..(279): Xaa in position 278 to 279 is any amino acid
  Variant (282)..(284): Xaa in position 282 to 284 is any amino acid
  Variant (286)..(286): Xaa in position 286 is any amino acid
  Variant (290)..(290): Xaa in position 290 is any amino acid
  Variant (293)..(293): Xaa in position 293 is any amino acid
  Variant (295)..(295): Xaa in position 295 is any amino acid
  Variant (297)..(297): Xaa in position 297 is any amino acid
  Variant (299)..(301): Xaa in position 299 to 301 is any amino acid
  Variant (303)..(308): Xaa in position 303 to 308 is any amino acid
RXXWXXLXXXXXXXXXLXXXXXXXXXXXXXXXXLXXVXXXYLPLXXLXXXXXXXXXXXXXXXXXFLXXXXXXXXXXXXXPXXIXXAGSVAVGKSTTARXLXXLLXXXXXXXXXVXLXTTDGFLXPXXXLXXXXXXXXKGFPESYDXXXLXXFXXXXKXGXXXXXXPXYSHXXYDXXXXXXXXXXXPDXXIXEGXNVLQXXXXXXXXXXXXXXXSDFXDFSXYVDAXXXXXXXWYXXRFXXXXXXAFXXPXSXFXXXXXXXXXXXAXXXAXXXWXXINXXNLXXXIXPTRXRAXLXLXKXXXHXXXXXXLRK

SEQ ID NO: 5985 - protein, 30 aa, Artificial sequence
  protein pattern
  Variant (2)..(2): Xaa in position 2 is any amino acid
  Variant (9)..(9): Xaa in position 9 is any amino acid
  Variant (11)..(13): Xaa in position 11 to 13 is any amino acid
  Variant (15)..(17): Xaa in position 15 to 17 is any amino acid
  Variant (18)..(18): Xaa in position 18 is Asp, Gly, Asn or Gln
  Variant (19)..(19): Xaa in position 19 is Ile, Leu or Met
  Variant (20)..(20): Xaa in position 20 is Leu or Met
  Variant (21)..(21): Xaa in position 21 is any amino acid
  Variant (22)..(22): Xaa in position 22 is Lys or Arg
  Variant (27)..(27): Xaa in position 27 is any amino acid
LXTTDGFLXPXXXLXXXXXXXXKGFPXSYD

SEQ ID NO: 5986 - protein, 59 aa, Artificial sequence
  protein pattern
  Variant (2)..(2): Xaa in position 2 is any or no amino acid
  Variant (4)..(4): Xaa in position 4 is any or no amino acid
  Variant (8)..(8): Xaa in position 8 is Ile or Val
  Variant (10)..(10): Xaa in position 10 is Ile, Met or Val
  Variant (13)..(16): Xaa in position 13 to 16 is any amino acid
  Variant (17)..(17): Xaa in position 17 is Ile or Leu
  Variant (18)..(19): Xaa in position 18 to 19 is any amino acid
  Variant (22)..(23): Xaa in position 22 to 23 is any amino acid
  Variant (26)..(27): Xaa in position 26 to 27 is any amino acid
  Variant (28)..(28): Xaa in position 28 is Phe, Leu or Met
  Variant (29)..(31): Xaa in position 29 to 31 is any amino acid
  Variant (33)..(37): Xaa in position 33 to 37 is any amino acid
  Variant (38)..(38): Xaa in position 38 is Ala, Asn or Ser
  Variant (39)..(39): Xaa in position 39 is Phe, His or Tyr
  Variant (40)..(40): Xaa in position 40 is Phe or Tyr
  Variant (41)..(42): Xaa in position 41 to 42 is any amino acid
  Variant (43)..(43): Xaa in position 43 is Phe or Tyr
  Variant (44)..(45): Xaa in position 44 to 45 is any amino acid
  Variant (46)..(46): Xaa in position 46 is Ile, Leu, Met or Val
  Variant (47)..(50): Xaa in position 47 to 50 is any amino acid
  Variant (51)..(51): Xaa in position 51 is Ala, Ser or Val
  Variant (52)..(54): Xaa in position 52 to 54 is any amino acid
  Variant (56)..(58): Xaa in position 56 to 58 is any amino acid
DXFXDFSXYXDAXXXXXXXWYXXRFXXXXXXAXXXXXXXXXXXXXXXXXXXXXXAXXXW

SEQ ID NO: 5987 - protein, 25 aa, Artificial sequence
  protein pattern
  Variant (2)..(2): Xaa in position 2 is Phe or Tyr
  Variant (3)..(3): Xaa in position 3 is Ile or Val
  Variant (5)..(7): Xaa in position 5 to 7 is any or no amino acid
  Variant (9)..(9): Xaa in position 9 is any or no amino acid
  Variant (17)..(17): Xaa in position 17 is Ser, Thr or Val
  Variant (18)..(18): Xaa in position 18 is Ala or Ser
  Variant (20)..(20): Xaa in position 20 is Ile, Leu or Val
  Variant (21)..(21): Xaa in position 21 is Ile or Leu
  Variant (22)..(23): Xaa in position 22 to 23 is any amino acid
  Variant (24)..(24): Xaa in position 24 is Ile, Leu, Met or Val
PXXIXXXGXVAVGKSTXXRXXXXXL

SEQ ID NO: 5988 - protein, 27 aa, Artificial sequence
  protein pattern
  Variant (2)..(3): Xaa in position 2 to 3 is any amino acid
  Variant (6)..(6): Xaa in position 6 is any amino acid
  Variant (7)..(7): Xaa in position 7 is any or no amino acid
  Variant (9)..(10): Xaa in position 9 to 10 is any amino acid
  Variant (11)..(11): Xaa in position 11 is any or no amino acid
  Variant (13)..(13): Xaa in position 13 is Ser or Thr
  Variant (14)..(14): Xaa in position 14 is Lys or Arg
  Variant (15)..(15): Xaa in position 15 is any amino acid
  Variant (17)..(17): Xaa in position 17 is Ala or Ser
  Variant (18)..(18): Xaa in position 18 is any amino acid
  Variant (19)..(19): Xaa in position 19 is Leu or Val
  Variant (20)..(20): Xaa in position 20 is Ile or Val
  Variant (21)..(21): Xaa in position 21 is Ile, Leu, Met or Val
  Variant (22)..(22): Xaa in position 22 is any amino acid
  Variant (24)..(24): Xaa in position 24 is Asp, Gly, Ser or Thr
  Variant (25)..(26): Xaa in position 25 to 26 is any amino acid
NXXNLXXNXXXPXXXRXXXXXXKXXXH

SEQ ID NO: 5989 - protein, 13 aa, Artificial sequence
  protein pattern
  Variant (2)..(2): Xaa in position 2 is Asp or Glu
  Variant (3)..(3): Xaa in position 3 is Ile or Val
  Variant (4)..(4): Xaa in position 4 is Ile, Leu or Val
  Variant (6)..(6): Xaa in position 6 is Phe, Ile, Leu or Val
  Variant (9)..(9): Xaa in position 9 is Ile, Leu or Val
PXXXIXEGXNVLQ

SEQ ID NO: 5990 - protein, 9 aa, Artificial sequence
  protein pattern
  Variant (2)..(2): Xaa in position 2 is Ile, Leu or Val
  Variant (6)..(7): Xaa in position 6 to 7 is any amino acid
PXYSHXXYD

SEQ ID NO: 5991 - protein, 11 aa, Artificial sequence
  protein pattern
  Variant (2)..(2): Xaa in position 2 is Ile, Leu, Met or Val
  Variant (3)..(3): Xaa in position 3 is any amino acid
  Variant (5)..(5): Xaa in position 5 is Ile, Leu or Val
  Variant (6)..(6): Xaa in position 6 is Ala, Asp, Asn, Ser, Thr or Val
  Variant (7)..(7): Xaa in position 7 is any amino acid
  Variant (8)..(8): Xaa in position 8 is Ile, Leu or Val
  Variant (10)..(10): Xaa in position 10 is Ala, Asn or Ser
LXXFXXXXKXG

SEQ ID NO: 5992 - DNA, 540 bp, Escherichia coli K12
  CDS (1)..(540): transl_table=11
atgaaacaggaagtggaaaagtggcgaccttttggacatccggatggtgatattcgtgatttatcatttcttgatgctcatcaggctgtctacgttcagcatcatgagggcaaagagcctttagagtatcgcttttgggttacctactctcttcactgcttcacaaaagattatgaacatcagacgaacgaagaaaaacaatcgttaatgtaccacgcgcctaaagaatctcgtcccttctgccagcaccgttataacttagcgcgcacacacttaaaaagaactattttggcgctgccagaaagcaacgttattcatgccgggtatggtagctatgccgtgattgaggtggacttagacggaggagataaggcattttactttgttgcgttcagggctttcagggaaaagaaaaaactccgtttgcatgtaactagcgcttatcccatttctgaaaaacagaaaggtaaatcagtgaaatttttcaccattgcctacaacttattgagaaataagcagcttcctcagccctcaaaataa

SEQ ID NO: 5993 - protein, 179 aa, Escherichia coli K12
MKQEVEKWRPFGHPDGDIRDLSFLDAHQAVYVQHHEGKEPLEYRFWVTYSLHCFTKDYEHQTNEEKQSLMYHAPKESRPFCQHRYNLARTHLKRTILALPESNVIHAGYGSYAVIEVDLDGGDKAFYFVAFRAFREKKKLRLHVTSAYPISEKQKGKSVKFFTIAYNLLRNKQLPQPSK

SEQ ID NO: 5994 - DNA, 444 bp, Escherichia coli O157:H7 EDL933
  CDS (1)..(444): transl_table=11
atgaaacaggaagtggagaagtggcgaccttttaaacatccggatggcgacgttcgtgatttatcgtttcttgatgctcatcaggttatctacgttcagcatcatgaggacaaggagcctttagagtatcgcttttgggttacctactctcttcactgcttcacaaaagattatgaacatcagacgaacgaagaaaaactatcgttaatgtaccacgcgcctaaagaatctcgtcccttctgccagcaccgttataacttagcgcgcacacacttaaaaagaactattttggcgctgccagaaagcaacgttattcatgccgggtatggtagctatgccgtgattgaggtggacttagacggaggagataaggcattttactttgttgtgttcagggctttcagtgaaatttttcaccattgcctaaaacttattgagaaataa

SEQ ID NO: 5995 - protein, 147 aa, Escherichia coli O157:H7 EDL933
MKQEVEKWRPFKHPDGDVRDLSFLDAHQVIYVQHHEDKEPLEYRFWVTYSLHCFTKDYEHQTNEEKLSLMYHAPKESRPFCQHRYNLARTHLKRTILALPESNVIHAGYGSYAVIEVDLDGGDKAFYFVVFRAFSEIFHHCLKLIEK

SEQ ID NO: 5996 - DNA, 24 bp, Artificial sequence
  primer
atgaaacaggaagtggaaaagtgg

SEQ ID NO: 5997 - DNA, 22 bp, Artificial sequence
  primer
ttattttgagggctgaggaagc

SEQ ID NO: 5998 - protein, 168 aa, Artificial sequence
  consensus sequence
  Variant (12)..(12): Xaa in position 12 is any amino acid
  Variant (18)..(18): Xaa in position 18 is any amino acid
  Variant (29)..(30): Xaa in position 29 to 30 is any amino acid
  Variant (37)..(37): Xaa in position 37 is any amino acid
  Variant (67)..(67): Xaa in position 67 is any amino acid
  Variant (130)..(130): Xaa in position 130 is any amino acid
  Variant (135)..(135): Xaa in position 135 is any amino acid
  Variant (137)..(137): Xaa in position 137 is any amino acid
  Variant (138)..(161): Xaa in position 138 to 161 is any or no amino acid
  Variant (163)..(167): Xaa in position 163 to 167 is any amino acid
MKQEVEKWRPFXHPDGDXRDLSFLDAHQXXYVQHHEXKEPLEYRFWVTYSLHCFTKDYEHQTNEEKXSLMYHAPKESRPFCQHRYNLARTHLKRTILALPESNVIHAGYGSYAVIEVDLDGGDKAFYFVXFRAFXEXXXXXXXXXXXXXXXXXXXXXXXXXFXXXXXL

SEQ ID NO: 5999 - DNA, 2097 bp, Escherichia coli K12
  CDS (1)..(2097): transl_table=11
atgaaaaaaagacatctgcttagcttactggcgctgggcattagcacagcttgctacggcgaaacatatcctgcgcccattggtccgtcgcagtcggatttcggtggcgtaggattattacaaacgcccaccgcgcgtatggcacgggaaggggagttgagtctgaactatcgcgataacgatcagtaccgttattactcagcttcagtgcaactcttcccgtggctggaaacaacgctgcgctacaccgacgtgcgcacccggcagtacagcagcgtcgaagcgttctctggcgatcaaacgtataaagataaagccttcgatctcaaactgcgtttgtgggaagagagttactggctgccgcaagtggcggttggtgcgcgggatatcggcggtacggggctgtttgatgcggaatatcttgttgccagcaaagcctgggggccgttcgattttacgctcggcctgggctgggggtatttgggcaccagcggtaatgtgaaaaatccgctctgttcagccagtgataaatattgctatcgcgataacagctacaaacaggcgggatctatcgacggtagccagatgttccacggtcctgcctcactgtttggcggcgtggaataccagacgccctggcaaccgctgcgcctgaaactggagtatgaaggcaataattatcagcaggattttgccgggaagctggagcaaaaaagtaagtttaacgtcggtgcgatttatcgcgttaccgattgggccgacgttaaccttagctatgaacgtggcaacacctttatgtttggcgttacgttgcgcaccaactttaacgatctgcgcccgtcttacaacgataacgcccgcccgcaatatcaaccgcagccgcaggatgccattttgcagcattcggtggtggcgaatcagttaacgctgttgaaatacaatgccggacttgccgatccacagatccaggcgaaaggcgatacgctgtatgttaccggcgagcaggtgaaatatcgtgattcgcgcgaagggatcatccgtgcgaatcggatcgtgatgaacgatctgccggatgggatcaaaacgatccgcattacggaaaatcgccttaacatgccgcaggtgacgacggaaaccgatgtcgccagcctgaaaaatcatctcgccggagagccgttgggccacgaaacgacgctggcgcaaaaacgcgtcgagccagtggttccgcagtccaccgagcagggctggtatatcgacaaatcacgctttgatttccatatcgatccggtgctgaaccagtcggtcggtggcccggaaaacttttacatgtatcagctgggcgtgatgggaacggcagatttgtggctgacggaccatctgctgaccaccggcagcctgtttgcaaatcttgccaacaactacgacaagtttaactacactaatcctccgcaggactcgcacttaccgcgcgtgcgtacccatgtgcgcgagtatgtgcagaacgatgtctatgtgaataacctgcaagccaactacttccagcatctgggcaacggcttctacggtcaggtctacggtggttatctcgaaaccatgtttggcggtgcgggggcagaagtgttgtatcgcccgctggacagcaactgggcgtttggtctggatgccaactacgttaaacagcgcgactggcgtagtgcaaaagatatgatgaaattcaccgactacagcgtgaaaaccggacatctgaccgcctactggacgccatctttcgctcaggatgtgttagttaaagccagcgtcgggcagtatctggcaggggataaaggcggcacgctggagatcgccaaacgctttgatagcggcgtggtggtgggtggctatgccacgatcactaatgtttcgaaagaggagtacggcgaaggggacttcaccaaaggcgtgtatgtctcggtaccgttggatctcttctcgtctggcccgacacgcagccgtgcggcgattggctggacgccgctgacgcgtgacggtggtcagcaacttgggcgtaagttccagttgtatgacatgaccagcgaccgtagcgtcaatttccgctaa

SEQ ID NO: 6000 - protein, 698 aa, Escherichia coli K12
MKKRHLLSLLALGISTACYGETYPAPIGPSQSDFGGVGLLQTPTARMAREGELSLNYRDNDQYRYYSASVQLFPWLETTLRYTDVRTRQYSSVEAFSGDQTYKDKAFDLKLRLWEESYWLPQVAVGARDIGGTGLFDAEYLVASKAWGPFDFTLGLGWGYLGTSGNVKNPLCSASDKYCYRDNSYKQAGSIDGSQMFHGPASLFGGVEYQTPWQPLRLKLEYEGNNYQQDFAGKLEQKSKFNVGAIYRVTDWADVNLSYERGNTFMFGVTLRTNFNDLRPSYNDNARPQYQPQPQDAILQHSVVANQLTLLKYNAGLADPQIQAKGDTLYVTGEQVKYRDSREGIIRANRIVMNDLPDGIKTIRITENRLNMPQVTTETDVASLKNHLAGEPLGHETTLAQKRVEPVVPQSTEQGWYIDKSRFDFHIDPVLNQSVGGPENFYMYQLGVMGTADLWLTDHLLTTGSLFANLANNYDKFNYTNPPQDSHLPRVRTHVREYVQNDVYVNNLQANYFQHLGNGFYGQVYGGYLETMFGGAGAEVLYRPLDSNWAFGLDANYVKQRDWRSAKDMMKFTDYSVKTGHLTAYWTPSFAQDVLVKASVGQYLAGDKGGTLEIAKRFDSGVVVGGYATITNVSKEEYGEGDFTKGVYVSVPLDLFSSGPTRSRAAIGWTPLTRDGGQQLGRKFQLYDMTSDRSVNFR

SEQ ID NO: 6001 - DNA, 2097 bp, Escherichia coli
  CDS (1)..(2097)
atgaagaagaattcttatcttttaagctgcctggccattgccgtctccagtgcctgtcatgctgaagtattaacctacccggatccgctgggttcgtcgcaatcggactttggcggcacaggattgttgcagatgccaaatgcgcgcatcgcaccggaaggtgaattcagcgtcaactaccgggataacgatcaataccgtttctactccacctccgtggcgctgttcccatggctggaaggcaccattcgttatacggatgtgcgcacacgtaaatatagccagtgggaagatttcagcggcgatcagtcatacaaagacaaatcattcgattttaaacttcgcctgtgggaagaaggttactggctaccgcaagtggcgtttggtaaacgtgatattgctggtacgggtctgtttgacggtgagtatctggtggccagcaagcaagcggggccatttgatttcaccctcgggatggcatggggctacgccggtaatgcgggcaatattaccaacccgttttgccgggtgagcgataaatattgtcatcgcgcagagtctcacgatgcgggcgatatcagctttagcgatatctttcgtggcccggcttccatctttggcggcattgagtatcaaacgccgtggaatcccctgcgtctgaaactcgaatacgacggcaacaattaccagaatgatttcgctggcaaactgcctcaggcaagccatttcaacgtcggtgcagtttatcgcgctgccagctgggcagacctcaacctgagttatgaacgcggtaacacgttgatgtttggtttcactttacggaccaatttcaacgatctgcgccctgccctgcgcgatacgccaaaaccggcatatcaacctgcgcctgaatctgaaggattgcagtacaccacggtagcaaaccaacttaccgccctgaagtataacgcgggctttgacgcgccagaaattcagctacgcgataagacgctgtatatgtctggtcagcaatacaaataccgtgactctcgtgaagcggtcgatcgtgccaaccggattctggtgaataacctgccgcaaggcgttgagaagattagcgtgacgcaaaagcgcgagcatatggcgatggtgactaccgaaaccgacgtagccagcctgcgcaaacagctggcaggtacagcgcctggtcaatcagagccactgcaacaacaacgtgttgaagctgaagatctttctgcctttggtcggggctaccgtattcgtgaagatcgctttagctactctttcaacccaacactttcacagtcgctgggcggcccggaagatttctatatgttccagctggggctgatgtccagcgcccgctactggtttaccgaccacctgctgcttgatggcggtattttcaccaatatttacaacaactacgacaagtttaagtcttcgctgttgcccgcggactctaccctgccccgcgtgcgcacgcatatccgtgattacgttcgcaatgacgtttatctcaacaacttgcaagcgaattactttgccgacttaggcaatggtttctatggccaggtgtatggcggttatctggaaacgatgtatgccggtgtcggttccgagctgctttatcgcccgctagatgccagctgggcgctgggtgtggacgttaactacgtgaagcagcgtgactgggacaacatgatgcgcttcaccgattattccacgccaactggtttcgtgacggcttactggaacccgccgacgctcaatggcgtactgatgaaacttagcgttgggcaatatctggcaaaagataaaggggcaacgatcgacgtcgccaaacgctttgacagcggcgtggcggtaggggtatgggcggcaatcagtaacgtatctaaagatgactacggcgaaggcggctttagtaaaggtttttatatctcgattccgttcgacttgatgaccattggacctaaccgcaaccgcgcggtggtttcgtggacaccattgacgcgtgatggtggacaaatgctgtcacgcaaataccagctctatccaatgacggcagagcgagaagtaccggttggacaataa

SEQ ID NO: 6002 - protein, 698 aa, Escherichia coli
MKKNSYLLSCLAIAVSSACHAEVLTYPDPLGSSQSDFGGTGLLQMPNARIAPEGEFSVNYRDNDQYRFYSTSVALFPWLEGTIRYTDVRTRKYSQWEDFSGDQSYKDKSFDFKLRLWEEGYWLPQVAFGKRDIAGTGLFDGEYLVASKQAGPFDFTLGMAWGYAGNAGNITNPFCRVSDKYCHRAESHDAGDISFSDIFRGPASIFGGIEYQTPWNPLRLKLEYDGNNYQNDFAGKLPQASHFNVGAVYRAASWADLNLSYERGNTLMFGFTLRTNFNDLRPALRDTPKPAYQPAPESEGLQYTTVANQLTALKYNAGFDAPEIQLRDKTLYMSGQQYKYRDSREAVDRANRILVNNLPQGVEKISVTQKREHMAMVTTETDVASLRKQLAGTAPGQSEPLQQQRVEAEDLSAFGRGYRIREDRFSYSFNPTLSQSLGGPEDFYMFQLGLMSSARYWFTDHLLLDGGIFTNIYNNYDKFKSSLLPADSTLPRVRTHIRDYVRNDVYLNNLQANYFADLGNGFYGQVYGGYLETMYAGVGSELLYRPLDASWALGVDVNYVKQRDWDNMMRFTDYSTPTGFVTAYWNPPTLNGVLMKLSVGQYLAKDKGATIDVAKRFDSGVAVGVWAAISNVSKDDYGEGGFSKGFYISIPFDLMTIGPNRNRAVVSWTPLTRDGGQMLSRKYQLYPMTAEREVPVGQ

SEQ ID NO: 6003 - DNA, 2097 bp, Enterobacter cloacae
  CDS (1)..(2097)
ctgatgaacaaactttttttactgagcggccttgctctggcgatctcttctgcctgccacgcggagctgcgtacctggcccgatccgaccggaccgtcacagtccgattttggcggcaccggcctgatgcaaatgcccgacgcgcgctttggccgggaaggggaattcagcgtaaactaccgcgataacaaccagtaccgtttttactcctcttcggtcgtgctcttcccgtggctggaagggacaattcgctataccgacgtccgcacccgtaaatacagcagcaacgaggatttcagcggcgatcaaagctacaaggataagtcgttcgactttaaagttcgtctgtgggaagaggactatagcctgccgcaggtggcgctcggcaagcgtgatattgcaggcaccggcctgttcgatggtgaatatctggttgccagtaaaatggccggaccggtcgattttacctttggaatagcctggggatatcccggtaatagcgacaacgtgggtaacccgctttgccatgacaacaataagtattgcacccgcggcgagtcgcatgatgccggagatatcagctttagcgatatgtttcgtggtccggcgtctctgtttggcggcctccagtatcagacgccctggcagcccctgcgcctgaagcttgagtatgacggcaacaattatgccgatgattttgccggctccattaagcagtcgagccatattaacgtgggggcggtctatcgcgttgccgactgggccgatctcaacctcagctacgagcgcggcaatacgctgatgtttggcttcaccctgcggaccaactttaacgacctgcgccccgcgctgcgtgataacccgaaaccggcctggcaaccggcaccggcaggcgagacgctggactatacctctgcggcgaaccagctcaccgcgcttaagtacaacgcaggcttcgatgcgccggagatccttcagcacggcaataccttatacatgaccggcgaacagtatcgctatcgcgatccgcgcgaagcggtggatcgtgccaaccgtattctgatcaataacctgcccgacggggtcgacacgatcgctatcacccagcagcgtgatcatctgccgctcgtcacgacgcaaaccgatgtcgccagcctgcgcaaacagttggcggggcagccgctcggccaggaggaggcgctcaggcagcagcgcgtcgagcctgtggataccacagcattcgggcgtggctaccgtattcgcgccgatcgcttcagctacagcgttaaaccgacgctggcgcagtcgctgggcggtccggaagatttctatatgttccaggtgggggtgatggccagcgccagctactggctgaccgatcgtctgctgctcgacggcggcgtgttcgccaacctctataacaactacgacaagttcaaatcctcgctacttcccgctgactccagcctgccgcgcgtcagaacccatattcgcgattatgtcagcaatgacgtctacatcaacaacttacaagccaactatgtcgatgcgctggggaacggcttctatgcccagatttatggcggctacctcgaaaccatgtacggcggcgtgggagcagaggcgctctggcgcccgctggatagcgactgggcgctgggcgtggatgcgaattacgtcaagcagcgcgactgggacgacatgatgcgcttcaccgactacagcgtgccaaccggatttatcaccgcctactggaacccggcgaagctcaacagtgtgctaatgaagctgagcgtcgggcagtacctggcgaaggataaaggcgccaccctcgacgtcgcgaagcgattcgacagcggcgtgacggtaggcgtctgggcggcgctgaccaacgtctcgaaagaggattatggcgaaggtggctttagcaaaggcttctacatctcgatcccgcttgatctgatgacgatcggcccaaatcgcaaccgggcggtggtctcttggacgcctctcacgcgtgatggcggccagatgttaggccgtaaatatcagctctatgacatgacgtcagaacgcgaaaccccggtagggcagtag

SEQ ID NO: 6004 - protein, 698 aa, Enterobacter cloacae
LMNKLFLLSGLALAISSACHAELRTWPDPTGPSQSDFGGTGLMQMPDARFGREGEFSVNYRDNNQYRFYSSSVVLFPWLEGTIRYTDVRTRKYSSNEDFSGDQSYKDKSFDFKVRLWEEDYSLPQVALGKRDIAGTGLFDGEYLVASKMAGPVDFTFGIAWGYPGNSDNVGNPLCHDNNKYCTRGESHDAGDISFSDMFRGPASLFGGLQYQTPWQPLRLKLEYDGNNYADDFAGSIKQSSHINVGAVYRVADWADLNLSYERGNTLMFGFTLRTNFNDLRPALRDNPKPAWQPAPAGETLDYTSAANQLTALKYNAGFDAPEILQHGNTLYMTGEQYRYRDPREAVDRANRILINNLPDGVDTIAITQQRDHLPLVTTQTDVASLRKQLAGQPLGQEEALRQQRVEPVDTTAFGRGYRIRADRFSYSVKPTLAQSLGGPEDFYMFQVGVMASASYWLTDRLLLDGGVFANLYNNYDKFKSSLLPADSSLPRVRTHIRDYVSNDVYINNLQANYVDALGNGFYAQIYGGYLETMYGGVGAEALWRPLDSDWALGVDANYVKQRDWDDMMRFTDYSVPTGFITAYWNPAKLNSVLMKLSVGQYLAKDKGATLDVAKRFDSGVTVGVWAALTNVSKEDYGEGGFSKGFYISIPLDLMTIGPNRNRAVVSWTPLTRDGGQMLGRKYQLYDMTSERETPVGQ

SEQ ID NO: 6005 - DNA, 2097 bp, Escherichia coli O157:H7 EDL933
  CDS (1)..(2097): transl_table=11
  misc_feature (679)..(679): r is g or a
atgaagaagaattcttatcttttaagctgcctggccattgccgtctccagtgcctgtcatgctgaagtattaacctacccggatccgctgggttcgtcgcaatcggactttggcggcacaggattgttgcagatgccaaatgcgcgcatcgcaccggaaggtgaattcagcgtcaactaccgggataacgatcaataccgtttctactccacctccgtggcgctgttcccatggctggaaggcaccattcgttatacggatgtgcgcacacgtaaatatagccagtgggaagatttcagcggcgatcagtcatacaaagacaaatcattcgattttaaacttcgcctgtgggaagaaggttactggctaccgcaagtggcgtttggtaaacgtgatattgctggtacgggtctgtttgacggtgagtatctggtggccagcaagcaagcggggccatttgatttcaccctcgggatggcatggggctacgccggtaatgcgggcaatattaccaacccgttttgccgggtgagcgataaatattgtcatcgcgcagagtctcacgatgcgggcgatatcagctttagcgatatctttcgtggcccggcttccatctttggcggcattgagtatcaaacgccgtggaatcccctgcgtctgaaactcgaatacgacggcracaattaccagaatgatttcgctggcaaactgcctcaggcaagccatttcaacgtcggtgcagtttatcgcgctgccagctgggcagacctcaacctgagttatgaacgcggtaacacgttgatgtttggtttcactttacggaccaatttcaacgatctgcgccctgccctgcgcgatacgccaaaaccggcatatcaacctgcgcctgaatctgaaggattgcagtacaccacggtagcaaaccaacttaccgccctgaagtataacgcgggctttgacgcgccagaaattcagctacgcgataagacgctgtatatgtctggtcagcaatacaaataccgtgactctcgtgaagcggtcgatcgtgccaaccggattctggtgaataacctgccgcaaggcgttgagaagattagcgtgacgcaaaagcgcgagcatatggcgatggtgactaccgaaaccgacgtagccagcctgcgcaaacagctggcaggtacagcgcctggtcaatcagagccactgcaacaacaacgtgttgaagctgaagatctttctgcctttggtcggggctaccgtattcgtgaagatcgctttagctactctttcaacccaacactttcacagtcgctgggcggcccggaagatttctatatgttccagctggggctgatgtccagcgcccgctactggtttaccgaccacctgctgcttgatggcggtattttcaccaatatttacaacaactacgacaagtttaagtcttcgctgttgcccgcggactctaccctgccccgcgtgcgcacgcatatccgtgattacgttcgcaatgacgtttatctcaacaacttgcaagcgaattactttgccgacttaggcaatggtttctatggccaggtgtatggcggttatctggaaacgatgtatgccggtgtcggttccgagctgctttatcgcccgctagatgccagctgggcgctgggtgtggacgttaactacgtgaagcagcgtgactgggacaacatgatgcgcttcaccgattattccacgccaactggtttcgtgacggcttactggaacccgccgacgctcaatggcgtactgatgaaacttagcgttgggcaatatctggcaaaagataaaggggcaacgatcgacgtcgccaaacgctttgacagcggcgtggcggtaggggtatgggcggcaatcagtaacgtatctaaagatgactacggcgaaggcggctttagtaaaggtttttatatctcgattccgttcgacttgatgaccattggacctaaccgcaaccgcgcggtggtttcgtggacaccattgacgcgtgatggtggacaaatgctgtcacgcaaataccagctctatccaatgacggcagagcgagaagtaccggttggacaataa

SEQ ID NO: 6006 - protein, 698 aa, Escherichia coli O157:H7 EDL933
MKKNSYLLSCLAIAVSSACHAEVLTYPDPLGSSQSDFGGTGLLQMPNARIAPEGEFSVNYRDNDQYRFYSTSVALFPWLEGTIRYTDVRTRKYSQWEDFSGDQSYKDKSFDFKLRLWEEGYWLPQVAFGKRDIAGTGLFDGEYLVASKQAGPFDFTLGMAWGYAGNAGNITNPFCRVSDKYCHRAESHDAGDISFSDIFRGPASIFGGIEYQTPWNPLRLKLEYDGBNYQNDFAGKLPQASHFNVGAVYRAASWADLNLSYERGNTLMFGFTLRTNFNDLRPALRDTPKPAYQPAPESEGLQYTTVANQLTALKYNAGFDAPEIQLRDKTLYMSGQQYKYRDSREAVDRANRILVNNLPQGVEKISVTQKREHMAMVTTETDVASLRKQLAGTAPGQSEPLQQQRVEAEDLSAFGRGYRIREDRFSYSFNPTLSQSLGGPEDFYMFQLGLMSSARYWFTDHLLLDGGIFTNIYNNYDKFKSSLLPADSTLPRVRTHIRDYVRNDVYLNNLQANYFADLGNGFYGQVYGGYLETMYAGVGSELLYRPLDASWALGVDVNYVKQRDWDNMMRFTDYSTPTGFVTAYWNPPTLNGVLMKLSVGQYLAKDKGATIDVAKRFDSGVAVGVWAAISNVSKDDYGEGGFSKGFYISIPFDLMTIGPNRNRAVVSWTPLTRDGGQMLSRKYQLYPMTAEREVPVGQ

SEQ ID NO: 6007 - DNA, 2097 bp, Salmonella enterica subsp. enterica serovar Typhi str. CT18
  CDS (1)..(2097): transl_table=11
atgaaaaaaacacatctgctcagcgtgctggcgctgggtattagcgcggcctgccatgccgaaacatatccagcccctgttgggccttcacaatctgactttggcggcgtgggcctgctgcaaacgccgacagcgcgtatggcgcgtgaaggggagatgagcctgaactatcgcgataacgatcagtaccgctactactcggcttcggttcagcttttcccgtggctggaaaccacgttgcgctataccgatgtccgtacgaaaaagtacagcagcgtggaatcattctccggcgaccagacttacaaagataaagcgtttgatgtgaaactgcggttgtgggaagagagttactggatgccgcaggtggcggttggcgcgcgcgatatcggcgggacggggctgtttgatgcggaatatattgtagcgagtaaggcttgggggccatttgatttttcattaggtctcggctggggctatcttggcaccagcggcaatgtgtctaatcctttctgttcgtatagtgataaattctgttcgcgtgataacagctataaagaggccggttccgtcgacggtagcgatatgtttcacggcccggcttcgctgtttggcggcgtggaataccagaccccgtggcaaccgctacgcctgaagctggagtatgaaggcaataactatcagcaggattttgcggggaaactggaacagaagagcaagtttaacgtcggcgccatttactgcgtcaccgattgggccgacgttaacctcagctacgagcgcggcaacacctttatgtttggcgttacgctgcgcaccaatttcaacgatttacgtcccgcgtatcatgacaattcacgcccgcaataccgaccacagccgcaggatgccatcctgcaacattcggtagtggctaatcaattaacgttattgaaatataatgccggtctggcggacccgaaaatccaggtcaaaggcgatacgctatacgttaccggtgaacaggtgaagtaccgcgactcccgtgaggggatcgtgcgcgctaaccggatcgtcatgaacgatctgccggaggggatccgcacgatccgcgtgacggaaaaccgccttaatctgccgcaggtcaccactgaaaccgatgtcgccagcctgaaacgccatctggaaggcgaaccgctgggacatgaaactccgctggcgcaaaaacgcgtggagccgatcgtgccagagagtactgaacagggttggtatatcgacaagtcgcgcattgattttcatcttgatcccgtgctgaatcagtcggtaggcggcccggaaaacttctatatgtatcagttgggcgtaatgggaactgcggatctgtgggtcacggatcatctgctcaccacgggcagcgtgtttgccaatatcgccaacaactacgacaaatttaactacaccaatccaccgaaggactcgcatctgccgcgggtgcgtacgcatgtccgtgagtatgtgcagaatgatgtttatgtgaataacctacaggccaactacttccagtattttggcaatggtttctatgggcaggtctatggcggttatctggagaccatgtttggcggtgccggggcggaagtcctgtatcgcccggtagacagcaattgggcgtttggtctggatgccaactacgtgaaacagcgtgactggcgtagcgcgcaggatatgatgaagtttaccgattacagcgtgaagaccggacatttgaccgcatactggacgccgtcgttcgcccaggatgtgctggtgaaagccagcgttggtcagtatctggcgggcgataaaggcggtacgctggagatcgccaaacgcttcgatagcggcgtcgttgtcggcggttacgcgacgattaccgatgcgtcgccggatgaatatggggaaggggattttaccaaaggcgtatatgtttccgtaccgctggatctcttctcgtccggcccaacccgaagtcgtgcggcaattggctggacgccgctgacgcgtgacggtggtcaacagcttggccgtaagtttggcctgtatgatatgaccagtgacaggagcgtaaatttccgttaa

SEQ ID NO: 6008 - protein, 698 aa, Salmonella enterica subsp. enterica serovar Typhi str. CT18
MKKTHLLSVLALGISAACHAETYPAPVGPSQSDFGGVGLLQTPTARMAREGEMSLNYRDNDQYRYYSASVQLFPWLETTLRYTDVRTKKYSSVESFSGDQTYKDKAFDVKLRLWEESYWMPQVAVGARDIGGTGLFDAEYIVASKAWGPFDFSLGLGWGYLGTSGNVSNPFCSYSDKFCSRDNSYKEAGSVDGSDMFHGPASLFGGVEYQTPWQPLRLKLEYEGNNYQQDFAGKLEQKSKFNVGAIYCVTDWADVNLSYERGNTFMFGVTLRTNFNDLRPAYHDNSRPQYRPQPQDAILQHSVVANQLTLLKYNAGLADPKIQVKGDTLYVTGEQVKYRDSREGIVRANRIVMNDLPEGIRTIRVTENRLNLPQVTTETDVASLKRHLEGEPLGHETPLAQKRVEPIVPESTEQGWYIDKSRIDFHLDPVLNQSVGGPENFYMYQLGVMGTADLWVTDHLLTTGSVFANIANNYDKFNYTNPPKDSHLPRVRTHVREYVQNDVYVNNLQANYFQYFGNGFYGQVYGGYLETMFGGAGAEVLYRPVDSNWAFGLDANYVKQRDWRSAQDMMKFTDYSVKTGHLTAYWTPSFAQDVLVKASVGQYLAGDKGGTLEIAKRFDSGVVVGGYATITDASPDEYGEGDFTKGVYVSVPLDLFSSGPTRSRAAIGWTPLTRDGGQQLGRKFGLYDMTSDRSVNFR

SEQ ID NO: 6009 - DNA, 2097 bp, Salmonella typhimurium LT2
  CDS (1)..(2097): transl_table=11
atgaaaaaaacacatctgctcagcgtgctggcgctgggtattagcgcggcctgccatgccgaaacatatccagcccctgttgggccttcacaatctgactttggcggcgtgggcctgctgcaaacgccgacagcgcgtatggcgcgtgaaggggagatgagcctgaactatcgcgataacgatcagtaccgctactactcggcttcggttcagcttttcccgtggctggaaaccacgttgcgctataccgatgtccgtacgaaaaagtacagcagcgtggaatcattctccggcgaccagacttacaaagataaagcgtttgatgtgaaactgcggttgtgggaagagagttactggatgccgcaggtggcggttggcgcgcgcgatatcggcgggacggggctgtttgatgcggaatatattgtagcgagtaaggcctgggggccgtttgatttttcattaggtctcggctggggctatcttggcaccagcggcaatgtgtctaatcctttctgttcgtatagtgataaattctgttcgcgtgataacagctacaaagaggcaggttccgtcgacggtagcgatatgtttcacggcccggcctcgctgtttggcggcgtggaataccagaccccgtggcaaccgctacgcctgaagctggagtatgaaggcaataactatcagcaggattttgcgggtaaactggagcagaagagcaagtttaacgtcggcgccatttaccgcgtcaccgattgggccgacgttaacctcagctacgagcgcggcaatacctttatgtttggcgttacgctgcgcaccaatttcaacgatttacgtcccgcgtatcatgacaattcacgcccgcaataccgaccacagccgcaggatgccatcctgcaacattcggtagtggctaatcaattaacgttattgaaatataatgccggtctggcggacccgaaaatccaggtcaaaggcgatacgctatacgttaccggtgaacaggtgaagtaccgcgactcccgtgaagggatcgtgcgcgctaaccggatcgtcatgaacgatctgccggaggggatccgcacgatccgcgtgacggaaaaccgccttaatctgccgcaggtcaccactgaaaccgatgtcgccagcctgaaacgccatctggaaggcgaaccgctgggacatgaaactccgctggcgcaaaaacgcgtggagccgatcgtgccagagagtactgaacagggctggtatatcgacaagtcgcgcgttgattttcatcttgatcccgtgctgaatcagtcggtaggcggcccggaaaacttctatatgtatcagttgggcgtaatgggaactgcggatctgtgggtcacggatcatctgctcaccacgggcagcgtgtttgccaatatcgccaacaactacgacaaatttaactacaccaatccgccgaaggactcgcatctgccgcgggtgcgtacgcatgtccgtgagtatgtgcagaatgatgtttatgtgaataacctacaggccaactacttccagtattttggcaatggtttctatgggcaggtctacggtggttatctggagaccatgtttggcggtgccggggcggaagtcctgtatcgcccggtagacagcaattgggcgtttggcctggatgccaactacgtgaaacagcgtgactggcgtagcgcgcaggatatgatgaagtttaccgattacagcgtgaagaccggacatttgaccgcatactggacgccgtcgttcgcccaggatgtgctggtgaaagccagcgttggtcagtatctggcgggcgataaaggcggtacgctggagatcgccaaacgcttcgatagcggcgtcgttgtcggcggttacgcgacgattaccgatgcgtcgccggatgaatatggggaaggggattttaccaaaggcgtatatgtttccgtgccgctggatatcttctcgtccggcccaacccgaagtcgtgcggcaattggctggacgccgctgacgcgtgacggtggtcaacagcttggccgtaagtttggcctgtatgatatgaccagtgacaggagcgtaaatttccgttaa

SEQ ID NO: 6010 - protein, 698 aa, Salmonella typhimurium LT2
MKKTHLLSVLALGISAACHAETYPAPVGPSQSDFGGVGLLQTPTARMAREGEMSLNYRDNDQYRYYSASVQLFPWLETTLRYTDVRTKKYSSVESFSGDQTYKDKAFDVKLRLWEESYWMPQVAVGARDIGGTGLFDAEYIVASKAWGPFDFSLGLGWGYLGTSGNVSNPFCSYSDKFCSRDNSYKEAGSVDGSDMFHGPASLFGGVEYQTPWQPLRLKLEYEGNNYQQDFAGKLEQKSKFNVGAIYRVTDWADVNLSYERGNTFMFGVTLRTNFNDLRPAYHDNSRPQYRPQPQDAILQHSVVANQLTLLKYNAGLADPKIQVKGDTLYVTGEQVKYRDSREGIVRANRIVMNDLPEGIRTIRVTENRLNLPQVTTETDVASLKRHLEGEPLGHETPLAQKRVEPIVPESTEQGWYIDKSRVDFHLDPVLNQSVGGPENFYMYQLGVMGTADLWVTDHLLTTGSVFANIANNYDKFNYTNPPKDSHLPRVRTHVREYVQNDVYVNNLQANYFQYFGNGFYGQVYGGYLETMFGGAGAEVLYRPVDSNWAFGLDANYVKQRDWRSAQDMMKFTDYSVKTGHLTAYWTPSFAQDVLVKASVGQYLAGDKGGTLEIAKRFDSGVVVGGYATITDASPDEYGEGDFTKGVYVSVPLDIFSSGPTRSRAAIGWTPLTRDGGQQLGRKFGLYDMTSDRSVNFR

SEQ ID NO: 6011 - DNA, 2097 bp, Shigella flexneri 2a str. 301
  CDS (1)..(2097): transl_table=11
atgaagaagaattcttatcttttaagctgcctggccattgccgtctccagtgcctgtcatgctgaagtattaacctacccggatccgctgggttcgtcgcaatcagactttggcggcacaggattgttgcagatgccaaatgcgcgcatcgcaccggaaggtgaattcagcgtcaactaccgggataacgatcaataccggttctactccacctccgtggcgctgttcccatggctggaaggcaccattcgttatacggatgtgcgcacacgcaaatatagccagtgggaagatttcagcggcgatcagtcatacaaagacaaatcattcgattttaaacttcgcctgtgggaagaaggttactggctaccgcaagtggcgtttggtaaacgtgatattgctggtacgggtttgtttgacggtgaatatctggtggccagcaagcaagcggggccatttgatttcaccctcgggatggcatggggctacgccggtaatgcgggcaatattaccaacccgttttgccgggtgagcgataaatattgtcatcgcgcagagtctcacgatgcgggcgatatcagctttagcgatatctttcgtggcccggcttccatctttggcggcattgagtatcaaacgccgtggaatcccctgcgtctgaaactcgaatacgacggcaacaattaccagaatgatttcgctggcaaactgcctcaggcaagccatttcaacgtcggtgcagtttatcgcgctgccagctgggcagacctcaacctcagttatgaacgcggaaacacgttgatgtttggtttcactttacggaccaatttcaacgatctgcgccctgccctacgcgatacgccaaaaccggcctggcagcctgcgccagagtctgaaggtttgcagtacaccacggtagcaaaccaacttaccgccctgaagtataacgcgggctttgacgcgccagaaattcagctacgcgataagacgctgtatatgtctggtcagcaatacaaataccgtgactctcgcgaagcggtcgatcgtgccaaccggattctggtgaataacctgccgcaaggcgttgagaagattagcgtgacgcaaaagcgcgagcatatggcgatggtgactaccgaaaccgacgtagccagcctgcgcaaacagctggccggcacagcgcctggtaaatcagagcaactgcaacaacaacgtgttgaagcagaagatctttctgcctttggtcggtgctaccgtattcgtgaagatcgctttagctactctttcaacccaacactttcacagtcgctgggcggcccggaagatttctatatgttccagctggggctgatgtccagcgcccgctactggtttaccgaccacctgctgcttgatgacggtattttcaccaatatttacaacaactacgacaagtttaagtcttcactgttacccgcggactctaccctgccccgcgtgcgcacgcatatccgtgattacgttcgcaatgacgtttatctcaacaacttgcaagcgaattactttgccgacttaggcaatggtttctatggccaggtgtatggcggttatctggaaacgatgtatgccggtgtcggttccgagcttctttatcgcccgctagatgccagctgggcgctgggtgtggacgttaactacgtgaagcagcgtgactgggacaacatgatgcgcttcaccgattattccacgcccacaggtttcgtgacggcttactggaacccgccgacgctcaatggcgtactgatgaaacttagcgttgggcaatatctggcaaaagataaaggcgcaacgatcgacgtcgccaaactctttgacagcggcgtggcggtaggggtatgggcggcaatcagtaacgtatctaaagatgactacggcgaaggcggctttagtaaaggtttttatatctcgattccgttcgacttgatgaccattggacctaaccgcaaccgcgcggtggtttcgtggacaccattgacgcgtgatggtggacaaatgctgtcacgcaaataccagctcgatccaatgacggcagagcgagaagtaccggttggacaataa

SEQ ID NO: 6012 - protein, 698 aa, Shigella flexneri 2a str. 301
MKKNSYLLSCLAIAVSSACHAEVLTYPDPLGSSQSDFGGTGLLQMPNARIAPEGEFSVNYRDNDQYRFYSTSVALFPWLEGTIRYTDVRTRKYSQWEDFSGDQSYKDKSFDFKLRLWEEGYWLPQVAFGKRDIAGTGLFDGEYLVASKQAGPFDFTLGMAWGYAGNAGNITNPFCRVSDKYCHRAESHDAGDISFSDIFRGPASIFGGIEYQTPWNPLRLKLEYDGNNYQNDFAGKLPQASHFNVGAVYRAASWADLNLSYERGNTLMFGFTLRTNFNDLRPALRDTPKPAWQPAPESEGLQYTTVANQLTALKYNAGFDAPEIQLRDKTLYMSGQQYKYRDSREAVDRANRILVNNLPQGVEKISVTQKREHMAMVTTETDVASLRKQLAGTAPGKSEQLQQQRVEAEDLSAFGRCYRIREDRFSYSFNPTLSQSLGGPEDFYMFQLGLMSSARYWFTDHLLLDDGIFTNIYNNYDKFKSSLLPADSTLPRVRTHIRDYVRNDVYLNNLQANYFADLGNGFYGQVYGGYLETMYAGVGSELLYRPLDASWALGVDVNYVKQRDWDNMMRFTDYSTPTGFVTAYWNPPTLNGVLMKLSVGQYLAKDKGATIDVAKLFDSGVAVGVWAAISNVSKDDYGEGGFSKGFYISIPFDLMTIGPNRNRAVVSWTPLTRDGGQMLSRKYQLDPMTAEREVPVGQ

SEQ ID NO: 6013 - DNA, 2379 bp, Shewanella oneidensis MR-1
  CDS (1)..(2379): transl_table=11
atgaaaaagtcaactcccactttgcatgcattcgggcgtttatctgcgctgtcattagcattgctacctttattacatgttaacgccgatgaattttcttatcccacactcttaccttcacagtcagatttcggtggcgttggtctcatgcaaatgccaacgggccgtatggcgcccgaaggtgaatttaactttgccaccacttataacgatgactatcagcactttagtgcttcggtacagttatttccgtggtttgagaccaccattcgctatacccaagtacaagatttgctttatagcgatgacccaagctttagcggtaactctaaatacacagacaaaggcattgattttaaggttcgtctactcgaagaaagcaattggctacccgaaacctccattggggtacgggactttggcggcacaggtttatttgatggcgaatttattgccgcgacgaaacgagttggcccactggattttaccctcggcattggctggggttatattggcaatagcggtaatcttacctcggataaaaaagatcttaattacaactgtgacagagatacctcttttggtggttcgggtggcaccgttgattaccagcgctggtttaagggctgcgccgccctctttggcggcgttgaatatcaaaccccttgggaaccgttacgcttgaaagtcgaatatgacggtaacgactatcaatccgactaccctgttattcgtggcgaaagcactatgccacaggacagtaaatttaactacggactgctctatcggtttggtgattggggcgatctgcatttaagttatgagcgtggtaatacttggacgctcggctttagtctgcaaaccaattttaataccctatcgcagattaaaaccgatcctgctgccactaaatataagccgcttccagctgcgccattaacacctacacaaacagaatcctccacgccggtaaacataccaacagtcgcacaagtgactgttagtgctgatacttccgaaacgcataaatcagaagttcaaaatgcagaagtagcaaatctagaacctgtaaacgcatccaatcaggctgttacgaatacccaagtagattggaacaaggtcactcatgacttacaaactatcgcaggttatgcaaacgccaaaatttatctggctcatgacagcattaccgtagtaggtgaacaaacgacattccgcgatagaaatgaagcgcatcaaagagcagccactatccttgctaataacactgatgcaactcatatcaaagagtatcggctaattgaaacccgttataaccagccgataaccgaaactctaatcgatacacaaaagtttgcccaaattgcaagctatagttatctcaatgccaaaataactgacgccagtgttgtaagagttcccagcttacctcagggacaactggtcaatagtactgataaggattggctggataagcttagttttgatgtttcgccgaccatggcccaatcctttggtggttccgaaggtttttatatgttcaacattggggtgacaggcagtgcaaattatcgctttaccgataattttgatttttcaggttccctttatctgaatctttacgataactacgataagtttttatacgatgtgccacccgatggaacagacttaaaacgtgttcgtacacttatccgtcaatatgttcatgaaaatccagtaagggtgaatagcctacaactaacttggatggataatttaaccgataatatctcctaccaagcctatggtggctatctagaaatgatgtatggcggtgtggggacagagttcctctaccgaccacttaatagccaatgggcttttggtattgatgtgaattatgttaagcagcgcgatcccgatagcgtgtttggcttctttgaagatgagcatcaatatgatccaattacaaacagcaactacagagtacagacaggtacagtcacaggtaatgcgactttctactatcaacccgactggttccccaatactttattaagggtaagtgcaggccaatatttgactgaagataaaggtgtaacagttgatttctccaaacaattcgatagcggcgtaattgttggcgcctttgcgactaagactaacctttctgcggaggaatatggtgaaggcagctttaccaagggcttctacatctctatcccatttgatttaatgaccgtaaaatcaacccatagccgagcgacgatcagttggatgccactcacccgcgatggtggccaaatggtcggccgtaaatattatctctttgataatactgatgctcgctcaccttggttcactcgtctcagcactcaaactaagtcagtaaaataa

SEQ ID NO: 6014 - protein, 792 aa, Shewanella oneidensis MR-1
MKKSTPTLHAFGRLSALSLALLPLLHVNADEFSYPTLLPSQSDFGGVGLMQMPTGRMAPEGEFNFATTYNDDYQHFSASVQLFPWFETTIRYTQVQDLLYSDDPSFSGNSKYTDKGIDFKVRLLEESNWLPETSIGVRDFGGTGLFDGEFIAATKRVGPLDFTLGIGWGYIGNSGNLTSDKKDLNYNCDRDTSFGGSGGTVDYQRWFKGCAALFGGVEYQTPWEPLRLKVEYDGNDYQSDYPVIRGESTMPQDSKFNYGLLYRFGDWGDLHLSYERGNTWTLGFSLQTNFNTLSQIKTDPAATKYKPLPAAPLTPTQTESSTPVNIPTVAQVTVSADTSETHKSEVQNAEVANLEPVNASNQAVTNTQVDWNKVTHDLQTIAGYANAKIYLAHDSITVVGEQTTFRDRNEAHQRAATILANNTDATHIKEYRLIETRYNQPITETLIDTQKFAQIASYSYLNAKITDASVVRVPSLPQGQLVNSTDKDWLDKLSFDVSPTMAQSFGGSEGFYMFNIGVTGSANYRFTDNFDFSGSLYLNLYDNYDKFLYDVPPDGTDLKRVRTLIRQYVHENPVRVNSLQLTWMDNLTDNISYQAYGGYLEMMYGGVGTEFLYRPLNSQWAFGIDVNYVKQRDPDSVFGFFEDEHQYDPITNSNYRVQTGTVTGNATFYYQPDWFPNTLLRVSAGQYLTEDKGVTVDFSKQFDSGVIVGAFATKTNLSAEEYGEGSFTKGFYISIPFDLMTVKSTHSRATISWMPLTRDGGQMVGRKYYLFDNTDARSPWFTRLSTQTKSVK

SEQ ID NO: 6015 - DNA, 2250 bp, Vibrio vulnificus CMCP6
  CDS (1)..(2250): transl_table=11
atgacgtacttaaattcctcatcagaaatcccaagcgttggctttcgctctcaaatttccgccgtttgtcttggtgtactctccgcgctcgcaggcgtaacttctttgcattcacaagcctctgagcttgaaaccgtgacacttcgcccctcacaaactgattttggtggcgtgggtttaatgcaaatgccatctggccgtatggcaaaagaaggtgaattcaactttggtgttaacctcaacgacgattatcaacattattacacctcgctgcagttgttcgattggtttgaaaccaccattcgttacacgcgtgtgccggatatgctgtttaacccgaacccagattacagcggcgataatctctataccgataaaggtattgatttcaaaatacgcctttggcaagagagctactggttacctgaaacctcaattggtattcgtgattttggcgggacaggtttatttgatggcgagtttattgccgcgaccaaacggtttggccctatcgactttaccctaggtatgggatggggttatatcggccaaagcggcaattttaccaacccattttgtaaagccagcgacaagttttgtgaaaggccgagtgattataaaggctcaggtggcagcgttgattttgagcgctggtttaaaggccctgctgccctctacggcggcattgaatatcaaacaccgtatcaaccgctgcgcttgaaagtggaatacgatgccaacgattacagccaagatttcccttatgttcaaggtggtaagccaatgccacaacataccccttggaactttggcgtactctatcaacttggggattggggcgatgctaagctaagttatcaacgtggcgatacactgacgtttggttttaatctctacaccaattttgatgatctcaaagccgtttggcgagatgaaccaaagcaagccgttacgggaagaccaagcgaaggcaacaccgattggcaagcagtcgcccagcaactagacagcaacgcgggttatcagcaaagcaccttgtatgaacaaggcgatgctttggtgattgcgggtgagcaggttaaatacagtgatataaaagaagcgcaagatcgcgccgccacgattttagccaataacgcaccagactacatcactacctataagattgttgaaacgcgcaatggcgtggacttaacacaaaccgagtttgatgcagaagcttataaacaagcggcgacgtatcaataccttggtgccaatagccgtgagctaggcagtaccagcgagcccgattaccgtgaaaacgcaaaaccattgacgacacatcgcgagcgctggaacgcaggtatttctcctgtgttggcgcaatcattgggtggccctgaagcgttctacttgttccaccttggttttaataccgaagcgaactattggctaaccaacaacatcgaagcgagcggctctatctacgtcaaccttgccgataactacgacaagttcaactacgtagagaaagatcctcatatttcgaacttcgccgtgccgcgcgtgcgaacgatgttccgctcctacgtgagcgataaccctgttcgtctaaaccatatgcagctcacttggtttgctcaacctacgcagcaagtctatacccagatgtacggcggttatttggaaaccatgtttgctggtgtgggtggtgaagtgctttatcgtccattaggtaaaaactgggcgctgggcttggatgcgaacttaatctcacagcgtgacccagatagctggtttgctacgtttgatgaaccgtttgtttattacgatggctacgatgcctctaactgcaaaccaaacgatgttggctgccaagcttacgtgcttgataaaggcacaacgggtcaactttcggcttactacatgcctcagtggtctttgctagagaacacgttatttaaagtcagcgcgggtaagttcttgggcggtgacaacggggtacgcgtcgatttctccaaacagtttaaatccggcatgattgttggcgcatttgcgaccgtgacggacctgacgacagaggaatatggcgaaggcagttacaacaaaggcttctatatttcgattccatttgatgcgatgacgatcaaaccaagcacggcgcgtggtgtttttgcttggcaaccaatcacgcgagatggcggtcaaacactgagccgcaagtacgagctatttgaagtgaccaacgcgagaagccgttggtattaa

SEQ ID NO: 6016 - protein, 749 aa, Vibrio vulnificus CMCP6
MTYLNSSSEIPSVGFRSQISAVCLGVLSALAGVTSLHSQASELETVTLRPSQTDFGGVGLMQMPSGRMAKEGEFNFGVNLNDDYQHYYTSLQLFDWFETTIRYTRVPDMLFNPNPDYSGDNLYTDKGIDFKIRLWQESYWLPETSIGIRDFGGTGLFDGEFIAATKRFGPIDFTLGMGWGYIGQSGNFTNPFCKASDKFCERPSDYKGSGGSVDFERWFKGPAALYGGIEYQTPYQPLRLKVEYDANDYSQDFPYVQGGKPMPQHTPWNFGVLYQLGDWGDAKLSYQRGDTLTFGFNLYTNFDDLKAVWRDEPKQAVTGRPSEGNTDWQAVAQQLDSNAGYQQSTLYEQGDALVIAGEQVKYSDIKEAQDRAATILANNAPDYITTYKIVETRNGVDLTQTEFDAEAYKQAATYQYLGANSRELGSTSEPDYRENAKPLTTHRERWNAGISPVLAQSLGGPEAFYLFHLGFNTEANYWLTNNIEASGSIYVNLADNYDKFNYVEKDPHISNFAVPRVRTMFRSYVSDNPVRLNHMQLTWFAQPTQQVYTQMYGGYLETMFAGVGGEVLYRPLGKNWALGLDANLISQRDPDSWFATFDEPFVYYDGYDASNCKPNDVGCQAYVLDKGTTGQLSAYYMPQWSLLENTLFKVSAGKFLGGDNGVRVDFSKQFKSGMIVGAFATVTDLTTEEYGEGSYNKGFYISIPFDAMTIKPSTARGVFAWQPITRDGGQTLSRKYELFEVTNARSRWY

SEQ ID NO: 6017 - DNA, 2199 bp, Vibrio parahaemolyticus RIMD 2210633
  CDS (1)..(2199): transl_table=11
atgaacctgatcagaaccagtttatccctttctttaataggtccagcgttggtgtgggctcaagacatgcctttcgaagcaccaccattgcaaccatcacaaatggactttggtggtgtcggcttaatgcagatgccaaccggtcgtatggcgcctgaaggtgagtttaactttgctattaacaacagtaatgagtacacattttacaatgttactttgcaagtgatgccatggttagaaactactattcgttatactactgcaaaagatgttctttacagcgaagaccccaatttttctggcaacaatgaatacactgataaaggcatcgattttaaagttcgacttttgcaagagtctaagtacttaccagaactttctgttggtgtacgtgactttgcaggcaccggcctttttgatggtgaatttgttgccgcgacaaaacgttactctaacccaaacctcggtacctttgattttacgttaggtattggttggggctacttaggtacgcgcgacaacatcagcaacccagcttgtaagctgtccgatagtttctgtgaacgcccttcagactttaaaggtaatggcggtagtgtggattttgaacgttggttcaaaggccctgctgcactctttggtggtgttgagtatcaaactttgcacgccccactgcgatttaagcttgaatacgacagcaacgattacagcgaagacttccctgttgtacgtggtggtgtagacatgacgcctcatacaccttggaactttggtgttctgtatcgtttaggacatatggcagatttgcgcttgagctacgagcgcggtgacacgttagttgcaggcgtaagcctttacacaaacttcaataatatgccgtctttctggcgtgatacaccaacgccagaagttgaagacaagcaaccagagcaactgtctgatgtagattgggaacgtgttaccgaggagctggataaaattgctggctaccaaaatacccaactctatgttgaagataataccgtttcggttgtcggcgagcagaagaagtatcgcgaccgcaacgaagctcatgaaaaagcagcggcagtcctttataacgaaatgccagacaacattgatacctttactatcaatgaacgcagtagtggtctgatcggcgatcaaacggttatctccaaagagaaataccgtgactttgcagaagttaactacatcaatccaaatatcgaagatgcaacatcaacctcaagcgataaaccgcaaggtaaacctgcttacgatggttttgagcgctttgattggagcttctcaccaaaactggctcaaaccttaggcaacccagaagagttctatctgttcagtgtcggcttaagtggcagcgcctcttactggctgacagataacctagaaattggtggctcgctatactgggattggtacaacaactacgacaagtttaactacgtcaccccaccagacggcacttcgattcctcgtgtacgtaccatgttccgcgcttatcagaatgaacacgcggtaaccatgtccaacctgcagttaacttggttccaagaatactcagataccatggaccaacagttctacgctggttatctagaaagtatgttcgcgggtgtgggtaccgaattcttgtaccgaccgaaaggcgcaaactgggctatcggtgcagatgtaaacttgatctctcaacgtgatccgcaaagctacttcggtgtatacgacgagaaatggcaatacgttccagaatatgggcgtccgttccaagttgtagacaaaggctttactggttttgtgtcgggttattactacccgcaatgggacttcctacaagatttgatgattcaagtcgatgtaggtcaattcctagccggtgatgtcggtacgcaagtgaatgtatctaaacagttcaagagtggtgtcattgcaggtgcattcgcatcaatcagtgatttgtctgctgacgaattcggtgaaggtagctttactaaaggcttctacatttcgattccattcgacatcatgacagtgaaaccaagcaacaaccgcgcgttctttagctggcagccattgactcgcgatggtggtcaaaagctaggtcgtaagtacagcttgattgaacttactgatgaacgtaacccttggtaccagagaccaaacgcgtcaaacgctaaataa

SEQ ID NO: 6018 - protein, 732 aa, Vibrio parahaemolyticus RIMD 2210633
MNLIRTSLSLSLIGPALVWAQDMPFEAPPLQPSQMDFGGVGLMQMPTGRMAPEGEFNFAINNSNEYTFYNVTLQVMPWLETTIRYTTAKDVLYSEDPNFSGNNEYTDKGIDFKVRLLQESKYLPELSVGVRDFAGTGLFDGEFVAATKRYSNPNLGTFDFTLGIGWGYLGTRDNISNPACKLSDSFCERPSDFKGNGGSVDFERWFKGPAALFGGVEYQTLHAPLRFKLEYDSNDYSEDFPVVRGGVDMTPHTPWNFGVLYRLGHMADLRLSYERGDTLVAGVSLYTNFNNMPSFWRDTPTPEVEDKQPEQLSDVDWERVTEELDKIAGYQNTQLYVEDNTVSVVGEQKKYRDRNEAHEKAAAVLYNEMPDNIDTFTINERSSGLIGDQTVISKEKYRDFAEVNYINPNIEDATSTSSDKPQGKPAYDGFERFDWSFSPKLAQTLGNPEEFYLFSVGLSGSASYWLTDNLEIGGSLYWDWYNNYDKFNYVTPPDGTSIPRVRTMFRAYQNEHAVTMSNLQLTWFQEYSDTMDQQFYAGYLESMFAGVGTEFLYRPKGANWAIGADVNLISQRDPQSYFGVYDEKWQYVPEYGRPFQVVDKGFTGFVSGYYYPQWDFLQDLMIQVDVGQFLAGDVGTQVNVSKQFKSGVIAGAFASISDLSADEFGEGSFTKGFYISIPFDIMTVKPSNNRAFFSWQPLTRDGGQKLGRKYSLIELTDERNPWYQRPNASNAK

SEQ ID NO: 6019 - DNA, 2250 bp, Vibrio vulnificus YJ016
  CDS (1)..(2250): transl_table=11
atgacgtacttcaattcctcatcagaaatcccaagcgttggctttcgctctcaaatttccgccgtttgtcttggcgtgctctccgcgcttgcaggcgtaacttctttgcattcacaagcctctgagcttgaaaccgtgacacttcgcccctcacaaactgattttggtggcgtgggtttaatgcaaatgccgtctggccgtatggcaaaagagggtgaattcaactttggtgttaacctcaacgacgactaccaccattattacacctcgctgcagttgtttgattggtttgaaaccaccatccgctatacacgaattcctgacactttatacaatccaaatcctgactacagcggcgataatctaaacacagacaaaggtatagatatcaagtttcgtctctggcaagagagctattggcttcctgaaacctccattggtattcgcgatattggcggaactggtttatttgatggcgagtttattgcgggtacaaaacgctttggccctctcgatgtcacccttggcgttggttggggatatattggtcaaagtggcaatatttctaatcctttctgtaaagtgagtgaagaatattgtgacagagacggcccaacaaaaggaactggagggagtgtcgattttggtcgctggtttaaaggggaggcttcgatttacggtggcattgaatatcaaacaccgtatcaaccactgcgcttgaaagtggaatacgatgccaacgactacactacggattacccagttcgcgctgttaacaaaccgatgccacaacatactccttggaactttggcgtgctctaccaacttggggattggggcgatgccaagttaagttaccaacgtggcgatacactgacctttggttttaatctctacaccaattttgaggatctcaaagcggtttggcgagatgaaccaaagcaagccgtcacgggaagaccaagcgaaggcaataccgattggcaagcagtcgcccagcaactagacagcaacgcgggttatcagcaaagcaccttgtatgaacaaggcgatgctttggtgattgcgggtgagcaggttaaataccgtgatagaaaagaagcgcaagatcgcgccgccgcgattttagccaataacgcaccagactacatcactacctataagattgttgatacgcgcaatggcgtggacttaacacaaaccgagtttgacgcagaagcttataaacaagcggcgacgtatcaataccttggtgccaatagccgtgagctaggcagtaccagcgagcccgattaccgtgaaaacgcaaaaccattgacgacacatcgcgagcgctggaacgcaggtatttctcctgtgttggcgcaatcattaggtggcccggaagcgttctacttgttccaccttggttttaataccgaagcgaactattggctaactgataacatcgaagcgagtggttctatctacgtcaaccttgccgataactacgacaagttcaactacgtagagaaagatcctcatatttcgaacttcgccgtgccgcgcgtgcgaacgatgttccgctcctacgtgagcgataaccctgttcgtctaaaccatatgcagctcacctggtttgctcagcctacgcagcaagtctatacccaaatgtacggcggttatttggaaaccatgtttgctggtgtaggtggtgaagtgctttaccgtccattaggtaaaaactgggctttgggcttggatgcgaacttaatctcacagcgtgacccagatagctggtttgctacctttgatgagccgtttgtttattacgatggctacgacgcctctaactgcaaaccaaacgatgttggctgccaagcttacgtgcttgataaaggcacaacgggtcaactttcggcttactacatgcctcagtggtctttgttggagaacacgttgtttaaagtcagcgcgggtaagttcttgggcggcgacaacggggtacgcgtcgatttctccaaacagtttaaatccggcatgattgttggtgcatttgcgaccgtgacggacctgacgacagaggaatatggcgaaggcagttacaacaaaggcttctatatttcgattccatttgatgcgatgacgatcaaaccaagcacggcgcgtggtgtttttgcttggcaaccaatcacgcgagatggcggtcaaacactgagtcgcaagtacgagctatttgaagtgaccaacgcgagaagccgttggtattaa

SEQ ID NO: 6020 - protein, 749 aa, Vibrio vulnificus YJ016
MTYFNSSSEIPSVGFRSQISAVCLGVLSALAGVTSLHSQASELETVTLRPSQTDFGGVGLMQMPSGRMAKEGEFNFGVNLNDDYHHYYTSLQLFDWFETTIRYTRIPDTLYNPNPDYSGDNLNTDKGIDIKFRLWQESYWLPETSIGIRDIGGTGLFDGEFIAGTKRFGPLDVTLGVGWGYIGQSGNISNPFCKVSEEYCDRDGPTKGTGGSVDFGRWFKGEASIYGGIEYQTPYQPLRLKVEYDANDYTTDYPVRAVNKPMPQHTPWNFGVLYQLGDWGDAKLSYQRGDTLTFGFNLYTNFEDLKAVWRDEPKQAVTGRPSEGNTDWQAVAQQLDSNAGYQQSTLYEQGDALVIAGEQVKYRDRKEAQDRAAAILANNAPDYITTYKIVDTRNGVDLTQTEFDAEAYKQAATYQYLGANSRELGSTSEPDYRENAKPLTTHRERWNAGISPVLAQSLGGPEAFYLFHLGFNTEANYWLTDNIEASGSIYVNLADNYDKFNYVEKDPHISNFAVPRVRTMFRSYVSDNPVRLNHMQLTWFAQPTQQVYTQMYGGYLETMFAGVGGEVLYRPLGKNWALGLDANLISQRDPDSWFATFDEPFVYYDGYDASNCKPNDVGCQAYVLDKGTTGQLSAYYMPQWSLLENTLFKVSAGKFLGGDNGVRVDFSKQFKSGMIVGAFATVTDLTTEEYGEGSYNKGFYISIPFDAMTIKPSTARGVFAWQPITRDGGQTLSRKYELFEVTNARSRWY

SEQ ID NO: 6021 - DNA, 2133 bp, Erwinia carotovora subsp. atroseptica SCRI1043
  CDS (1)..(2133): transl_table=11
atgaccaagaacagaaacgttaaactaggctgtctgtcgttggcaattggcggcattctgagtgcgcaggctatggcggctgaaacagaaaacagccgtactgcgacgaacccgaatctgcgttttcagcctgcgggtgtgtcgcagtctgatttcggtggcacgggcttattgcaaatgccaaccgcacgcatggcggaaacgggtgaatttagccttaactaccgcgacaatgaggattatcgacgttactccgtgtccctccaactctttgactggctggaaacaacggtgcgttataccgatatccgtacccgactttatagcgacgacgcgtctttcagcggtaatcaaacctacaaggacaaagccttcgatctcaaggctcgcttgtggcaggaaagctactggatgccggatgtatcgctggggttgcgcgatattgctggtaccgggttgttcgatagcgaatatctggtagccagcaagcgtatggggccgtttgatttcaccttgggtatggggtggggcaatatggcggagagcgggaatattaaaaacccagcctgttcgctgaaagccagcttctgcaatcgtactcagaatacagaaatcggtcagtttgaggttaagaatttcttacatggtccggcggcactgtttggtggaattgaatatcagacgccatgggatccgctgcgcctgaaactcgagtatgacagcaacgattatagtaatgagactgcagatggtgcgcgaagcgagaaaatcaagcaggattctcctttcaacatcggggcagtttaccgcgtgggcgatatactggataccacgctgtcgtggcagcggggcaataccctgatgtggggctttaccctacgtactaactttaacagtttgaaaccaaactatttagacgatgcaccaccagtctatgcgccggtgcaggatggtaaagggacaaactggcagctagtttcgaaagagctgaatgataaggctggctttaaggacgccgatatctacgcggaccaaaagcaggtcaccattgttgccgatcagacaaaatatcgtgatagtgagcaggccacacagcgtgctgccaccgtattggcgaaccatgtcccaggtagtcttgatgaatatcacattgttcagcgcagccagcgcttaccgattgccagtacggaagtcgatgccaaagccttccatcaggttcaacaggctgctattccgcttggtcaacctgaacctgctacgcatcgcaaagaaccggtatctgacgtgcgtggtcagcaggtgctgctcgcagagcccgatcgtctgacgtattcattagatccgacgctggtacagtctttcggtggtcctgaatccttctatatgtaccaaatcgcgcttaaaggcaatgtggactaccgtctaagcgatcactggagcgtggggggaaccgcgctgctgaatctggtgaataactatgacaagtttaactataaatcaccgccggccgatggcgcggcattgccgcgagtcagaacctgggtgcgtgaatattccacatcttccgatctgttattgaccaatctgcaattgacccgcagggataatcccgcgcaggactggtatacgcaggtctacggcggttatctggaaatgatgtatgctggcgttggctctgaagtgctgtatcgtccgttcggtaaaagctgggcactggggctggatgttaactatgtcaaacagcgtgactggaacgacatcatgagaatggccgattacgatgtagtgacgggccatctgaccgcgtattgggaactgccgtttgtggaaggtgcggtggcgaaagtgagcgtaggtcgttatctggctggtgataaaggggtcacgctcgacctgtctcgccgctttgacagcgggattgttgcgggtgcctttgcaaccaaaactaacgtcagcgctgctgaatacggtgaagggagctttaccaaaggcttctacgtctccataccgtttgacctactgttcactgagcctacggtgaaacgtggggcagtcggttgggtaccgctaacgcgtgatggtggtcaaatgttgcagcgccgtagctcgctgtatggcctcaccgatcactaa

SEQ ID NO: 6022 - protein, 710 aa, Erwinia carotovora subsp. atroseptica SCRI1043
MTKNRNVKLGCLSLAIGGILSAQAMAAETENSRTATNPNLRFQPAGVSQSDFGGTGLLQMPTARMAETGEFSLNYRDNEDYRRYSVSLQLFDWLETTVRYTDIRTRLYSDDASFSGNQTYKDKAFDLKARLWQESYWMPDVSLGLRDIAGTGLFDSEYLVASKRMGPFDFTLGMGWGNMAESGNIKNPACSLKASFCNRTQNTEIGQFEVKNFLHGPAALFGGIEYQTPWDPLRLKLEYDSNDYSNETADGARSEKIKQDSPFNIGAVYRVGDILDTTLSWQRGNTLMWGFTLRTNFNSLKPNYLDDAPPVYAPVQDGKGTNWQLVSKELNDKAGFKDADIYADQKQVTIVADQTKYRDSEQATQRAATVLANHVPGSLDEYHIVQRSQRLPIASTEVDAKAFHQVQQAAIPLGQPEPATHRKEPVSDVRGQQVLLAEPDRLTYSLDPTLVQSFGGPESFYMYQIALKGNVDYRLSDHWSVGGTALLNLVNNYDKFNYKSPPADGAALPRVRTWVREYSTSSDLLLTNLQLTRRDNPAQDWYTQVYGGYLEMMYAGVGSEVLYRPFGKSWALGLDVNYVKQRDWNDIMRMADYDVVTGHLTAYWELPFVEGAVAKVSVGRYLAGDKGVTLDLSRRFDSGIVAGAFATKTNVSAAEYGEGSFTKGFYVSIPFDLLFTEPTVKRGAVGWVPLTRDGGQMLQRRSSLYGLTDH

SEQ ID NO: 6023 - DNA, 2988 bp, Burkholderia pseudomallei K96243
  CDS (1)..(2988): transl_table=11
atgccgaagcgtgaggcgacgggccgcaagcggcgcggcggcacatggctggccgtcgtgctcgcatgcgcccgtcctttcgacgccgccgcgcacgtcgaagaaacgatcgccgcgccgacgcatctcggcgactggctcgccgcccatcagtcgacgcccgccgtcggaacgccgccgtccggcgcgccttcgccgtacctcggcggcctgagctggcgctcgaaccgcgaagtcgccgcacagcaggcgagcaagcgccgcctgctcgccggcatcgacgcgctgcccgcgctcacgccggccgcgcaggcggcgcgggcacgcctctcggcgatgatcgccgcgcgtgccgcaaccggccgcgtgatcgtcgcgcgaagcgatgcgcgctggctgcaggccaatcccgcccacgatccctatctcgaagccggcgacgtcgtgacgattcccgatcgcccgtcgagcgtcgccgtcgtgcgcgcggacggctcgatctgcacggtcgctcacgtgcaggacgtcgaagcattgccgtacgtgctcgcgtgcgcccccgacgcggcgcccgatctcgcgtggatcgcgcaacccgacggcacggtcagcgaaagcaaggtggcgatgtggaatcgcgacgtgcaggacacgccggcgcccggcagttggatctgggcgcccgatcggggcagccgatggccgccggccctgtcgcgcgccctggcggaattcatggcgacgcagggcgtatccgggctcgcggacgacggctcgccgctgcccgcgcctcccattgcgcccgtccaccagaccgcgtttccgagcggcgcgcccggccggtccgcagcgttcccggtaacgggcggcgactggggcacggcgggcattctgcaaacgccgaccgcgcgaatgaacgacgcgggcgaagcatcgctcagcatgagccacgtgagcccgtacacgcgcctgaacttcacgctgcagccgctcgattggctcgaaatcgggttccgctacaccgacgtcagcaatcagccgtacggccccgtctcgctgagcggcacccagtcgtacaaggacaagagcatcgacgcgaagctcaggctgtggcgcgaatccgcctatctgcccgacgtggccgtcggctttcgcgacatcgccggctcgggcctgttctccggcgagtacctggtggccagcaagcgaaccgggccgttcgactggagcgtcggcctcggctggggttacgtgggcgcgcgcggcaatctgcgcaacccgctggcggtgatcagccggcggttcgacgatcgcacgaacagcgcgacaccgaacggcggcgagctcggctacagctcatggtttcgcggccgcgtctcgccgttcggcggcgtgcaataccagacgccgcacgagcgcctcatcctgaaagccgaatacgacggcaacgactatcggcacgaaccgttcggtcaagtgctgaaggcgcgatcgccattcaacttcggcgccgtctatcgcgcgacgcgcaacatcgacttgagcctcggcttcgagcgaggcgcgcgcgtgatgttcggcgtctcgctgcacggcaatctgaagcgcgcgtcgatgcccaagctcggcaatccgccggctccgccggtgacgcaaccggccgcgaacgccgggccgcccccgccggccgccgatccggcatcgggcgacgcgcaagcggcgaccgcgccggcatcgcgcatcggacgcgcgtcgccgtcgccgttcgatcgcgactggtccggcaccgtcgcgcaattgcaggcgcaaacgcattggcacgtgcgcagcatccgtgcgctcggcatggatctcgtcgtcgagttcgacgacgtcgacgcgttctacctgcaggacccgctcgagcgcatcgcgacgatcctgaaccgtgacgcgccgctcaacgtgcgcacgttccatgtcgtcgcgctcgtgcacggcgtgccggttgccgactatcaggtgcagcgcacgcagtggtttgcgagccgcacccgcgccctcacgccgagcgaggctgcacccgacacggcgctcggccggccgctcacgcgacagtcgatcgacatgctgccctctctattcgagcagcggcccaaggccttcgtggcgtcggtcggcccgggctaccggcaaacccttggcggtccgaacggtttcctgctctaccagatctccgccgatgcatacggcgagctgagactgcccggcggcgcatggctcggcggcgaactgaacgtggggctcgtcgacaactacggcaagttcacctacacggcggacagcaagctgccgcgcgtgcgcacgtatctgcgcgagtacctgacgacgtcgcgcgtcacgctgccgctgctgcaactgacgaagatgggacgcctcggcaacgatcagttctacagcgtatacggcgggctgctcgaaagcatgttcgcgggcgtcggggccgaatggctgtatcgcccggcggatagccgcctcgcgatcggcgtcgacgtgaacgcggtgcggcagcgcggcttccgccaggatttctcgatgcgcgactaccggacgctcaccggacacgtgacggcgtattggaacaccggatggcaaggcgtccagatcaatctgagcgtcggccagtatctggcgaaggacaagggcgcgacgctcgacatctcgcggcgctttcgcaacggcgtcgtgatcggcgcctatgcgacgaagacgaacatatcggcggcccaattcggcgaaggcagcttcgacaagggcatctacctgacgattccgttcgacgcgatgatgacgcgctcgagcggcagcgtggcgaatctgcgctggaaccccgtgacgcgcgacggcggcgcgaagctggatcgcaaatatccgctgtacgatctcaccgacatgggcgagcgccgcagcttgtggtacgcgccgccggatggcgcattgtcgccgtga

SEQ ID NO: 6024 - protein, 995 aa, Burkholderia pseudomallei K96243
MPKREATGRKRRGGTWLAVVLACARPFDAAAHVEETIAAPTHLGDWLAAHQSTPAVGTPPSGAPSPYLGGLSWRSNREVAAQQASKRRLLAGIDALPALTPAAQAARARLSAMIAARAATGRVIVARSDARWLQANPAHDPYLEAGDVVTIPDRPSSVAVVRADGSICTVAHVQDVEALPYVLACAPDAAPDLAWIAQPDGTVSESKVAMWNRDVQDTPAPGSWIWAPDRGSRWPPALSRALAEFMATQGVSGLADDGSPLPAPPIAPVHQTAFPSGAPGRSAAFPVTGGDWGTAGILQTPTARMNDAGEASLSMSHVSPYTRLNFTLQPLDWLEIGFRYTDVSNQPYGPVSLSGTQSYKDKSIDAKLRLWRESAYLPDVAVGFRDIAGSGLFSGEYLVASKRTGPFDWSVGLGWGYVGARGNLRNPLAVISRRFDDRTNSATPNGGELGYSSWFRGRVSPFGGVQYQTPHERLILKAEYDGNDYRHEPFGQVLKARSPFNFGAVYRATRNIDLSLGFERGARVMFGVSLHGNLKRASMPKLGNPPAPPVTQPAANAGPPPPAADPASGDAQAATAPASRIGRASPSPFDRDWSGTVAQLQAQTHWHVRSIRALGMDLVVEFDDVDAFYLQDPLERIATILNRDAPLNVRTFHVVALVHGVPVADYQVQRTQWFASRTRALTPSEAAPDTALGRPLTRQSIDMLPSLFEQRPKAFVASVGPGYRQTLGGPNGFLLYQISADAYGELRLPGGAWLGGELNVGLVDNYGKFTYTADSKLPRVRTYLREYLTTSRVTLPLLQLTKMGRLGNDQFYSVYGGLLESMFAGVGAEWLYRPADSRLAIGVDVNAVRQRGFRQDFSMRDYRTLTGHVTAYWNTGWQGVQINLSVGQYLAKDKGATLDISRRFRNGVVIGAYATKTNISAAQFGEGSFDKGIYLTIPFDAMMTRSSGSVANLRWNPVTRDGGAKLDRKYPLYDLTDMGERRSLWYAPPDGALSP

SEQ ID NO: 6025 - DNA, 2079 bp, Pseudomonas fluorescens PfO-1
  CDS (1)..(2079): transl_table=11
ttgaatttgcgttttgcagctgtgttgttattgccgtgtggcctggtgcatgccgagcctcggattacccagaatgacttcggcggcgtcggtctgttgcagaccccgaccgcgcgcatgtcgcccgccggtgagttgagcgtcaacgccaaccgcaccgaaccgtacagccgatacagcgtttcgttgcagccgctcgactggctggaaggttcgtttcgctacaccgccatcaccaaccgtccgtacggttccgaagcgctgagcggcagccagagctataaggacaaggcggtcgacgccaaggtccggctgtggcaggaaagccactgggcgccggaagtggcgctgggctttcgagacatcggcggtaccggtctgtttgccagtgaattcttcgtggccaacaagcgctgggacaatttcgatttcagcgccggcatcgcctggggttacatcggcaatcgcggcgatgtcgataacccgttgggttcgatcagtgaccgcttcaacactcgccctgatctggaaggcaccggtgacgtcaacgccggctcgtactttcgcggcaagccgtcgtttttcggcggtgtgagttaccagacgccctgggaccgtctcagtctgaagctcgaatacgaaggcaacgactacaagcacgagcccaaggacaacatcatcaagcaggactcgccgatcaacctcggcgcggtgttcaaggtgaccgattcagtcgatgtgagtgcggcctgggaacgcggcaacacggcgatgttcggcatcacgttccacaccaatttcgtcagtcgcaaggccccggccaagacctttgatccgccggccgaaccgctgccggcgaaggcgccgaccgcgtccatggaagaggtcaactgggccgacgtgtcgcgccgtttgcagcagaacgccggctacaaggtcgaacgcatcacccagcgcgattccgaactgatcgtgtacggcgagcagcagcgctatttccattcgccgaaggctgtcggccgcgcgagccggatcctcgacaacagcgtcaacgacgacatcgactggttcaccgtggtcaacaagcgctacgacctgccgctggaagaaaccagcgtgccccggcagacattccgcgaagtgatcaacaacgaagagcctctggagtcgctgcaccgcaccaccgagatcaacccggcgatgccgcgcaacgagaaaaccctctacaccgaggcgccgcagcacttcaattacggcgtcggcctgggcttcaaacagaacgtcggcggccccgatggtttgctctatcagttcacggcggatctggacgccgagtaccgcttcaaccgcaacacctggtggaacggtctgctgagtcagaacctgatcaacaacttcgacaagttcacctacgacgcgcccagcggcctgccgcgtgtgcgcaccgacttgcgtcagtacctgaccacgtcggacaccaccatgccgctgttccaggtcagccacgccgagcaactggacaaggatttgtacggcatggtctacggcggttatctggagtcgatgttcgccggggtcgggggcgaggtgctgtttcgcccgaccggcaagcgctggtcgattggtgcggacctgaactacgtgcgtcagcgtgagttcgaccagggtttcggcctgcgtgattactcggtctggaccggccacatcaccggctacaccgacctgccgttcgacacgctggccgcagtcagcgtcgggcgttacctggcgggcgactttggcggcacggtggatatctcccgcgagttcttcaacggcgtacgctttggcgcctgggcgaccattaccaccgccggcagcgccgagtatggtgagggtagtttcgacaaggggctgtatttgtcgattccgttcgacgaaatgatgagcatgtcgaccatgcgccgcgccaacctggtgtgggcaccgctgacccgtgacggtggcgcgcggctcaaccgaagcttccagctgcattcgatgacggacagtcgggaaggggacatgttctaccgcaacttcgggaagattaccgagtag

SEQ ID NO: 6026 - protein, 692 aa, Pseudomonas fluorescens PfO-1
MNLRFAAVLLLPCGLVHAEPRITQNDFGGVGLLQTPTARMSPAGELSVNANRTEPYSRYSVSLQPLDWLEGSFRYTAITNRPYGSEALSGSQSYKDKAVDAKVRLWQESHWAPEVALGFRDIGGTGLFASEFFVANKRWDNFDFSAGIAWGYIGNRGDVDNPLGSISDRFNTRPDLEGTGDVNAGSYFRGKPSFFGGVSYQTPWDRLSLKLEYEGNDYKHEPKDNIIKQDSPINLGAVFKVTDSVDVSAAWERGNTAMFGITFHTNFVSRKAPAKTFDPPAEPLPAKAPTASMEEVNWADVSRRLQQNAGYKVERITQRDSELIVYGEQQRYFHSPKAVGRASRILDNSVNDDIDWFTVVNKRYDLPLEETSVPRQTFREVINNEEPLESLHRTTEINPAMPRNEKTLYTEAPQHFNYGVGLGFKQNVGGPDGLLYQFTADLDAEYRFNRNTWWNGLLSQNLINNFDKFTYDAPSGLPRVRTDLRQYLTTSDTTMPLFQVSHAEQLDKDLYGMVYGGYLESMFAGVGGEVLFRPTGKRWSIGADLNYVRQREFDQGFGLRDYSVWTGHITGYTDLPFDTLAAVSVGRYLAGDFGGTVDISREFFNGVRFGAWATITTAGSAEYGEGSFDKGLYLSIPFDEMMSMSTMRRANLVWAPLTRDGGARLNRSFQLHSMTDSREGDMFYRNFGKITE

SEQ ID NO: 6027 - DNA, 2919 bp, Burkholderia thailandensis E264
  CDS (1)..(2919): transl_table=11
gtgcatcctttcgatgccgccgcgcatgtcgaagaaacgatcgccgccccaatgtacctcggcgactggctcgcagcccgtcagccgacgcccgctgtcggcacgtcatcatccgagacgccttcgccgtacctgagcggcctgagctggcgatcgggtcgcgaagtcgcggctcagcaggcgaacaagcgccgcctgatcgccggcatcgaagcgctgcccgcgcccacgccggccgcgcaggcggcgcgagcgcgcttctcggcaatggttgccgcgcgccccgcgaccggacgcgtggtcgtcccccgaaccgacggacgatggttgcaggccaatcccgccagcgatcctcgtctcgaagccggcgacatcgtgacgattcccgatcgctcgtcgaccgtcaccgtcgtgcgcgcggacggctcgacatgcacggtcgcccacgcgcaagacgtcgaagcattgcagtacgtgctcgcgtgcgatcccgccgcgacgcccgatgtcgcgtggatcgcgcaacccgacggcacggtcagcgaaaacaaggtggccgcctggaatcgcgatgcgcaggatacgcccgcacccggcagctggatctgggcacccgatcgcggcagtcgatggacgccggccctgtcgcgcgcattggccgaatttctggcgacgcaaggcgtatcggaaccgaccggcgacggcgcgccgccgcacgcaccccgcattgcgccgcgccatcagaccgagtttctgaccggcgcgccgacccgctccgccgcattcccggtgacgggcggagactggggcacggcgggcatcctgcagacgccgaccgcgcggatgaacgacgccggagaagcgtcgctcagcatgagccacgtcagcccgtacacgcgcctcaatttcgcgttgcagccactcgactggctcgagatcggcttccgatacaccgacgtcagcaatcaaccgtacgggcccgtctcgctgagcggaacccagtcatacaaggacaagagcatcgacgcgaagatccggctatggcgcgaatccgcgtatctgcccgacgtggccgtcggctttcgcgacatcgccggatcggggctcttctccggcgagtacctggtggcgagcaagcggacggggccgttcgactggagcgtcggcctgggctggggctatatgggcgcgcgcggcaatctgcgcaacccgctgtcgatgatcagccgacggttcgacgatcgcgcgaacagcgcgacgccgaacggcggcgagctgggctacggctcgtggtttcgcgggcgcgtatcgcccttcggcggcgtgcagtaccagacgcccgacgagcgcctcatcctgaaggccgaatacgacggcaacgactatcggcacgagccgttcgggcaagtgttgaaggagcgatctccattcaacttcggcgccgtctatcgcgccacgcgcaacatcgacctgagcgtcggcttcgagcgaggcacgcgcgtgatgttcggcgtctcgctgcacggcaatctgaagcgtgcgacgatgcccaaactgggcaatccgccgcccgttccggtgacgcagccggccgcgaacgccgggccgcgcacgcacgccgccggcgcgccgacacgcggcgggcgatcggcggttgcgtcgacaccgcgtatcgaaggtgcatcgccttcgccgttcgatcgcgactggtcggacaccgtcgcgcaactccaggctcaaacgaattggcatgtgcgcagcatccgcgcgctcggcatggatctcgtcatcgagttcgacgacgtcgacgcgttctacctgcaggaccagatcgaccgcatcgcgacgatactgaaccgcgacgcgccgctcaacgtgcgcacgtttcacgtcgtcgcgctcacgcacggcgtgccggttgccgactatcaggtgcagcgcacgcagtggttcgcgagccgcacccgcgccctcgtgccgagcgaagtcgcccccgcgacgacgctcggcaggccgctcacgaatcagtcgatcgacatgctgccgccgctgttcgagcaacggccgagagccttcgtgctgtcggtcgggccgggctaccagcaaacgcttggcgggccgaacggcttcctgctctatcagatctcggccaacgcgtacggcgaattgagaatgcccggcggcgcgtggctcggcggcgaactgaacgtcgggctcgtcgacaactacggcaagttcacctacacggcggacagcaagctgccgcgcgtgcgcacctatctgcgcgagtatctgacgacgtcgcgcgtcacgctgccgctgctgcaactgacgaaaatcggacgtctcggcaacgatcagttctacagcgtctacggcggactgctcgaaagcatgttcgccggggtcggcgtggaatggctgtatcgccctgcgcatagccgtctcgcgatcggcgtcgacgtgaacgcggtgcgccagcgcggcttccgccaggatttttcgatgcgcggctacaagacgctcaccggacacgtgaccgcatactgggataccggttggcaaggcgtccagatcaatctgagcgtcggccagtatctggcgaaggacaagggcgcgacgctcgacatctcgcggcgctttcgcaatggcgtcgtgatcggcgcctatgcgacgaaaacgaacgtatcgccggcgcaattcggcgaaggcagcttcgacaagggcatctacgtgacgatcccgttcgacgcgatgatgacgcgctcgagcagcagcatcgcgaatctgcgttggaaccccgtgacgcgcgacggcggcgcgaagctggaccgcagatatccgctgtacgatctcaccgacatgggcgagcgccggagcttgtggtacgcgcctccggatggcgcggtctcgccgtga

SEQ ID NO: 6028 - protein, 972 aa, Burkholderia thailandensis E264
MHPFDAAAHVEETIAAPMYLGDWLAARQPTPAVGTSSSETPSPYLSGLSWRSGREVAAQQANKRRLIAGIEALPAPTPAAQAARARFSAMVAARPATGRVVVPRTDGRWLQANPASDPRLEAGDIVTIPDRSSTVTVVRADGSTCTVAHAQDVEALQYVLACDPAATPDVAWIAQPDGTVSENKVAAWNRDAQDTPAPGSWIWAPDRGSRWTPALSRALAEFLATQGVSEPTGDGAPPHAPRIAPRHQTEFLTGAPTRSAAFPVTGGDWGTAGILQTPTARMNDAGEASLSMSHVSPYTRLNFALQPLDWLEIGFRYTDVSNQPYGPVSLSGTQSYKDKSIDAKIRLWRESAYLPDVAVGFRDIAGSGLFSGEYLVASKRTGPFDWSVGLGWGYMGARGNLRNPLSMISRRFDDRANSATPNGGELGYGSWFRGRVSPFGGVQYQTPDERLILKAEYDGNDYRHEPFGQVLKERSPFNFGAVYRATRNIDLSVGFERGTRVMFGVSLHGNLKRATMPKLGNPPPVPVTQPAANAGPRTHAAGAPTRGGRSAVASTPRIEGASPSPFDRDWSDTVAQLQAQTNWHVRSIRALGMDLVIEFDDVDAFYLQDQIDRIATILNRDAPLNVRTFHVVALTHGVPVADYQVQRTQWFASRTRALVPSEVAPATTLGRPLTNQSIDMLPPLFEQRPRAFVLSVGPGYQQTLGGPNGFLLYQISANAYGELRMPGGAWLGGELNVGLVDNYGKFTYTADSKLPRVRTYLREYLTTSRVTLPLLQLTKIGRLGNDQFYSVYGGLLESMFAGVGVEWLYRPAHSRLAIGVDVNAVRQRGFRQDFSMRGYKTLTGHVTAYWDTGWQGVQINLSVGQYLAKDKGATLDISRRFRNGVVIGAYATKTNVSPAQFGEGSFDKGIYVTIPFDAMMTRSSSSIANLRWNPVTRDGGAKLDRRYPLYDLTDMGERRSLWYAPPDGAVSP

SEQ ID NO: 6029 - DNA, 2160 bp, Vibrio sp. Ex25
  CDS (1)..(2160)
atgggcccagcattggtttgggctcaagaagtaccctttgaggctccctcgttacagccttctcaatctgattttggtggtgttggcttaatgcagatgccaaccggacgtatggctcctgaaggggaattcaacttttctgttaccggtagtgatgagtaccttttttacaacgttactctgcaactaatgccttggttagaaacaaccattcgttatacttcggtgcgagatttgctctatagtaaggatcctagtttctcgggagatacaaactatacagataaaggtattgactttaaaattcgattgctaaaagaatctcagtatattcctgagctatcactgggtgttcgagactttgctggtaccggcttattcgatggagaatacatagcagctacgaagcggtattccaactctgagctagggacctttgattttacttttggtattggttgggggtcgctaggcactcgtgacaacatctctaacccgacttgtaaattgtcagatcgattttgtgaacgcccctctgactatttagatacaggtggcacaactaactttgatagagcatttaaaggaccaactgcattgtttggtggtgttgaatatcagaccttacatgcaccattacgttttaaactcgaatacgatagcaatgattacagcgaagacttccctgtggtaaaaggtggcgtggacatgacaccacatactccgtggaacgctggtatgctgtaccgtatcggaatggccgattttcgtttaagttatgaacgcggagacactttggttgcaggtttaacgctcaacactaacttcaatgacatgccatcattctggcgagatgagcctacgccagaagtcgaagataaccaaccagaagaactgtctaatgttgactgggaacgtgtaacggaagatttagacaaaattgcgggttaccaaaacacgcgcatttatgttgatgacaacaccgtaactgtcgttggtgaacagaagaaatatcgtgaccgtacagaggcacatgaaaaagcggcggctgtacttcataatgaaatgcctgaagatattgatacctatgcgatcaatgaacgtagccgaggcttagtcggcgaacaaacgattatttccaaggagaaatatcgcgactttgcccaagttaattacatcaaccctaaaatagaagatgcaaccgcaaaagctagcaataagccaagtggagaatctgtctatgatggttttgagcgttttgattggggctttgcaccgaagcttgttcaaactctcggtaacgcagaagacttctacctctttagtgtaggactaagcggtaatgcctcatactggctgacggataaccttgaaattggcggctccttatactgggattggtataacaactacgataagtttaactatgtcactccacctgatggtactaccgttcctcgtgttcgcaccatgttccgcgcttaccaaaatgaacatactgtaaccatgtcaaacctacaattgacttggttccaagagtattccaatacgatggaccagcaattctacgctggctatctggagagcatgtttgccggagtcggtaccgagtttctttaccgaccacaaggagctaactgggcgattggcgctgacgtcaacgtaatttctcaacgtgatccacaaagttacttcggtgtttacgatgagaaatggcaaaacgtgccagaatatggacgtccgttccaagttattgataaaggattcactggttttgtatctggttactactaccctcaatgggagttcctgcaagatttgatgatccaagtcgatgttggtcagttcctagctggcgatgttggtacacaaatcaatgtttctaagcagttcaagagtggcgtaattgctggcgcctttgcctcatttacagacttgtctgcggatgaatttggtgaaggtagctttactaaaggtttctacttgtcgattccgtttgacatcatgaccgttaaaccaagtaacaatcgtgcgaactttagttggcagcctcttactcgtgacggagggcagaagctcggccgcaaatacagcttaattgagttaaccgacgaacgaaatccttggtaccaaagacctaaccgttcggatgtggaataa

SEQ ID NO: 6030 - protein, 719 aa, Vibrio sp. Ex25
MGPALVWAQEVPFEAPSLQPSQSDFGGVGLMQMPTGRMAPEGEFNFSVTGSDEYLFYNVTLQLMPWLETTIRYTSVRDLLYSKDPSFSGDTNYTDKGIDFKIRLLKESQYIPELSLGVRDFAGTGLFDGEYIAATKRYSNSELGTFDFTFGIGWGSLGTRDNISNPTCKLSDRFCERPSDYLDTGGTTNFDRAFKGPTALFGGVEYQTLHAPLRFKLEYDSNDYSEDFPVVKGGVDMTPHTPWNAGMLYRIGMADFRLSYERGDTLVAGLTLNTNFNDMPSFWRDEPTPEVEDNQPEELSNVDWERVTEDLDKIAGYQNTRIYVDDNTVTVVGEQKKYRDRTEAHEKAAAVLHNEMPEDIDTYAINERSRGLVGEQTIISKEKYRDFAQVNYINPKIEDATAKASNKPSGESVYDGFERFDWGFAPKLVQTLGNAEDFYLFSVGLSGNASYWLTDNLEIGGSLYWDWYNNYDKFNYVTPPDGTTVPRVRTMFRAYQNEHTVTMSNLQLTWFQEYSNTMDQQFYAGYLESMFAGVGTEFLYRPQGANWAIGADVNVISQRDPQSYFGVYDEKWQNVPEYGRPFQVIDKGFTGFVSGYYYPQWEFLQDLMIQVDVGQFLAGDVGTQINVSKQFKSGVIAGAFASFTDLSADEFGEGSFTKGFYLSIPFDIMTVKPSNNRANFSWQPLTRDGGQKLGRKYSLIELTDERNPWYQRPNRSDVE

SEQ ID NO: 6031 - DNA, 2376 bp, Shewanella sp. ANA-3
  CDS (1)..(2376): transl_table=11
atgaaaaactcgactcccacttttccctctttcgggcgtttatcagcgctatctttagcactgctaccattattacacgttagcgccgatgaattttcttacccaacatcgttgccttcacagtctgactttggtggtgtaggtttaatgcaaatgccaacaggccgtatgacgcctgaaggtgaatttaactttgccacgacttacaacgatgactatcagcattttagcgcttcagtgcagctcttcccttggtttgaaacaacaatacgctacaccctagtacaagacctgctttacagtagcgaccccaactttagtggtaatactaaatacacggataaaggcatagactttaaagttcgtctactcgaagaaagtaactggctgcctgaaacctctattggggtgagggactttggtggcactggtttatttgatggtgaatttgttgctgcgacaaagcgcgtcggtccactcgattttactctaggtataggttggggctatatcggcaatagcggtaatctcacttccgataaaaaagatcttaattacaactgtgatagagatacttcttatgggggtaaaggtggcactgttgattaccagcgttggtttaagggctgcgcatccctctttggtggcgttgaatatcagactccttgggaacctttacgtttgaaagtcgaatacgatggtaacgactatcaatcagactttcccgttgttcgtggtggtatagatatgcctcaggacagcaagtttaactatggaatgctctatcgttttggagactggggcgatctacatttaagttatgagcgtggcaatacttggacacttggctttagtctgcagaccaattttaataccttgtcacagattaaacgagatccaaaggcagctaaatataagccacttcctgccgcgccattaacccttacgcaaacagaatcctctgctcaagtaaacacactaagagccgaacaagcgactgtgagtacagaaacttcaacgcataaatcagaagtgcaaaatgatgaagtagcaaatctagagcttgtaaatgcatccagtcagactgctgcgaatcccctggtggattggaataaaattgctcaggatttacaaactattgctggttacgcaaacgccaaaatttaccttgataatgacagtattaccgttgtaggtgaacagacaaaattccgcgatagaaatgaagcgcataaaagagctgccaccattctagccaacaatactgatgccaactttattaaagagtatcgactaattgagactcgttatagccaaccaataacggaaacccgtattgatgctcagaagtttgccaaagtcgcaagttatggctatctcaatgccaaagtcactgatgctagtgttgtgagtattccaagcttacctcagggacaactagtcaataatactgataaagattggctagataagcttagttttgatgtttcgcctaccatgtcccaatccttcggcggttccgaagggttttatatgtttagtattggaatgactggcagtgcaagttaccgatttaccgataactttgagttttcaagctctctttatcttaacctctacgataactttgataagtttttatacgaagttccacccgatggcactgacttaaaacgtgttcgcaccctggttcgtcaatatattcatgataatcctgtacgagtgaataacctgcaactaacctggatggataatttaaccgataacatttctttccaagcctacggcggctatttagaaatgatgtatggtggtgtgggcacagaggttctctatcgaccacttaacagccaatgggcttttggggttgatgtgaattatgttaagcagcgcgatccagacagcatgctaggcttctttgaagatgagcatcaatttgactcactcactaaccgcccctatcgagtgcaaacgggtacggtaacaggacacgcatcaatctattatcaacctgactggttccccaatactttactgagaatcagtgccggccagtatttggccgaggataaaggagtaacagttgatttctcaaaacaattcgatagtggggtgattgttggcgctttcgccactaagactaatctttcatcagaggagtatggtgagggcagttttactaaaggcttctacgtgtcgattccatttgacttgatgaccattaaatcaacccatagccgggcgacaatcagttggatgccactgacacgcgatggtggtcaaacattagggcgcaagtacagtctatatgatgtaatggatgctagagatccttggttcacacgcgcaagcatcacaagtgagtctgtcaaataa

SEQ ID NO: 6032 - protein, 791 aa, Shewanella sp. ANA-3
MKNSTPTFPSFGRLSALSLALLPLLHVSADEFSYPTSLPSQSDFGGVGLMQMPTGRMTPEGEFNFATTYNDDYQHFSASVQLFPWFETTIRYTLVQDLLYSSDPNFSGNTKYTDKGIDFKVRLLEESNWLPETSIGVRDFGGTGLFDGEFVAATKRVGPLDFTLGIGWGYIGNSGNLTSDKKDLNYNCDRDTSYGGKGGTVDYQRWFKGCASLFGGVEYQTPWEPLRLKVEYDGNDYQSDFPVVRGGIDMPQDSKFNYGMLYRFGDWGDLHLSYERGNTWTLGFSLQTNFNTLSQIKRDPKAAKYKPLPAAPLTLTQTESSAQVNTLRAEQATVSTETSTHKSEVQNDEVANLELVNASSQTAANPLVDWNKIAQDLQTIAGYANAKIYLDNDSITVVGEQTKFRDRNEAHKRAATILANNTDANFIKEYRLIETRYSQPITETRIDAQKFAKVASYGYLNAKVTDASVVSIPSLPQGQLVNNTDKDWLDKLSFDVSPTMSQSFGGSEGFYMFSIGMTGSASYRFTDNFEFSSSLYLNLYDNFDKFLYEVPPDGTDLKRVRTLVRQYIHDNPVRVNNLQLTWMDNLTDNISFQAYGGYLEMMYGGVGTEVLYRPLNSQWAFGVDVNYVKQRDPDSMLGFFEDEHQFDSLTNRPYRVQTGTVTGHASIYYQPDWFPNTLLRISAGQYLAEDKGVTVDFSKQFDSGVIVGAFATKTNLSSEEYGEGSFTKGFYVSIPFDLMTIKSTHSRATISWMPLTRDGGQTLGRKYSLYDVMDARDPWFTRASITSESVK

SEQ ID NO: 6033 - DNA, 2364 bp, Shewanella sp. MR-7
  CDS (1)..(2364): transl_table=11
atgaaaaactcgactcccactttgcatgcgttcgggcgtttatcagcgctgtccttagcactgctacctttattacatgttaacgccgatgaattttcctatcccacactgttaccatcacagtcagattttggtggtgttgggctaatgcagatgccaacaggacgtatggcacctgaaggtgaatttaactttgccactacttacaacgatgactatcaacattttagcgcttcagtgcagctcttcccttggtttgaaaccactattcgctacaccttagtacaagacctgctttacagtagcgatcctagctttagtggtaatactaaatacacggataaagggatcgattttaagattcgtctactcgaagaaagtaactggctccctgaaacctccattggcgtgcgagactttggtggtacaggtttatttgatggtgaatttattgctgcgacaaagcgcgtcggtccactcgattttactctaggtataggttggggctatattggcaatagcggtaatctcacttccgataaaaaagatcttaattacaactgtgatagagatacttcttatgggggtaaaggtggcactgttgattatcagcgttggtttaaaggctgcgcggcactctttggtggcgttgaataccaaactccttgggagccacttcgcttaaaagtcgaatacgatggtaacgactatcaatcagatttcccagtggttcgtggtggcatagccatgccacaggacagcaaatttaactatggaatgctttatcgctttggggattggggcgatctacatttaagttatgagcgcggtaatacgtggacgctcggttttagtctgcaaacaaattttaataccttgtcgcagattaaacgtgatccagaggccgcaaaatataaaccgcttcctgctgcgccattaacgcatagtccgacagaaacatctagacaggcagacacgactaaatccgcacaagatattgaaaatgtaaaagctttatcagtaaaagatgacgaagcgcaaggttccgacctcttatctgcctcatatcaaaccatgcctgatactaaagtggattggaataaagttgctcaggatttacaaactattgctggttacgcaaacgcaaaaatttaccttgataatgaaagcattaccgttgtaggtgaacagacaaaattccgcgatagaaatgaagcgcataaaagagctgccaccattcttgccaacaatactgatgccaactttattaaagagtatcgactaattgagactcgttatagtcaacctataacggaaacccgcattgatgcccagaagtttgcccaagtcgcaagttatggctacctcaatgccaaagtcaccgatgcaactgtagtgagtatcccaagcttacctcatggacaactagtaaataatactgataaagattggttagataagcttagttttgatgtttcgcccaccatgtcccaatccttcggcggttccgaagggttttatatgtttagtattggaatgacaggtagtgcaagttaccgctttaccgataactttgagttttcaagctctctgtatcttaacctctacgataactttgataagtttttatacgaagttccacccgatggcactgacttaaaacgtgttcgcaccctagttcgtcaatatattcatgataatccagttcgggtgaataacctgcaactgacttggatggataatttaaccgacaacatttctttccaagcctacggcggctatttagaaatgatgtatggtggtgtgggcacagaggttctctatcgaccacttaacagtcaatgggccttcggtgtcgatatgaattatgtcaaacaacgtgatccagacagcatgctaggcttctttgatgatgagcatcaatttgactcactcactaaccgcccctatcgagtgcaaacgggtacaataacaggtcatgcatctgtctattatcaacctgactggttccccaataccttattaaggatcagtgcaggccagtatttagccgaggataaaggagtaacggttgatttctccaaacaattcgatagcggtgtgattgttggtgctttcgccactaagactaatctttcatcagatgagtatggtgagggcagttttactaaaggcttctacgtgtcgattccatttgacttgatgaccattaaatcaacccatagcagtgcgacaatcagttggatgccgctgacacgcgatggtggtcaaacattaggtcgcaagtacagtctatatgatgtaatggatgctagagatccttggttcacacgtgcaagcatcacaagtgagtctgtcaaataa

SEQ ID NO: 6034 - protein, 787 aa, Shewanella sp. MR-7
MKNSTPTLHAFGRLSALSLALLPLLHVNADEFSYPTLLPSQSDFGGVGLMQMPTGRMAPEGEFNFATTYNDDYQHFSASVQLFPWFETTIRYTLVQDLLYSSDPSFSGNTKYTDKGIDFKIRLLEESNWLPETSIGVRDFGGTGLFDGEFIAATKRVGPLDFTLGIGWGYIGNSGNLTSDKKDLNYNCDRDTSYGGKGGTVDYQRWFKGCAALFGGVEYQTPWEPLRLKVEYDGNDYQSDFPVVRGGIAMPQDSKFNYGMLYRFGDWGDLHLSYERGNTWTLGFSLQTNFNTLSQIKRDPEAAKYKPLPAAPLTHSPTETSRQADTTKSAQDIENVKALSVKDDEAQGSDLLSASYQTMPDTKVDWNKVAQDLQTIAGYANAKIYLDNESITVVGEQTKFRDRNEAHKRAATILANNTDANFIKEYRLIETRYSQPITETRIDAQKFAQVASYGYLNAKVTDATVVSIPSLPHGQLVNNTDKDWLDKLSFDVSPTMSQSFGGSEGFYMFSIGMTGSASYRFTDNFEFSSSLYLNLYDNFDKFLYEVPPDGTDLKRVRTLVRQYIHDNPVRVNNLQLTWMDNLTDNISFQAYGGYLEMMYGGVGTEVLYRPLNSQWAFGVDMNYVKQRDPDSMLGFFDDEHQFDSLTNRPYRVQTGTITGHASVYYQPDWFPNTLLRISAGQYLAEDKGVTVDFSKQFDSGVIVGAFATKTNLSSDEYGEGSFTKGFYVSIPFDLMTIKSTHSSATISWMPLTRDGGQTLGRKYSLYDVMDARDPWFTRASITSESVK

SEQ ID NO: 6035 - DNA, 2364 bp, Shewanella sp. MR-4
  CDS (1)..(2364): transl_table=11
atgaaaaactcgactcccactttgcatgcgttcgggcgtttatcagcgctgtccttagcactgctacctttattacatgttaacgccgatgaattttcctatcccacactgttaccatcacagtcagattttggtggtgttgggctaatgcagatgccaacaggacgtatggcacctgaaggtgaatttaactttgccactacttacaacgatgactatcaacattttagcgcttcagtgcagctcttcccttggtttgaaaccactattcgctacaccttagtacaagacctgctttacagtagcgatcctagctttagtggtaatactaaatacacggataaagggatcgattttaagattcgtctactcgaagaaagtaactggctccctgaaacctccattggcgtgcgagactttggtggtacaggtttatttgatggtgaatttattgctgcgacaaagcgcgtcggtccactcgattttactctaggtataggttggggctatattggcaatagcggtaatctcacttccgataaaaaagatcttaattacaactgtgatagagatacttcttatgggggtaaaggtggcactgttgattatcagcgttggtttaaaggctgcgcggcactctttggtggcgttgaatatcaaaccccttgggaacctttacgcttgaaagtcgaatacgatggtaacgactatcaatcagatttcccagtggttcgtggtgatatagccatgccacaggacagcaaatttaactatggaatgctttatcgctttggtgattggggcgatctacatttaagttatgagcgcggtaatacgtggacgctcggttttagtctgcaaacaaattttaataccttgtcgcagattaaacgtgatccagaggccgcaaaatataaaccgcttcctgctgcgccattaacgcatagtccgacagaaacatctagacatgcagacatgactaaatccgcacaagatattgaaaatataaaagctttatcagtaaaagatgacgaagtgcaaggctccgacctcttatctacctcatatcaaaccatgcccgatactaaagtggattggaataaagttgctcaggatttacaaactattgctggttacgcaaacgcaaaaatttaccttgataatgaaagcattaccgttgtaggtgaacagacaaaattccgcgatagaaatgaagcgcataaaagagctgccaccattcttgccaacaatactgatgccaactttattaaagagtatcgactaattgagactcgttatagtcaacctataacggaaacccgtattgatgcccagaagtttgcccaagtcgcaagttatggctacctcaatgccaaagtcaccgatgcaactgtagtgagtatcccaagcttacctcatggacaactagtcaataatactgataaagattggttagataagcttagctttgatgtttcgcccaccatgtcccaatccttcggcggttccgaagggttttatatgtttagtattggaatgacaggtagtgcaagttaccgctttaccgataactttgagttttcaagctctctgtatcttaacctctacgataactttgataagtttttatacgaagttccacccgatggcactgacttaaaacgtgttcgcaccctagttcgtcaatatattcatgataatccagttcgggtgaataacctgcaactgacttggatggataatttaaccgacaacatttctttccaagcctacggcggctatttagaaatgatgtatggtggtgtgggcacagaggttctctatcgaccacttaacagtcaatgggcttttggtatcgatgtgaattatgttaagcagcgcgatccagacagcatgctaggcttctttgatgatgagcatcaatttgactcactcactaaccgcccctatcgagtgcaaacgggtacaataacaggtcatgcatctgtctattatcaacctgactggttccccaataccttattaaggatcagtgcaggccagtatttagccgaggataaaggagtaacggttgatttctccaaacaattcgatagcggtgtgattgttggcgctttcgccactaagactaatctttcatcagatgagtatggtgagggcagttttactaaaggcttctacgtgtcgattccatttgacttgatgaccattaaatcaacccatagccgtgcgacaatcagttggatgccgctgacacgcgatggtggtcaaacattaggccgcaagtacagtctatatgatgtaatggatgctagagatccttggttcacacgtgcaagcatcacaagtgagtctgtcaaataa

SEQ ID NO: 6036 - protein, 787 aa, Shewanella sp. MR-4
MKNSTPTLHAFGRLSALSLALLPLLHVNADEFSYPTLLPSQSDFGGVGLMQMPTGRMAPEGEFNFATTYNDDYQHFSASVQLFPWFETTIRYTLVQDLLYSSDPSFSGNTKYTDKGIDFKIRLLEESNWLPETSIGVRDFGGTGLFDGEFIAATKRVGPLDFTLGIGWGYIGNSGNLTSDKKDLNYNCDRDTSYGGKGGTVDYQRWFKGCAALFGGVEYQTPWEPLRLKVEYDGNDYQSDFPVVRGDIAMPQDSKFNYGMLYRFGDWGDLHLSYERGNTWTLGFSLQTNFNTLSQIKRDPEAAKYKPLPAAPLTHSPTETSRHADMTKSAQDIENIKALSVKDDEVQGSDLLSTSYQTMPDTKVDWNKVAQDLQTIAGYANAKIYLDNESITVVGEQTKFRDRNEAHKRAATILANNTDANFIKEYRLIETRYSQPITETRIDAQKFAQVASYGYLNAKVTDATVVSIPSLPHGQLVNNTDKDWLDKLSFDVSPTMSQSFGGSEGFYMFSIGMTGSASYRFTDNFEFSSSLYLNLYDNFDKFLYEVPPDGTDLKRVRTLVRQYIHDNPVRVNNLQLTWMDNLTDNISFQAYGGYLEMMYGGVGTEVLYRPLNSQWAFGIDVNYVKQRDPDSMLGFFDDEHQFDSLTNRPYRVQTGTITGHASVYYQPDWFPNTLLRISAGQYLAEDKGVTVDFSKQFDSGVIVGAFATKTNLSSDEYGEGSFTKGFYVSIPFDLMTIKSTHSRATISWMPLTRDGGQTLGRKYSLYDVMDARDPWFTRASITSESVK

SEQ ID NO: 6037 - DNA, 2193 bp, Vibrio cholerae
  CDS (1)..(2193): transl_table=11
atgaaaactggccaccgccctcttttgaatacttcgctgtctttactcggcgtactgataagcagcgcattactcacaccacggcaagcttttgccgatgagtttagctacccacggctgcgccattcacaaactgactttggcggcacagggttaatgcaaatgcccagtgcccggatgttagaggaaggtgagctaaatcttgccatcaccaataatgatgattatctacactatgcaatttcgctgcagctgtttccatggctagaaaccacggtgcgttatacccaagtgcatgaattactgtacagcgatcaagccagtttcagtggtgataccaaatacaccgataaatcaattgatgccaagctgcgcctgtggcaagagagctattggctaccagagctttcgcttggcttgcgtgatatcggcggcaccggattatttgatggtgaatatctggtcgcgactaaacaagtgggaccactcgattttaccttaggttttggctggggctatctaggtaatcgcgccaactttagcggcgataaaatcagcagccaagactgcggacgtgatagtaactacggcggcaacggcggcctacttgatttggggcggatgttcactggttgtactgccctatttggtggcattgaataccaaaccccactcgcgccactgcgcttacagctggaatacgatggtaatgattaccgcagtgattttccggtaacacgcggccagcctgatgcaatgccggtcgccagcccatggaactttgggcttgcttatgcactgaccgactgggctgatttgcgggtcagttatcaacgtggcaataccttaactgcaggtttaacttttggcactaatcttgccaccctcaaacccacctggcttgatagccccgccccaacttaccaaccagtgccgagtaaagcagaactcagtgatgaagagtggcaacgcttaagccaagatgttgctaacattgccggctaccaaccggttgaaatttatcaagagcaagacagcgtggtgattaagggctctcaagtcaaataccgcgaccgcgagcaagctgagcatcgcgccgccacattacttgccaatacgggaattaatgcgcgctactatcgaattattgaaactagccaagatcaacccctaacggaaactcagctcaatagcgctgcattcaaacgtattattgatcatgattatcctaatgctcgattgtcggatgccaaacagcacaccgaccctgcgccgattcatggtgatttaaaagccgcgcgtaccgagcgctggaaatttggtttctcgccagtgttacaacaatcatttggtggcgcagaagatttttacctctatgcgatcggggtcaatgccaatgccagttacaagatgggcgatcattggcagctttccggcaccttgtatggcaacctaatcgacaactacgacaagttcaattataccgtaccgccagatggcaccgatttaaaacgggtaagaaccttatcacgccagtattttgaagagccgctacgcataagccacttgcaactgacctattttgatcgatggcagcatttttatactcaagcatatgctggatatcttgaaaccatgtttgccggtgtgggcagtgagctattgtaccggccattgggcaaaaattgggcggtggggattgatggtaactatgttaaacaacgtgacccaagctcagcctttggcttgtatgagcacgagcatcaatacgatgtagaaacagatgataattatcgcgtgcaaactggcacccttaccggtcatgccacgctgtattggcaaccgcaattttggtcgcttctggataatacgctactcaaagtcagcgctgggcgttatttgaccgaggatattggctttacggttgatttctcaaaacagtttgctagcggcgttgtcgccggtgcatttgccaccaaaaccgacctctcagcagaagagtttggcgaaggcagcttcacgaaaggcttctatatttctattccattggatttgatgacggttcgcccaagcactgagcgggttaatatttcttggctaccactgcaacgcgatggcggacaaatgctttcccgtcagtatggattatataaaatgaccgatgctagaagcccttggtatgaaaggttctag

SEQ ID NO: 6038 - protein, 730 aa, Vibrio cholerae
MKTGHRPLLNTSLSLLGVLISSALLTPRQAFADEFSYPRLRHSQTDFGGTGLMQMPSARMLEEGELNLAITNNDDYLHYAISLQLFPWLETTVRYTQVHELLYSDQASFSGDTKYTDKSIDAKLRLWQESYWLPELSLGLRDIGGTGLFDGEYLVATKQVGPLDFTLGFGWGYLGNRANFSGDKISSQDCGRDSNYGGNGGLLDLGRMFTGCTALFGGIEYQTPLAPLRLQLEYDGNDYRSDFPVTRGQPDAMPVASPWNFGLAYALTDWADLRVSYQRGNTLTAGLTFGTNLATLKPTWLDSPAPTYQPVPSKAELSDEEWQRLSQDVANIAGYQPVEIYQEQDSVVIKGSQVKYRDREQAEHRAATLLANTGINARYYRIIETSQDQPLTETQLNSAAFKRIIDHDYPNARLSDAKQHTDPAPIHGDLKAARTERWKFGFSPVLQQSFGGAEDFYLYAIGVNANASYKMGDHWQLSGTLYGNLIDNYDKFNYTVPPDGTDLKRVRTLSRQYFEEPLRISHLQLTYFDRWQHFYTQAYAGYLETMFAGVGSELLYRPLGKNWAVGIDGNYVKQRDPSSAFGLYEHEHQYDVETDDNYRVQTGTLTGHATLYWQPQFWSLLDNTLLKVSAGRYLTEDIGFTVDFSKQFASGVVAGAFATKTDLSAEEFGEGSFTKGFYISIPLDLMTVRPSTERVNISWLPLQRDGGQMLSRQYGLYKMTDARSPWYERF

SEQ ID NO: 6039 - DNA, 2097 bp, Escherichia coli
  CDS (1)..(2097): transl_table=11
atgaagaagaattcttatcttttaagctgcctggccattgccgtctccagtgcctgtcatgctgaagtattaacctacccggatccgctgggttcgtcgcaatcagactttggcggcacaggattgttgcagatgccaaatgcgcgcatcgcaccggaaggtgaattcagcgtcaactaccgggataacgatcaataccggttctactccacctccgtggcgctgttcccatggctggaaggcaccattcgttatacggatgtgcgcacacgcaaatatagccagtgggaagatttcagcggcgatcagtcatacaaagacaaatcattcgattttaaacttcgcctgtgggaagaaggttactggctaccgcaagtggcgtttggtaaacgtgatattgctggtacgggtctgtttgacggtgagtatctggtggccagcaagcaagcggggccatttgatttcaccctcgggatggcatggggctacgccggtaatgcgggcaatattaccaacccgttttgccgggtgagcgataaatattgtcatcgcgcagagtctcacgatgcgggcgatatcagctttagcgatatctttcgtggcccggcttccatctttggcggcattgagtatcaaacgccgtggaatcccctgcgtctgaaactcgaatacgatggaaacaattaccagaatgatttcgctggcaaactgcctcaggcaagccatttcaacgtcggcgcagtttatcgcgctgccagctgggcagatctcaacctgagttatgaacgcggtaacacgttgatgtttggcttcacgttacggaccaatttcaacgatctgcgccctgccctgcgcgatacgccaaaaccggcatatcaacctgcgcctgaatctgaaggattgcagtacaccacggtagcaaaccaacttaccgccctgaagtataacgcgggctttgacgcgccagaaattcagctacgcgataagacactgtatatgtctggtcagcaatacaaataccgtgactctcgtgaagcggtcgatcgtgccaaccggattctggtgaataacctgccgcaaggcgttgagaagattagcgtgacgcaaaagcgcgagcatatggcgatggtgactaccgaaaccgacgtagccagcctgcgcaaacagctggcaggtacagcgcctggtcaatcagagccactgcaacaacaacgtgttgaagctgaagatctttctgcctttggtcggggctaccgtattcgtgaagatcgctttagctactctttcaacccaacactttcacagtcgctgggcggcccggaagatttctatatgttccagctggggctgatgtccagtgcccgctactggtttaccgaccacctgctgcttgatggcggtattttcaccaatatttacaacaactacgacaagtttaagtcttcgctgttgcccgcggactctaccctgccccgcgtgcgcacgcatatccgtgactacgttcgcaatgacgtttatctcaacaacttgcaggcgaactattttgctgacttaggcaatggtttctatggccaggtgtatggcggttatctggaaacgatgtacgccggtgtcggttccgagctgctttatcgcccgctagatgcctgctgggcgctgggtgtggacgttaactacgtgaagcaacgtgactgggacaacatgatgcgtttcaccgattattccacgccaacaggtttcgtgacggcttactggaacccgccgacgctcaatggcgtactgatgaaacttagcgttgggcaatatctggcaaaagataaaggcgcaacgatcgacgtcgccaaacgctttgacagcggcgtggcggtaggggtatgggcggcaatcagtaacgtatctaaagatgactacggcgaaggcggctttagtaaaggtttttatatctcgattccattcgacttgatgaccattggacctaaccgcaaccgcgcggtggtttcgtggacaccattgacgcgtgatggtggacaaatgctgtcacgcaaataccagctctatccaatgacggcagagcgagaagtaccggttggacaataa

SEQ ID NO: 6040 - protein, 698 aa, Escherichia coli
MKKNSYLLSCLAIAVSSACHAEVLTYPDPLGSSQSDFGGTGLLQMPNARIAPEGEFSVNYRDNDQYRFYSTSVALFPWLEGTIRYTDVRTRKYSQWEDFSGDQSYKDKSFDFKLRLWEEGYWLPQVAFGKRDIAGTGLFDGEYLVASKQAGPFDFTLGMAWGYAGNAGNITNPFCRVSDKYCHRAESHDAGDISFSDIFRGPASIFGGIEYQTPWNPLRLKLEYDGNNYQNDFAGKLPQASHFNVGAVYRAASWADLNLSYERGNTLMFGFTLRTNFNDLRPALRDTPKPAYQPAPESEGLQYTTVANQLTALKYNAGFDAPEIQLRDKTLYMSGQQYKYRDSREAVDRANRILVNNLPQGVEKISVTQKREHMAMVTTETDVASLRKQLAGTAPGQSEPLQQQRVEAEDLSAFGRGYRIREDRFSYSFNPTLSQSLGGPEDFYMFQLGLMSSARYWFTDHLLLDGGIFTNIYNNYDKFKSSLLPADSTLPRVRTHIRDYVRNDVYLNNLQANYFADLGNGFYGQVYGGYLETMYAGVGSELLYRPLDACWALGVDVNYVKQRDWDNMMRFTDYSTPTGFVTAYWNPPTLNGVLMKLSVGQYLAKDKGATIDVAKRFDSGVAVGVWAAISNVSKDDYGEGGFSKGFYISIPFDLMTIGPNRNRAVVSWTPLTRDGGQMLSRKYQLYPMTAEREVPVGQ

SEQ ID NO: 6041 - DNA, 26 bp, Artificial sequence
  primer
atgaaaaaaagacatctgcttagctt

SEQ ID NO: 6042 - DNA, 23 bp, Artificial sequence
  primer
ttagcggaaattgacgctacggt

SEQ ID NO: 6043 - protein, 770 aa, Artificial sequence
  consensus sequence
  Variant (3)..(3): Xaa in position 3 is any amino acid
  Variant (8)..(8): Xaa in position 8 is any amino acid
  Variant (11)..(11): Xaa in position 11 is any amino acid
  Variant (13)..(13): Xaa in position 13 is any amino acid
  Variant (15)..(16): Xaa in position 15 to 16 is any amino acid
  Variant (18)..(20): Xaa in position 18 to 20 is any amino acid
  Variant (24)..(33): Xaa in position 24 to 33 is any amino acid
  Variant (35)..(39): Xaa in position 35 to 39 is any amino acid
  Variant (41)..(42): Xaa in position 41 to 42 is any amino acid
  Variant (44)..(45): Xaa in position 44 to 45 is any amino acid
  Variant (47)..(47): Xaa in position 47 is any amino acid
  Variant (49)..(49): Xaa in position 49 is any amino acid
  Variant (51)..(51): Xaa in position 51 is any amino acid
  Variant (55)..(55): Xaa in position 55 is any amino acid
  Variant (57)..(60): Xaa in position 57 to 60 is any amino acid
  Variant (62)..(66): Xaa in position 62 to 66 is any amino acid
  Variant (67)..(67): Xaa in position 67 is any or no amino acid
  Variant (70)..(72): Xaa in position 70 to 72 is any amino acid
  Variant (74)..(74): Xaa in position 74 is any amino acid
  Variant (77)..(78): Xaa in position 77 to 78 is any amino acid
  Variant (80)..(80): Xaa in position 80 is any amino acid
  Variant (82)..(82): Xaa in position 82 is any amino acid
  Variant (85)..(86): Xaa in position 85 to 86 is any amino acid
  Variant (88)..(91): Xaa in position 88 to 91 is any amino acid
  Variant (93)..(96): Xaa in position 93 to 96 is any amino acid
  Variant (98)..(98): Xaa in position 98 is any amino acid
  Variant (101)..(102): Xaa in position 101 to 102 is any amino acid
  Variant (109)..(109): Xaa in position 109 is any amino acid
  Variant (111)..(113): Xaa in position 111 to 113 is any amino acid
  Variant (115)..(115): Xaa in position 115 is any amino acid
  Variant (117)..(118): Xaa in position 117 to 118 is any amino acid
  Variant (119)..(123): Xaa in position 119 to 123 is any or no amino acid
  Variant (126)..(126): Xaa in position 126 is any amino acid
  Variant (129)..(130): Xaa in position 129 to 130 is any amino acid
  Variant (132)..(133): Xaa in position 132 to 133 is any amino acid
  Variant (137)..(137): Xaa in position 137 is any amino acid
  Variant (139)..(140): Xaa in position 139 to 140 is any amino acid
  Variant (143)..(152): Xaa in position 143 to 152 is any amino acid
  Variant (153)..(154): Xaa in position 153 to 154 is any or no amino acid
  Variant (156)..(156): Xaa in position 156 is any amino acid
  Variant (158)..(163): Xaa in position 158 to 163 is any amino acid
  Variant (164)..(165): Xaa in position 164 to 165 is any or no amino acid
  Variant (167)..(173): Xaa in position 167 to 173 is any amino acid
  Variant (175)..(175): Xaa in position 175 is any amino acid
  Variant (177)..(180): Xaa in position 177 to 180 is any amino acid
  Variant (184)..(184): Xaa in position 184 is any amino acid
  Variant (190)..(191): Xaa in position 190 to 191 is any amino acid
  Variant (197)..(197): Xaa in position 197 is any amino acid
  Variant (201)..(201): Xaa in position 201 is any amino acid
  Variant (203)..(203): Xaa in position 203 is any amino acid
  Variant (205)..(206): Xaa in position 205 to 206 is any amino acid
  Variant (208)..(215): Xaa in position 208 to 215 is any amino acid
  Variant (216)..(221): Xaa in position 216 to 221 is any or no amino acid
  Variant (223)..(224): Xaa in position 223 to 224 is any amino acid
  Variant (226)..(226): Xaa in position 226 is any amino acid
  Variant (228)..(229): Xaa in position 228 to 229 is any amino acid
  Variant (231)..(235): Xaa in position 231 to 235 is any amino acid
  Variant (236)..(236): Xaa in position 236 is any or no amino acid
  Variant (238)..(239): Xaa in position 238 to 239 is any amino acid
  Variant (246)..(246): Xaa in position 246 is any amino acid
  Variant (248)..(250): Xaa in position 248 to 250 is any amino acid
  Variant (252)..(253): Xaa in position 252 to 253 is any amino acid
  Variant (255)..(255): Xaa in position 255 is any amino acid
  Variant (259)..(266): Xaa in position 259 to 266 is any amino acid
  Variant (268)..(273): Xaa in position 268 to 273 is any amino acid
  Variant (274)..(282): Xaa in position 274 to 282 is any or no amino acid
  Variant (284)..(284): Xaa in position 284 is any amino acid
  Variant (286)..(298): Xaa in position 286 to 298 is any amino acid
  Variant (299)..(353): Xaa in position 299 to 353 is any or no amino acid
  Variant (355)..(357): Xaa in position 355 to 357 is any amino acid
  Variant (360)..(364): Xaa in position 360 to 364 is any amino acid
  Variant (366)..(375): Xaa in position 366 to 375 is any amino acid
  Variant (377)..(377): Xaa in position 377 is any amino acid
  Variant (379)..(381): Xaa in position 379 to 381 is any amino acid
  Variant (384)..(389): Xaa in position 384 to 389 is any amino acid
  Variant (392)..(393): Xaa in position 392 to 393 is any amino acid
  Variant (396)..(396): Xaa in position 396 is any amino acid
  Variant (398)..(418): Xaa in position 398 to 418 is any amino acid
  Variant (419)..(420): Xaa in position 419 to 420 is any or no amino acid
  Variant (422)..(469): Xaa in position 422 to 469 is any amino acid
  Variant (470)..(475): Xaa in position 470 to 475 is any or no amino acid
  Variant (477)..(479): Xaa in position 477 to 479 is any amino acid
  Variant (481)..(482): Xaa in position 481 to 482 is any amino acid
  Variant (485)..(485): Xaa in position 485 is any amino acid
  Variant (487)..(487): Xaa in position 487 is any amino acid
  Variant (490)..(493): Xaa in position 490 to 493 is any amino acid
  Variant (495)..(498): Xaa in position 495 to 498 is any amino acid
  Variant (500)..(504): Xaa in position 500 to 504 is any amino acid
  Variant (506)..(510): Xaa in position 506 to 510 is any amino acid
  Variant (512)..(515): Xaa in position 512 to 515 is any amino acid
  Variant (517)..(519): Xaa in position 517 to 519 is any amino acid
  Variant (525)..(531): Xaa in position 525 to 531 is any amino acid
  Variant (532)..(537): Xaa in position 532 to 537 is any or no amino acid
  Variant (539)..(539): Xaa in position 539 is any amino acid
  Variant (544)..(545): Xaa in position 544 to 545 is any amino acid
  Variant (547)..(547): Xaa in position 547 is any amino acid
  Variant (549)..(552): Xaa in position 549 to 552 is any amino acid
  Variant (553)..(553): Xaa in position 553 is any or no amino acid
  Variant (555)..(558): Xaa in position 555 to 558 is any amino acid
  Variant (561)..(572): Xaa in position 561 to 572 is any amino acid
  Variant (573)..(573): Xaa in position 573 is any or no amino acid
  Variant (575)..(575): Xaa in position 575 is any amino acid
  Variant (582)..(582): Xaa in position 582 is any amino acid
  Variant (584)..(585): Xaa in position 584 to 585 is any amino acid
  Variant (589)..(589): Xaa in position 589 is any amino acid
  Variant (591)..(591): Xaa in position 591 is any amino acid
  Variant (596)..(599): Xaa in position 596 to 599 is any amino acid
  Variant (602)..(602): Xaa in position 602 is any amino acid
  Variant (604)..(604): Xaa in position 604 is any amino acid
  Variant (606)..(606): Xaa in position 606 is any amino acid
  Variant (608)..(608): Xaa in position 608 is any amino acid
  Variant (610)..(610): Xaa in position 610 is any amino acid
  Variant (614)..(626): Xaa in position 614 to 626 is any amino acid
  Variant (627)..(652): Xaa in position 627 to 652 is any or no amino acid
  Variant (655)..(658): Xaa in position 655 to 658 is any amino acid
  Variant (660)..(661): Xaa in position 660 to 661 is any amino acid
  Variant (663)..(670): Xaa in position 663 to 670 is any amino acid
  Variant (671)..(675): Xaa in position 671 to 675 is any or no amino acid
  Variant (677)..(677): Xaa in position 677 is any amino acid
  Variant (679)..(679): Xaa in position 679 is any amino acid
  Variant (683)..(683): Xaa in position 683 is any amino acid
  Variant (685)..(685): Xaa in position 685 is any amino acid
  Variant (687)..(687): Xaa in position 687 is any amino acid
  Variant (689)..(692): Xaa in position 689 to 692 is any amino acid
  Variant (694)..(694): Xaa in position 694 is any amino acid
  Variant (696)..(696): Xaa in position 696 is any amino acid
  Variant (700)..(701): Xaa in position 700 to 701 is any amino acid
  Variant (703)..(704): Xaa in position 703 to 704 is any amino acid
  Variant (706)..(710): Xaa in position 706 to 710 is any amino acid
  Variant (712)..(715): Xaa in position 712 to 715 is any amino acid
  Variant (719)..(719): Xaa in position 719 is any amino acid
  Variant (721)..(721): Xaa in position 721 is any amino acid
  Variant (724)..(724): Xaa in position 724 is any amino acid
  Variant (726)..(726): Xaa in position 726 is any amino acid
  Variant (730)..(730): Xaa in position 730 is any amino acid
  Variant (732)..(732): Xaa in position 732 is any amino acid
  Variant (734)..(740): Xaa in position 734 to 740 is any amino acid
  Variant (743)..(745): Xaa in position 743 to 745 is any amino acid
  Variant (747)..(747): Xaa in position 747 is any amino acid
  Variant (756)..(756): Xaa in position 756 is any amino acid
  Variant (758)..(758): Xaa in position 758 is any amino acid
  Variant (761)..(762): Xaa in position 761 to 762 is any amino acid
  Variant (764)..(766): Xaa in position 764 to 766 is any amino acid
  Variant (768)..(769): Xaa in position 768 to 769 is any amino acid
SQXDFGGXGLXQXPXXRXXXEGEXXXXXXXXXXYXXXXXSXXLXXWXEXTXRYTXVXXXXYXXXXXXSGXXXYXDKXXDXKXRLXXEXXXXPXXXXGXRDXXGTGLFDXEXXXAXKXXXXXXXGPXDFXXGXXWGYXGXXGNXXXXXXXXXXXXCXRXXXXXXXXGXXXXXXXFXGXXXXFGGXEYQTPXXPLRLKXEYDXNXYXXDXXXXXXXXXXXXXXSXXNXGXXYXXXXXXDXXLSYERGXTXXXGXXLXTNFXXXXXXXXDXXXXXXXXXXXXXXXPXPXXXXXXXXXXXXXXXXXXXXXXXXXXXXXXXXXXXXXXXXXXXXXXXXXXXXXXXXXXXXXXXXXXXXLXXXAGXXXXXIXXXXXXXXXXGXQXXXRDXXXXXXRAXXILXNXXXXXXXXXXXXXXXXXXXXXXXTXXXXXXXXXXXXXXXXXXXXXXXXXXXXXXXXXXXXXXXXXXXXXXXXXXXXXXPXXXQXXGGXEXFYXXXXGXXXXAXXXXXDXXXXXGXXXXNXXXNYDKFXXXXXXXXXXXXXLXRVRTXXRXYXXXXXVXXXXLQXXXXXXXXXXXXXQXYGGYLEXMXXGVGXEXLYRPXXXXWAXGXDXNXVXQRDXXXXXXXXXXXXXXXXXXXXXXXXXXXXXXXXXXXXXXXTGXXXXYXXPXXXXXXXXXXXXXSXGXYLAXDXGXTXXXXKXFXSGVXXGXXAXXXXXSXXXXGEGXFXKGXYXSIPXDXMXXXXXXXRAXXXWXPLTRDGGQXLXRKXXLXXXTXXR

SEQ ID NO: 6044 - protein, 45 aa, Artificial sequence
  protein pattern
  Variant (2)..(2): Xaa in position 2 is any amino acid
  Variant (5)..(5): Xaa in position 5 is Ala, Gly or Ser
  Variant (6)..(6): Xaa in position 6 is Phe or Ile
  Variant (8)..(8): Xaa in position 8 is any amino acid
  Variant (10)..(10): Xaa in position 10 is Ala, Ile, Leu or Val
  Variant (13)..(14): Xaa in position 13 to 14 is any amino acid
  Variant (16)..(16): Xaa in position 16 is Asp, Gly or Ser
  Variant (17)..(18): Xaa in position 17 to 18 is any amino acid
  Variant (19)..(19): Xaa in position 19 is Ile, Leu or Met
  Variant (21)..(21): Xaa in position 21 is Asp, Glu or Gln
  Variant (22)..(22): Xaa in position 22 is any amino acid
  Variant (23)..(23): Xaa in position 23 is Ala or Ser
  Variant (24)..(24): Xaa in position 24 is Phe, Ile, Leu or Val
  Variant (26)..(26): Xaa in position 26 is any amino acid
  Variant (29)..(29): Xaa in position 29 is Phe or Ile
  Variant (30)..(30): Xaa in position 30 is Ala or Gly
  Variant (37)..(37): Xaa in position 37 is Ala, Gly or Ser
  Variant (39)..(40): Xaa in position 39 to 40 is any amino acid
  Variant (41)..(41): Xaa in position 41 is any or no amino acid
  Variant (43)..(43): Xaa in position 43 is any amino acid
  Variant (44)..(44): Xaa in position 44 is any or no amino acid
YXDKXXDXKXRLXXEXXXXPXXXXGXRDXXGTGLFDXEXXXAXXK

SEQ ID NO: 6045 - protein, 59 aa, Artificial sequence
  protein pattern
  Variant (2)..(2): Xaa in position 2 is any amino acid
  Variant (4)..(4): Xaa in position 4 is Gln or Arg
  Variant (7)..(7): Xaa in position 7 is Ala or Thr
  Variant (8)..(8): Xaa in position 8 is any amino acid
  Variant (10)..(10): Xaa in position 10 is any amino acid
  Variant (12)..(12): Xaa in position 12 is any amino acid
  Variant (14)..(14): Xaa in position 14 is Ile, Leu or Val
  Variant (15)..(15): Xaa in position 15 is Asp or Glu
  Variant (16)..(16): Xaa in position 16 is Phe, Ile, Leu or Val
  Variant (17)..(17): Xaa in position 17 is Ala or Ser
  Variant (18)..(18): Xaa in position 18 is Lys or Arg
  Variant (19)..(19): Xaa in position 19 is any amino acid
  Variant (21)..(21): Xaa in position 21 is any amino acid
  Variant (22)..(22): Xaa in position 22 is Asn or Ser
  Variant (24)..(24): Xaa in position 24 is any or no amino acid
  Variant (26)..(26): Xaa in position 26 is any amino acid
  Variant (27)..(27): Xaa in position 27 is any or no amino acid
  Variant (29)..(29): Xaa in position 29 is Ala, Gly or Val
  Variant (30)..(30): Xaa in position 30 is Phe, Trp or Tyr
  Variant (32)..(32): Xaa in position 32 is Ala or Thr
  Variant (33)..(33): Xaa in position 33 is any amino acid
  Variant (34)..(34): Xaa in position 34 is Ser or Thr
  Variant (35)..(35): Xaa in position 35 is Asp, Asn or Thr
  Variant (36)..(36): Xaa in position 36 is Ala, Ile, Leu or Val
  Variant (37)..(37): Xaa in position 37 is Gly or Ser
  Variant (38)..(38): Xaa in position 38 is any amino acid
  Variant (39)..(39): Xaa in position 39 is Ala, Asp or Glu
  Variant (40)..(40): Xaa in position 40 is Asp, Glu or Gln
  Variant (41)..(41): Xaa in position 41 is Phe or Tyr
  Variant (45)..(45): Xaa in position 45 is Asp, Gly or Ser
  Variant (47)..(47): Xaa in position 47 is Asp, Ser or Thr
  Variant (50)..(50): Xaa in position 50 is Phe, Ile, Leu or Val
  Variant (52)..(52): Xaa in position 52 is Ile, Leu or Val
  Variant (53)..(53): Xaa in position 53 is Ser or Thr
  Variant (54)..(54): Xaa in position 54 is Ile or Val
  Variant (56)..(56): Xaa in position 56 is Phe or Leu
  Variant (58)..(58): Xaa in position 58 is any amino acid
  Variant (59)..(59): Xaa in position 59 is Phe, Leu or Met
SXGXYLXXDXGXTXXXXXXFXXGXVXXGXXAXXXXXXXXXXGEGXFXKGXYXXXPXDXX

SEQ ID NO: 6046 - protein, 58 aa, Artificial sequence
  protein pattern
  Variant (5)..(5): Xaa in position 5 is Thr or Val
  Variant (8)..(8): Xaa in position 8 is Leu or Met
  Variant (10)..(10): Xaa in position 10 is any amino acid
  Variant (12)..(12): Xaa in position 12 is Asp, Asn, Ser or Thr
  Variant (13)..(13): Xaa in position 13 is Ala or Gly
  Variant (15)..(15): Xaa in position 15 is Phe, Ile or Met
  Variant (16)..(17): Xaa in position 16 to 17 is any amino acid
  Variant (21)..(21): Xaa in position 21 is Phe, Leu or Met
  Variant (22)..(22): Xaa in position 22 is Asn or Ser
  Variant (23)..(23): Xaa in position 23 is Phe, Leu or Val
  Variant (24)..(24): Xaa in position 24 is Ala, Gly, Asn or Ser
  Variant (25)..(27): Xaa in position 25 to 27 is any amino acid
  Variant (28)..(28): Xaa in position 28 is Asn or Ser
  Variant (29)..(29): Xaa in position 29 is Asp or Asn
  Variant (30)..(30): Xaa in position 30 is Asp, Glu or Gln
  Variant (32)..(32): Xaa in position 32 is any amino acid
  Variant (33)..(33): Xaa in position 33 is Phe, His or Tyr
  Variant (34)..(34): Xaa in position 34 is Phe or Tyr
  Variant (35)..(36): Xaa in position 35 to 36 is any amino acid
  Variant (37)..(37): Xaa in position 37 is Ser or Thr
  Variant (38)..(38): Xaa in position 38 is Leu or Val
  Variant (39)..(39): Xaa in position 39 is any amino acid
  Variant (40)..(40): Xaa in position 40 is Leu or Val
  Variant (41)..(41): Xaa in position 41 is Phe or Met
  Variant (42)..(42): Xaa in position 42 is Asp or Pro
  Variant (44)..(44): Xaa in position 44 is Phe or Leu
  Variant (46)..(46): Xaa in position 46 is Gly or Thr
  Variant (48)..(48): Xaa in position 48 is Ile, Leu or Val
  Variant (52)..(52): Xaa in position 52 is any amino acid
  Variant (53)..(53): Xaa in position 53 is Ala, Ile or Val
  Variant (54)..(54): Xaa in position 54 is any amino acid
  Variant (55)..(55): Xaa in position 55 is Asp, Glu or Thr
  Variant (56)..(57): Xaa in position 56 to 57 is any amino acid
  Variant (58)..(58): Xaa in position 58 is Phe or Tyr
DFGGXGLXQXPXXRXXXEGEXXXXXXXXXXYXXXXXXXXXXXWXEXTXRYTXXXXXXX

SEQ ID NO: 6047 - protein, 40 aa, Artificial sequence
  protein pattern
  Variant (2)..(2): Xaa in position 2 is any amino acid
  Variant (4)..(4): Xaa in position 4 is Ala or Gly
  Variant (9)..(9): Xaa in position 9 is any amino acid
  Variant (11)..(11): Xaa in position 11 is Phe or Tyr
  Variant (12)..(12): Xaa in position 12 is Ala or Gly
  Variant (14)..(14): Xaa in position 14 is Ala or Val
  Variant (16)..(16): Xaa in position 16 is Ala, Gly, Ser or Thr
  Variant (18)..(18): Xaa in position 18 is Phe, Leu or Val
  Variant (23)..(23): Xaa in position 23 is any amino acid
  Variant (24)..(24): Xaa in position 24 is Asp, Gly or Asn
  Variant (25)..(26): Xaa in position 25 to 26 is any amino acid
  Variant (29)..(29): Xaa in position 29 is Phe, Ile, Leu or Val
  Variant (31)..(31): Xaa in position 31 is Ala, Ile, Leu or Val
  Variant (33)..(33): Xaa in position 33 is any amino acid
  Variant (35)..(35): Xaa in position 35 is any amino acid
  Variant (36)..(36): Xaa in position 36 is Ile or Val
  Variant (37)..(37): Xaa in position 37 is any amino acid
QXYXGYLEXMXXGXGXEXLYRPXXXXWAXGXDXNXXXQRD

SEQ ID NO: 6048 - protein, 44 aa, Artificial sequence
  protein pattern
  Variant (2)..(3): Xaa in position 2 to 3 is any or no amino acid
  Variant (5)..(8): Xaa in position 5 to 8 is any amino acid
  Variant (9)..(10): Xaa in position 9 to 10 is any or no amino acid
  Variant (12)..(12): Xaa in position 12 is any amino acid
  Variant (14)..(14): Xaa in position 14 is any amino acid
  Variant (15)..(15): Xaa in position 15 is Ala, Pro or Thr
  Variant (16)..(16): Xaa in position 16 is Ala or Ser
  Variant (17)..(17): Xaa in position 17 is Phe, Ile or Leu
  Variant (18)..(18): Xaa in position 18 is Phe or Tyr
  Variant (21)..(21): Xaa in position 21 is Ile, Leu or Val
  Variant (22)..(22): Xaa in position 22 is Glu, Gln or Ser
  Variant (26)..(26): Xaa in position 26 is Leu or Pro
  Variant (27)..(27): Xaa in position 27 is any amino acid
  Variant (28)..(28): Xaa in position 28 is Ala, Asp, Glu, Asn or Gln
  Variant (29)..(29): Xaa in position 29 is any amino acid
  Variant (31)..(31): Xaa in position 31 is Arg or Ser
  Variant (32)..(32): Xaa in position 32 is Phe or Leu
  Variant (33)..(33): Xaa in position 33 is any amino acid
  Variant (34)..(34): Xaa in position 34 is Leu or Val
  Variant (37)..(37): Xaa in position 37 is Asp or Glu
  Variant (38)..(38): Xaa in position 38 is Ala, Gly or Ser
  Variant (39)..(39): Xaa in position 39 is any amino acid
  Variant (40)..(40): Xaa in position 40 is Asp or Asn
  Variant (42)..(43): Xaa in position 42 to 43 is any amino acid
  Variant (44)..(44): Xaa in position 44 is Asp or Glu
GXXDXXXXXXFXGXXXXXGGXXYQTXXXXLXXXXEYXXXXYXXX

SEQ ID NO: 6049 - protein, 28 aa, Artificial sequence
  protein pattern
  Variant (2)..(5): Xaa in position 2 to 5 is any or no amino acid
  Variant (7)..(7): Xaa in position 7 is any amino acid
  Variant (9)..(9): Xaa in position 9 is Ile, Leu or Val
  Variant (15)..(15): Xaa in position 15 is Ala or Gln
  Variant (16)..(16): Xaa in position 16 is any amino acid
  Variant (18)..(18): Xaa in position 18 is Asp, Gly, Asn or Ser
  Variant (20)..(20): Xaa in position 20 is any amino acid
  Variant (21)..(21): Xaa in position 21 is Phe or Tyr
  Variant (22)..(22): Xaa in position 22 is any amino acid
  Variant (24)..(24): Xaa in position 24 is any amino acid
  Variant (25)..(25): Xaa in position 25 is Asp, Glu, Pro or Ser
  Variant (26)..(26): Xaa in position 26 is Leu, Met or Val
  Variant (27)..(27): Xaa in position 27 is any amino acid
  Variant (28)..(28): Xaa in position 28 is Ala, Asp, Asn or Ser
RXXXXWXPXTRDGGXXLXRXXXLXXXXX

SEQ ID NO: 6050 - protein, 25 aa, Artificial sequence
  protein pattern
  Variant (2)..(3): Xaa in position 2 to 3 is any or no amino acid
  Variant (5)..(6): Xaa in position 5 to 6 is any or no amino acid
  Variant (9)..(9): Xaa in position 9 is Glu or Gln
  Variant (12)..(12): Xaa in position 12 is Asp or Asn
  Variant (14)..(16): Xaa in position 14 to 16 is any amino acid
  Variant (18)..(18): Xaa in position 18 is Phe, Leu or Val
  Variant (19)..(19): Xaa in position 19 is Asn, Ser or Thr
  Variant (20)..(20): Xaa in position 20 is Phe or Leu
  Variant (21)..(21): Xaa in position 21 is any amino acid
  Variant (24)..(24): Xaa in position 24 is Phe or Leu
  Variant (25)..(25): Xaa in position 25 is Ala, Asp, Glu or Asn
DXXLXXSYXRGXTXXXGXXXXTNXX

SEQ ID NO: 6051 - protein, 20 aa, Artificial sequence
  protein pattern
  Variant (3)..(3): Xaa in position 3 is Phe, Ile, Leu or Val
  Variant (5)..(5): Xaa in position 5 is any amino acid
  Variant (6)..(6): Xaa in position 6 is Ser or Thr
  Variant (7)..(7): Xaa in position 7 is Phe, Leu or Val
  Variant (9)..(9): Xaa in position 9 is Phe, Ile, Leu, Met or Val
  Variant (10)..(10): Xaa in position 10 is Ala or Gly
  Variant (14)..(14): Xaa in position 14 is any amino acid
  Variant (16)..(16): Xaa in position 16 is Ala, Asn, Gln or Thr
  Variant (17)..(17): Xaa in position 17 is any amino acid
  Variant (18)..(18): Xaa in position 18 is Ala, Asp or Gly
  Variant (20)..(20): Xaa in position 20 is Phe, Ile, Leu or Val
GPXDXXXGXXWGYXGXXXNX

SEQ ID NO: 6052 - protein, 18 aa, Artificial sequence
  protein pattern
  Variant (2)..(2): Xaa in position 2 is Gly or Asn
  Variant (3)..(3): Xaa in position 3 is Ala, Pro or Ser
  Variant (5)..(5): Xaa in position 5 is Ala, Asp, Glu, Gly or Asn
  Variant (8)..(8): Xaa in position 8 is Leu or Met
  Variant (9)..(9): Xaa in position 9 is Phe or Tyr
  Variant (10)..(10): Xaa in position 10 is any amino acid
  Variant (11)..(11): Xaa in position 11 is Ile, Leu or Val
  Variant (13)..(13): Xaa in position 13 is Phe, Leu, Met or Val
  Variant (14)..(14): Xaa in position 14 is any amino acid
  Variant (15)..(15): Xaa in position 15 is Ala, Gly, Ser or Thr
  Variant (16)..(16): Xaa in position 16 is Glu, Asn, Ser or Thr
  Variant (18)..(18): Xaa in position 18 is Asp, Asn, Arg or Ser
GXXEXFYXXXXGXXXXAX

SEQ ID NO: 6053 - protein, 20 aa, Artificial sequence
  protein pattern
  Variant (2)..(3): Xaa in position 2 to 3 is any amino acid
  Variant (4)..(5): Xaa in position 4 to 5 is any or no amino acid
  Variant (7)..(7): Xaa in position 7 is any amino acid
  Variant (12)..(13): Xaa in position 12 to 13 is any amino acid
  Variant (15)..(15): Xaa in position 15 is Asp, Glu or Gln
  Variant (17)..(18): Xaa in position 17 to 18 is any amino acid
  Variant (19)..(19): Xaa in position 19 is Asp, Glu, Asn, Ser or Thr
  Variant (20)..(20): Xaa in position 20 is Asp, Asn, Pro or Ser
DXXXXLXRVRTXXRXYXXXX

SEQ ID NO: 6054 - protein, 46 aa, Artificial sequence
  protein pattern
  Variant (2)..(4): Xaa in position 2 to 4 is any amino acid
  Variant (5)..(5): Xaa in position 5 is any or no amino acid
  Variant (8)..(9): Xaa in position 8 to 9 is any amino acid
  Variant (10)..(10): Xaa in position 10 is Ala, Asp, Asn or Gln
  Variant (11)..(11): Xaa in position 11 is Ala, Pro, Ser or Thr
  Variant (12)..(12): Xaa in position 12 is any amino acid
  Variant (13)..(13): Xaa in position 13 is Ile or Leu
  Variant (14)..(18): Xaa in position 14 to 18 is any amino acid
  Variant (19)..(19): Xaa in position 19 is Ala, Gln, Ser or Thr
  Variant (20)..(20): Xaa in position 20 is Ile, Leu or Val
  Variant (21)..(21): Xaa in position 21 is any amino acid
  Variant (22)..(22): Xaa in position 22 is Ile, Met or Val
  Variant (23)..(23): Xaa in position 23 is Ala, Ser, Thr or Val
  Variant (24)..(24): Xaa in position 24 is Ala or Gly
  Variant (25)..(25): Xaa in position 25 is Asp, Glu or Gln
  Variant (27)..(28): Xaa in position 27 to 28 is any amino acid
  Variant (29)..(29): Xaa in position 29 is Phe or Tyr
  Variant (30)..(30): Xaa in position 30 is Arg or Ser
  Variant (32)..(32): Xaa in position 32 is any amino acid
  Variant (33)..(33): Xaa in position 33 is any or no amino acid
  Variant (35)..(38): Xaa in position 35 to 38 is any amino acid
  Variant (39)..(39): Xaa in position 39 is any or no amino acid
  Variant (41)..(41): Xaa in position 41 is Ala or Asn
  Variant (42)..(42): Xaa in position 42 is any amino acid
  Variant (43)..(43): Xaa in position 43 is Ile or Val
  Variant (44)..(44): Xaa in position 44 is Leu or Val
  Variant (45)..(45): Xaa in position 45 is any amino acid
LXXXXAGXXXXXXXXXXXXXXXXXXQXXXXDXXEXXXXXAXXXXXN

SEQ ID NO: 6055 - protein, 14 aa, Artificial sequence
  protein pattern
  Variant (2)..(2): Xaa in position 2 is any amino acid
  Variant (3)..(3): Xaa in position 3 is Ala, Ile, Leu or Val
  Variant (4)..(5): Xaa in position 4 to 5 is any amino acid
  Variant (6)..(6): Xaa in position 6 is Asp, Gly or Asn
  Variant (7)..(8): Xaa in position 7 to 8 is any amino acid
  Variant (9)..(9): Xaa in position 9 is Asp or Asn
  Variant (11)..(11): Xaa in position 11 is Phe or Tyr
  Variant (12)..(12): Xaa in position 12 is Asp or Gly
GXXXXXXXXNXXKF

SEQ ID NO: 6056 - DNA, 1437 bp, Escherichia coli K12
  CDS (1)..(1437): transl_table=11
atgtcaaacaacattcgtatcgaagaagatctgttgggtaccagggaagttccagctgatgcctactatggtgttcacactctgagagcgattgaaaacttctatatcagcaacaacaaaatcagtgatattcctgaatttgttcgcggtatggtaatggttaaaaaagccgcagctatggcaaacaaagagctgcaaaccattcctaaaagtgtagcgaatgccatcattgccgcatgtgatgaagtcctgaacaacggaaaatgcatggatcagttcccggtagacgtctaccagggcggcgcaggtacttccgtaaacatgaacaccaacgaagtgctggccaatatcggtctggaactgatgggtcaccaaaaaggtgaatatcagtacctgaacccgaacgaccatgttaacaaatgtcagtccactaacgacgcctacccgaccggtttccgtatcgcagtttactcttccctgattaagctggtagatgcgattaaccaactgcgtgaaggctttgaacgtaaagctgtcgaattccaggacatcctgaaaatgggtcgtacccagctgcaggacgcagtaccgatgaccctcggtcaggaattccgcgctttcagcatcctgctgaaagaagaagtgaaaaacatccaacgtaccgctgaactgctgctggaagttaaccttggtgcaacagcaatcggtactggtctgaacacgccgaaagagtactctccgctggcagtgaaaaaactggctgaagttactggcttcccatgcgtaccggctgaagacctgatcgaagcgacctctgactgcggcgcttatgttatggttcacggcgcgctgaaacgcctggctgtgaagatgtccaaaatctgtaacgacctgcgcttgctctcttcaggcccacgtgccggcctgaacgagatcaacctgccggaactgcaggcgggctcttccatcatgccagctaaagtaaacccggttgttccggaagtggttaaccaggtatgcttcaaagtcatcggtaacgacaccactgttaccatggcagcagaagcaggtcagctgcagttgaacgttatggagccggtcattggccaggccatgttcgaatccgttcacattctgaccaacgcttgctacaacctgctggaaaaatgcattaacggcatcactgctaacaaagaagtgtgcgaaggttacgtttacaactctatcggtatcgttacttacctgaacccgttcatcggtcaccacaacggtgacatcgtgggtaaaatctgtgccgaaaccggtaagagtgtacgtgaagtcgttctggaacgcggtctgttgactgaagcggaacttgacgatattttctccgtacagaatctgatgcacccggcttacaaagcaaaacgctatactgatgaaagcgaacagtaa

SEQ ID NO: 6057 - protein, 478 aa, Escherichia coli K12
MSNNIRIEEDLLGTREVPADAYYGVHTLRAIENFYISNNKISDIPEFVRGMVMVKKAAAMANKELQTIPKSVANAIIAACDEVLNNGKCMDQFPVDVYQGGAGTSVNMNTNEVLANIGLELMGHQKGEYQYLNPNDHVNKCQSTNDAYPTGFRIAVYSSLIKLVDAINQLREGFERKAVEFQDILKMGRTQLQDAVPMTLGQEFRAFSILLKEEVKNIQRTAELLLEVNLGATAIGTGLNTPKEYSPLAVKKLAEVTGFPCVPAEDLIEATSDCGAYVMVHGALKRLAVKMSKICNDLRLLSSGPRAGLNEINLPELQAGSSIMPAKVNPVVPEVVNQVCFKVIGNDTTVTMAAEAGQLQLNVMEPVIGQAMFESVHILTNACYNLLEKCINGITANKEVCEGYVYNSIGIVTYLNPFIGHHNGDIVGKICAETGKSVREVVLERGLLTEAELDDIFSVQNLMHPAYKAKRYTDESEQ

SEQ ID NO: 6058 - DNA, 1726 bp, Brassica napus
  CDS (76)..(1554)
ataatttgccattttgtttgccctatcttctgcaactctccaccatctcgtctcccaaggcagaagaagaaccccatggcgatttacgtcgcatcacggcggctttccgccagaacaaccgcggcggcgctgcgttacgccactgctctgagatcttattcgacctcgttcagggaggagagggacaccttcggcccgatccaagttccttccgataagttgtggggagcccagacgcagagatcgctgcagaacttcgagatcggcggcgagcgcgagcgaatgcccgagccaatcgtccgcgcttttggcgtcttgaagaagtgcgctgccaaggttaacatggagtatggacttgatccaactattgggaaagcgattatggaagctgctcaggaagttgctgagggcaaactcaatgatcatttcccccttgttgtttggcaaactggtagtggcactcagagtaacatgaatgctaatgaggtcattgctaacagagcagctgagattcttggtcgcaaacgtggtgaaaaatgtgtccaccctaatgaccatgtcaacagatctcagtcttctaacgacactttccctaccgtcatgcacattgcagctgcaaccgagattaattcaaggctcatccctagtctgaaaactttgcataccactctcgactctaagtccttcgagtttaaagatattgtgaaaattggaagaactcacactcaagatgctactcctttgactctaggacaagaatttggtggctatgctactcaggttaagtatggacttaatcgagtcacatgcactctaccccgcctctatcagcttgcacaaggtggaactgcggttgggacaggattaaacaccaagaaagggtttgatgtaaagatagctgctgcagtagccgaagaaacaaacctgccgtttgtcactgcagaaaacaagtttgaagctctggctgcacatgatgcttgtgttgaaaccagtgggtcacttaacacaatcgccacatcgttgatgaagattgccaatgatatacgttttcttggaagtggtccaagatgtggtcttggtgaacttgttctgcctgaaaatgagccaggaagcagcatcatgcctgggaaggtaaatcctacacagtgtgaggccttgactatggtttgtgctcaggtaatgggcaaccatgtagctgtgacagttggtgagtcaaatggtcatttcgaactgaatgtatttaagccggtgattgcaagcgctctcttgcattccgtgaggttaatagcagatgcttcagcttcgtttgagaaaaactgtgtaaggggtattgaggccaacagagaaaggatctcaaagcttttgcacgagtctcttatgcttgtgacatcattgaatccgaaaatcggatatgacaatgctgcagcagttgccaagaaagctcacaaagaaggatcgacactgaaggaagcggctctgaagttaggtgttcttacttctgaagagtttgatacccttgttgttcccgagaagatgatcggtccctccgattgatgttgagccaaaagcttcattttgccatgttttattcttgataaagaggttgtaatgacaaataagcaaatccccagactcaaattttgcatttggaaggattcaattctttatgtatcacacagttacttttatgttgaataaaagagcaactatgcaaaaaaaaaaaaaa

SEQ ID NO: 6059 - protein, 492 aa, Brassica napus
MAIYVASRRLSARTTAAALRYATALRSYSTSFREERDTFGPIQVPSDKLWGAQTQRSLQNFEIGGERERMPEPIVRAFGVLKKCAAKVNMEYGLDPTIGKAIMEAAQEVAEGKLNDHFPLVVWQTGSGTQSNMNANEVIANRAAEILGRKRGEKCVHPNDHVNRSQSSNDTFPTVMHIAAATEINSRLIPSLKTLHTTLDSKSFEFKDIVKIGRTHTQDATPLTLGQEFGGYATQVKYGLNRVTCTLPRLYQLAQGGTAVGTGLNTKKGFDVKIAAAVAEETNLPFVTAENKFEALAAHDACVETSGSLNTIATSLMKIANDIRFLGSGPRCGLGELVLPENEPGSSIMPGKVNPTQCEALTMVCAQVMGNHVAVTVGESNGHFELNVFKPVIASALLHSVRLIADASASFEKNCVRGIEANRERISKLLHESLMLVTSLNPKIGYDNAAAVAKKAHKEGSTLKEAALKLGVLTSEEFDTLVVPEKMIGPSD

SEQ ID NO: 6060 - DNA, 1764 bp, Glycine max
  CDS (34)..(1521)
gttattctccggtggctccttccttccttcgccatggcgttctacgtgctctcgcgtcgtttatcagctggatccaactcaacgacgctcctcgccctgcgttttgcttcctcttccagatccttctcctcttccttcagggaagaaagagatacctttggacccattcaagttccctccgacaaattatggggagcacaaactcaaagatcgttgcagaacttcgacatcggtgggccccgcgaacgcatgcccgaacccatcattcgcgcttttggcgtcttgaagaaatgcgctgctaaggtgaacatggagtatggtcttgatcccatcgtgggagaagcaataatgcaagcggcacaagaagtagccgagggaaaactaaacgaacattttcctctcgttgtatggcaaactggcagtggcactcaaagtaacatgaatgctaacgaggttattgcaaaccgagcagcagagattcttggccataagcgcggtgggaagttcgtgcacccaaatgaccatgtcaatagatcgcagtcttctaatgatacattcccaaccgtaatgcacattgcagccacaatggaaataaactcaagactaattcccagcttgaaaaccttacacggtacactaaactcaaagtcaattgaattcaaagatattgtcaagattggacgcactcatactcaagatgcaacacctttgactcttgggcaagagtttagtgggtatactacacaagtgaagtacggtattgatcgagtaattggcactttgccgcacctgtatcagcttgcccagggtggtacagctgtagggactggattgaatacaaagaaggggtttgatgccaagatagcagcagcagtagctgaggaaacaaatctgccttttgttacggcagaaaataagtttgaggccttggctgcccatgatgcttttgttgaaactagtggagcacttaacactattgcggcttctttgatgaagattgctaatgatatacggttgttaggaagtggtccacgctgcggtcttggtgaactcattcttcctgaaaacgaaccaggaagtagtatcatgcctgggaaggttaaccctacccagtgtgaggctttgacaatggtgtgtgcccaggtcattggaaaccatgttgcagttacagtgggtggatcaaatggtcattttgagcttaatgtgttcaagccaatgactgccagttgtctcctgcattcgctgagactgcttggagattcatctgcttcctttgaaaagaattgtgtgagaggcattcaagctaatagggaaagaatttcaaaattactgcatgagtcactgatgctcgtcacatccttaaacccaaaaattggttatgacaaggcagcagcagttgccaagacagcccacaaagaggggtgtactcttaaggaagctgcattgaaactcggagtgctcagctctgaagattttgacaagcttgtggtacctgagaaaatgcttggaccgtctgattgactaactcgcaatgtttttgttctaataattccttgtttcatcatatcggctacatttgaggtagtatttttttagctacacccgttgattggtttgagaaatggcaacccaatgaacaataatttggcttcctcagttgatattcgcgagggaagagttcttccaaatttgtaacgagacaatgtattgcagaaatttactgagccaaataaagggaaattttttattcaaaaaaaaaaaaaa

SEQ ID NO: 6061 - protein, 495 aa, Glycine max
MAFYVLSRRLSAGSNSTTLLALRFASSSRSFSSSFREERDTFGPIQVPSDKLWGAQTQRSLQNFDIGGPRERMPEPIIRAFGVLKKCAAKVNMEYGLDPIVGEAIMQAAQEVAEGKLNEHFPLVVWQTGSGTQSNMNANEVIANRAAEILGHKRGGKFVHPNDHVNRSQSSNDTFPTVMHIAATMEINSRLIPSLKTLHGTLNSKSIEFKDIVKIGRTHTQDATPLTLGQEFSGYTTQVKYGIDRVIGTLPHLYQLAQGGTAVGTGLNTKKGFDAKIAAAVAEETNLPFVTAENKFEALAAHDAFVETSGALNTIAASLMKIANDIRLLGSGPRCGLGELILPENEPGSSIMPGKVNPTQCEALTMVCAQVIGNHVAVTVGGSNGHFELNVFKPMTASCLLHSLRLLGDSSASFEKNCVRGIQANRERISKLLHESLMLVTSLNPKIGYDKAAAVAKTAHKEGCTLKEAALKLGVLSSEDFDKLVVPEKMLGPSD

SEQ ID NO: 6062 - DNA, 1860 bp, Glycine max
  CDS (135)..(1622)
gctgaacaaaaatactagactattcatttggggtccaacttggaagaagactgcggaatcgcgtatcctgattggtcagacaagtgttatgctccggtgactccttccttcgccacccccactcaaattcaaccatggcgttgtacgtgctctcgcgtcgtttatcagctggatccaactcaaccacgctcctcgccttgcgttttgtttcctctaccagatcctactcctcttccttcagggaagaaagagatacctttggagccattcaagttccctccgagaaattatggggagcacaaactcaaagatcgttgcagaacttcgatatcggtgggccccgcgaacgcatgcccgaacccatcattcgcgcctttggcgtcttgaagaaatgcgctgctaaggtgaacatggagtatggtcttgatcccgccgttggaaaagcgattatgcaagcggcacaagaagtggccgagggaaaactaaacgaccattttcctctcgttgtatggcaaactggcagtggcactcaaagtaacatgaatgctaacgaggttattgcaaaccgagcagcagagattctttggcataagcggggtgggaagttagtgcacccaaatgaccatgtcaatagatcacagtcttcaaatgatacattcccaactgtaatgcacattgcagccgcaatggaaataaactcaagactaattcccagcctgaaaaccttacatggtacactaaactcaaagtcaattgaattcaaagatattgtcaagattggacgcactcatactcaagatgcaacacctttgactcttggacaagagtttagtgggtatactacacaagtgaagtatggtattgatagagtaattggcactttgccgcacatgtatcagcttgcccagggtgggacagctgtagggactggattgaatacaaagaaggggtttgatgccaaaatagcagcagcagtagctgaggaaaccaatctgccttttgttacggcagaaaataagtttgaggccttggctgcccatgatgcttttgttgaaactagtggagcccttaacactattgcggcttctttgatgaagattgctaatgacatacggttgttaggaagtggtccacgctgcggtcttggtgaactcattcttcctgaaaacgaaccagggagcagtatcatgcctgggaaggttaaccctacccagtgtgaggctttgacaatggtgtgtgcccaggtcataggaaaccatgttgcagttacagtgggtggatcaaatggtcattttgagcttaatgtgttcaagccaatgattgccagttgtctcctgcattcactgagactgcttggagattcatctgcttcctttgaaaagaattgcgtgagaggcattcaagctaacagggaaagaatttcaaaattactgcatgagtcactaatgcttgtcacatccttaaacccgaaaattggttatgacaaggcagcagcagttgccaagacagcccacaaagaggggtgtactcttaaggaagctgcattgaaactcggagtgctcagctctgaagattttgacaagcttgtggtacctgagaaaatgcttggaccatctgattgactggctcgtaatgttttgttctaattattccttgttttatcatcggctacattgaggtagtattttttagccacacccgttgataggtttgagaaatggcaatccaatgaacaataatttggcttcctcagttgatattcgcgagggaagagctcttccaaatttgtaatgagacaatgtattgcagaaatttactgacccaaataaagggaaaatttgtattcaaaaaaaaaaaaaa

SEQ ID NO: 6063 - protein, 495 aa, Glycine max
MALYVLSRRLSAGSNSTTLLALRFVSSTRSYSSSFREERDTFGAIQVPSEKLWGAQTQRSLQNFDIGGPRERMPEPIIRAFGVLKKCAAKVNMEYGLDPAVGKAIMQAAQEVAEGKLNDHFPLVVWQTGSGTQSNMNANEVIANRAAEILWHKRGGKLVHPNDHVNRSQSSNDTFPTVMHIAAAMEINSRLIPSLKTLHGTLNSKSIEFKDIVKIGRTHTQDATPLTLGQEFSGYTTQVKYGIDRVIGTLPHMYQLAQGGTAVGTGLNTKKGFDAKIAAAVAEETNLPFVTAENKFEALAAHDAFVETSGALNTIAASLMKIANDIRLLGSGPRCGLGELILPENEPGSSIMPGKVNPTQCEALTMVCAQVIGNHVAVTVGGSNGHFELNVFKPMIASCLLHSLRLLGDSSASFEKNCVRGIQANRERISKLLHESLMLVTSLNPKIGYDKAAAVAKTAHKEGCTLKEAALKLGVLSSEDFDKLVVPEKMLGPSD

SEQ ID NO: 6064 - DNA, 1770 bp, Arabidopsis thaliana
  CDS (84)..(1559)
gtcgccacgcgccgacttgatccgtcgtcttctctcagtctccatctccgtcttccaagttttactgtcaggcagaagaatccatgtcgatttacgtcgcgtcggcactctccggcggaacaactgtgacggcgctgcgttatgccacctctctgagatcttattcgacctcgtttagggaggagagggacaccttcgggccgattcaagttccttccgataaattgtggggagcccagacgcagagatcgctgcagaacttcgaaatcggtggtgagcgcgagcgcatgcctgaaccaattgtccgcgcttttggcgtcttgaagaaatgcgctgccaaggttaacatggaatacggtcttgatccgacgattgggaaagcaattatgcaagctgctcaggaagtagctgagggaaagctcaatgatcatttcccccttgttgtctggcaaactggtagtgggactcagagtaatatgaatgctaatgaggtcattgctaatagagcagctgagattcttggtcgcaaacgtggtgagaaatgtgtgcacccaaatgaccatgtgaacagatcacaatcttctaacgacacttttcctaccgtcatgcacattgcagctgcaaccgagattaattcgaggctcatccctagtttaaaaactttgcatcgcactttggaatctaagtccttcgagttcaaagatattgtgaaaattggaagaactcacactcaagatgctacacctttgacactaggacaggaatttggtggctatgctactcaagttaagtacggactaaatagagtcacctgcactcttcctcgcctctatcagcttgcacaaggtggaactgcggttgggacaggattaaacactaagaaagggtttgatgtaaagatagctgctgcagtagctgaagaaacaaacttgccatttgtcactgcagaaaacaagtttgaagctctggctgcacacgatgcttgtgttgaaaccagtgggtcacttaacacaatcgccacatcgctgatgaagatcgccaatgatatacgttttcttggaagtggcccaagatgtggtcttggtgaacttgtactacctgaaaatgagccaggaagcagtatcatgcctgggaaggtaaatcctacacagtgtgaggccttgactatggtttgtgcacaggttatgggaaaccatgtagctgtgacagttggtgggtcaaatggtcatttcgaattgaatgtattcaagccggtgacgtcgagtgctcttttacattccgtcagattaatagcagatgcttcagcttcgttcgagaaaaactgtgtgaggggcattgaggccaacagagaaaggatctcaaagctattgcacgagtctcttatgcttgtgacatcattgaatcggaaaatcgggtgtgacaatgctgcagcagttgccaagaaagctcacaaagaaggatgtacattgaaggaagcggctctgaatttaggcgtgcttactgcggaagagtttgatacacttgttgttcctgagaagatgattggtccctccgattgatagttgtttttggagccaaagcttcaagtaccattattcttctgatgcttttatttaggttataataaaaatgagcaaatccagaaacaattcaaattttcttgggagggcaacattgttcttcatcttacggctaaactatgatcttctttatgtatcaattttttttttgtgttgaataagagagtgagtactcagcgagaagaatttc

SEQ ID NO: 6065 - protein, 491 aa, Arabidopsis thaliana
MSIYVASALSGGTTVTALRYATSLRSYSTSFREERDTFGPIQVPSDKLWGAQTQRSLQNFEIGGERERMPEPIVRAFGVLKKCAAKVNMEYGLDPTIGKAIMQAAQEVAEGKLNDHFPLVVWQTGSGTQSNMNANEVIANRAAEILGRKRGEKCVHPNDHVNRSQSSNDTFPTVMHIAAATEINSRLIPSLKTLHRTLESKSFEFKDIVKIGRTHTQDATPLTLGQEFGGYATQVKYGLNRVTCTLPRLYQLAQGGTAVGTGLNTKKGFDVKIAAAVAEETNLPFVTAENKFEALAAHDACVETSGSLNTIATSLMKIANDIRFLGSGPRCGLGELVLPENEPGSSIMPGKVNPTQCEALTMVCAQVMGNHVAVTVGGSNGHFELNVFKPVTSSALLHSVRLIADASASFEKNCVRGIEANRERISKLLHESLMLVTSLNRKIGCDNAAAVAKKAHKEGCTLKEAALNLGVLTAEEFDTLVVPEKMIGPSD

SEQ ID NO: 6066 - DNA, 1512 bp, Arabidopsis thaliana
  CDS (1)..(1479)
atgtcgatttacgtcgcgtcgcgacggctctccggcggaacaactgtgacggcgctgcgttatgccacctctctgagatcttattcgacctcgtttagggaggagagggacaccttcgggccgattcaagttccttccgataaattgtggggagcccagacgcagagatcgctgcagaacttcgaaatcggtggtgagcgcgagcgaatgcctgaaccaattgtccgcgcttttggcgtcttgaagaaatgcgctgccaaggttaacatggaatacggtcttgatccgacgattgggaaagcaattatgcaagctgctcaggaagtagctgagggaaagctcaatgatcatttcccccttgttgtctggcaaactggtagtgggactcagagtaatatgaatgctaatgaggtcattgctaatagagcagctgagattcttggtcgcaaacgtggtgagaaatgtgtgcacccaaatgaccatgtgaacagatcacaatcttctaacgacacttttcctaccgtcatgcacattgcagctgcaaccgagattaattcgaggctcatccctagtttaaaaactttgcatagcactttggaatctaagtccttcgagttcaaagatattgtgaaaattggaagaactcacactcaagatgctacacctttgacactaggacaagaatttggtggctatgctactcaagttaagtatggactaaatagagtcacctgcactcttcctcgcctctatcagcttgcacaaggtggaactgcggttgggacaggattaaacactaagaaagggtttgatgtaaagatagctgctgcagtagctgaagaaacaaacttgccatttgtcactgcagaaaacaagtttgaagctctggctgcacacgatgcttgtgttgaaaccagtgggtcacttaacacaatcgccacatcgctgatgaagatcgccaatgatatacgttttcttggaagtggcccaagatgtggtcttggtgaacttgtactacctgaaaatgagccaggaagcagtatcatgcctgggaaggtaaatcctacacagtgtgaggccttgactatggtttgtgcacaggttatgggaaaccatgtagctgtgacagttggtgggtcaaatggtcatttcgaattgaatgtattcaagccggtgatcgcgagtgctcttttacattccgtcagattaatagcagatgcttcagcttcgttcgagaaaaactgtgtgaggggcattgaggccaacagagaaagaatctcaaagctattgcacgagtctcttatgcttgtgacatcattgaatccgaaaatcgggtatgacaatgctgcagcagttgccaagaaagctcacaaagaaggatgtacattgaaggaagcggctctgaatttaggcgtgcttactgcggaagagtttgatacacttgttgttcctgagaagatgattggtccctccgattgatagttgtttttggagccaaagcttcaagtacca

SEQ ID NO: 6067 - protein, 492 aa, Arabidopsis thaliana
MSIYVASRRLSGGTTVTALRYATSLRSYSTSFREERDTFGPIQVPSDKLWGAQTQRSLQNFEIGGERERMPEPIVRAFGVLKKCAAKVNMEYGLDPTIGKAIMQAAQEVAEGKLNDHFPLVVWQTGSGTQSNMNANEVIANRAAEILGRKRGEKCVHPNDHVNRSQSSNDTFPTVMHIAAATEINSRLIPSLKTLHSTLESKSFEFKDIVKIGRTHTQDATPLTLGQEFGGYATQVKYGLNRVTCTLPRLYQLAQGGTAVGTGLNTKKGFDVKIAAAVAEETNLPFVTAENKFEALAAHDACVETSGSLNTIATSLMKIANDIRFLGSGPRCGLGELVLPENEPGSSIMPGKVNPTQCEALTMVCAQVMGNHVAVTVGGSNGHFELNVFKPVIASALLHSVRLIADASASFEKNCVRGIEANRERISKLLHESLMLVTSLNPKIGYDNAAAVAKKAHKEGCTLKEAALNLGVLTAEEFDTLVVPEKMIGPSD

SEQ ID NO: 6068 - DNA, 2014 bp, Zea mays
  CDS (30)..(1526)
tcgctgtcgacgatttcgtcccacccgagatggcgatggctctgcgccgccttgcgggcgtgtccggatcgccgtcggcctcctctgccgcggccacggtgctactccggtcggcgctgacccgcccgatctccaccggcttccgcgaggagcgcgacaccttcggtcccatccaagtccccaacgacaagctgtggggcgcgcagacgcagagatcgctgcagaactttgacattggcggggagcgtgagaggatgcccgttcccatcatccgtgcctttggcgtgctaaaaaagtgcgccgctaaggtgaatatggactatggccttgatccaacaatagggaaggccataatacaggcagctgaggaggtcgcagagggaaagttggatgatcacttcccacttgttatctggcaaactggcagtggcacacaaagcaacatgaatgccaatgaggtaattgcaaatagggcatctgagatccttggacacaagcgcggtgagaagtttgtgcacccaaatgaccatgtgaataggtcacaatcttcaaatgatacatttcccactgtaatgcatatagcgacggccgttgagatacattcgaggtttatcccaagtttgcaacagttgcatgattcacttcattcgaaaactattgagtttaaagacataattaaaattggacgtacacatacccaagatgccaccccattgactcttggccaagaattcagtggctacactacacaggtcaaatatggaattgaccgcattaattgtacattacctcggatgtaccagcttgctcaaggtggaactgcagttggaactggcttgaacaccaagaaaggatttgatgccaaaatagctgctgcagtggctgaggaaacaaacctaccctttgtgacagcagagaacaagtttgaagctttggcagcacatgacgcttttgttgagagcagtggtgccgtaaatacaatttctgcatctcttatgaagatagcaaacgacatacgtttgctaggaagtggtcctcggtgtggtcttggtgaactaatcctaccagaaaatgagcctgggagcagcattatgcctgggaaagttaatccaacccagtgtgaggctctgacaatggtttgtgcacaggttatgggtaatcatgttggtgttacaattggtggtgccaatgggcattttgaactgaatgtttttaagccaatgatcgcagccggattacttcgatcattgaggttgttaggggatgcatccgtgtcctttgagaaaaattgtgtcaggggaattcaagcaaaccacaagagaatttcacaacttttgcatgagtctctgatgttagtgacatctttgaaccctaaaattggctatgacaatgctgcagctgttgctaagaaagcccacaaagaaggaaccacgttgaaggaagctgcattagaccttggagtattaacggagcaagaattccatgagcttgtcgtcccggagaaaatgattggtccttctgattgataaccccatgttcactatgtttctttgaagcattcaggttgccacatccgcgagttctggtggccctgtgtttccaagttaatgattctagcgcacccataaataaagcaaataatttttcatatggtcattaggtcctcaccgtaccgcactagagaaatgatttttgcatggcggatggtatctgagaaaacagttgtattcttgttcaaatagggagcagtgcactttgattcatgaggcgccttccattatcttggcatcagtcaaccttttcttgccaagtagctagtgctatgtaacaagtgacatggcaaccatgtatagaaattatttgcatgggtttgtgttcttgccaggtagctaatgttatgtaataagtgacaaggaaacaatggcatgaattatttgcattgggtttaaaaaaaaaaaaaaaaaaaaaaaaaaaaaaaaaaaataaaaaaaaaaaaaaaagagaccgacacgca

SEQ ID NO: 6069 - protein, 498 aa, Zea mays
MAMALRRLAGVSGSPSASSAAATVLLRSALTRPISTGFREERDTFGPIQVPNDKLWGAQTQRSLQNFDIGGERERMPVPIIRAFGVLKKCAAKVNMDYGLDPTIGKAIIQAAEEVAEGKLDDHFPLVIWQTGSGTQSNMNANEVIANRASEILGHKRGEKFVHPNDHVNRSQSSNDTFPTVMHIATAVEIHSRFIPSLQQLHDSLHSKTIEFKDIIKIGRTHTQDATPLTLGQEFSGYTTQVKYGIDRINCTLPRMYQLAQGGTAVGTGLNTKKGFDAKIAAAVAEETNLPFVTAENKFEALAAHDAFVESSGAVNTISASLMKIANDIRLLGSGPRCGLGELILPENEPGSSIMPGKVNPTQCEALTMVCAQVMGNHVGVTIGGANGHFELNVFKPMIAAGLLRSLRLLGDASVSFEKNCVRGIQANHKRISQLLHESLMLVTSLNPKIGYDNAAAVAKKAHKEGTTLKEAALDLGVLTEQEFHELVVPEKMIGPSD

SEQ ID NO: 6070 - DNA, 1500 bp, Arabidopsis thaliana
  CDS (1)..(1500)
atggccgctttgacaatgcagtttgaaggagagaagaaaaacgtatccgaagttgcagacgtaaccctcaagcaagaagatgaacaacaagaacgtagatcttattcgacgccgtttagggaagagagagacacctttggcccgatccaagttccttccgataaattatggggagcacagacgcagagatcgcttcagaacttcgagattggtggtgaccgcgagcgaatgcccgaaccaatcgtccgagcttttggtgtcttgaagaaatgtgctgccaaggttaacatggagtatggtcttgatccaatgattggggaagccataatggaagctgcacaagaagtagcagaaggaaagctcaatgatcatttccctcttgttgtatggcaaactggtagtgggacgcagagtaatatgaatgctaatgaggtcattgccaatagagcagctgagattcttggtcacaaacgtggtgaaaaaattgtgcacccaaatgaccatgtgaacagatcacaatcttctaatgacacttttccaactgtcatgcacattgcagctgcaaccgagattacttcgaggctaatccctagtttgaaaaatttgcatagctctttggaatctaagtccttcgagtttaaagatatagtgaaaatcggaagaactcatactcaagatgctacacctttgacattaggacaagaatttggtggctatgctactcaagttgagtatggacttaatagagtcgcatgtactctaccccgcatctatcagcttgcacaaggtggaactgctgttgggaccggattaaacactaagaaagggtttgatgtaaagatcgctgctgcagtagctgaagaaacaaacttgccattcgtcaccgcagaaaacaagtttgaagctctggctgcacacgatgcttgtgttgaaacaagtggatctcttaacacaatcgccacatcattgatgaagattgccaatgatatacgttttcttggaagtggtccaagatgtggtcttggtgaactttctctgcctgagaatgaaccaggaagcagtattatgcctggaaaggtaaatcctacacagtgtgaggccttgactatggtttgtgctcaagttatgggaaaccatgtagccgtgacaattggtgggtcgaatggtcattttgaattgaatgtattcaagccggttatcgcaagcgctctcttacattccattagactaatagcagatgcttcagcttcatttgagaaaaactgtgttagaggcattgaggccaacagagaaaggatctcaaagctattgcacgagtctcttatgcttgtgacatcattgaatcctaaaattggctatgacaatgctgcagcagtagccaaaagagctcacaaagaaggatgcacattaaagcacgcagctatgaagttaggtgttcttacttcggaagagtttgatactcttgttgttcccgagaagatgattggtccatctgattaa

SEQ ID NO: 6071 - protein, 499 aa, Arabidopsis thaliana
MAALTMQFEGEKKNVSEVADVTLKQEDEQQERRSYSTPFREERDTFGPIQVPSDKLWGAQTQRSLQNFEIGGDRERMPEPIVRAFGVLKKCAAKVNMEYGLDPMIGEAIMEAAQEVAEGKLNDHFPLVVWQTGSGTQSNMNANEVIANRAAEILGHKRGEKIVHPNDHVNRSQSSNDTFPTVMHIAAATEITSRLIPSLKNLHSSLESKSFEFKDIVKIGRTHTQDATPLTLGQEFGGYATQVEYGLNRVACTLPRIYQLAQGGTAVGTGLNTKKGFDVKIAAAVAEETNLPFVTAENKFEALAAHDACVETSGSLNTIATSLMKIANDIRFLGSGPRCGLGELSLPENEPGSSIMPGKVNPTQCEALTMVCAQVMGNHVAVTIGGSNGHFELNVFKPVIASALLHSIRLIADASASFEKNCVRGIEANRERISKLLHESLMLVTSLNPKIGYDNAAAVAKRAHKEGCTLKHAAMKLGVLTSEEFDTLVVPEKMIGPSD

SEQ ID NO: 6072 - DNA, 1865 bp, Solanum tuberosum
  CDS (66)..(1547)
ctcagactcagcatcaacattcccaccaactcgcatacaggcggcggcgcattgactgctgagatatggcgatgttaaatgcggctcgtcgattatcagctggatcagctttatcagattcactgcgttatacttcttcctggaggtttttctctacgtctttcagggaggaaagagatacgtttggtcctattctcgttccatcggacaagttatggggggctcaaactcaaagatcattgcagaattttgaaattgggggtgatcgtgaaagaatgcctgagccaatcatacgtgcattcggtattattaaaaagtgtgcagccaaggtgaacatggactatggccttgaccaatctattggaaaagcaataatgcaagcagctgaagaggttgcagaaggaaaattaaatgaccattttcctttggtggtttggcagactggcagtggcactcaaagtaacatgaatgctaacgaggttattgcaaatcgagcagctgaaatacttggccataaccgcggagacaaacatgtgcatccaaatgaccatgtaaataaatcgcaatcttcaaatgatactttctctacggtgatgcacattgctgcagcaatggagctaaataaaagattagtaccaaaccttgaaacagttgcatactcactaaattcaaagtcagtcgaattcaaggacattatcaagattgggcgaacccacacacaagatgcaacacctttgactcttggacaagagtttagtggctatgcaactcaagtgaaatatggaatcgatagagtcttatgcacgcttcagcgcatgtatcagctcgcacaagggggcacagcagtagggacaggattgaatacaaagaaagggtttgacataaaaattgctgcagcagttgcagaggaaacaaatttcccatttgttacagctgaaaacaagtttgaagcattggctgctcatgatgcatttgctgaaactagtggagccttaaataccctggctgcttcccttatgaagattgggaatgatatacgcttcttgggaagtggtccccgctgtggtcttggcgagctcagtcttcctgaaaatgaacccggaagcagtataatgcctggcaaggtaaatcctactcagtgtgaggctctcaccatggtctgtgctcaggttatggggaatcatgtggctgttactgttggtgcatcaaatggccattttgagctgaatgtcttcaagccgatgattgctaatgctctcctacattcagtaagattgctaggcgatgcatctgcttcctttgaaaagaattgtgtgagggatatccaagctaacagagacagaattgctaaattgttgcacgagtcactcatgctcgttacatgtttgaacccaaaaattggttatgataatgctgctgcagttgccaagaaagcccacaaggagggaaccagtttgaaggaagctgctctcaatctaggagtcctcaccagtgaagagtttgatcaacttgtagtccctgagaaaatgattggtccaactgactgatctgattcattagctcttcgaaatgagaaagaggaccatggctagcttcttctgtccatcagattcgaacgagggaaataaacatttgacacaattcttgaggttttcttattcctggtaatttatcagtgttttttactgtgagaatgcctccatttttttttttgtaatgagtccctggagcgatagccaagtaaataatgaactgaattagtattttttatgaggttgggccatgaataatgagggagaaaatcatcttttatgaaatggagacggggaaatgatcaaaatggtcttatgtatgggttttgattc

SEQ ID NO: 6073 - protein, 493 aa, Solanum tuberosum
MAMLNAARRLSAGSALSDSLRYTSSWRFFSTSFREERDTFGPILVPSDKLWGAQTQRSLQNFEIGGDRERMPEPIIRAFGIIKKCAAKVNMDYGLDQSIGKAIMQAAEEVAEGKLNDHFPLVVWQTGSGTQSNMNANEVIANRAAEILGHNRGDKHVHPNDHVNKSQSSNDTFSTVMHIAAAMELNKRLVPNLETVAYSLNSKSVEFKDIIKIGRTHTQDATPLTLGQEFSGYATQVKYGIDRVLCTLQRMYQLAQGGTAVGTGLNTKKGFDIKIAAAVAEETNFPFVTAENKFEALAAHDAFAETSGALNTLAASLMKIGNDIRFLGSGPRCGLGELSLPENEPGSSIMPGKVNPTQCEALTMVCAQVMGNHVAVTVGASNGHFELNVFKPMIANALLHSVRLLGDASASFEKNCVRDIQANRDRIAKLLHESLMLVTCLNPKIGYDNAAAVAKKAHKEGTSLKEAALNLGVLTSEEFDQLVVPEKMIGPTD

SEQ ID NO: 6074 - DNA, 1416 bp, Nostoc sp. PCC 7120
  CDS (1)..(1416)
atgactacaaatacagattttcgtattgaacgcgattcgatgggcgatcgccaaattgctagtgatgtttattacggtattcaaactctccgagccgttgaaaatttccccattagtggtcttaagcccttacctacttacgtagatgctggtcttttaattaaaaaagctacagcaattgtcaatggagaactaggttgtattccccaagatattagccaagcgattgtgcaagcaaccgatgaaattctggcagggaagttaagagatcagttcgtcgttgatgtctatcaagctggtgcaggcacatcccaccacatgaacattaacgaagtcctagcaaatcgggctttggaaattttgggtgcagaaaagggcaattaccaacgagttagccctaatgatcatgtgaactacgggcagtctaccaacgatgttattcccacagcaattcgcatcggtggcttattggcactgaccaaaacattacagccagcattagaaaaagcgatcgccgccttagaacacaaagctgtagaatttcaagatattgtcaaatctggcagaacccatttacaggatgccgttcccgtccgcttgggtgataatttcgccgcttgggcgcatatcctctcagaacatcaaaaccgcatttacactgcctctggagacttgatggtactcggtttaggtggtagtgcggcgggaacaggcttaaacacccatcctcaataccgcgcccgtgtggtggaagtactggcagaattactaaacttaccactccaacccgccccccatctcatggctgccatgcagagtatgtccccatttgtgaacgtttccggggcgatacgcaacctagcccaagacttagcgaaaatttcccacgacttgaggctgatggactccgggccaaaaactggtttaaaagaaattcaactacccccagtccaacccggttcctcaatcatgccaggcaaatataaccccgttatggcagagatgacatcgatggtgtgtttccaggtgatgggttacgatcaggcgatcgctcttgcagcccaagccggacaattagaattaaacgtgatgatgccgttgattgcctatgatttgatccacagcatcgaaattctggggtcaaccatcgccgcccttacagaacgctgcattcaaggaattaccgccaacaaagaacgctgtttagcctacgccgaaggcagtttagctttagttaccgccctcaacactcacattggttatttaaatgccgcagatgtcgccaaagaatccttaaacacaggaaaatctctaaggcagattgtgttagaaaaaggactgatgagcgaagcagagttagccaccgtgttaaatctagaagaaatgagtagtatattgccactccaaacagagtaa

SEQ ID NO: 6075 - protein, 471 aa, Nostoc sp. PCC 7120
MTTNTDFRIERDSMGDRQIASDVYYGIQTLRAVENFPISGLKPLPTYVDAGLLIKKATAIVNGELGCIPQDISQAIVQATDEILAGKLRDQFVVDVYQAGAGTSHHMNINEVLANRALEILGAEKGNYQRVSPNDHVNYGQSTNDVIPTAIRIGGLLALTKTLQPALEKAIAALEHKAVEFQDIVKSGRTHLQDAVPVRLGDNFAAWAHILSEHQNRIYTASGDLMVLGLGGSAAGTGLNTHPQYRARVVEVLAELLNLPLQPAPHLMAAMQSMSPFVNVSGAIRNLAQDLAKISHDLRLMDSGPKTGLKEIQLPPVQPGSSIMPGKYNPVMAEMTSMVCFQVMGYDQAIALAAQAGQLELNVMMPLIAYDLIHSIEILGSTIAALTERCIQGITANKERCLAYAEGSLALVTALNTHIGYLNAADVAKESLNTGKSLRQIVLEKGLMSEAELATVLNLEEMSSILPLQTE

SEQ ID NO: 6076 - DNA, 1452 bp, Brucella melitensis
  CDS (1)..(1452)
atgacaaccctggaaaatattcatcccctgacacggcgcgagcaggattcccttggggagcgcgatattcccatggatgcctatttcggcatccagaccctacgggcagttgaaaacttctcgctttccgatgttgcgctgaaccatattcctgccctcgttcgcgcccttgcaatggtcaagaaagcggctgccaccgccaattacaagctgcggcagctgccggagcccaaatatgcggccatcgtcgccgcctgcgacaacatcattgacgggcttttgatggagcaattcgtcgtggatgtgtttcagggcggcgcgggcacctcaagcaatatgaacgcaaatgaggttatcgcaaaccgcgcccttgaacatctggggcggccgcgaggcgactaccagacgatccatcccaatgatgacgtcaacatgtcgcagtccaccaatgatgtgtatccaaccgcggtaaggctggcgcttcttctcagccagaaccaggttcagacggcgctgcaccggctgattgccgcctttgaagcaaaggggcgggaattcgcgacggtcatcaagatcgggcgcacacagttgcaggatgcggttccgatcactcttggacaggagttcgaggcatttgccgcaacgttgcgggaggacacagcccggctggaggaggttgccgcgcttttccgcgaagtaaacctcgatggaaccgctatcggcacgcgcatcaacgcctcgcacgcctatgccgaacaggccatcgcggaactttcgcagatttccggtatcgaactgaaagccgccggcaatctcgtggaagcgagctgggataccggtgcgttcgtcaccttttccgggatattgcgccggatcgcagtcaagctttccaagatcgccaacgatctgcggctactctcaagcgggccgcgaagcggccttggtgaaatccgcctgcctgcggttcagccgggatcgtcgatcatgccgggaaaggtcaatccggtcataccggaatcggtcaatcaggtctgctatcaggtgatcggcaatgacctaactgtaaccatggcagccgaaagcgggcaattgcagctcaacgcgttcgagccgctgatcgtctacaatatcctcagttccatgcgactgctcggccgcgccatgaccaatctggccgaacgttgcgtcgacggaatcgaagccaatgtggaacgctgtcgcgcaggcgcggaggaaagcatttcgcttgcaaccgccctcgtcccggtcgtgggctatgccagggcggcagagatcgccaagcaggcgcttgcctcagggcagaccgtcatggaagtggcgatttccaaggggctggacgcatctgcgctcacgataatgcttgaccccttgagaatggcattcccgccggaaacgcacgacaaggaggcacatcatgcatctgtcggctaa

SEQ ID NO: 6077 - protein, 483 aa, Brucella melitensis
MTTLENIHPLTRREQDSLGERDIPMDAYFGIQTLRAVENFSLSDVALNHIPALVRALAMVKKAAATANYKLRQLPEPKYAAIVAACDNIIDGLLMEQFVVDVFQGGAGTSSNMNANEVIANRALEHLGRPRGDYQTIHPNDDVNMSQSTNDVYPTAVRLALLLSQNQVQTALHRLIAAFEAKGREFATVIKIGRTQLQDAVPITLGQEFEAFAATLREDTARLEEVAALFREVNLDGTAIGTRINASHAYAEQAIAELSQISGIELKAAGNLVEASWDTGAFVTFSGILRRIAVKLSKIANDLRLLSSGPRSGLGEIRLPAVQPGSSIMPGKVNPVIPESVNQVCYQVIGNDLTVTMAAESGQLQLNAFEPLIVYNILSSMRLLGRAMTNLAERCVDGIEANVERCRAGAEESISLATALVPVVGYARAAEIAKQALASGQTVMEVAISKGLDASALTIMLDPLRMAFPPETHDKEAHHASVG

SEQ ID NO: 6078 - DNA, 1416 bp, Bacillus halodurans
  CDS (1)..(1416)
atgacagactatcgtgtagagcgagatttaattggtgaaaagaaagtaccgaaagaggcatattatggaattcaaacgatgagagcgagggaaaacttccccattacagggtatccccctcatgaggaattgattcgcgcctttggctttgtcaaaaaggctgctgcgatggcgaatcgggatgtaggggtgttgccagctaacattgtcgatgcgatcattaccgcagcagacgaagtgatcgaaggaacgttcaacgatcaatttatcgttgatgcgatccaaggtggtgcaggtacttcttttaatatgaatgcaaatgaagtgattgccaatcgtgcgattgaaatccttggaggagagaagggggaatacctccgcgtaagcccaaatactcacgtgaacatggcgcaatcgacaaacgatgctttcccgacagctattcatattgcctgtctttatttagccaaaggattaattcaatcactagaagacctgattgcagccattaaggaaaaggaacaacagtttgacgatgtgttaaaaatggggcgaacccatttacaggatgcagttccgatacggatgggacaagaatttggcgcttaccgccgcgtgctcactcgtgatttgggacgaatccgcagctcaattgatcatatgcatgaaattaatatgggggcgacagcagtagggacaggacttaacgcaaagcctgaatatatggaaaaagtggttgcctatttaagtgacattactgaatttccgttccgccatgcagcagatttagtggacgcgacgcaaaatacggatgcttacacagaattatcgagtgcgctgaaaattttggcgatcaatttatcaaaaatggcgaatgacatccgcttgatgagctctgggccacgcacggggttaaatgaaatcaaccttccaccgcgtcaaccagggtcgtcgatcatgccaggaaaggtaaatccagtaatggctgaagtgatcaaccaaatttcgttccaagtcatcggcaatgaccatacgattagcttagcgtcagaagctgggcagcttgaactaaacgttatggagccggttctcgtctttaacttacttcaatcgttatcgatcctgcaaaacgggatgaaggtgttccgtcagcacgcgattgaaggaatgacggccaacgtagagcgctgcaaagaaatggtggagagcagtgttgggatcattactgcgatcaacccccatgtaggatatgaaacagcctctcgaatcgcaaaggaagcgatccaaacagggcgtccagtacgagaaatttgtctagaacgagggattttaacagaagaggaactaaacgaaattttggatccgaaagaaatgacgaagcctggtattgctggggcaaggttcatttacggataa

SEQ ID NO: 6079 - protein, 471 aa, Bacillus halodurans
MTDYRVERDLIGEKKVPKEAYYGIQTMRARENFPITGYPPHEELIRAFGFVKKAAAMANRDVGVLPANIVDAIITAADEVIEGTFNDQFIVDAIQGGAGTSFNMNANEVIANRAIEILGGEKGEYLRVSPNTHVNMAQSTNDAFPTAIHIACLYLAKGLIQSLEDLIAAIKEKEQQFDDVLKMGRTHLQDAVPIRMGQEFGAYRRVLTRDLGRIRSSIDHMHEINMGATAVGTGLNAKPEYMEKVVAYLSDITEFPFRHAADLVDATQNTDAYTELSSALKILAINLSKMANDIRLMSSGPRTGLNEINLPPRQPGSSIMPGKVNPVMAEVINQISFQVIGNDHTISLASEAGQLELNVMEPVLVFNLLQSLSILQNGMKVFRQHAIEGMTANVERCKEMVESSVGIITAINPHVGYETASRIAKEAIQTGRPVREICLERGILTEEELNEILDPKEMTKPGIAGARFIYG

SEQ ID NO: 6080 - DNA, 1398 bp, Clostridium acetobutylicum
  CDS (1)..(1398)
atggattttaggattgagagtgattccataggtgataagaaggttcctaaggaggtatactatggagttcaaacattgagaggtgcggataattttaaaataacaggacttaggttaaatgaagagtttataaagagtgttgttcaaataaaaaaagcagctgcaattactaatttagaaattggagagctagaggttaacataggaaaagccataattaaagcctgtgatgaggtgatagctgggaagtttaatgaagactttataatagaccctattcaaggtggagcaggaacatctataaatatgaatgccaatgaggttattgcaaatagagctatagaaattttaggatatgaaaaaggaaattatagaattgtacatccaaacgatcatgtcaatatgggacaatcaactaatgatgttataccaacagcaggaaagataactgcattaagacttgtgatcaagaatttagacaaactcaaagaattaagcaatgcctttagtgagaaagcagaacaattcaaagatgtaattaaaatgggtagaacacagcttcaagatgctgtacctataacgttgggacaagaatttagtgcttacagtgcggttgtaaaaagagatatcgctaggattcaaaaagctcaagatgagctgaaagttgtaaatataggtggaactgcggttgggacaggtattaatgcagatagcagatatgtggatagaatagttccaaggctttcttttgtttctggattaaatttaaaaaaagctgacgatttaatcgatggtacacagaatttggatagctttgctagtttatccgcaacaataaaaacctgtgctttaaatctatctaaaatagccaatgacttaaggcttatgtcttctggaccaaggacggggttaggggagatcaatcttcctgcaaagcaaaatggatcatcaataatgcctggaaaagttaatcctgtaatacctgaagttataaatcaaatagcctttaatattgcaggaaatgatgtagctatttctatggctgttgaggcagggcagctagaactaaatgcttttgagccagttatattttataatatatttgaatctatccaaactttaacaaatggtgtagatacatttattaaaaattgtattctagatattactgcaaatgaagagatatgtagtgaatacgtaaataatagtgttggaatagttacagcactctgtccttatataggttatgcagaatcagcaaagatagcgaagatggctataaaaagtggagagtcaataaaaaaagtagttttaagagaaggcgttctcaaggaaaaggaacttaatagtattattaatccactaaaaatgactaaaccagggattgtaggaaaatag

SEQ ID NO: 6081 - protein, 465 aa, Clostridium acetobutylicum
MDFRIESDSIGDKKVPKEVYYGVQTLRGADNFKITGLRLNEEFIKSVVQIKKAAAITNLEIGELEVNIGKAIIKACDEVIAGKFNEDFIIDPIQGGAGTSINMNANEVIANRAIEILGYEKGNYRIVHPNDHVNMGQSTNDVIPTAGKITALRLVIKNLDKLKELSNAFSEKAEQFKDVIKMGRTQLQDAVPITLGQEFSAYSAVVKRDIARIQKAQDELKVVNIGGTAVGTGINADSRYVDRIVPRLSFVSGLNLKKADDLIDGTQNLDSFASLSATIKTCALNLSKIANDLRLMSSGPRTGLGEINLPAKQNGSSIMPGKVNPVIPEVINQIAFNIAGNDVAISMAVEAGQLELNAFEPVIFYNIFESIQTLTNGVDTFIKNCILDITANEEICSEYVNNSVGIVTALCPYIGYAESAKIAKMAIKSGESIKKVVLREGVLKEKELNSIINPLKMTKPGIVGK

SEQ ID NO: 6082 - DNA, 1377 bp, Thermotoga maritima
  CDS (1)..(1377)
atgagaaaggaacgcgattacctcgggaaactggagatagaaggcgaagtctactatggaatacacacaaagagagccctcatgaacttcccatccacgggtgaaaagctcgacgaaactttcatctgggcctatttcatggtgaaaaaagcctgcgcccttttgaacacagagcttggttatctggacgaacgaacaggaaacgccattgtgaaagcctgtgacgaatgggaagacctgaaaaaacacgtggttgtggatccactctctggtggggctggaacttccataaacatgaacgtaaacgaagtgatcgcaaacagggctacggaaatactcggtggaaagaaaggagaatacctggtcgatcccatagaccacgtgaacctgcaccagtccacaaacgataccttcccaacgagtgcgaaaatcgccaccatcgtgaaactcagaagactcatagatgaagtgataaaccttcaggagaagattcaggagaaagagaaggagttctactccatcagaaaaccgggaagaacacagctcatggatggaccgcccatcatgttagggcaggaattcggtgccttcgcggatgccctcgcgagagacagatggaggctctacaaagtcgaagaaagaataagaagtgtaaacatcgggggaacggccatcggaacgggagttggggcgccgaaagactacatcctcaagatcgtggaaaaggtgagagaagtgacgaaagtgaagattgctaaagcagaaaacctcatagacgccacgcagaactgggacgtttttgccgaggttcatggtcttttgaaatcccttgctgtgaacctctacaagatttcaaacgacatcagactgctgggaagcggaccaaacaccgtgatcggggaactgattcttccagctgtgcaggcgggaagctccatcatgccaggaaaaataaacccggttgtttccgagtacgtaatgcaaatctgtcatatggttttcggtcacgacatgatcctgaaccatgcctgcgcgcttgggaatttagaactcaaccagttcgctcctctgatagttcacctcacactgaaatctctcacactcctcacaaacgcctgtagatcactcgccagctacatctcaaaaataaaagcgaacaacgagcggtgtgaggaacaccttcgaaggtctgtttcgaacctcacacctttgataaagttgtttggatacgaagcggtctctgaagcaataaaaaaagcgaattgggacataaagaaagccgttgaaattctatcccaggagaaaaacattcctgtcgaagagatactgaaggttctcaacctcaaaaagatgacggggcttggctactccttgtaa

SEQ ID NO: 6083 - protein, 458 aa, Thermotoga maritima
MRKERDYLGKLEIEGEVYYGIHTKRALMNFPSTGEKLDETFIWAYFMVKKACALLNTELGYLDERTGNAIVKACDEWEDLKKHVVVDPLSGGAGTSINMNVNEVIANRATEILGGKKGEYLVDPIDHVNLHQSTNDTFPTSAKIATIVKLRRLIDEVINLQEKIQEKEKEFYSIRKPGRTQLMDGPPIMLGQEFGAFADALARDRWRLYKVEERIRSVNIGGTAIGTGVGAPKDYILKIVEKVREVTKVKIAKAENLIDATQNWDVFAEVHGLLKSLAVNLYKISNDIRLLGSGPNTVIGELILPAVQAGSSIMPGKINPVVSEYVMQICHMVFGHDMILNHACALGNLELNQFAPLIVHLTLKSLTLLTNACRSLASYISKIKANNERCEEHLRRSVSNLTPLIKLFGYEAVSEAIKKANWDIKKAVEILSQEKNIPVEEILKVLNLKKMTGLGYSL

SEQ ID NO: 6084 - DNA, 1413 bp, Clostridium acetobutylicum
  CDS (1)..(1413)
atgtttgatttgccttctgattttagaatagaaaaagacttacttggagaaaaaaacttacctaaagagtcctactacggaataaactctctaagagcctttgaaaactttaatataagcaataaaaaagtaaatttaaatttaatatatgcagtggtaattgtaaaaaaagcggctgctttagctcataaaaaactcaaggaacttaaagatgaaaaagcagatgctataataagcgcttgtgatgacatattaagtggaaaatttgacgatgagttcattacaaattctcttcaaggcggtgctggaacctcaaccaacatgaatgtaaatgaagtcattgcaaacagagctattgaattacttaatggctcaaagggtgactactctataatccacccaattgaagatgttaatatgtctcagtcaaccaatgatgtatacccaactgctcttagaattgcagctataaaacttctaaggcctttatctgatgctttaagtaaacttcaagaatcctttcaaataaaagaaaatgatttttcagatatacttatgcttggaaggacagaacttatggatgccttacctatgatggtaggtcagggctttggagcttatgcaaaagcctttgctagggatagatggcgaatatataaggttgaagagagacttcgtgagataaatattggaggaaatgccataggaactggaataaatgcttcctatgattatattttcactgttactgacatacttcaagatttaacaggactcgggcttgcaagaagtgattacccaatggatgtaacacaaaacatggatgtatttgtagaggtgtcaggtcttttaaaatcctgcgctgttaatcttataaaaatttcaaatgacataagacttttaaatagcggccctgtaggtggtataggagaatttattgttgaagaggttcaagctggttcatcaattatgccaggaaaagtaaaccctgttatatgtgaaatgacagctcaaacttctatgaaggttatggcaaacgatactgctatctccctcgcctcatcttttggacagcttcaattaaatgctttttctcctctaattgctgaaagccttttagaatctcttgaaatacttactaatgcagttaatgtgttcagggaaaaatgcatagattcaataaaaattaatgaagaaaaatgtcttgagaatttagaagcttctacagcactcgttacagccttagttcattatataggttatgataaagcatctattatagcaaaaaaagctctaaaagaaaaaaaatccatacgggaattactccttttagaaaaaattttaacaaaagaagaaatagataaaatacttaatccttatgagattacaaaacctggcataccaggactatag

SEQ ID NO: 6085 - protein, 470 aa, Clostridium acetobutylicum
MFDLPSDFRIEKDLLGEKNLPKESYYGINSLRAFENFNISNKKVNLNLIYAVVIVKKAAALAHKKLKELKDEKADAIISACDDILSGKFDDEFITNSLQGGAGTSTNMNVNEVIANRAIELLNGSKGDYSIIHPIEDVNMSQSTNDVYPTALRIAAIKLLRPLSDALSKLQESFQIKENDFSDILMLGRTELMDALPMMVGQGFGAYAKAFARDRWRIYKVEERLREINIGGNAIGTGINASYDYIFTVTDILQDLTGLGLARSDYPMDVTQNMDVFVEVSGLLKSCAVNLIKISNDIRLLNSGPVGGIGEFIVEEVQAGSSIMPGKVNPVICEMTAQTSMKVMANDTAISLASSFGQLQLNAFSPLIAESLLESLEILTNAVNVFREKCIDSIKINEEKCLENLEASTALVTALVHYIGYDKASIIAKKALKEKKSIRELLLLEKILTKEEIDKILNPYEITKPGIPGL

SEQ ID NO: 6086 - DNA, 1437 bp, Bacillus cereus
  CDS (1)..(1437)
atggcaacattaactgaagttaaaaatggtgttcgaattgaaaaagattttttaggtgaaaaagaagtaccaaactatgcatactacggtgtacaaacaatgcgtgcagttgaaaacttcccaattacaggatacaaaattcatgaaggtttaattagagcgttcgcagttgtaaaaaaagctgcagcgcttgcgaatacagatgtaggaagattggaattgaacaagggcggcgcaatcgcagaagctgctcaagaaattcttgacgggaaatggcatgatcatttcatcgtagacccaatccaaggcggagcaggtacttcaatgaacatgaatgcaaatgaagtcattgccaatcgtctcttgattattaggaatggaaagggagactatcattatattagtccaaatagtcatgtaaacatggcgcaatccacaaacgatgcattcccaacggcgattcatatcgctacattaaacgcattagaaggtttattacaaacgatgggctatatgcacgatgtatttgaattaaaagcagaacagttcgatcatgtgattaaaatgggtcgtacacatttacaagacgctgttccaattcgtcttggacaagaatttaaagcatactctcgcgtacttgaacgtgatatgaaacgaattcagcagtcacgtcaacacttatatgaagtgaacatgggagcaactgcagttggtacaggcttaaatgcagatccagaatatattcaagctgttgtaaaacatttagctgcaattagtgaactaccacttgttggtgcggaagacttagtagatgcaacgcaaaatacggatgcatatacagaagtatcagcagcactgaaagtatgtatgatgaatatgtctaaaattgccaatgaccttcgcttaatggcatcaggtccacgtgttggtttagcagaaattatgttaccggctcgtcaaccaggttcatctattatgccagggaaagtaaaccctgttatgccagaggtaattaatcaaattgcgttccaagtaattggtaatgaccatacaatttgtcttgcttcagaagcaggtcaattagaattgaacgttatggaaccagtactagttttcaacttacttcaatcaattagcattatgaataacggtttccgtgcctttacagataattgcttaaaaggaattgaagcgaatgaagatcgcttaaaagagtatgttgagaagagtgtaggaattattacagccgtgaaccctcatatcggttatgaagcagcagctcgcgttgcgaaagaagcaatcgcgacagggcaatccgttcgagaactttgtgtgaaaaatggtgtactgtcacaagaagacttagaattaattctagatccattcgaaatgacgcacccagggattgcaggagcaactcttttaaagaaaaattaa

SEQ ID NO: 6087 - protein, 478 aa, Bacillus cereus
MATLTEVKNGVRIEKDFLGEKEVPNYAYYGVQTMRAVENFPITGYKIHEGLIRAFAVVKKAAALANTDVGRLELNKGGAIAEAAQEILDGKWHDHFIVDPIQGGAGTSMNMNANEVIANRLLIIRNGKGDYHYISPNSHVNMAQSTNDAFPTAIHIATLNALEGLLQTMGYMHDVFELKAEQFDHVIKMGRTHLQDAVPIRLGQEFKAYSRVLERDMKRIQQSRQHLYEVNMGATAVGTGLNADPEYIQAVVKHLAAISELPLVGAEDLVDATQNTDAYTEVSAALKVCMMNMSKIANDLRLMASGPRVGLAEIMLPARQPGSSIMPGKVNPVMPEVINQIAFQVIGNDHTICLASEAGQLELNVMEPVLVFNLLQSISIMNNGFRAFTDNCLKGIEANEDRLKEYVEKSVGIITAVNPHIGYEAAARVAKEAIATGQSVRELCVKNGVLSQEDLELILDPFEMTHPGIAGATLLKKN

SEQ ID NO: 6088 - DNA, 1431 bp, Bacillus anthracis str
  CDS (1)..(1431)
atggcaatgacaaacaagaacgtgcgaatggagaaggattttttgggaggaaaggaattacctattgaggcatattacggaattcagactttacgtgctgttgaaaattttccgattacagggtataaaattcatgaaagtttaattagagcgttcgcagttgtaaaaaaagctgcagcgcttgcgaatacagatgtaggaagattggaattgaacaagggcggcgcgatcgcagaagctgctcaagaaattcttgatggaaaatggcatgatcatttcatcgtagatccaatccaaggcggagcaggtacttcaatgaacatgaatgcaaatgaagtcattgccaatcgtgcgcttgaattattagggatggaaaagggagactatcattatattagtccaaatagtcatgtaaacatggcacaatcaacaaacgatgcattcccaacggcgattcatatcgcaacattaaacgcattagaaggtttattacaaacgatgggttatatgcacgatgtatttgaattaaaagcagaacagttcgatcatgtgattaaaatggggcgtacacatttacaagacgctgtgccaattcgtcttggacaagaatttaaagcatactctcgcgtacttgaacgtgatatgaaacgaattcagcaatcgcgtcaacatttatatgaagtaaatatgggagcaactgcagttggtacaggcttaaatgcagatccagaatatattgaagcagttgtaaaacatttagctgcaattagtgaactgccacttgttggtgcagaagatttagtagatgcaacgcaaaatacggatgcatacacagaagtatcagcagcacttaaagtatgtatgatgaatatgtctaaaattgcgaatgaccttcgcttaatggcatcaggtccacgtgttggcttagcggaaattatgctacctgctcgtcaaccaggttcttctattatgccagggaaagtaaaccctgttatgccagaagtaattaatcaaattgcattccaagtaattggtaacaaccatacaatttgtcttgcttcagaagcaggtcaattagaattaaacgtgatggaaccagtacttgttttcaacttactacaatcaattagcattatgaataacggtttccgtgcctttacagataattgcttaaaaggaattgaagcgaatgaagatcgcttaaaagagtatgttgagaagagtgtaggaattattacagccgtgaaccctcatatcggttatgaagcagcagctcgcgttgcgaaagaagcaatcgcgacagggcaatccgttcgagaactttgtgtgaaaaatggtgtattgtcacaagaagatttagagttaattttagatccatttgaaatgacacacccagggattgcaggagcaactcttttaaagaaaaattaa

SEQ ID NO: 6089 - protein, 476 aa, Bacillus anthracis str
MAMTNKNVRMEKDFLGGKELPIEAYYGIQTLRAVENFPITGYKIHESLIRAFAVVKKAAALANTDVGRLELNKGGAIAEAAQEILDGKWHDHFIVDPIQGGAGTSMNMNANEVIANRALELLGMEKGDYHYISPNSHVNMAQSTNDAFPTAIHIATLNALEGLLQTMGYMHDVFELKAEQFDHVIKMGRTHLQDAVPIRLGQEFKAYSRVLERDMKRIQQSRQHLYEVNMGATAVGTGLNADPEYIEAVVKHLAAISELPLVGAEDLVDATQNTDAYTEVSAALKVCMMNMSKIANDLRLMASGPRVGLAEIMLPARQPGSSIMPGKVNPVMPEVINQIAFQVIGNNHTICLASEAGQLELNVMEPVLVFNLLQSISIMNNGFRAFTDNCLKGIEANEDRLKEYVEKSVGIITAVNPHIGYEAAARVAKEAIATGQSVRELCVKNGVLSQEDLELILDPFEMTHPGIAGATLLKKN

SEQ ID NO: 6090 - DNA, 1461 bp, Photobacterium profundum
  CDS (1)..(1461)
atgtctcagatgattgatcttgaaaagaatgaagcaactctaaatgttgctactcgcattgaagaagatttacttggtgaacgtcacgttcctgctgacgcttactggggtatccacacacttcgcgctgttgaaaacttcaacatctcaaacactacaatttctgacgttcctgattttgttcgcggtatggttttcactaagaaagcagctgcaatggcgaacaaagagctaggcgctattccttcagaagttggtaactacatcatccaagcatgtgatttaattctagacactggtaagtgtatggatcaattcccgtctgatgtttaccaaggcggtgctggtacgtcagtgaacatgaacacaaacgaagttattgccaaccttgctcttgaactgatgggcaaagacaaaggcgaatacgacgtcgttaaccctaatgatcacgtaaacaaatcgcaatcaactaactgtgcgtacccaacaggcttccgtgttgctgtatacaacagcatcatgacaatgattgaagctattgattacctaaaaggtgctttcgacgcgaaagataaagaattcgcaggcgttctaaagatgggtcgtactcagcttcaagatgctgtaccaatgactgttggtcaagagttccacgcgtactcagttcttcttaaagaagaaatcaaaaaccttaagtacacagcagatcttctacttgaagtgaacttaggtgcaacagctatcggtactggcttaaacgcagcgactggttaccaagaacttgctgttcagcgtcttgctgaaatcactggtctaccatgtacaccagcagaagatttaatcgaagcaacgtctgactgtggcgcatacgtaatgatccacggtgctcttaagcgtactgcagttaaactgtctaagatttgtaacgacttacgtctactttcttctggtcctcgtacaggtttgaacgaactaaacctaccagaaatgcaggctggttcttctatcatgccagctaaagtaaacccagtaattcctgaagtagttaaccaagtttgcttcaaggttattggtaacgacacaacaattactttcgcagcagaagctggtcagcttcagttgaacgtaatggaacctgttatcggtcaagcactgttcgaatctatttcacttctgaaaaacgcttgtgtaactctacgtgataagtgcgtatcgggtatcacagtgaataaagaagtatgtgaaagttacgtatttaactcaatcggtatcgtgacttacctaaacccattcattggccaccacgaaggtgacattgttggtaagatttgtgctgaaacaggtaaaaacgtacgcgaagttgtacttgagcgtggtcttctaacggaagagcaactagacgacatcttctcggtacaaaacctaatgcacccagaatacaaagcgaagcgttataactaa

SEQ ID NO: 6091 - protein, 486 aa, Photobacterium profundum
MSQMIDLEKNEATLNVATRIEEDLLGERHVPADAYWGIHTLRAVENFNISNTTISDVPDFVRGMVFTKKAAAMANKELGAIPSEVGNYIIQACDLILDTGKCMDQFPSDVYQGGAGTSVNMNTNEVIANLALELMGKDKGEYDVVNPNDHVNKSQSTNCAYPTGFRVAVYNSIMTMIEAIDYLKGAFDAKDKEFAGVLKMGRTQLQDAVPMTVGQEFHAYSVLLKEEIKNLKYTADLLLEVNLGATAIGTGLNAATGYQELAVQRLAEITGLPCTPAEDLIEATSDCGAYVMIHGALKRTAVKLSKICNDLRLLSSGPRTGLNELNLPEMQAGSSIMPAKVNPVIPEVVNQVCFKVIGNDTTITFAAEAGQLQLNVMEPVIGQALFESISLLKNACVTLRDKCVSGITVNKEVCESYVFNSIGIVTYLNPFIGHHEGDIVGKICAETGKNVREVVLERGLLTEEQLDDIFSVQNLMHPEYKAKRYN

SEQ ID NO: 6092 - DNA, 1413 bp, Desulfovibrio vulgaris
  CDS (1)..(1413)
atgtctttgtctgatcaggacgccatccgcatcgagcacgacttgctcggcgactgtgcggttccccgcacggccttgcacggtgcgcatacgcaacgggcgctctccaatgtcgccctcagcggccgcccgttgcacccggaaatcatcagggcattcggggccgtgaagcgtgcctgtgcacgtaccaacatgaacctcggccacctctcccgtgaggtggccgaggccatcatcatggcatgtgatgagcttgaagatggcgggttgggcgagcacatcgtggtcgacgcactgcaaggcggcgctggcacctccgccaacatgaacgtcaacgaagtgctggcgaaccgcgccgaagagatgctgggcggcacgcgaggccagtaccagcttgtcgacccgctggcgcacgtcaatctgcatcagtccaccaacgatgtgttccccacggcagtgcggattgcggcattgcgtctgctggcgcgactcgaaccggcgattgccgcactccagtccgcattccagacgcacgaggcatcgttcgcgcaggtggtgcggctggggcgcacccagttgcaggatgccgtgcccatgacattcggggcagcctgtggcgcgtgggccgaagccctttcgcgggacaggtggcgcgtgttcaagtgttcggagagactgcgcgtcgtcaatctgggaggaaccgccatcggcaccggcatcgcagccccccgaagctacatcctctctgtcgtggacaggttgcgtgaagacacgggcctgcctctcgcaagagcagaaaacctcatggacgccacacagaatgtcgatgcgttcgtcgaggtgtctggcatactcaaggcccacgcctcgaatctgctcaagctttcctccgacctgcgcctgctggcgtcggggccgggtggcggcatcggcgaggtcgtactcccgcccgtccaggccgggtcgagcatcatgcccggcaaggtcaacccggtcgtgtgcgagaccgtggcacaggcggccatgcaggcaacggccaacgaccttgccatcaccctgtccgcccagcacggtcagcttgaactgaacgccttcatgccgctcatcgctgatgcgctgctgcatggcatcgagcttctcacgaatgcctgcgacctgttccgtacgcgctgtgtcgaagggttacaccctgatacggaaacctgcgcccggcacgtttccacatcgacagccacgcttacggcactcgttcctgaaatcggctacgccgccgcctctgaaatggcccgccacatgcgcgaacacggcacggacgtcttcggggctgccaaagcgacaggactcatcgacgaagaccggcttgcaaggctgctttctcctgaacgtctcgtggcactggggtacagaggatga

SEQ ID NO: 6093 - protein, 470 aa, Desulfovibrio vulgaris
MSLSDQDAIRIEHDLLGDCAVPRTALHGAHTQRALSNVALSGRPLHPEIIRAFGAVKRACARTNMNLGHLSREVAEAIIMACDELEDGGLGEHIVVDALQGGAGTSANMNVNEVLANRAEEMLGGTRGQYQLVDPLAHVNLHQSTNDVFPTAVRIAALRLLARLEPAIAALQSAFQTHEASFAQVVRLGRTQLQDAVPMTFGAACGAWAEALSRDRWRVFKCSERLRVVNLGGTAIGTGIAAPRSYILSVVDRLREDTGLPLARAENLMDATQNVDAFVEVSGILKAHASNLLKLSSDLRLLASGPGGGIGEVVLPPVQAGSSIMPGKVNPVVCETVAQAAMQATANDLAITLSAQHGQLELNAFMPLIADALLHGIELLTNACDLFRTRCVEGLHPDTETCARHVSTSTATLTALVPEIGYAAASEMARHMREHGTDVFGAAKATGLIDEDRLARLLSPERLVALGYRG

SEQ ID NO: 6094 - DNA, 1392 bp, Treponema denticola
  CDS (1)..(1392)
atgcgaagggaacatgacttactcggagaattggatattccggaagatgcttattatggaattcaaacattccgcagtgttgaaaattttcaaattacaggattaaggctctgtgattttcccgattttattaagggtcttgcttatacaaagcaggctgcagccgaagccaaccatgaactcggctatttaagcgatgaagtttacaaggctatgattcaggcttgtaaagaagttgccgaaggcaaattcgataaggaatttgtagtcgatatgattcagggcggagcaggaacttctaccaatatgaatgcaaatgaagttatcgccaaccgcgcaaacgaaatcttaggaaaggccaagggaacttattcgccctgccatcccaataatcacgtaaactttgctcaatctacaaacgacgcttatcctacagctgcaaagctcggcatctcgttaaatacaccggctcttatagatgaactcaaatctcttgttgcttcttttagaaaaaaggcccaagaacttggagaaaatatcaagatgggaagaacccagcttcaagatgccgtacccatgaccctcggccaagagtttgaatcctatgccgcttctttggaaaacgaaattcctcagattcagtttgcaagggaaaatcttcacaccataaacatgggagctaccgctatcggaacaggtatcaactcggatcctaactatacaccgaaagtaacctctcatctggcaaaaatttcgggtcttgatctaaaggctgcaaaaaacatgatagctgccacgaacgatacatccgactttgtaacatattcttcacaattaaagcgcctttctgcaaagctttcaaagatatgcagcgatttacgccttctttcttcgggccccagaacaggactttacgatataagtcttcctccgatgcagcccggttcttctatcatgcccggaaaggtaaacccggttattcctgaggttgtcaatcaggtttgctacagggttatcggaaatgatactgccgttatcttggctgcagaatcaggccagcttgaactcaacgtttttgaacccgttataatttattctatctttgagtcgattaagcttcttataaatgcaatgaagactttgagggaacgatgcgttacgggcattgtaggaaactatgagcattgtaaggaaagcgttcaccgaagtatcggcttggttacggccttaaatcccgtcatcggttatgaggcttcttccgatattgcaaagactgccttgcgcgataaccgcagcgtttatgaccttgttttggaaagagggcttctttcaaaagaaaaattggatgaggttttaaaacccgaaaacatgacaaagcccagaaagctttag

SEQ ID NO: 6095 - protein, 463 aa, Treponema denticola
MRREHDLLGELDIPEDAYYGIQTFRSVENFQITGLRLCDFPDFIKGLAYTKQAAAEANHELGYLSDEVYKAMIQACKEVAEGKFDKEFVVDMIQGGAGTSTNMNANEVIANRANEILGKAKGTYSPCHPNNHVNFAQSTNDAYPTAAKLGISLNTPALIDELKSLVASFRKKAQELGENIKMGRTQLQDAVPMTLGQEFESYAASLENEIPQIQFARENLHTINMGATAIGTGINSDPNYTPKVTSHLAKISGLDLKAAKNMIAATNDTSDFVTYSSQLKRLSAKLSKICSDLRLLSSGPRTGLYDISLPPMQPGSSIMPGKVNPVIPEVVNQVCYRVIGNDTAVILAAESGQLELNVFEPVIIYSIFESIKLLINAMKTLRERCVTGIVGNYEHCKESVHRSIGLVTALNPVIGYEASSDIAKTALRDNRSVYDLVLERGLLSKEKLDEVLKPENMTKPRKL

SEQ ID NO: 6096 - DNA, 1392 bp, Geobacter sulfurreducens
  CDS (1)..(1392)
atgacgttccgggtcgagaaggataccctcggtgaggtgcgggttccggcggacgcctactacggcgcccagacggtccgggccgtggagaatttccccatctccgggctgcggccccatccggccctcgtccgggcgacggtgctcgtcaaaatgtgtgcggcccgggccaacatggccacgggcaggctcgattcccggcttggagacgctatcgtccgggcggccgacgagtgcctggccggtgcctttgatgcccacttcgtggtggacccgtttcaagccggcgccggcacctcccacaacatgaacgtgaacgaggtcctcgccaaccgggccaatgaactgctgggagaggagcggggcaggtatgctcccgtccatcccaacgaccacgtgaacatggcccagtccaccaacgacgtcttccccacggccatgcgtctggcggcccttcgggtggcgggggatctccggccggccctagagggactcgttgccgcgcttcggaaaaagtccgctgaattcgacggcattctcaagagcggccggactcacctgcaggatgcggtgccgatccgtctcggccaggagttcgaggcgtgggccgtggcgctggagaagaacctggccgccatcgagggggcggtgccgggccttgcggaactgggtatcggcggcaccgcggcaggtaccggcatgaacgccgagccggcctacatcgatcttgtggtggcagagctcgcccgggaaaccggctttcccctcgtacggggtgcgaacctggttgagcggatgcagaacatggaccccttcgtggccctctcctccgctctcaagggacttgccgtaaacctcgcccgtatcgccaacgacctgcggctcctttcctctggcccccggaccgggctggccgagatcgcgctgccggcgctgcagcccggctcctctatcatgccggggaaggtcaacccggtcatggccgaggtgaccgacatggtcgcctttcaagtgatgggtgcggacacgacaatcatgctcgccgcccaggcagggcagctggagcttaacgtcatgatgccggtcatcgcgttcaaccttctgttcagccttgaaatcctgaagaacacggtgcccaagctggctgatgcctgcatcgccggcatcactgcggaccgggagcgctgcctccggtacctggagcagtcggtaggactggccacggtgctcgcgccctacatcggctatgccgcggccgcggaggtggccaaggaatcgactgccacgggccggagtatccggcagatcgtggaagaccggcagctcctgtcggccgggcgtctggcggagatcctcgaccccttccctctcaccagccctggcgttccgtga

SEQ ID NO: 6097 - protein, 463 aa, Geobacter sulfurreducens
MTFRVEKDTLGEVRVPADAYYGAQTVRAVENFPISGLRPHPALVRATVLVKMCAARANMATGRLDSRLGDAIVRAADECLAGAFDAHFVVDPFQAGAGTSHNMNVNEVLANRANELLGEERGRYAPVHPNDHVNMAQSTNDVFPTAMRLAALRVAGDLRPALEGLVAALRKKSAEFDGILKSGRTHLQDAVPIRLGQEFEAWAVALEKNLAAIEGAVPGLAELGIGGTAAGTGMNAEPAYIDLVVAELARETGFPLVRGANLVERMQNMDPFVALSSALKGLAVNLARIANDLRLLSSGPRTGLAEIALPALQPGSSIMPGKVNPVMAEVTDMVAFQVMGADTTIMLAAQAGQLELNVMMPVIAFNLLFSLEILKNTVPKLADACIAGITADRERCLRYLEQSVGLATVLAPYIGYAAAAEVAKESTATGRSIRQIVEDRQLLSAGRLAEILDPFPLTSPGVP

SEQ ID NO: 6098 - DNA, 1410 bp, Gloeobacter violaceus PCC 7421
  CDS (1)..(1410)
atgcaaccaagaaccgagcgcgactcgatgggcgagcgcaccctggaggccggagcctattacggcatccagaccctgcgcgccgtcgagaatttcccgattagcggcatcggcccgctgcccgacttcgtgcgcgcctgcaccctcatcaaacgggccgccgcccgggtgaacgccgagcttgaatgcatccccaaagacgtggcccaggcgatcattggcgcctcggacgaggtgctggcgggccagtggagcgatcagttcgtggtcgatatctttcaggcgggcgccggcacctcccaccacatgaatatcaacgaggtgctcgccaaccgcgccctcgagctgctgggttacgcgcggggcgactacaagcaggtcaaccccaacgatcacgtcaactacggccagtccaccaacgacgtgatccccactgccatccgtctgggagcgctctttgcaagcgcgccgctgttggaggcgctaagcaccctgcaacaaagtttcgaggccaagggcaacgagtttttgcccatcgtcaaatccgggcgcacccacctgcaggacgcggtgcccataaggcttggggatgaatttctggcctatgcccagatcgtcggcgagcaccgcgcccgcatcgaaaccgcctgccgcgagctattggtgctgggcctggggggcagcgccgccggtaccggcctcaacacccatccccagtaccgggtgcgcgtcgtcgccgaactggcccggctgacagggcaccccctcacccccgccccccgaccgatggcggcaatgcagagcatggcgcccttcgtggccgtctccggcagcctgcgcaatctggcccaggatctggtcaagatcgcgggcgatctgcgcctgatggattccggccccaagacgggcctgcgtgagatcgaactgccgccggtgcagccgggttcgtcgatcatgcccggcaagtacaacccggtgctgtgcgagatgctcacgatggtcgcctttcaggtgatgggctacgaccaggcgattgccttggccgcccaggcgggccaactggaattgaacgtgatgatgccgctgatcgcctacgacttgctccacagcttcacgatcctcaccaacgccctcacggtctttcgagcgcgctgcatcgacggcatccaggcccaacccgagcgctgcctggcctacgccgagggctcgatcgccctggtgaccgctctcaatccccacatcggctatctcaacgccgccgccgtcgccaaagaatcgctcgcgaccggccgctccctgcgcgagatcgttctcgagcgggggctactgaccgaagcgcaactcgccgagatcctcgaccttgaagcgatgagccggttgccggagacgcaggccgcctcagaccggtag

SEQ ID NO: 6099 - protein, 469 aa, Gloeobacter violaceus PCC 7421
MQPRTERDSMGERTLEAGAYYGIQTLRAVENFPISGIGPLPDFVRACTLIKRAAARVNAELECIPKDVAQAIIGASDEVLAGQWSDQFVVDIFQAGAGTSHHMNINEVLANRALELLGYARGDYKQVNPNDHVNYGQSTNDVIPTAIRLGALFASAPLLEALSTLQQSFEAKGNEFLPIVKSGRTHLQDAVPIRLGDEFLAYAQIVGEHRARIETACRELLVLGLGGSAAGTGLNTHPQYRVRVVAELARLTGHPLTPAPRPMAAMQSMAPFVAVSGSLRNLAQDLVKIAGDLRLMDSGPKTGLREIELPPVQPGSSIMPGKYNPVLCEMLTMVAFQVMGYDQAIALAAQAGQLELNVMMPLIAYDLLHSFTILTNALTVFRARCIDGIQAQPERCLAYAEGSIALVTALNPHIGYLNAAAVAKESLATGRSLREIVLERGLLTEAQLAEILDLEAMSRLPETQAASDR

SEQ ID NO: 6100 - DNA, 1401 bp, Lactobacillus plantarum WCFS1
  CDS (1)..(1401)
atgcgaattgaagctgattgtattggtaagttagctgttccggatgatgctttgtatggaattcatacgttacgtgccgttcataattttccgattacgacggaattgatgcatccactgatcatgcaaagtcttgttcaaatcaagaaagcggcggccagtgtgaatgcggctgccggaactttgtctaatgataaggcacacgccattattgcggcatgtaatcagttactactggggcgttacgcggataacttcattgtgccagcgattcaggggggtgctgggacctcggctaacatgaacgtcaatgaagtggtggctaatttggctcaccggttgatgccggcagtcgccgttcatcccaatgatgatgttaatcaatcacaatcaaccaatgatacttttccaacggccggtaaaatggcgctttgcatgcaactcccaggactattaacggcactcagccggttggtacaaacgttactggttaaatcgcagcgttatcaagatgccatcaaagttggccgaactcagcttgaagatgcggtaccgacgacgtacgggcgaacctttcatgcttattaccaattattcaagcgtgatttgacccgtgtacggcaggcgggcgaacatctccgaatcgtaaatttgggtgggactgcaatcggtaccggcatcaacgcgactcacacgtatcaacagcagattttagtgaaattaaatcaaaatactgatttagatttagtagccgcaccagacttgatcgatgcaacgcaaaactgcgatttgttcgtggaattctctgcggccatgaagacgttagccgttgacctttccaagtttagcaatgacttaagattgctggcgagcggcccacaagctggctttggtgaattgaatttgcccgcgcagcaagcaggctcttctattatgccaggtaaaatcaatccggttattccggaggttgttaaccaagttgcgtttgaagtgattggtcacgacacgacggtaacaatggcagcggaagcgggccaattggaattaaacgcttttgagccaattatgttacgggcattgctagccagtgagcagcatttacagcaggccttgactacattagtcgatcactgtgtgcggcaattgacggtcaatcgccaacgctgtgcagatcaagtggcacattcggccattacggcaactgttttggcgccataccttggttacgagacgactaccgcgctgattaaagaagcgctcaccactaaccaagcaattcctgaattattacatcgacgtcgcttgcttagcgatgatttggtcgagcagctgttttcaccggccggactaactcagccacgtccagaggttattgaacaactacgagcggttgcaaagtag

SEQ ID NO: 6101 - protein, 466 aa, Lactobacillus plantarum WCFS1
MRIEADCIGKLAVPDDALYGIHTLRAVHNFPITTELMHPLIMQSLVQIKKAAASVNAAAGTLSNDKAHAIIAACNQLLLGRYADNFIVPAIQGGAGTSANMNVNEVVANLAHRLMPAVAVHPNDDVNQSQSTNDTFPTAGKMALCMQLPGLLTALSRLVQTLLVKSQRYQDAIKVGRTQLEDAVPTTYGRTFHAYYQLFKRDLTRVRQAGEHLRIVNLGGTAIGTGINATHTYQQQILVKLNQNTDLDLVAAPDLIDATQNCDLFVEFSAAMKTLAVDLSKFSNDLRLLASGPQAGFGELNLPAQQAGSSIMPGKINPVIPEVVNQVAFEVIGHDTTVTMAAEAGQLELNAFEPIMLRALLASEQHLQQALTTLVDHCVRQLTVNRQRCADQVAHSAITATVLAPYLGYETTTALIKEALTTNQAIPELLHRRRLLSDDLVEQLFSPAGLTQPRPEVIEQLRAVAK

SEQ ID NO: 6102 - DNA, 1413 bp, Clostridium tetani E88
  CDS (1)..(1413)
atgcaatacagattagaaagtgattcagtaggtgaaaaaagaataccaaaggatgcttattatggtgtgcaaagtcttagagcacaagagaattttatgataacaggaaaaaaagtccacacggaaatgataaaagcattagcagaggtaaaaaaagcaacagctatgacaaatatgcaagtggaacttttaagtaaaaaagcaggtaacgccattgtaaaagcttgtgatgaaataattgaaggaaatttacaagaacagtttataactgatcctatacaaggtggcgcaggaacatctatgaacatgaatttaaacgaagtaattgctaatagagcagtagaaatattaggtggggaaaagggagattatagtatagttcatcctaatgatcatgtaaatatgggacaatctactaacgatgttattcctacagggggaaaaatagcaactataagacttttagatagagcattaatgtcattagaaaatttagtagatgcacttacaaataaatctaaggaatttgatcatattataaaaatggggagaactcaaatgcaagatgctgtaccaataagattaggacaagaatttaaggcatattcaaatgctataaaaagggacatagttagaattaagagagcaaaagaagaattatatcatgtaagtattggggctacagctataggtacaggtataaatgctgatgaggagtatgtaaaaaatataacaccaaatttatcaaaagtaacaacacttagcctaattcaatgtgaagatttagtagatggaactcaaaatctagattgttttgcttcagtatcatcaaatttaaaggtttgtgctttaagtttatctaaaatagctaatgatttaagacttatgtcctcaggacctagaaccggttttggagaaataaatcttccagcaaaacaaaatgggtcatctataatgccaggaaaagtaaatccagtaatagctgaagttgtaaaccaagttgcatttagtattgtaggaaatgatgtaactattagcatggctgttgaagcaggacaattagaattaaacgcatttgagccggtgttatattataagttatttgaatctattgaaatattgaaaaatggtgtggatacatttattcataattgtataaatggtataacagcaaatgaggaaagatgtaaaaagttagtggataatagtgttggaataattactgcaatatgtccacatgtaggatataaaaaagcagctaaagtagcaaaaactgctatacagactggagaatctgtaaaggagcttgtattaaaagaaaatttattatcagaaaaagaattggatacaatacttgacccatttggaatgactaaaccaggaatatctgggaaagagctgttaaaaaagtaa

SEQ ID NO: 6103 - protein, 470 aa, Clostridium tetani E88
MQYRLESDSVGEKRIPKDAYYGVQSLRAQENFMITGKKVHTEMIKALAEVKKATAMTNMQVELLSKKAGNAIVKACDEIIEGNLQEQFITDPIQGGAGTSMNMNLNEVIANRAVEILGGEKGDYSIVHPNDHVNMGQSTNDVIPTGGKIATIRLLDRALMSLENLVDALTNKSKEFDHIIKMGRTQMQDAVPIRLGQEFKAYSNAIKRDIVRIKRAKEELYHVSIGATAIGTGINADEEYVKNITPNLSKVTTLSLIQCEDLVDGTQNLDCFASVSSNLKVCALSLSKIANDLRLMSSGPRTGFGEINLPAKQNGSSIMPGKVNPVIAEVVNQVAFSIVGNDVTISMAVEAGQLELNAFEPVLYYKLFESIEILKNGVDTFIHNCINGITANEERCKKLVDNSVGIITAICPHVGYKKAAKVAKTAIQTGESVKELVLKENLLSEKELDTILDPFGMTKPGISGKELLKK

SEQ ID NO: 6104 - DNA, 1473 bp, Bifidobacterium longum
  CDS (1)..(1473)
atgctggcgtttccaacccacgcacaggaagatggaagcatgagcgaaacatcgaacaagacccgtctggaacatgactgcatcggccagatggaggtgccggcgaacgtctactggggtattcacacccagcgcgctatcggcaacttcccggtctccggcatcaccgatagccaacatcccgagctgattcgcgcctatgccacggtcaagcgcgcctgcgccatcgccaatgaggaattaggcctgatcgacccagccaaggccgaggccattcgcgccgcctgcctagaaattgaggccggcaaactggccgatcagttcccggtcgatgtgatgcagggcggtgccggcacctcgtcgaacatgaacatgaacgaggtgatcgccaaccgtgcgttggaaatcgccggccgccagcgcggcgattacacatacatccatccgaacgacgacgtcaacaagtcgcagtccacgaacgacacctacccggccgcctgcaaactcgcgcttatcgacgcgatcgggccgctcgccgagtccaccaagaaactcgccaaggccttccacgatctggccgacaaacatatcaatgacgtgacgattggccgcacgcagctgcaggacgccgtaccaatgacctatggtcaggaatttcatgcgtttgccacgctgttgaagtctgatttggctgcattcgatcgcgtggtgccgctgctggcccagctcaacctcggtgccaccgccatcggtaccggcatttgcgcggatctgcgattccgcaagtccgctatcaagcatctggcgcaaatcaccgggctgccggtcaccgccgcgcccgatccggtggccgccatgacggatatgggcgcgtacgtggccacgtcggctgccatcaagagcctcgccgtgcacctgaagaaggccgccgacgatttgcgactgctcaattccgggccgcgctgcggtttcaacgatctcaacgtgccggctcgccaggccggatcgtcgatcatgccggccaaagtgaaccctgtgatccccgaatgcgtcaaccagtgctgcttcacgattttcggcatggacgtgactgtgaactgggctgtggccgagggacagttgcagctgaacgccttcgacccggtgatggtgcatgagctgctgaccggcatggcgttgctgacgcacgccatggagacgttccgcgtcaactgcgtggaaggcatcgaaatcaatgctgacctggggcgttcatacgctcagtcctcaccgtcgatttccgccgcgctcaaccactacatcggctacgagcacgcggccgacatcgccgccgaagccgtacataccggccgtaccgtgcgcgaggtggccggcgaacgcaccgacctgcccgccgagcagttggacgagattctcgatccgattcgactggcccgaggcctcggccagacctgccgcgagcaccaggagtag

SEQ ID NO: 6105 - protein, 490 aa, Bifidobacterium longum
MLAFPTHAQEDGSMSETSNKTRLEHDCIGQMEVPANVYWGIHTQRAIGNFPVSGITDSQHPELIRAYATVKRACAIANEELGLIDPAKAEAIRAACLEIEAGKLADQFPVDVMQGGAGTSSNMNMNEVIANRALEIAGRQRGDYTYIHPNDDVNKSQSTNDTYPAACKLALIDAIGPLAESTKKLAKAFHDLADKHINDVTIGRTQLQDAVPMTYGQEFHAFATLLKSDLAAFDRVVPLLAQLNLGATAIGTGICADLRFRKSAIKHLAQITGLPVTAAPDPVAAMTDMGAYVATSAAIKSLAVHLKKAADDLRLLNSGPRCGFNDLNVPARQAGSSIMPAKVNPVIPECVNQCCFTIFGMDVTVNWAVAEGQLQLNAFDPVMVHELLTGMALLTHAMETFRVNCVEGIEINADLGRSYAQSSPSISAALNHYIGYEHAADIAAEAVHTGRTVREVAGERTDLPAEQLDEILDPIRLARGLGQTCREHQE

SEQ ID NO: 6106 - DNA, 1386 bp, Thermoanaerobacter tengcongensis
  CDS (1)..(1386)
atgccgcgtattgaaaaagatttcttgggtgaattaacacttgaagataatgaactttatggaattcatacaaaacgagctttgaaaaacttctctgtatcttcacaaaagattgatatagatcttgtacgagcaattgtgatggtcaaaaaagcatgcgcaattgcaaattttgaggttggaaacctcgatgaaaaaataaaagatgcaattgtctttgcatgtgatgagattttagccggcaaatacaccgagcaatttgtggtagacaaattccaaggcggtgctggaacatctacaaatatgaacgtaaatgaagtaattgccaacatagcactcatttatcttggcaaaaaaccaggagagtatcaatacatccatcctatagaccatgttaatatgtcacaatcgacaaatgatgtctacccaaccgctttgaggattgcaacaatatggaatgtgagagaactttctgaagagtgtgcagaactccaaaaaagcttgcaaaaaaaagagcatgagtttgaaggtgtaattaaggctgggcgcactcaacttcaagatgcccttcccatcaccttagggcaagagtttggggcgtatgcacaggcgatatcacgcgatagatggcgaatatataaaattgaagaaagattaagagtggtaaacttgggcgcaacagctgttggaacaggagtgaatgcaagcttaaaatatatgtttaaagtgatagaacttttgcgcgattttactaaaataggcttggctcggtctgattacctcatggatgcaacacaaaatgcagatgtatttgtggaatgctcgggtcttttaaaagccttggcggtgaatctatcaaaaattgcaaatgacttaaggctcttatcatctggtccaaacacgggtttaaacgagataaacttacctgctgcacaagcaggttcaagcattatgcctggtaaagtaaatcctgtcatacctgaacttataaacaccatatcattccaggttatgtcaaatgatgttgcaataaccttagcagcccaagcaggtcagcttgagctaaatgcattcttgcctttaattgcaaacaatttgcttgaaagcctcaaaattctcaaaaacggaatcaggatattcagaaaacagtgcattgatggaataacagcaaacaaagaaagatgtcttgagtttgccaaaaagactccttctattgccgctgcattgattgataaaatagggtatgacaaggcaagtgaaattgctaaaaaagccattgccgagaataaggaaataattgaggtggtaaaggaattgaagatcttaaatgagaatgaggctgaagcactactaaatccttttgaatttgtaaagtttaaagagtaa

SEQ ID NO: 6107 - protein, 461 aa, Thermoanaerobacter tengcongensis
MPRIEKDFLGELTLEDNELYGIHTKRALKNFSVSSQKIDIDLVRAIVMVKKACAIANFEVGNLDEKIKDAIVFACDEILAGKYTEQFVVDKFQGGAGTSTNMNVNEVIANIALIYLGKKPGEYQYIHPIDHVNMSQSTNDVYPTALRIATIWNVRELSEECAELQKSLQKKEHEFEGVIKAGRTQLQDALPITLGQEFGAYAQAISRDRWRIYKIEERLRVVNLGATAVGTGVNASLKYMFKVIELLRDFTKIGLARSDYLMDATQNADVFVECSGLLKALAVNLSKIANDLRLLSSGPNTGLNEINLPAAQAGSSIMPGKVNPVIPELINTISFQVMSNDVAITLAAQAGQLELNAFLPLIANNLLESLKILKNGIRIFRKQCIDGITANKERCLEFAKKTPSIAAALIDKIGYDKASEIAKKAIAENKEIIEVVKELKILNENEAEALLNPFEFVKFKE

SEQ ID NO: 6108 - DNA, 1374 bp, Thermoplasma acidophilum
  CDS (1)..(1374)
atgaggacagaaagggatgttatcggggaggtgcagctgcccgacaatgtattttatggcataaacacggcaagggcaagggagaacttcaggatcaccgggctgaccgctgattctgatcacatcgtatcaattgcgcaggtcaagaaggctgcagcgcttgcaaatgccgacggaggcgcactggataaggagaaggcagattacatttcaaaggcatgcgacgagataatcggcgggaagtaccatgaccagttcgtgatagacgtctaccaggctggcgcaggaacatcctacaacatgaacgcaaatgaggtcatagccaacgttgcgctgacactgatgggcaagaataagggagagtactcggtgatacatccaaacgaccacgtgaacatgagccagtctacgaacgatgtttatccgacgatgatgcgattaacagtctccaagaagatcaggaagctcaaggatgcactcaacgaactcatagagagcttagaggcaaagagcagggaattcagggggatcgcaaagcccgggaggacccatctccaggatgctgcgcctgtaacgcttgggcttgagttcggagcctacgcctacgccatgaagaaggaccgtgatgagataatagatgcctcggactacataatggagctgaacataggggggacagcggttggcacggggataaacactgcgaagaactatcaggaaaacgtggtgaagcacataaacgagataacgaaggagaacttcaggaaaagcacgaatctgctcggcataatgcagttcatgacggatttctccagggtcatgaatgcggtcacgaacctcgccctggatgttgagaagatagcaaacgacataaggctgctttactccggccctggcgcaggcatccatgagataataattccagctgtacagcagggatcatccataatgccgggcaagataaacccgtccatcgccgaggccatgaacatgatctgccactcagtcataggagcgcagcaggcggttaatatgagcgttcaggcagggcagcttgagctgaacgtgatgatgcccaacatcgactacgagctgacgagatccatagacataatgacaaacggcctgaagatgttcaagcagaaactcatagacggcatcaaagctaacgttcctgtatgcagagaacacctggcgaacagcttcggttcagcagcgctccttaacccctatctcggatacgataacgttgcaaagatagtgagagaggccgttgaaactgggaaatcaataaaaagcctagtactcgcaaccggaaaactgacagaagagcagtacatgaagataatggacagtggggttccaaaggactga

SEQ ID NO: 6109 - protein, 457 aa, Thermoplasma acidophilum
MRTERDVIGEVQLPDNVFYGINTARARENFRITGLTADSDHIVSIAQVKKAAALANADGGALDKEKADYISKACDEIIGGKYHDQFVIDVYQAGAGTSYNMNANEVIANVALTLMGKNKGEYSVIHPNDHVNMSQSTNDVYPTMMRLTVSKKIRKLKDALNELIESLEAKSREFRGIAKPGRTHLQDAAPVTLGLEFGAYAYAMKKDRDEIIDASDYIMELNIGGTAVGTGINTAKNYQENVVKHINEITKENFRKSTNLLGIMQFMTDFSRVMNAVTNLALDVEKIANDIRLLYSGPGAGIHEIIIPAVQQGSSIMPGKINPSIAEAMNMICHSVIGAQQAVNMSVQAGQLELNVMMPNIDYELTRSIDIMTNGLKMFKQKLIDGIKANVPVCREHLANSFGSAALLNPYLGYDNVAKIVREAVETGKSIKSLVLATGKLTEEQYMKIMDSGVPKD

SEQ ID NO: 6110 - DNA, 2106 bp, Bacillus sp
  CDS (349)..(1755)
tctacagcaggaatccctgtattcactgtaaataaaccgatggaaccaaaaatggccatactaactgacagtttaatcatagcagatacattcatttgacttccctcaaaactatattaatatcctataattttccgaaaactctgaaataaaacaatatagaatctattaaataacatttatgtgaatttggcaatactattacaaaatattattaggaaacagggctctttttatattttctatgatagaatagtgtaggatttaataaagaaactctaatacaagttcgacaatgtaaacgtttgcttagagcttcgatagaaagaaaaggagattgtttttattatgaataccgatgttcgtattgagaaagactttttaggagaaaaggagattccgaaagacgcttattatggcgtacaaacaattcgggcaacggaaaattttccaattacaggttatcgtattcatccagaattaattaaatcactagggattgtaaaaaaatcagccgcattagcaaacatggaagttggcttactcgataaagaagttgggcaatatatcgtaaaagctgctgacgaagtgattgaaggaaaatggaatgatcaatttattgttgacccaattcaaggcggggcaggaacttccattaatatgaatgcaaatgaagtgattgctaaccgcgcattagaattaatgggagaggaaaaaggaaactattcaaaaattagtccaaactcccatgtaaatatgtctcaatcaacaaacgatgctttccctactgcaacgcatattgctgtgttaagtttattaaatcaattaattgaaactacaaaatacatgcaacaagaattcatgaaaaaagcagatgaattcgctggcgttattaaaatgggaagaacgcacttgcaagacgctgttcctattttattaggacaagagtttgaagcatatgctcgtgtaattgcccgcgatattgaacgtattgccaatacgagaaacaatttatacgacatcaacatgggtgcaacagcagtcggcactggcttaaatgcagatcctgaatatataagcatcgtaacagaacatttagcaaaattcagcggacatccattaagaagtgcacaacatttagtggacgcaactcaaaatacagactgctatacagaagtttcttctgcattaaaagtttgcatgatcaacatgtctaaaattgccaatgatttacgcttaatggcatctggaccacgcgcaggcttatcagaaatcgttcttcctgctcgacaacctggatcttctatcatgcctggtaaagtgaatcctgttatgccagaagtgatgaaccaagtggcattccaagtgttcggtaatgatttaacaattacatctgcttctgaagcaggccaatttgaattaaatgtgatggaacctgtgttattcttcaatttaattcaatcgatttcgattatgactaatgtctttaaatcctttacagaaaactgcttaaaaggtattaaggcaaatgaagaacgcatgaaagaatatgttgagaaaagcattggaatcattactgcaattaacccacatgtaggctatgaaacagctgcaaaattagcacgtgaagcatatcttacaggggaatccatccgtgaactttgcattaagtatggcgtattaacagaagaacagttaaatgaaatcttaaatccatatgaaatgacacatccgggaattgctggaagaaaataatgctacttttttaggcgaagggtactattgaggtgctctttgccttttattttttgagttacaacatgctcatcttgatgaagtgtaatcgaaatctgcaatgttcgataatagccaaaatcgtggagataatagtcaatcaagtaaggataatagtcaaactcgggcagataatagccaatggaagaaaaaggtgcttagcgaaattcgatattagtcaaaatcaagaagataatagtcaaccaagcaaggataatagtcaaacttgggaacataatagccaacggaagaaaaagttgcctcgcccctcggcaagataatagccaatggaagaaaaagttgcctcgcccg

SEQ ID NO: 6111 - protein, 468 aa, Bacillus sp
MNTDVRIEKDFLGEKEIPKDAYYGVQTIRATENFPITGYRIHPELIKSLGIVKKSAALANMEVGLLDKEVGQYIVKAADEVIEGKWNDQFIVDPIQGGAGTSINMNANEVIANRALELMGEEKGNYSKISPNSHVNMSQSTNDAFPTATHIAVLSLLNQLIETTKYMQQEFMKKADEFAGVIKMGRTHLQDAVPILLGQEFEAYARVIARDIERIANTRNNLYDINMGATAVGTGLNADPEYISIVTEHLAKFSGHPLRSAQHLVDATQNTDCYTEVSSALKVCMINMSKIANDLRLMASGPRAGLSEIVLPARQPGSSIMPGKVNPVMPEVMNQVAFQVFGNDLTITSASEAGQFELNVMEPVLFFNLIQSISIMTNVFKSFTENCLKGIKANEERMKEYVEKSIGIITAINPHVGYETAAKLAREAYLTGESIRELCIKYGVLTEEQLNEILNPYEMTHPGIAGRK

SEQ ID NO: 6112 - DNA, 1428 bp, Rhizobium etli
  CDS (1)..(1428)
atgacgacatccgatatgaccactattcgcgttgagcacgacctgatcggcgaccgcgacgtgccggcctcggcctattacggcgtgcatacggtgcgcgcggttgagaattttccaattaccggtcagacgctgaaggaatcggcggatctgatcgcctccctggcggcgatcaagcaggcggcggccgaggtcaatgttagcctcggccttctggatcagcagcgggccgacgccatcgtcgcggcttgcatcgaaatccgcgacggcgcgctgcacgaccagttcgtcgtcgatctgatccagggcggggcgggaacctcgaccaacatgaacgccaatgaggtgatcgcgaacagggcgctggaaatactggggcaccgccgcggcgagtaccagcacctgcatccgaacgagcacgtcaatctctcgcaatccaccaacgacgtctatccgacggcactgaagctcgccgcatggatcggcgttcaccgcctcgtcgacgccatggcgatcctgcgtcgcgcattcgcggccaaggcggtcgagtttgccgacgtgctgaagatgggccgcacccagttgcaggatgccgtgccgatgacgctcggccaggaattcggaacctacgcgctgatgctggcggaggacgaggcgcgcctcttggaagcggtctccttgatccgtgagatcaatctcggcgcgaccgcgatcggcaccggcatcaccgcccatcctcattatgccgcgctggtgcgcgagcgtctttcggccattgttggcatcgatctggtgacgtcacctgacctggtggaggcgacgcaggattgcggctccttcgtgcagctttcgggggttctcaagcgcgtggcggtcaagctttccaagacctgcaacgatctgcggctgctatcctccggcccgcgcgccggcttgaatgagatcaatctgccggcgcgccaggccggctcctcaatcatgcctggaaaggtaaaccctgttatccccgaggtcgtcaaccaggtcgccttcgaagtgatcggcaatgacgtgacgatcaccatggccgccgaggcaggccaactgcagctgaacgccttcgagccggtgatcttctacagcctctatcgcagtctcagccacctgaccaatgcctgcctgacgctagaggcgaattgcattcgagggattaccgccaaccgcgaccggctgcggcagacggtcgagcaatcgatcggcatcgtaacagcgctcaacccctatatcggctaccgcaacgccacagaggttgcgctggaagcgcatcattcgggacggggggtctatgaaatccttctcgagcgcggcctgatgcagaaggagcatctcgatgcggtgctgcgcccggaaacgctgacccggccgagcgagaagctgtccttctcgtaa

SEQ ID NO: 6113 - protein, 475 aa, Rhizobium etli
MTTSDMTTIRVEHDLIGDRDVPASAYYGVHTVRAVENFPITGQTLKESADLIASLAAIKQAAAEVNVSLGLLDQQRADAIVAACIEIRDGALHDQFVVDLIQGGAGTSTNMNANEVIANRALEILGHRRGEYQHLHPNEHVNLSQSTNDVYPTALKLAAWIGVHRLVDAMAILRRAFAAKAVEFADVLKMGRTQLQDAVPMTLGQEFGTYALMLAEDEARLLEAVSLIREINLGATAIGTGITAHPHYAALVRERLSAIVGIDLVTSPDLVEATQDCGSFVQLSGVLKRVAVKLSKTCNDLRLLSSGPRAGLNEINLPARQAGSSIMPGKVNPVIPEVVNQVAFEVIGNDVTITMAAEAGQLQLNAFEPVIFYSLYRSLSHLTNACLTLEANCIRGITANRDRLRQTVEQSIGIVTALNPYIGYRNATEVALEAHHSGRGVYEILLERGLMQKEHLDAVLRPETLTRPSEKLSFS

SEQ ID NO: 6114 - DNA, 1389 bp, Neisseria meningitidis
  CDS (1)..(1389)
atgagcacccgtaccgaacacgacacgatgggcaatgtcgaagtcccatccgaagcctattggggcgcgcagacccagcgcagccgcaacaatttcaaaatcggtggcgaaaccctgccgcagccgttgatttatgctttggcattggtgaaaaaagccgccgctgccaccaatgtttccctcggtaggattaagcctgaacaggcggatttgattacgcaggcggcggatgatgtgttgagcggcaagctcgacgggcagttcccattggtagtgtggcagaccggttccggcacgcagtccaatatgaacatgaacgaagtgctggcaaaccgcgccaacgaaatcgccggtacgggtttggcggcttatcagcccgtccatcccaacgaccatgtgaaccacgcgcaatcgaccaacgacgcattcccgaccgctatccacgttgccgccgcgattgaaatcaaccgccacctcatccccgccgtaaaagccctgcgcgacacgttggacaaaaaagcccaagctttcgcccctatcgtcaaaatcggccgcacccacttgcaagacgcgacgccgctgactttgggacaggaattttccggctacgtttcccagcttgatcacggtttaggccgtctgaacgatgcgcttaaagacttgtatgaacttgctttgggcggtacggcggtcggcacgggtttgaacagccatcccgaatacgccgaaaaagccgccgccaaactcgccgaattgtccggcttgccgtttgtcagcgcgccgaacaaatttgaagccctgggcggacgcgatgccgccgttgccgcttcgggcgcattgaaaacgctggcggcaagcctgaacaaaattgccaacgacatccgttggctggcaagcggcccgcgttgcggtttgggcgaaatcaaaatccccgaaaacgagccgggttcgtccattatgccgggcaaagtcaacccgacccaatgcgaagcaatgacgatggtgtgctgccaagtgttcggcaacgacgttaccatcggtatggcgggcgcgtcgggcaatttcgagctgaacgtctatatgcccgttatcgcctacaacctcttgcaatccatccacctgttgggcgacgcgtgcaacagcttcaacgaacactgcgccatcggcatcgaacccgtgccggaaaaaatcgactatttcctgcaccattccctgatgctggttaccgcattaaaccgtaaaatcggttacgaaaacgccgccaaagtcgccaaaaccgcctacaaaaacaacaaatcgttgcgcgaaaccgccgttgagttgggcttgctgacgggcgaagaatttgacgaactggtcgttcctgccgatatggttcatccgcgctaa

SEQ ID NO: 6115 - protein, 462 aa, Neisseria meningitidis
MSTRTEHDTMGNVEVPSEAYWGAQTQRSRNNFKIGGETLPQPLIYALALVKKAAAATNVSLGRIKPEQADLITQAADDVLSGKLDGQFPLVVWQTGSGTQSNMNMNEVLANRANEIAGTGLAAYQPVHPNDHVNHAQSTNDAFPTAIHVAAAIEINRHLIPAVKALRDTLDKKAQAFAPIVKIGRTHLQDATPLTLGQEFSGYVSQLDHGLGRLNDALKDLYELALGGTAVGTGLNSHPEYAEKAAAKLAELSGLPFVSAPNKFEALGGRDAAVAASGALKTLAASLNKIANDIRWLASGPRCGLGEIKIPENEPGSSIMPGKVNPTQCEAMTMVCCQVFGNDVTIGMAGASGNFELNVYMPVIAYNLLQSIHLLGDACNSFNEHCAIGIEPVPEKIDYFLHHSLMLVTALNRKIGYENAAKVAKTAYKNNKSLRETAVELGLLTGEEFDELVVPADMVHPR

SEQ ID NO: 6116 - DNA, 1413 bp, Halobacterium sp. NRC-1
  CDS (1)..(1413)
atgagcgaggattaccgcacggagcaggacagcctcggcgagatgcaggttcccgctgacgcctactggggggcacagacccagcgcgcgatcgagaacttcccgatctcggggatcgcgttcgggcggcggttcgtgcgcgcgctcggcgtcgtcaagaaggccgccgcgcaggcgaaccgcgacctcggcctcgttgacgacgagcgcgccgacgccatcgtcgcggccgccgacgaggtcatcgccggcgagcacgacgaccagttcccggtcgacgtcttccagaccgggtccgggacgtcctcgaacatgaacgccaacgaggtcatcgcgaaccgcgccgcggagctcctcggcgaggagatcggggatcgcgtcgtgcaccccaacgaccacgtgaactatggccagtccagcaacgacgtgatcccgaccgcgatgcacgtggcgagcctcgacgcgctcgtcaacgacgtcaaacccggcctggagacgctggcagcggaactcgacgacaaagcggacgcgttcgacggcgtcgtgaagaccgggcgcacgcacttgcaggacgccacgccggtgcggttgggccaggagttcggcggctaccgcacccaagtcgagaagggcatcgaccgcatcgaggccgttgccccgcgcctctcggagctcgcgctcggcggcaccgccgtcggcaccgggctgaacacccaccccgagttcccggagacggcggccggctacatcagcgaggagaccggcgttacgttccgtgaggcggacaaccacttcgaggcgcaggccgcccacgacgccatgaacgaggcccacggcgcgctgcgcacggtcgcggggtcgctgaacaagatcgccaacgacctccggctgcttgcctccggcccccgcaacgggctgggggagatcgagcagcccgagaaccagcccggctcctcgatcatgcccgggaagatcaaccccgtggtggcggaggcggtcaaccaggtccacaagcaggtcgtgggcaacgacgccgccatcgccgcgggggccgcggaggggcagatcgacttgaacctctacaagcccgtgctggcgcacaacttcctgcagtccgcggacatgctcgccaacgcgagcgctgccttcggcgagaagttcgtcgccaagctcgaagccaacgaggccgcctgcgaggcgcaggtcgagcgctcgatggcgctggcgaccgcgctcaaccccacgatcggctacgacaaggccagcgaggtcgcgaaggccgcgctgaaggaggggaaaacagtcacggaggtcgtcgtcgagaagggatacctctcggaggcggaggccgctgacgtgctcgaccccgaggggatgacccaccggggcatcctctccggcgacgacacgtag

SEQ ID NO: 6117 - protein, 470 aa, Halobacterium sp. NRC-1
MSEDYRTEQDSLGEMQVPADAYWGAQTQRAIENFPISGIAFGRRFVRALGVVKKAAAQANRDLGLVDDERADAIVAAADEVIAGEHDDQFPVDVFQTGSGTSSNMNANEVIANRAAELLGEEIGDRVVHPNDHVNYGQSSNDVIPTAMHVASLDALVNDVKPGLETLAAELDDKADAFDGVVKTGRTHLQDATPVRLGQEFGGYRTQVEKGIDRIEAVAPRLSELALGGTAVGTGLNTHPEFPETAAGYISEETGVTFREADNHFEAQAAHDAMNEAHGALRTVAGSLNKIANDLRLLASGPRNGLGEIEQPENQPGSSIMPGKINPVVAEAVNQVHKQVVGNDAAIAAGAAEGQIDLNLYKPVLAHNFLQSADMLANASAAFGEKFVAKLEANEAACEAQVERSMALATALNPTIGYDKASEVAKAALKEGKTVTEVVVEKGYLSEAEAADVLDPEGMTHRGILSGDDT

SEQ ID NO: 6118 - DNA, 1395 bp, Acinetobacter sp
  CDS (1)..(1395)
atgcaaactcgaattgaacacgacaccatgggtgaggttgaggtcccaaacgatgcactttggggagctcagacgcaacgcagtttgcaaaattttaagatcggtcaggaaagactcccacgagcgatgattcgtgcaatgggacttgtcaagaaggcagcagcgattaccaatgcagaactcgggcagttgccagaggatctgagccaatatatcgttggtgcggcagaagaagtaattgcaggtgactgggactcgcaatttcctttggtggtctggcaaacgggttcaggcacacaaagtaatatgaattgtaatgaagtgattgccaatattgcgaaccaaaaattaggaaatgctttaggttctcaatcacctgtgcatccgaacgatcatgtcaatcgtgctcagtcgacaaacgattctttcccaactgccatacatgttgctgcatcattacaaatcaacgaattgcttattcccgctgtaaaaagcctaaaagagaccttgaagaaaaaatcagatgaattttctgatattgtcaaaattggtcgcacgcatttacaggatgcaacaccgttaacattagggcaagagtttagtgggtatgtatcgcagctcgatcatgggttaaagcgattacagcaagcgcttgagggtttatacgagcttccgttaggtggaacggctgtgggtacaggtttaaatgcacatcctgattatgcagtgaatgcagctcaacaacttgctaaactgacaagtctgccattcgttacggcacctaataaatttgaagctttagctggacgtgatgctgcggtatttgcatctggtgcactgaaaactctcgctgtaagcttaaacaaaattgcaaatgatattcgttggctggcaagtggtccgcgttgcggatttggtgaaattcgtattccagaaaacgaaccaggctcaagcattatgccaggcaaagtaaatccaacgcaaagtgaagctatgacgatggtggttgcgcaggtgttaggcaatgatacaacgatcaatgttgcaggtgcttctggtaactttgaactgaatgtcttcatgcctgtaatcgcatttaatcttcttcagtcaattcagcttctaggtgatgcttgtaatagttttaacgaacattgtgcagtaggtatcgagccaaatagagaaaagattgattattttctgcataattcattaatgttggtgacggcattgaatcctgttattggttatgaaaacgctgcaaaagtagcaaaaacggcttacaaagaaaataaaacgttaaaacaggttgctgtagaactaaatttagtcacagaacagcagtttgatgaaatcgttcgtcctgaaaagatggtatctccaaataccaagtaa

SEQ ID NO: 6119 - protein, 464 aa, Acinetobacter sp
MQTRIEHDTMGEVEVPNDALWGAQTQRSLQNFKIGQERLPRAMIRAMGLVKKAAAITNAELGQLPEDLSQYIVGAAEEVIAGDWDSQFPLVVWQTGSGTQSNMNCNEVIANIANQKLGNALGSQSPVHPNDHVNRAQSTNDSFPTAIHVAASLQINELLIPAVKSLKETLKKKSDEFSDIVKIGRTHLQDATPLTLGQEFSGYVSQLDHGLKRLQQALEGLYELPLGGTAVGTGLNAHPDYAVNAAQQLAKLTSLPFVTAPNKFEALAGRDAAVFASGALKTLAVSLNKIANDIRWLASGPRCGFGEIRIPENEPGSSIMPGKVNPTQSEAMTMVVAQVLGNDTTINVAGASGNFELNVFMPVIAFNLLQSIQLLGDACNSFNEHCAVGIEPNREKIDYFLHNSLMLVTALNPVIGYENAAKVAKTAYKENKTLKQVAVELNLVTEQQFDEIVRPEKMVSPNTK

SEQ ID NO: 6120 - DNA, 1368 bp, Picrophilus torridus DSM 9790
  CDS (1)..(1368)
atgagaacagagcacgatgttataggcagtgttgagcttgatgattctgtttactatggcataaatacatacagggccatgaacaattttaaaatatcaggaataaaggaggatgatgaccatataaaggcaatagcaatggtcaagaaggcagctgcctatggaaaccatagagccgggaagcttaacgatgagctttacagtgcaatagaccaggcgtgtgacctggttatatcaggaaaatacaatgaccagtttgttatagatgtttaccaggcaggtgcaggaacctcatttaacatgaacgcaaacgaggttattgccaatatagcactggaaaaacttggccataaaaagggcgattataagataatacatccaaatgacactgtaaatatgagccagtcaacaaatgatatatacccaacaatgatgcgtgttgcaataatgataaaggctcctgaccttctggaatcaatgaaccagctgataatgtctctgaacaggaagggcgaggaattctcaaagatatacaaaacaggaagaacacacctgcaggacgccgttcgtgttacacttggcgatgagttccgtgcctgggcctatgcccttgcaaaggatatgaaggaaataaaaaatgccctggattacatattagaattaaacataggcggaacggctgttggaaacggcgccaatacacctgatggatacagggattacgccgttgaggcactttcaaatatgttaaaggtgaactttagaacctctggaaacatgatgggtgttatgcagtttatgactgatttttccaggttcatgaactctcttgcgaacactgcaatagaccttggcaagatctctgatgatttaaggcttctatactcgggacctggagccggaatccgtgagatactgttgccggcagtgcagcaggggtcatcaataatgcctggaaagataaatccatcaataccggaggcaatgaacatgatatgcaattccgtacttggtgcccagcaggcggtaaacatgtcggcaaaggcagggcagcttgaattaaacgtctttatgccaaatatagattatgagataacaagatcaataacaatacttaaaaatggcatggacatgctcagggaaagggccatagatggtataaaaccggatttaaagcactgcaggatgcatctgcagaacagctttggatctgccgcattgcttaatccataccttggctatgataccgttgctgcaatagttgaaagggcccttgaaaccggcgagaatatcagggatcttgtcctgcaaacaggaaaaataactgaggagcagtacgataaaatattctcgttcatgaatgaatga

SEQ ID NO: 6121 - protein, 455 aa, Picrophilus torridus DSM 9790
MRTEHDVIGSVELDDSVYYGINTYRAMNNFKISGIKEDDDHIKAIAMVKKAAAYGNHRAGKLNDELYSAIDQACDLVISGKYNDQFVIDVYQAGAGTSFNMNANEVIANIALEKLGHKKGDYKIIHPNDTVNMSQSTNDIYPTMMRVAIMIKAPDLLESMNQLIMSLNRKGEEFSKIYKTGRTHLQDAVRVTLGDEFRAWAYALAKDMKEIKNALDYILELNIGGTAVGNGANTPDGYRDYAVEALSNMLKVNFRTSGNMMGVMQFMTDFSRFMNSLANTAIDLGKISDDLRLLYSGPGAGIREILLPAVQQGSSIMPGKINPSIPEAMNMICNSVLGAQQAVNMSAKAGQLELNVFMPNIDYEITRSITILKNGMDMLRERAIDGIKPDLKHCRMHLQNSFGSAALLNPYLGYDTVAAIVERALETGENIRDLVLQTGKITEEQYDKIFSFMNE

SEQ ID NO: 6122 - DNA, 1374 bp, Thermoplasma volcanium
  CDS (1)..(1374)
atgagaactgaaagggatgtaattggagaaatacagcttgaagatactgtattttacggtataaatactgctagggccaaggaaaatttcaggataaccggcctgacctccgattctgaccacatcgtttctattgcacagataaaaaaagcagcagccatggctaatgcggaagctggtgcactggacaaggaaaaagctgaatttatagagaaagcgtgtgatgagatcataagtggaagataccacgaccaatttgttatagatgtttaccaggccggtgctggaacatctttcaacatgaacgcaaatgaggtaattgcaaacgttgcacttacattaatgggcaagaacaaaggagattactcagtaatacaccccaacgaccacgtcaacatgagccaatcaacaaatgacgtttatcctacaatgatgcggctaacggtgacgaaaaaagtgaagaaacttaaggaggccatttccgacttaatagaaagcctggaaaagaaatccaaggaacttaggggtataccaaaaccaggcaggacgcaccttcaggatgcagcacctgtaacggttggattggaattttctgcctacgcatatgcaataaaaaaggatagagatgaaattactgatgcccttgattatataatggaattaaacataggggggacggcagtcggcacgggcataaatacatcaaaaaattatcaggagaacgttgtaaagcatatagctgagataacgagggaaaatttcaggaagagcagcaatctgatgggaattatgcagtttatgactgatttttcgagagtgatgaatgctgttacgaacctagcactagatattgaaaagatagctaatgacataaggcttctctactcaggtcctgggacaggtatacatgaaataataatacccgcggtgcagcaaggttcgtccataatgcctggaaaaataaatccgtccatagcagaggcaatgaacatgatatgccattcggttataggtgcgcaacaggcagtaaacatgagcgtacaggccgggcaactggaactaaatgtaatgatgcctaatatagattacgagctaacgagatcaatcgacataatgagaaacggcctaataatgttcaaagaaaaactcatcgacgggatcaaggccaacgtaaacacatgcagagaacatctcgcaaatagctttggatccgctgcactcttgaatccataccttggctatgataatgttgcaaagatagtcagagaagccgtcgaaactggtaaatcaataaaatcattagtgttagcaactggtaaaatcacagaagagcagtatatgaaaattatggaaagtggagtcccaaaggattga

SEQ ID NO: 6123 - protein, 457 aa, Thermoplasma volcanium
MRTERDVIGEIQLEDTVFYGINTARAKENFRITGLTSDSDHIVSIAQIKKAAAMANAEAGALDKEKAEFIEKACDEIISGRYHDQFVIDVYQAGAGTSFNMNANEVIANVALTLMGKNKGDYSVIHPNDHVNMSQSTNDVYPTMMRLTVTKKVKKLKEAISDLIESLEKKSKELRGIPKPGRTHLQDAAPVTVGLEFSAYAYAIKKDRDEITDALDYIMELNIGGTAVGTGINTSKNYQENVVKHIAEITRENFRKSSNLMGIMQFMTDFSRVMNAVTNLALDIEKIANDIRLLYSGPGTGIHEIIIPAVQQGSSIMPGKINPSIAEAMNMICHSVIGAQQAVNMSVQAGQLELNVMMPNIDYELTRSIDIMRNGLIMFKEKLIDGIKANVNTCREHLANSFGSAALLNPYLGYDNVAKIVREAVETGKSIKSLVLATGKITEEQYMKIMESGVPKD

SEQ ID NO: 6124 - DNA, 1401 bp, Myxococcus xanthus
  CDS (1)..(1401)
atgagcacgaagaacgtccgtaccgagaaagacaccttcggtcccatcgacgtccccgccgaccggctgtggggcgcgcagacgcagcgcagcctccagaacttcgccatctccaccgagcgcatgccgctggccctcatccgcgccctggtgctggtgaagaaggccgccgcgcgggtgaacgtggagaacggctcgctggcgaaggagaagggcgaggccatcatccgggccgcggacgaggtgctggccggccagcacgacgcggagttccccttgagcgtctggcagacgggcagcgggacgcagacgaacatgaacacgaacgaggtgctcgccaaccgcgcctcggagctgctgggcggcgagcgcggcgagcgccgcaaggtccaccccaacgacgacgtcaacaaggggcagagctccaacgacgtcttccccaccgcgatgagcgtggccgccgtggccgccatcaccgagcacgtgctgccggagctgaaggcgctgcgcgacgtgctcgcgcagaaggcccgcgccttccatgacgtggtgaaggtgggccgcacccacctgcaggacgccacgcccctgacgctggggcaggaggtcggcggcttcgtggcgcagttggaccacgcgaagggccacctggagcgcaccctgccgcatcttctggagctggccctgggcggcacggcggtgggcaccggcctcaacgcccccaagggctatgccgagcgggtggcgcaggagctggcccagctcaccggccaccccttcgtcaccgcgcccaacaagttcgaggcgctggccgccaacgacgcgctggtgcaggcgcacggggcgctgaaggggctggcggcggtgctcttcaaggtggccaacgacgtgcgctggctgtcctcggggccgcgctcggggctggcggaaatcaccatcccggagaacgagccgggcagctccatcatgccgggcaaggtgaaccccacccagagcgaggcgctcaccatgctgtgcgcccaggtgatggggaacgacgtcgccgtcaccgtgggtggggcgtccggcaacttccagctcaacgtcttcaagccgctcatcgcccacaacctgctccagagctgccggttgctggcggatggcatgcgcagcttccgcctgcactgcgcggtgggcatcgagcccaaccggccccgcatccaggagaacctggagcgcagcctgatgctcgtcacggcgctcaacccccacatcggctacgacaacgcggcgaaaatcgccaagacggcccacagggacggcacgacgctcaaggagacggccgtggcgctggggctcgtcacccccgagcagttcgaccagtgggtccgcccggaggacatgacgggccacaaggggtag

SEQ ID NO: 6125 - protein, 466 aa, Myxococcus xanthus
MSTKNVRTEKDTFGPIDVPADRLWGAQTQRSLQNFAISTERMPLALIRALVLVKKAAARVNVENGSLAKEKGEAIIRAADEVLAGQHDAEFPLSVWQTGSGTQTNMNTNEVLANRASELLGGERGERRKVHPNDDVNKGQSSNDVFPTAMSVAAVAAITEHVLPELKALRDVLAQKARAFHDVVKVGRTHLQDATPLTLGQEVGGFVAQLDHAKGHLERTLPHLLELALGGTAVGTGLNAPKGYAERVAQELAQLTGHPFVTAPNKFEALAANDALVQAHGALKGLAAVLFKVANDVRWLSSGPRSGLAEITIPENEPGSSIMPGKVNPTQSEALTMLCAQVMGNDVAVTVGGASGNFQLNVFKPLIAHNLLQSCRLLADGMRSFRLHCAVGIEPNRPRIQENLERSLMLVTALNPHIGYDNAAKIAKTAHRDGTTLKETAVALGLVTPEQFDQWVRPEDMTGHKG

SEQ ID NO: 6126 - DNA, 1404 bp, Streptomyces avermitilis
  CDS (1)..(1404)
atgaccgacgaggacgacaagcagaactaccgtgtcgagcacgactccatgggtgaggtccgtgtccccgcggacgccaagtggcgggcccagacccagcgtgccgtggagaacttccccatctccgggcagcggctcgagcgggcgcacatcgaggccctcgcccggatcaagggagccgccgccaaggtgaacgccgagttgggcgtgctcgacaaggacgtcgccgaggccattcaggaggcggccgccgaggtcgcggaggggcgttgggacgagcacttccccgtggacgtgttccagaccggctccgggacctcgtccaacatgaacgccaacgaggtcatcgccacgctcgcgaccgaacggctcggcagggacgtacaccccaatgaccacgtgaacgcgtcgcagtcgtcgaacgacgtgttcccgtccagcattcacatcgcggccaccgccgccgtcacccgcgatctggtacccgccctggagcacctggccgccgcgctgggccgcaagtccgaggagttcgcggacgtcgtgaaggccgggcgtacgcatctcatggacgcgacgcccgtgaccctggggcaggagttcggcggatacgcggcccaggtgcggtacggcgtcgagcggctggccgcctccctgccgcggctcgccgaactgcccctcgggggcaccgcggtcgggaccgggatcaacaccccgccgggcttctccgccgccgtcatcgccgaggtcgcccgcgtcaccgggctgccgctcaccgaggcgcgcgaccacttcgaggcgcagggtgcgcgggacgggatcgtcgagaccagcgggcagttgcggaccatcgccgtaggactgacgaagatcgcgaacgatctgcggtggatggcttcggggccgcgtaccgggctctccgagatcagcctgcccgaccttcagccggggtcctcgatcatgcccggcaaggtgaatcccgtgattcccgaggccgtgctgatggtcgccgcacaggtgacgggcaacgacgcgaccgtcgccgccgccggagccgccggcaacttcgaactcaatgtgatgctgcccgtcatcgcgaagaacgtgctggagtccgtccggctgctcgcccatgtctcccggctgctggccgaccgcaccgtcgacgggatcgtcgcccatcgcgaccgggcccgtgagtacgccgagtcgtcaccgtccgtcgtcaccccgctgaacaagtacatcgggtacgaggaggccgcgaaggtcgccaagaaggccctcgccgagcggcagacgatccgtcaggtcgtcctggagagcggatacgtggaccgtggcgacctcaccctggagcagctcgacgaggcgctcgacgtcctgcggatgacgcacccctga

SEQ ID NO: 6127 - protein, 467 aa, Streptomyces avermitilis
MTDEDDKQNYRVEHDSMGEVRVPADAKWRAQTQRAVENFPISGQRLERAHIEALARIKGAAAKVNAELGVLDKDVAEAIQEAAAEVAEGRWDEHFPVDVFQTGSGTSSNMNANEVIATLATERLGRDVHPNDHVNASQSSNDVFPSSIHIAATAAVTRDLVPALEHLAAALGRKSEEFADVVKAGRTHLMDATPVTLGQEFGGYAAQVRYGVERLAASLPRLAELPLGGTAVGTGINTPPGFSAAVIAEVARVTGLPLTEARDHFEAQGARDGIVETSGQLRTIAVGLTKIANDLRWMASGPRTGLSEISLPDLQPGSSIMPGKVNPVIPEAVLMVAAQVTGNDATVAAAGAAGNFELNVMLPVIAKNVLESVRLLAHVSRLLADRTVDGIVAHRDRAREYAESSPSVVTPLNKYIGYEEAAKVAKKALAERQTIRQVVLESGYVDRGDLTLEQLDEALDVLRMTHP

SEQ ID NO: 6128 - DNA, 1386 bp, Streptomyces coelicolor
  CDS (1)..(1386)
atgagcgaataccgcatcgagcacgactccatgggcgaggtccgcgtccccgcggacgccaagtggcgcgcccagacccagcgcgccgtcgagaacttccccgtctccgggcagcgcatcgagcgcgcgcacatcgaggcgctggcgcggatcaagagcgcggcggcgaaggtcaacgccgagctgggagtgctcgacgaggacgtcgccggcgcgatccaggaggcggccggtgaggtggccgaggggaagtgggacgagcacttccccgtcgacgtgttccagaccgggtccgggacctcgtccaacatgaacaccaacgaggtcgtcgccaccctggcgactgaacggctcggccgcgacgtgcatcccaacgaccacgtcaacgcctcccagtcgtccaacgacgtcttcccgtcctcgatccacatcgccgccaccgccgccgtcacccgcgacctgatcccggccctggaccatctcgccggcgccctggagcgcaaggccggggagttcgccgacgtggtgaagtccgggcgtacgcacctcatggacgccacgcccgtcaccctgggccaggagttcggcggttacgcggcccaggtgcggtacggcatcgagcggcttcaggcctcactgccccggctcgccgagctgccgctgggcggcaccgcggtcggcaccggcatcaacaccccgcccggcttctccgccgccgtcatcgaggaggtggcccgcgcgacggggctgccgctgaccgaggcgcgcgaccacttcgaggcgcagggcgcccgggacggcatcgtcgagaccagcgggcagctgcggaccatcggcgtcgggctcacgaagatcgccaacgacctgcgctggatggcgtccggtccgcgcaccgggctcgcggagatctcgctgcccgacctccagcccgggtcgtccatcatgcccggcaaggtcaacccggtgatccccgaggcggtcctcatggtcgccgcccaggtcaccggcaacgacgcgacggtcgccgcggcgggcgcggccggcaacttcgagctgaacgtgatgctgccggtcatcgccaagaacgtgctggagtcggtgcggctgctcgccaacgtctcccggctgctcgccgaccgcaccgtggacgggatcgtggcgcaccccgagcgggcccgcgagtacgccgagtcctcgccctccgtggtcacgccgctcaacaagtacctcgggtacgaggaggccgccaaggtcgccaagagggcgctggccgagcggaagacgatccggcagaccgtgctggagggcggctacgtggaacgcggcgacctcacgcgggagcaactggaccaggccctggacgtgctgcggatgacccgcccgtga

SEQ ID NO: 6129 - protein, 461 aa, Streptomyces coelicolor
MSEYRIEHDSMGEVRVPADAKWRAQTQRAVENFPVSGQRIERAHIEALARIKSAAAKVNAELGVLDEDVAGAIQEAAGEVAEGKWDEHFPVDVFQTGSGTSSNMNTNEVVATLATERLGRDVHPNDHVNASQSSNDVFPSSIHIAATAAVTRDLIPALDHLAGALERKAGEFADVVKSGRTHLMDATPVTLGQEFGGYAAQVRYGIERLQASLPRLAELPLGGTAVGTGINTPPGFSAAVIEEVARATGLPLTEARDHFEAQGARDGIVETSGQLRTIGVGLTKIANDLRWMASGPRTGLAEISLPDLQPGSSIMPGKVNPVIPEAVLMVAAQVTGNDATVAAAGAAGNFELNVMLPVIAKNVLESVRLLANVSRLLADRTVDGIVAHPERAREYAESSPSVVTPLNKYLGYEEAAKVAKRALAERKTIRQTVLEGGYVERGDLTREQLDQALDVLRMTRP

SEQ ID NO: 6130 - DNA, 1581 bp, Brevibacterium flavum
  CDS (1)..(1581)
atgtctaagacgagcaacaagtcttcagcagactcaaagaatgacgcaaaagccgaagacattgtgaacggcgagaaccaaatcgccacgaatgagtcgcagtcttcagacagcgctgcagtttcggaacgtgtcgtcgaaccaaaaaccacggttcagaaaaagttccgaatcgaatcggatctgcttggtgaacttcagatcccatcccacgcatattacggcgtgcacacccttcgtgcggtggacaacttccaaatctcacgaaccaccatcaaccacgtcccagatttcattcgcggcatggtccaggtgaaaaaggccgcagctttagcaaaccgccgactacacacacttccagcacaaaaagcagaagcaattgtctgggcttgtgatcagatcctcattgagggacgctgtatggatcagttccccatcgatgtgttccagggtggcgcaggtacctcactgaacatgaacaccaacgaagttgttgccaaccttgcacttgagttcttaggccatgaaaagggcgagtaccacatcctgcaccccatggatgatgtgaacatgtcccagtccaccaacgattcctacccaactggtttccgcctgggcatttacgctggactgcagaccctcatcgctgaaattgatgagcttcaggttgcgttccgccacaagggcaatgagtttgtcgacatcatcaagatgggccgcacccagttgcaggatgctgttcccatgagcttgggcgaagagttccgagcattcgcgcacaacctcgcagaagagcagaccgtgctgcgtgaagctgccaaccgtctcctcgaggtcaaccttggtgcaaccgcaatcggtactggtgtgaacactccagcaggctaccgccaccaggttgtcgctgctctgtctgaggtcaccggactggaactaaagtccgcacgtgatctcattgaggctacctctgacaccggtgcatatgttcatgcgcactccgcaatcaagcgtgcagccatgaaactgtccaagatctgtaacgatctacgtctgctgtcttctggtcctcgtgctggcttgaacgaaatcaatctgccaccacgccaggctggttcctccatcatgccagccaaggtcaacccagtgatcccagaagtggtcaaccaggtctgcttcaaggtcttcggtaacgatctcaccgtcaccatggctgcggaagctggccagttgcagctcaacgtcatggagccagtcattggcgaatccctcttccagtcactgcgcatcctgggcaatgcagccaagactttgcgtgagaagtgcgtcgtaggaatcaccgccaacgctgatgtttgccgtgcttacgttgataactccattggcattatcacttacctgaacccattcctgggccacgacattggagatcagatcggtaaggaagcagccgaaactggtcgaccagtgcgtgaactcatcctggaaaagaagctcatggatgaaaagacgctcgaggcagtcctatccaaggagaacctcatgcacccaatgttccgcggaaggctctacttggagaactaa

SEQ ID NO: 6131 - protein, 526 aa, Brevibacterium flavum
MSKTSNKSSADSKNDAKAEDIVNGENQIATNESQSSDSAAVSERVVEPKTTVQKKFRIESDLLGELQIPSHAYYGVHTLRAVDNFQISRTTINHVPDFIRGMVQVKKAAALANRRLHTLPAQKAEAIVWACDQILIEGRCMDQFPIDVFQGGAGTSLNMNTNEVVANLALEFLGHEKGEYHILHPMDDVNMSQSTNDSYPTGFRLGIYAGLQTLIAEIDELQVAFRHKGNEFVDIIKMGRTQLQDAVPMSLGEEFRAFAHNLAEEQTVLREAANRLLEVNLGATAIGTGVNTPAGYRHQVVAALSEVTGLELKSARDLIEATSDTGAYVHAHSAIKRAAMKLSKICNDLRLLSSGPRAGLNEINLPPRQAGSSIMPAKVNPVIPEVVNQVCFKVFGNDLTVTMAAEAGQLQLNVMEPVIGESLFQSLRILGNAAKTLREKCVVGITANADVCRAYVDNSIGIITYLNPFLGHDIGDQIGKEAAETGRPVRELILEKKLMDEKTLEAVLSKENLMHPMFRGRLYLEN

SEQ ID NO: 6132 - DNA, 1428 bp, Bacillus subtilis
  CDS (1)..(1428)
atgttaaacggccaaaaagaatatcgcgtggaaaaagacttccttggggaaaaacaaattgaagcagatgtttattacggaattcagacgctccgtgcttctgaaaattttccgatcacaggatacaaaatccatgaggaaatgattaacgcactggcgattgtgaaaaaagctgcggctcttgccaacatggacgtgaaacggctgtatgaaggaattggccaagctatcgtacaagccgctgacgagattctggaaggcaagtggcacgatcagtttatcgtcgatccgattcagggcggtgccggaacttctatgaacatgaacgcgaatgaggttatcggaaaccgggcgcttgaaatcatgggacataaaaagggagattatatccatttaagtccaaacacacatgtgaacatgtcacagtctcagaacgatgtgttcccgactgctatccatatttccacattgaagctcttagaaaaactgctgaaaacaatggaagatatgcatagtgtgtttaaacaaaaagcacaggagtttcactctgttattaaaatgggccggacacaccttcaagatgcggttccgatccgtcttggccaggaattcgaagcttacagccgtgttctcgagcgtgatatcaaacgaatcaagcaatcgcgccagcacctgtatgaagtcaacatgggcgcaactgctgttggtacagggctgaacgctgatcctgaatatatcaaacaggtagtaaagcaccttgctgatattagcgggcttcctcttgtcggcgctgatcatcttgttgatgcgacacaaaatacagatgcctatacagaggtatcagcttcattaaaagtctgcatgatgaacatgtcgaagatcgcaaacgacctgcgcttaatggcgtcgggaccgcgcgccggacttgcggaaatttctctgcctgcacgtcagccgggttcatctattatgccggggaaagtcaatccggttatggcggagctgatcaaccaaattgcgttccaggttatcggaaatgacaatacaatctgccttgcttcagaagccggccagcttgagttgaacgtcatggagcccgtgcttgtctttaatttgcttcaatccatcagcatcatgaacaacggcttccgttcgttcactgacaactgcttaaaaggcattgaagccaacgaaaagcgtatgaagcaatacgtagaaaaaagcgcaggcgtgatcacagctgtcaatccgcatcttgggtatgaagcggcagctagaattgccagggaagcaattatgacagggcaatctgtccgggatctttgtctgcagcatgatgtgctgactgaagaagaattggatattattttaaacccatatgagatgaccaaaccaggtatcgcagggaaagaactattagaaaaataa

SEQ ID NO: 6133 - protein, 475 aa, Bacillus subtilis
MLNGQKEYRVEKDFLGEKQIEADVYYGIQTLRASENFPITGYKIHEEMINALAIVKKAAALANMDVKRLYEGIGQAIVQAADEILEGKWHDQFIVDPIQGGAGTSMNMNANEVIGNRALEIMGHKKGDYIHLSPNTHVNMSQSQNDVFPTAIHISTLKLLEKLLKTMEDMHSVFKQKAQEFHSVIKMGRTHLQDAVPIRLGQEFEAYSRVLERDIKRIKQSRQHLYEVNMGATAVGTGLNADPEYIKQVVKHLADISGLPLVGADHLVDATQNTDAYTEVSASLKVCMMNMSKIANDLRLMASGPRAGLAEISLPARQPGSSIMPGKVNPVMAELINQIAFQVIGNDNTICLASEAGQLELNVMEPVLVFNLLQSISIMNNGFRSFTDNCLKGIEANEKRMKQYVEKSAGVITAVNPHLGYEAAARIAREAIMTGQSVRDLCLQHDVLTEEELDIILNPYEMTKPGIAGKELLEK

SEQ ID NO: 6134 - DNA, 1410 bp, Brevibacterium flavum
  CDS (1)..(1410)
atgaccaccacttttagctccacccgcaccgaacatgacctcatcggcgacgccgaagtcccagctcacgtgtattggggcgttcacaccatgcgcgctgcagagaatttccagatcaccgatcaaaagcttgccgataatcctttcctcatcgcagctcttgcgcgcgtcaaacaggccgccgcccgcgccaacctacaacttggactgcttgatcaaactcgcgctgaagcaatcgatcaggcctgtgaccgcgttgctgccggagaattcaatgaacaattcattctcgacccgattcagggcggcgctggcacaagcaccaacatgaatgccaatgaggtcattgccaacgtagcgctggagattcttgggcatgaaaagggcgactaccagcaccttcaccccaatgatcacgtgaatctttcacaatccaccaacgatgcataccccacggcagtaaaaatcgccacctgttttgccgcccgcccgctgctcgacgccctgactgagcttgagcaagcatgccgcagcaaagccgtggaatttcggaccgtagtgaaaatgggacgcacccaactgcaagacgccgtccccatgaccgtcggccaagaattcggcggatgggccgtcacactgcgggaagaccacgatcgtttagaggaatccctcaagctcgtcaccgaaatcaacctcggcgcaaccgcgatcggcaccggacttaacgcaccagaaggatacgccgaagccgcacgcaagcacctggcagaactcaccgccctgccgctgtccaccagcccacacctcgtcgaagcaaccagcgacgtcggagccttcgtccacctctccggagtactcaaacgcgtcgccgtgaaactctccaaaatctgcagcgacctgcgactactctcctccgggccacgcgcaggcctcaacgacatccaactacccgctgtacaatccggctcctccatcatgcccggcaaagtcaaccccgtcatccctgaagttgtcaaccaaatcgcctaccaagtagtcggctacgacgccaccgtcaccatggccgcagaaggcggacaactccagctcaacgccttcgaacccgtcatcatgcactctatcggactgtcgatgaaacacctcgccaacggctgtagcacgctagcccgcaagtgcattgcgggcatcacggtcgacgaagatgctttacgacgccaagttgaacaatcaatcggcctcgtcaccgcactcaaccccgcccttggctatacccaatccaccatgatcgccatggaagccctccacaccggacgcggcgttgccgaactcgtcctcgaacgtgagctcctcaccgaagccgaactctccgaactgcttcgccccgaacgactcgccaacctcgcctcctag

SEQ ID NO: 6135 - protein, 469 aa, Brevibacterium flavum
MTTTFSSTRTEHDLIGDAEVPAHVYWGVHTMRAAENFQITDQKLADNPFLIAALARVKQAAARANLQLGLLDQTRAEAIDQACDRVAAGEFNEQFILDPIQGGAGTSTNMNANEVIANVALEILGHEKGDYQHLHPNDHVNLSQSTNDAYPTAVKIATCFAARPLLDALTELEQACRSKAVEFRTVVKMGRTQLQDAVPMTVGQEFGGWAVTLREDHDRLEESLKLVTEINLGATAIGTGLNAPEGYAEAARKHLAELTALPLSTSPHLVEATSDVGAFVHLSGVLKRVAVKLSKICSDLRLLSSGPRAGLNDIQLPAVQSGSSIMPGKVNPVIPEVVNQIAYQVVGYDATVTMAAEGGQLQLNAFEPVIMHSIGLSMKHLANGCSTLARKCIAGITVDEDALRRQVEQSIGLVTALNPALGYTQSTMIAMEALHTGRGVAELVLERELLTEAELSELLRPERLANLAS

SEQ ID NO: 6136 - DNA, 1434 bp, Rhodococcus sp
  CDS (1)..(1434)
atgacgatgcgcatcgagcacgacctgctcggtgatcgcgaagtgcctgcggaggcctactacggcatccacacgctgagagcactggagaacttcccgatcaccggtattcctctctcggtccacccggacatggtatcggcgttggctgcggtcaagcaggccgctgctcgggcgaacgccgacctcggaatcctctcgcccgagcatgcagcggcgatcgagcaagcttgcaaggagattcgtgcgggcaggttcaccgaccagttcgtcgtcgacgtcattcagggtggtgccggcacgtcatcgaacatgaacgccaacgaagtggtcgcgaaccgcgcgctcgaaattctcggcggcgaacgggggcagtaccaattcctccatccgctcgaacacgtcaacatgagtcagagcaccaacgacgtctaccccaccgcgatcaaaatcggcttgcaaggtgccgtcaccaggcttcgaggtgcgatggacgaacttgcaggcgcattcgcggagaaagcagccgagttctcccacgtgctcaaggtcgggcggactcagttgcaagacgcggtcccgatgactctcggtcaagagattgtcacgttcgccgtgatgatcaaggaggactctcagagactggaagaggccgctcggttgatctcggagatcaacctgggagggacggcgataggtaccggtctcaatgcgcacccggagtacgccagacgtgtgcgtgagcatctggtgtcgatcaccggtctcgacatctcgacggcatcggatctcatcgaagcaacccaggacgtcggggccttcgttcagctgtcgggagtgctcaagcgtaccgcggtcaaactgtccaagatctgcaacgatctgagattgctgtcctcaggcccacgagcaggtctgggtgagatcaatttacctgcggtgcaggcaggttcgtcgatcatgcccggaaaggtcaatccggtcattccggaagtggtcaatcagattgcctaccgggtggtgggaaacgatctgaccatcaccatggctgccgaggcgggtcaactgcagctcaacgcattcgaaccggtcattgcacacagcttgttcgagactgcagaactcctcacgcggggctgcactgtgttgcgcgagcgatgcgtgatcggcattaccgccaacgtcgagcatctcgaacgaacggtcgcggcttcgatcggtgtcgtgaccgccctcaatccctacatcggctacacagccgcgacggaattggcggcggacgcgcttgcttccggtcgtaccgtcgtggagttggtgctcgaacgcgggttgttgggcaaggaggatttggacgcgatcatggagcctgcgaatttggcacgaactgcgatcgtgtcggctcccgatttcgatccactcgtcccgtcgacctga

SEQ ID NO: 6137 - protein, 477 aa, Rhodococcus sp
MTMRIEHDLLGDREVPAEAYYGIHTLRALENFPITGIPLSVHPDMVSALAAVKQAAARANADLGILSPEHAAAIEQACKEIRAGRFTDQFVVDVIQGGAGTSSNMNANEVVANRALEILGGERGQYQFLHPLEHVNMSQSTNDVYPTAIKIGLQGAVTRLRGAMDELAGAFAEKAAEFSHVLKVGRTQLQDAVPMTLGQEIVTFAVMIKEDSQRLEEAARLISEINLGGTAIGTGLNAHPEYARRVREHLVSITGLDISTASDLIEATQDVGAFVQLSGVLKRTAVKLSKICNDLRLLSSGPRAGLGEINLPAVQAGSSIMPGKVNPVIPEVVNQIAYRVVGNDLTITMAAEAGQLQLNAFEPVIAHSLFETAELLTRGCTVLRERCVIGITANVEHLERTVAASIGVVTALNPYIGYTAATELAADALASGRTVVELVLERGLLGKEDLDAIMEPANLARTAIVSAPDFDPLVPST

SEQ ID NO: 6138 - DNA, 1413 bp, Bacillus clausii KSM-K16
  CDS (1)..(1413)
atggagtaccgggttgaacgagacttactaggagaaaaacaagtaccgaaacatgcttattatggcatccaatcgctgcgggcaaaggataattttccgattaccggctatccgccccaccctgaacttattcgcgctttcggctatgtgaaaaaagcggctgcccttgcaaaccgggatgtcggtgtactgcgcccccacattgctgaagcgattattaaggcaagcgatgaagtaattgaagggcgtttgaatgatcattttattgtcgattcgatccaaggaggcgccggcacgtcgtttaatatgaatgccaatgaagtcattgctaaccgggcgattgaaattcttggcggcgaaaaaggcgattatttaaaagtcagtcccaacacacacgtcaacatggcccagtctaccaatgattcatttccgacggcgattcatattgccgctttaaatatgacaaagggcttgacggaagaattgcagaaattgatcaacgaaatggaagcgaaagccgaagaatttgacagcgtcctaaaaatggggcggacccacttgcaagatgcagtccctattcgactagggcaggaatttggctcgtaccgcagagtgctagcccgtgatctaaaacgggtaagccgttcggcagaccacctccacgacatcaatatgggtgcaaccgctgtaggaacgggtttgaacgccaaaccggaatacattgaaaaagttgcaaaacatttggctgacttgactgagctgccgttgaaaacggcggaggatcttgtcgatgccacccaaaatacagatgcctatacagagctttctagttcgttaaaaattttagctattaatttatcgaaaatcgcaaatgacttacgtttaatgagctcgggcccgcggaccggattgaatgaaatcaatttgccgccgcgacagccgggttcatcgatcatgcctggaaaagtaaatccggttatgtgtgaagtcattaaccagctttcttttcaagttatcggcaatgaccatacgatcagccttgcttcagaagcgggccaacttgaactaaacgtgatggaacctgtactcgtttttaatttattgcaatcattaacggtgctacaaaacggtatgcgcgtctttaaagattacgcaattgccggcattaccgctaacgtggagcgatgccgggaacttgtagaacatagcgtcggtattgtaacggcaatcaatccccatgtcggctatgaagtagctactcgtgtagctaaagaagcaattgaaacagggcggccggtccgggaaatttgtcttgaacggggcatcctttcagaggaagaattgaatgaaattcttgatccaaaagaaatgacaaaacccggtatcgcgggctcccgttttttgccgttataa

SEQ ID NO: 6139 - protein, 470 aa, Bacillus clausii KSM-K16
MEYRVERDLLGEKQVPKHAYYGIQSLRAKDNFPITGYPPHPELIRAFGYVKKAAALANRDVGVLRPHIAEAIIKASDEVIEGRLNDHFIVDSIQGGAGTSFNMNANEVIANRAIEILGGEKGDYLKVSPNTHVNMAQSTNDSFPTAIHIAALNMTKGLTEELQKLINEMEAKAEEFDSVLKMGRTHLQDAVPIRLGQEFGSYRRVLARDLKRVSRSADHLHDINMGATAVGTGLNAKPEYIEKVAKHLADLTELPLKTAEDLVDATQNTDAYTELSSSLKILAINLSKIANDLRLMSSGPRTGLNEINLPPRQPGSSIMPGKVNPVMCEVINQLSFQVIGNDHTISLASEAGQLELNVMEPVLVFNLLQSLTVLQNGMRVFKDYAIAGITANVERCRELVEHSVGIVTAINPHVGYEVATRVAKEAIETGRPVREICLERGILSEEELNEILDPKEMTKPGIAGSRFLPL

SEQ ID NO: 6140 - DNA, 1616 bp, Arabidopsis thaliana
  CDS (44)..(1576)
acacgtttaataggcccgaagttgctatctagcagttgtagccatggccgctttgacaatgcagtttgaaggagagaagaaaaacgtatccgaagttgcagacgtaaccctcaagcaagaagatgaacaacaagaacgtagatcttattcgacgccgtttagggaagagagagacacctttggcccgatccaagttccttccgataaattatggggagcacagacgcagagatcgcttcagaacttcgagattggtggtgaccgcgagcgaatgcccgaaccaatcgtccgagcttttggtgtcttgaagaaatgtgctgccaaggttaacatggagtatggtcttgatccaatgattggggaagccataatggaagctgcacaagaagtagcagaaggaaagctcaatgatcatttccctcttgttgtatggcaaactggtagtgggacgcagagtaatatgaatgctaatgaggtcattgccaatagagcagctgagattcttggtcacaaacgtggtgaaaaaattgtgcacccaaatgaccatgtgaacagatcacaatcttctaatgacacttttccaactgtcatgcacattgcagctgcaaccgagattacttcgaggctaatccctagtttgaaaaatttgcatagctctttggaatctaagtccttcgagtttaaagatatagtgaaaatcggaagaactcatactcaagatgctacacctttgacattaggacaagaatttggtggctatgctactcaagttgagtatggacttaatagagtcgcatgtactctaccccgcatctatcagcttgcacaaggtggaactgctgttgggaccggattaaacactaagaaagggtttgatgtaaagatcgctgctgcagtagctgaagaaacaaacttgccattcgtcaccgcagaaaacaagtttgaagctctggctgcacacgatgcttgtgttgaaacaagtggatctcttaacacaatcgccacatcattgatgaagattgccaatgatatacgttttcttggaagtggtccaagatgtggtcttggtgaactttctctgcctgagaatgaaccaggaagcagtattatgcctggaaaggtaaatcctacacagtgtgaggccttgactatggtttgtgctcaagttatgggaaaccatgtagccgtgacaattggtgggtcgaatggtcattttgaattgaatgtattcaagccggttatcgcaagcgctctcttacattccattagactaatagcagatgcttcagcttcatttgagaaaaactgtgttagaggcattgaggccaacagagaaaggatctcaaagctattgcacgagtctcttatgcttgtgacatcattgaatcctaaaattggctatgacaatgctgcagcagtagccaaaagagctcacaaagaaggatgcacattaaaggtaaacaataaactattaacgttttcatcactaaataaatcggaatttaaacccatttttagcaagagaaaacatgttcatgtttgttacaatatatttgttgttctattttggatttaaaccttctccagtgaaaattatataatacaatacctttgag

SEQ ID NO: 6141 - protein, 510 aa, Arabidopsis thaliana
MAALTMQFEGEKKNVSEVADVTLKQEDEQQERRSYSTPFREERDTFGPIQVPSDKLWGAQTQRSLQNFEIGGDRERMPEPIVRAFGVLKKCAAKVNMEYGLDPMIGEAIMEAAQEVAEGKLNDHFPLVVWQTGSGTQSNMNANEVIANRAAEILGHKRGEKIVHPNDHVNRSQSSNDTFPTVMHIAAATEITSRLIPSLKNLHSSLESKSFEFKDIVKIGRTHTQDATPLTLGQEFGGYATQVEYGLNRVACTLPRIYQLAQGGTAVGTGLNTKKGFDVKIAAAVAEETNLPFVTAENKFEALAAHDACVETSGSLNTIATSLMKIANDIRFLGSGPRCGLGELSLPENEPGSSIMPGKVNPTQCEALTMVCAQVMGNHVAVTIGGSNGHFELNVFKPVIASALLHSIRLIADASASFEKNCVRGIEANRERISKLLHESLMLVTSLNPKIGYDNAAAVAKRAHKEGCTLKVNNKLLTFSSLNKSEFKPIFSKRKHVHVCYNIFVVLFWI

SEQ ID NO: 6142 - DNA, 1647 bp, Bradyrhizobium japonicum
  CDS (22)..(1485)
actgcctatatagaggagcacatgaagaggccgcgcggcatttcgcgcggcggaatggatgtgctcatggccaaatctgcacgcacgaagaccgctcgccccgcgacccgcaccgagaccgacagtttcggtcccatcgaggtcccctccgatcgctattggggcgcgcagaccgaacgttcgcggcagaatttccgcatcggcacggatcgcatgccgatctcgctcgtgcatgcgctcggcatcgtcaagctcgccgcggcgcagtccaaccgcgagctcggcctgctcgaccagcgccgcgccagtgccatcatccgcgccgcgcgcgaggtatcgacggcagacctcgacgatcatttcccgctcgtcgtgtggcagaccggctcgggcacgcagaccaacatgaacctcaacgaggtgatcgccaaccgcgccaatgagctgctcggcggcgagctcggcgccaagaagccggtgcatccgaacgatcacgtcaacatgagccagtcgtcgaacgactcttttcccaccgcaatgcatatcgcggcggctagccgcatcaccgccgatctcgttcctgcccttggcgaactgctccgcgcgctgcgcaagaaggagaaggagttcgccaagatcgtcaagatcggccgcacccacacccaggacgcgacgccgctgacgctcggccaggaattctccggctatgccgcgcaggtcgaacgcgggatcgcgcgactgaaggtcgcggtgaaggagctctatccgctggcgcagggcggcaccgccgtcggcaccggcctcaacgcgaagccgcgctttgcaagactgttcgcaaagcacgttgccggaatcaccaaactgcccttcaccagcgccgccaacaaattcgaggcgctggcctcgaacgatgcttatgtgctggcgcacggcgccatcagttcggtcgcgacaggcctgttcaagatcgccaacgacatccgcctgctcggatcgggtccgcgctcagggctcggcgagctgatcctgccggagaacgaaccgggctcgtcgatcatgccgggcaaggtcaatccgacgcagtgcgaggcgatgaccatggtgtgctgccaggtgttcggcaatcacaccgcgatcacggtcgccggcagccagggccatttcgagctcaacgtctacaagcccgtgctggcctacaacatgctgcactcgatccgcctgatggccgatgccgcgcgctccttcaccgaacattgcgtcagcggcatccgcgccgacgaaaagcgcataagtgagctgatgcagcgctcgctgatgctggtgaccgcgctcgcaccgaagatcggctacgacaacgccgccaaggtcgcgaagacggcgcatgccaacggcaccacgctgaaggaggaagcgctgcggctcggcttcgtcacagcggacgagttcgaccgtttggtgcagccggagaagatgacgaaaccgtagtaattcctaattccgatagtcatccgtaatgatacggagccaaaaagctcataattgtaaggcttaaaggagaggatttgattaccgtcaatgttccggaaagacggcgtgctacgaagctattctgcccttggcggggcgaaattcatcgtttgatggcca

SEQ ID NO: 6143 - protein, 487 aa, Bradyrhizobium japonicum
MKRPRGISRGGMDVLMAKSARTKTARPATRTETDSFGPIEVPSDRYWGAQTERSRQNFRIGTDRMPISLVHALGIVKLAAAQSNRELGLLDQRRASAIIRAAREVSTADLDDHFPLVVWQTGSGTQTNMNLNEVIANRANELLGGELGAKKPVHPNDHVNMSQSSNDSFPTAMHIAAASRITADLVPALGELLRALRKKEKEFAKIVKIGRTHTQDATPLTLGQEFSGYAAQVERGIARLKVAVKELYPLAQGGTAVGTGLNAKPRFARLFAKHVAGITKLPFTSAANKFEALASNDAYVLAHGAISSVATGLFKIANDIRLLGSGPRSGLGELILPENEPGSSIMPGKVNPTQCEAMTMVCCQVFGNHTAITVAGSQGHFELNVYKPVLAYNMLHSIRLMADAARSFTEHCVSGIRADEKRISELMQRSLMLVTALAPKIGYDNAAKVAKTAHANGTTLKEEALRLGFVTADEFDRLVQPEKMTKP

SEQ ID NO: 6144 - DNA, 1383 bp, Chlamydophila pneumoniae, Chlamydia pneumoniae
  CDS (1)..(1383)
atgcgacaagaaaaggatagtttaggaatcgtagaagttcctgaggataagttatatggagctcaaactatgcgttctaggaattttttttcttggggacctgagttgatgccttatgaggtaatacgagctctcgtatggattaaaaaatgtgctgctcaggcgaatcaagatttaggatttttggattccaagcattgcgatatgattgttgctgctgccgatgagattttagagggaggttttgaagagcatttccctttaaaagtttggcagacagggagcggcacacaatctaatatgaatgtgaatgaggtgattgcgaatcttgccattcgtcatcacggaggggtgttaggcagtaaggatcctatccatcctaatgatcatgtgaataagtcccaatcgtccaatgatgttttccctacagcaatgcatatcgctgctgtgattagtttaaaaaataagttaattccagctttagatcatatgattcgggtgttagatgctaaagtggaagaatttcgtcatgatgtaaagataggacggacccatcttatggatgcggtgcctatgacgttgggtcaggaattttctggttatagcagtcaattgcgtcactgcttagagagtatagcattttctttagctcatttatatgaacttgcgattggagctactgctgtagggactgggttgaatgttcctgaagggttcgtggaaaagatcatccattatttaaggaaggaaacagatgaaccgtttattccagcttccaattatttttcagcactgtcttgtcacgatgctttagtagatgcccatgggtctttagcaactttagcatgtgctttaactaagatagctacggatttgagctttttaggttcaggacccaggtgtgggttgggtgagttatttttccctgaaaatgaaccaggatcttctatcatgcctggtaaagtcaatcctacgcagtgtgaagctctccaaatggtttgtgctcaagttcttgggaataatcaaacagtgattattggaggaagtcgaggaaattttgagcttaatgtgatgaagcctgtgatcatctataatttcctgcagtctgtggatctcctttctgaggggatgagggctttctctgaattctttgtgaaaggattaaaagtaaataaagctcgtttacaagataatatcaataattctttgatgttggttacagctttagctcctgtattaggttacgacaagtgttcgaaagcagcactgaaagcatttcatgaatctatatctttgaaggaggcgtgtctagctttgggatatctttctgagaaggaatttgatcgtttagtggttcctgagaatatggtgggaaaccattag

SEQ ID NO: 6145 - protein, 460 aa, Chlamydophila pneumoniae, Chlamydia pneumoniae
MRQEKDSLGIVEVPEDKLYGAQTMRSRNFFSWGPELMPYEVIRALVWIKKCAAQANQDLGFLDSKHCDMIVAAADEILEGGFEEHFPLKVWQTGSGTQSNMNVNEVIANLAIRHHGGVLGSKDPIHPNDHVNKSQSSNDVFPTAMHIAAVISLKNKLIPALDHMIRVLDAKVEEFRHDVKIGRTHLMDAVPMTLGQEFSGYSSQLRHCLESIAFSLAHLYELAIGATAVGTGLNVPEGFVEKIIHYLRKETDEPFIPASNYFSALSCHDALVDAHGSLATLACALTKIATDLSFLGSGPRCGLGELFFPENEPGSSIMPGKVNPTQCEALQMVCAQVLGNNQTVIIGGSRGNFELNVMKPVIIYNFLQSVDLLSEGMRAFSEFFVKGLKVNKARLQDNINNSLMLVTALAPVLGYDKCSKAALKAFHESISLKEACLALGYLSEKEFDRLVVPENMVGNH

SEQ ID NO: 6146 - DNA, 1392 bp, Campylobacter jejuni
  CDS (1)..(1392)
atggaatacagagttgaacatgataccatgggtgaagttaaggttccaaatgacaaatattggggagctcaaactgaaagaagttttgaaaatttcaaaatcggttgtgagaaaatgccaaaggttttaatctatgcttttgcaaatcttaaaaaatctttagctttggtcaataacaaacttggcaaacttgatgatgctaagaaaaatgctatagttcaagcttgcgatgagattatcgcaggtaaatttgatgataattttccacttgcgatttggcaaacaggttcaggcacacaaagcaatatgaatatgaatgaagttattgcaaatcgtgccactgaaatcatgggcggggattttcgcaaagaaaagcttgtacatccaaatgatcatgttaatatgagtcaaagttcaaatgatacttttccaacagctatgagtatcgttgcggttgagcaagtagagaaaaagcttatccctgcgcttgatgagcttattgcaacttttgaaaaaaaagtaaaagaatttgatggtattatcaagataggacgcacgcatttacaagatgctactccacttactctagcgcaagaatttagtggatatctttctatgcttttacattcaaaagagcaaatcatcgcttctttaccaactttaagagaacttgccataggaggaaccgcagtgggaacagggcttaatgcacatccagaattaagccaaaaagtaagtgaagagctaactcaacttataggtacaaaatttatttcaagtccaaataaatttcatgctttaacaagtcatgatgcgattaattttactcatggagctatgaaaggtttggctgcaaatttaatgaaaattgcaaatgatataagatggttagcttcaggcccaagatgcggtcttggtgagcttatcatccctgaaaatgagccaggaagttcgattatgccaggtaaggtaaatcctacccagtgtgaagctgttactatggttgctgtacaagtgatgggaaatgatgtagctatcggatttgcagcaagtcaaggaaattttgaacttaatgtgtttaagcctgtgattatttataatttcttgcaaagtcttgatttgttggctgattctatgcattcattcaatatccattgtgctgtaggcatagaaccaaatcgtgcaaaaatcgatcataatcttcataattctttaatgctagttaccgctctaaatccacacataggttatgaaaacgctgctaaagtagccaaaaatgcccataaaaaaggtatttctttaaaagaaagcacaatggagcttggtttggttagcgaagaagatttcaataaatttgttgatcctactaaaatgataggcccaaaagcctag

SEQ ID NO: 6147 - protein, 463 aa, Campylobacter jejuni
MEYRVEHDTMGEVKVPNDKYWGAQTERSFENFKIGCEKMPKVLIYAFANLKKSLALVNNKLGKLDDAKKNAIVQACDEIIAGKFDDNFPLAIWQTGSGTQSNMNMNEVIANRATEIMGGDFRKEKLVHPNDHVNMSQSSNDTFPTAMSIVAVEQVEKKLIPALDELIATFEKKVKEFDGIIKIGRTHLQDATPLTLAQEFSGYLSMLLHSKEQIIASLPTLRELAIGGTAVGTGLNAHPELSQKVSEELTQLIGTKFISSPNKFHALTSHDAINFTHGAMKGLAANLMKIANDIRWLASGPRCGLGELIIPENEPGSSIMPGKVNPTQCEAVTMVAVQVMGNDVAIGFAASQGNFELNVFKPVIIYNFLQSLDLLADSMHSFNIHCAVGIEPNRAKIDHNLHNSLMLVTALNPHIGYENAAKVAKNAHKKGISLKESTMELGLVSEEDFNKFVDPTKMIGPKA

SEQ ID NO: 6148 - DNA, 1398 bp, Yersinia pestis
  CDS (1)..(1398)
atggcaactacccgcagtgaaaaggattctatggggtctatcgatgtacctgcaaaccaattatggggggcgcaaactcaacgttcattggcgcattttcgaatttcacaagaaaaaatgccaacagagctaattcatgcattggctctgaccaaacgagcggcagctcaagtgaatatggacctaggcttgctgccagccgagcgtgcaaaagcgattatgcgggccgcagatgaagttctggatggcgctcatccaaccgagttccctctcgccatctggcaaaccgggtcgggtactcagacgaatatgaatatgaatgaggtactggcaaaccgtgcgagtgagttgctcgggggggcgcgggggaataaccgtttggttcatcccaatgatgatgtcaataaaagccaaagttcaaatgatgtcttcccaacggcgatgcatgtcgctgcagtgatgggggtgagtgaacatcttcttcctgaactgaaggtgttacagaaaaccttggccgacaaagcagaagcttatcgcgatattgtaaaaattggccgtacacatttacaagatgcgacccctttaacgttggggcaggaaatttccgggtgggcggcaatgttatctcacagtgtgcggcatattgaggcgacccttcctcacctgtgtgaattagcgcttgggggaacagcggtggggactggcctcaatacgcatcctgaatatgctgtacgagtagctaatgaaatagccacactgacacgccaaccgtttatcactgccccgaataaatttgaatcattgggaacctgcgatgcattggttcatggtcacggtgcgctaaaaggcttagcggcatccctgatgaaaattgccaatgatgtccgttggttatcatcaggccctcgctgtggtattggcgaaatatctattccggaaaatgagccaggcagttctatcatgccaggcaaagtgaatccaacacagtgtgaagcgatgaccatgctatgtgctcaagttatgggtaatgatgtggctatcaatatcggtggggcgtccggcaactttgaattaaacgtgttccgtccattggtcatccataacttcctgcaatctgttcgtttgttggctgatggaatgcgtggttttaatgagcactgcgctttgggaattgaacccaaccgcgaccgtattacgcaattgctcaatgaatcgctgatgttagttaccgcgctcaatacccatattggctacgataaagcagctgaaatcgccaaaaaggcgcataaagaggggctaacactgaaagcagcagctatggcattgggttatcttaccgatgcagagtttgatgaatgggttcgaccggaagatatggtcggcagtatgaagaaatag

SEQ ID NO: 6149 - protein, 465 aa, Yersinia pestis
MATTRSEKDSMGSIDVPANQLWGAQTQRSLAHFRISQEKMPTELIHALALTKRAAAQVNMDLGLLPAERAKAIMRAADEVLDGAHPTEFPLAIWQTGSGTQTNMNMNEVLANRASELLGGARGNNRLVHPNDDVNKSQSSNDVFPTAMHVAAVMGVSEHLLPELKVLQKTLADKAEAYRDIVKIGRTHLQDATPLTLGQEISGWAAMLSHSVRHIEATLPHLCELALGGTAVGTGLNTHPEYAVRVANEIATLTRQPFITAPNKFESLGTCDALVHGHGALKGLAASLMKIANDVRWLSSGPRCGIGEISIPENEPGSSIMPGKVNPTQCEAMTMLCAQVMGNDVAINIGGASGNFELNVFRPLVIHNFLQSVRLLADGMRGFNEHCALGIEPNRDRITQLLNESLMLVTALNTHIGYDKAAEIAKKAHKEGLTLKAAAMALGYLTDAEFDEWVRPEDMVGSMKK

SEQ ID NO: 6150 - DNA, 1368 bp, Listeria monocytogenes
  CDS (1)..(1368)
atggaacgaatagagcgagatacgcttggagaaatttctgtagatgcgacgaaatattggggagcgcaaacagaacgaagtaaaaggaattttgctattggtgataatcctatgccgatagaaattatatatgcttttgctcagttaaagaaagccactgcaaaagtgaacgcagcagaaggaaaactagccgaagaaaaagcgatagcgattggccaggtttgtgatcaaatcattcaaggagaactagatgagcattttcctttagtcgtttggcaaacaggaagcggaacgcagagcaacatgaatgtcaatgaagttatcgcacacgttgccaacttaactttaggcgaaggacaaattcatccaaatgatgatgttaacatgtcacaaagctcgaacgacacatttccaacagcgatgcacattgccgcatacggggctttagtaacaaaacttttaccagaaataactaaaatggaagctgttttgacagagaagaaaaataaatatatgcatctcgttaaaattggtagaacgcatttacaagatgcaactcctttaacacttggtcaagaaattagtggctgggaagcatgtcttacaaataataaaaactatcttgaaacaagtatgaaagcaattttgccacttgcaattggcgggactgcagttggaacgggcttaaatgcctcacgtgattttggtgataaggttgccgaagaattgatgaaacaaacgggatatccttttacttctgattccaataagtattttgctttaactagtcatagtccgattaattttgttcatggcgccattcgtagccttgcttcggatctaatgaaaattgctaatgatatccgtttattagcaagtggaccacgtagcggcataggtgagctagagataccagctaatgaaccaggaagctctattatgcccgggaaagtaaaccctacccaatgtgaagcaattacgatggtagcggctcaagtcatgggaaatgatgtgacaattaatgttgccgcaagccaagggaactttgagttaaatgtctacaagccggttatcatttttaatttcctagaatctatcaaacttcttgcagatagcatgcgttcgttccgagtgcattgtttggaaggacttactgcgaatgaaaaagttattgaaacaaaagtaaatgactccctaatgcttgttacagcattgaatccgcatatcggctatgaaaaagctgctaaaattgccaaactggcttttgatgaaaatacgacattaaaagaagcggcaatcaaaaccggctttgtgacagaaaaagaatttgatttgtggataaatccattgaaaatgactaatttgtaa

SEQ ID NO: 6151 - protein, 455 aa, Listeria monocytogenes
MERIERDTLGEISVDATKYWGAQTERSKRNFAIGDNPMPIEIIYAFAQLKKATAKVNAAEGKLAEEKAIAIGQVCDQIIQGELDEHFPLVVWQTGSGTQSNMNVNEVIAHVANLTLGEGQIHPNDDVNMSQSSNDTFPTAMHIAAYGALVTKLLPEITKMEAVLTEKKNKYMHLVKIGRTHLQDATPLTLGQEISGWEACLTNNKNYLETSMKAILPLAIGGTAVGTGLNASRDFGDKVAEELMKQTGYPFTSDSNKYFALTSHSPINFVHGAIRSLASDLMKIANDIRLLASGPRSGIGELEIPANEPGSSIMPGKVNPTQCEAITMVAAQVMGNDVTINVAASQGNFELNVYKPVIIFNFLESIKLLADSMRSFRVHCLEGLTANEKVIETKVNDSLMLVTALNPHIGYEKAAKIAKLAFDENTTLKEAAIKTGFVTEKEFDLWINPLKMTNL

SEQ ID NO: 6152 - DNA, 1395 bp, Deinococcus radiodurans
  CDS (1)..(1395)
atgaccaaaacccgccaagaaaccgacacgatgggcaagatggacgtggacgccagccgctactggggcgcacagaccgagcgcagcatccacaacttcccgattgggcgcgacaccttcgtgtggggccgccccgtcatccgggcgctgggcatcctgaaaaagggcgcggcgcaggccaacgccgaactcggtgaactgcccgccgacgtggccgacctcatcgtgaaggccgccgacgaagtgattgccggcaaactcgacgaacactttccgctggtagtgttccagaccggctcgggcacccagagcaacatgaacgccaacgaggtgatttccaaccgcgccatcgaactcgccggcggcgaaatgggcagcaagaagccggtccaccccaacgaccacgtgaaccgcggccagagctccaacgacaccttccccactgccatgcacatcgcggtggtgctggaactcaacgagcggctgtacggcgcggtcggcaagctgcgcgacaccctgcacgccaaggccgagcagtacaaggacctcgtgaaagtgggccgcacccacctgcaagacgccacgcccatcacgctggggcaggaaatcggcggctgggtggcgcaactcgactacgcgctgtccgaagtcaagcacgcgggcgaaggcctgctcgacctcgccatcggcggcaccgccgtgggcaccggcctgaacgcgcaccccaaattcggtgatctggccgccaagaagtacgaagaagaaaccggctaccacttccgcagcgccgagaacaagttcgccgccctgagcgcccacgacgcgctggtgcagacctcggcggccctgcgtaccctggccggcgccctgatgaagatggcgaacgacgtgcgctggctggcgagcggcccgcgcaacggcatcggcgaaatcaccattcccgagaacgagcccggctccagcatcatgcccggcaaggtgaaccccacccagagtgaggccatgacgatggtcgccacccgcgtgttcggcaacgacgccaccgtcgcttttgccggcagccagggcaacttccagctgaacgtgttcaagccagtgatggttcacgccgtgctggaaagcattcgcctgatttccgacgcctgcctggccttcaacgaccactgcgcggtgggcatccagcccaacgaggccaagatcaaggaaaacctcgacaagaacctgatgcaggtgaccgccctcaatcgccacatcggctacgacaaggctgccgcgattgccaagaaggcccacaaggaaggcaccagcctcaaggacgccgcgctggccctgggctacgtgaccgaggacgaattcgcccagtgggtcgtgccgctgggcatgactcacaactga

SEQ ID NO: 6153 - protein, 464 aa, Deinococcus radiodurans
MTKTRQETDTMGKMDVDASRYWGAQTERSIHNFPIGRDTFVWGRPVIRALGILKKGAAQANAELGELPADVADLIVKAADEVIAGKLDEHFPLVVFQTGSGTQSNMNANEVISNRAIELAGGEMGSKKPVHPNDHVNRGQSSNDTFPTAMHIAVVLELNERLYGAVGKLRDTLHAKAEQYKDLVKVGRTHLQDATPITLGQEIGGWVAQLDYALSEVKHAGEGLLDLAIGGTAVGTGLNAHPKFGDLAAKKYEEETGYHFRSAENKFAALSAHDALVQTSAALRTLAGALMKMANDVRWLASGPRNGIGEITIPENEPGSSIMPGKVNPTQSEAMTMVATRVFGNDATVAFAGSQGNFQLNVFKPVMVHAVLESIRLISDACLAFNDHCAVGIQPNEAKIKENLDKNLMQVTALNRHIGYDKAAAIAKKAHKEGTSLKDAALALGYVTEDEFAQWVVPLGMTHN

SEQ ID NO: 6154 - DNA, 1506 bp, Caenorhabditis elegans
  CDS (1)..(1506)
atgtctgcagtctctatgttacagggagaaatgcttgctcgtggaggcgccgtcattgcccgcggagcgtctcttgccactgcccgcaatttttcgcgcaccactgttccaatggctaagattcgtaaggaacgagatactttcggagagctcgaggttccagccgacaaatactatggagcccagaccgcccgttcccagatgaacttcaagattggaggaccagaagagcgtatgccaatcccagttatccacgctttcggaatcttgaagaaggccgccgcccttgtcaacaccgagttcggattagacaaaaaactggctgacgcgatttcccaagctgctgatgaggttgttgacggcaagctcgacgagcacttcccacttgttacatggcagactggttcaggaactcagtccaacatgaatgtcaatgaggttatctcgaatcgtgctatcgagatcctcggaggagagctcggatcgaagaagccagttcatccaaatgatcatgtgaatatgtcccaatcatcaaatgacacattcccaactgctatgcacattgccgtcggacgtgaagtcaactctcgtcttcttccagctctcaagaagcttcgcactgcccttcacaacaaggctgaagagttcaaagatatcatcaagattggacgtactcacacccaagatgctgttccactcactcttggacaagagttctcagcttacgtcacacagcttgataactctattgctcgtgttgaatcgactcttccacgactttatcaattggctgccggtggaaccgctgttggaactggactcaacacgcgcaagggattcgctgagaaggttgccgccactgtttctgaacttaccggattgccattcgttaccgctccaaacaaatttgaagccctcgccgcccatgatgctctcgttgaggttcacggagccctgaacacagtcgcagtttccttcatgaagattggaaacgatatcagatttttgggatctggaccaagatgcggactcggagagttatcactcccagaaaacgaaccaggaagctccatcatgccaggaaaggtcaacccaactcaatgtgaagccatcacaatggttgccgctcaagttatgggaaatcaagttgcagtcagtgtaggaggatctaatggacatttcgagttgaatgttttcaagccacttatcgttcgtaatgttcttcaatcaacacgtcttcttgctgacagcgctgtgagcttcactgatcattgtgtcgacggaatcgttgctaacaaagacaatattgccaagattatgcgtgaatcacttatgcttgtcactgctctcaacccacacattggctacgacaacgccgccaagattgctaagactgctcacaagaacggcaccacccttgtccaggaagccgtgaagctgggaatccttaccgaggagcagttcgctcaatgggtcaagccagaaaacatgctcggacctaagtaa

SEQ ID NO: 6155 - protein, 501 aa, Caenorhabditis elegans
MSAVSMLQGEMLARGGAVIARGASLATARNFSRTTVPMAKIRKERDTFGELEVPADKYYGAQTARSQMNFKIGGPEERMPIPVIHAFGILKKAAALVNTEFGLDKKLADAISQAADEVVDGKLDEHFPLVTWQTGSGTQSNMNVNEVISNRAIEILGGELGSKKPVHPNDHVNMSQSSNDTFPTAMHIAVGREVNSRLLPALKKLRTALHNKAEEFKDIIKIGRTHTQDAVPLTLGQEFSAYVTQLDNSIARVESTLPRLYQLAAGGTAVGTGLNTRKGFAEKVAATVSELTGLPFVTAPNKFEALAAHDALVEVHGALNTVAVSFMKIGNDIRFLGSGPRCGLGELSLPENEPGSSIMPGKVNPTQCEAITMVAAQVMGNQVAVSVGGSNGHFELNVFKPLIVRNVLQSTRLLADSAVSFTDHCVDGIVANKDNIAKIMRESLMLVTALNPHIGYDNAAKIAKTAHKNGTTLVQEAVKLGILTEEQFAQWVKPENMLGPK

SEQ ID NO: 6156 - DNA, 1392 bp, Caulobacter crescentus
  CDS (1)..(1392)
atgaccgccacgcgtatcgagaccgacacctttggcccgatcgaagtcgccgccgaccgctactggggcgcgcaagctcagcgcagcctgggcaacttcaagatcggctgggaaaagcagcccctgcccgtcgtccgcgccctgggcatcgtcaagcgcgccgccgccgaggccaacctcgccttgggcaagctggacccgaagatcgccgagacgatcatcgccgccgccaacgaagtgatcgagggcaagctgaacgaccacttcccgctggtggtctggcagaccggctcgggcacccagtcgaacatgaacgccaacgaggtgatctcgaaccgcgccatcgagatgctgggcggtgagatgggcagcaagaagcccgtccaccccaacgaccacgtcaatatgagccagtcgtcgaacgacaccttcccgacggccatgcacatcgcctgcgccgaacaggtggtccacgacctgctgcccgcgctgaagcacctgcacaaggccctggccgccaaggccgccgagtggaaggacatcatcaagatcggccgcacccacacccaggacgccaccccgctgacgctgggccaggagttcggcggctacgctcagcagatcgagaacggcatcgctcgtatcgagatgaccctgccgatgctgatgcaactggcccagggcggcaccgccgtcggcaccggcctgaacgcccccgtgggcttcgccgagctggtcgccgagcagatcgccggcatcacgggcctaggcttcaccacggccccgaacaagttcgaggccctggccgcccacgacgccatggtcttcacccacggcgccatcaacacggtggccgccagcctgttcaagatcgccaacgacatccgcttcctgggctctggcccgcgcgccggtctcggcgagctttccctgccggaaaatgagccgggcagctcgatcatgccgggcaaggtcaatccgacccagtccgaagccctgacccaggtctgcgcccaggtgttcggcaaccactcgaccctgaccttcgccggcagccagggccatttcgagctgaacgtcttcaacccggtgatggcctataacttcctgcagtcggtccgtctggtcgccgacgcggcgatcagcttcaccgacaactgcgtggtcggcatcgagccgcgtgtcgacaacatcaagaagggcgtcgagaacagcctgatgctggtcacggccctgaacggcaagctcggctacgacgcctgcgccaagatcgccaagaccgcgcacaagaacggcaccaccctgcgcgaggaggccgtcggcggcggctatctgacgaacgaagagttcgaacagtacgtccgccccgaaaagatgatctcgccgggctga

SEQ ID NO: 6157 - protein, 463 aa, Caulobacter crescentus
MTATRIETDTFGPIEVAADRYWGAQAQRSLGNFKIGWEKQPLPVVRALGIVKRAAAEANLALGKLDPKIAETIIAAANEVIEGKLNDHFPLVVWQTGSGTQSNMNANEVISNRAIEMLGGEMGSKKPVHPNDHVNMSQSSNDTFPTAMHIACAEQVVHDLLPALKHLHKALAAKAAEWKDIIKIGRTHTQDATPLTLGQEFGGYAQQIENGIARIEMTLPMLMQLAQGGTAVGTGLNAPVGFAELVAEQIAGITGLGFTTAPNKFEALAAHDAMVFTHGAINTVAASLFKIANDIRFLGSGPRAGLGELSLPENEPGSSIMPGKVNPTQSEALTQVCAQVFGNHSTLTFAGSQGHFELNVFNPVMAYNFLQSVRLVADAAISFTDNCVVGIEPRVDNIKKGVENSLMLVTALNGKLGYDACAKIAKTAHKNGTTLREEAVGGGYLTNEEFEQYVRPEKMISPG

SEQ ID NO: 6158 - DNA, 1392 bp, Rickettsia conorii
  CDS (1)..(1392)
atgaaaaattacagaaccgaaagtgattcttttggagaaattcaaatagaagaaaaattttattggggggctcaaactcaaagatctttagaaaattttaaaataggcaagcaaaaaatgcctgaaattttaattcgtgctcttgctattttaaaaaaatgtgcagcacaggttaatcatgagtttggtgatttagaagctaaaatcgctataagtatagataaagcaacggatagaatcttagaaggcgaatttgaggataattttcctttagtagtttggcaaacaggttcaggaacgcaaacaaacatgaatatgaacgaggttattgcctctattgccaacgaagaattaacaggcaagaaaggcggcaaatctccggtacatcctaacgatcatgttaataaaggacaatcatccaacgactcttttccaaccgctatgcatatagcaaccgtacttgcaactaaacagcaactgataccagctttgaataatatactgacctctttgcaggataagtcaaaagattgggacaaaatcataaaaataggacgtacccacttgcaggatgcaactcctttaactcttaaacaggaattctccggatatattacacaaatagagtatgctttagaacgcatagaaaatgcactacaaaaagtttatctacttgcccaaggaggcacagcagtcggtacaggtattaactcaaaaataggctttgatataaaatttgccgagaaagtggcagagtttactaaacaaccctttaagacggctcctaataaatttgaaagtctagctgctcacgacgcactagtagaattttcaggaactcttaatactatagcagttagcttaatgaaaatagcaaatgatataagactgctcggctccggtccaagatgcggtcttggtgagctacatttacctgaaaatgaacctggttcttctattatgcccggtaaagtaaaccctacacaagtcgaagctttaacaatggtgtgcagtcaggtgatggggaatcatgttacggttactattgccggctcaaacggacatcttgaacttaacgtatttaaacccgtaataatatacaatatcctacaatctatagagctgttatccgatagcgtaaatagctttgttactcactgtgttaaaggattagaacccaatatagcacgcattaatgatttacgtgataaatctctaatgcttgttacagctcttaatccacatataggctatgataatgctgcaaaaattgctaaagaagcacataagcacggaatcactttaaaagaagcagctaaaaaactcaatcttctatcggaagcaaaatttgataaaatagtagtacctgaaaaaatggttagtcaatcttag

SEQ ID NO: 6159 - protein, 463 aa, Rickettsia conorii
MKNYRTESDSFGEIQIEEKFYWGAQTQRSLENFKIGKQKMPEILIRALAILKKCAAQVNHEFGDLEAKIAISIDKATDRILEGEFEDNFPLVVWQTGSGTQTNMNMNEVIASIANEELTGKKGGKSPVHPNDHVNKGQSSNDSFPTAMHIATVLATKQQLIPALNNILTSLQDKSKDWDKIIKIGRTHLQDATPLTLKQEFSGYITQIEYALERIENALQKVYLLAQGGTAVGTGINSKIGFDIKFAEKVAEFTKQPFKTAPNKFESLAAHDALVEFSGTLNTIAVSLMKIANDIRLLGSGPRCGLGELHLPENEPGSSIMPGKVNPTQVEALTMVCSQVMGNHVTVTIAGSNGHLELNVFKPVIIYNILQSIELLSDSVNSFVTHCVKGLEPNIARINDLRDKSLMLVTALNPHIGYDNAAKIAKEAHKHGITLKEAAKKLNLLSEAKFDKIVVPEKMVSQS

SEQ ID NO: 6160 - DNA, 1422 bp, Xylella fastidiosa
  CDS (1)..(1422)
atggagatgcagatgagcaacagtgatcgttacagaattgaacacgacagtatgggtgatctacgggtgccgatcgatgcgttgtggggtgcgcagacgcaacgtgctatcgagaactttccgatttccgggcggtcaatgcctcagggatttatccacgcattggggtttatcaaggcggctgcggcgaaggttaacgctgagctggggttgttaccaaagccaatggccaaggagattgaggccgctgcattggatgtcgctgcgggccgttatgatgcggattttccagtcgatatttaccagactggctcaggaacctcgtcgaatatgaacgctaatgaggtgattgcgacgctggccatgcgtgccaccaaggagcctatccaccccaacgaccatgtcaaccttggccaaagttctaatgatgtggttccaacagcgattcggatttccgcaacgttggcggttcagggacgattattaccggcgctcaagcatttacggaaaatgattaacaagcgtgcccgtggtttgggcagtgtggtgaagaccggccgtacccacctgatggatgcgatgccgctgacgttcgctcaagaattcggtgcctggtcggcacaaattgtctctgcggaggcgcgcttgaatgacaccctgaaacggttgcatcggctgccattgggagggacagcaattggtaccggtatcaatacggatccacatttcggccgcaatgcggtgaaggtactgtcagcattaacagggattcactttgagagtgcgaacaataagttcgagggattggcagcgcaagatgatttggttgagttatccggccagttcaatgcgttagcagtggcgttgatgaagattgctaatgatctacgctggatgaacgctggaccacttgctggcttgggagagattgagttgcccgcgttgcagccgggaagttcgatcatgccaggtaaggtaaatccggtgattccggaagctgtggtgatggtcgcctcgcaagtgattggccatcacactgcagtgaccgtggctgggcagagtggcaattttcagttgaatgtgacgttaccgctgattgcttacaacctattggagtctgcgacgttgcttggaaatgtggtgatgctgttggctgataaagtcatcgttggtctgaaggtgcgtcaggatcgagtgcaggaggtgctggagcggaatccgattttggtgacagcgttgaatccgatcattggctatgagaaagctgcggtgattgctaagcgtgcttataaggagcaccggccagtgcttgaggtcgcctgcgaggagagcaacctaaaccctgtggagttggcgcgcttactggatccgactgcgttgactgagggtgggatttatgtcgtcgggggaggtggtggataa

SEQ ID NO: 6161 - protein, 473 aa, Xylella fastidiosa
MEMQMSNSDRYRIEHDSMGDLRVPIDALWGAQTQRAIENFPISGRSMPQGFIHALGFIKAAAAKVNAELGLLPKPMAKEIEAAALDVAAGRYDADFPVDIYQTGSGTSSNMNANEVIATLAMRATKEPIHPNDHVNLGQSSNDVVPTAIRISATLAVQGRLLPALKHLRKMINKRARGLGSVVKTGRTHLMDAMPLTFAQEFGAWSAQIVSAEARLNDTLKRLHRLPLGGTAIGTGINTDPHFGRNAVKVLSALTGIHFESANNKFEGLAAQDDLVELSGQFNALAVALMKIANDLRWMNAGPLAGLGEIELPALQPGSSIMPGKVNPVIPEAVVMVASQVIGHHTAVTVAGQSGNFQLNVTLPLIAYNLLESATLLGNVVMLLADKVIVGLKVRQDRVQEVLERNPILVTALNPIIGYEKAAVIAKRAYKEHRPVLEVACEESNLNPVELARLLDPTALTEGGIYVVGGGGG

SEQ ID NO: 6162 - DNA, 1389 bp, Bacillus halodurans
  CDS (1)..(1389)
atgaacacacgaattgagcgagatacgctaggagaaatgcacgttccacaagacaaattatggggggcacaaacgcagcgaagctatgagaatttccatattgggacagaaaaaatgccgatggaaattatttatgcctttgccttgctaaaaaaagcagcagcaaacgtcaacaaaaagcttggacaactgtctgccgaaaaagcagatgccattacctgggctgcaaatgaagtgctagctggcaaacacgatgatcatttcccgcttttcgtttggcaaaccggtagcggcacgcagtcgaacatgaacatgaatgaagtccttgcccgcaggggaaaccagcttctgcaagaaaaagggctagatgttacaattcacccgaacgatgacgtgaaccgatcgcaaagctccaacgacacatttcctaccgccatgcatattgcggcttataataaactggacgatcacttactgcctacactccaaatgttcaaacaaacactccaccaaaaagcaaagcaatttgatgatgtgattaaattaggacgaacacacttacaggatgcgacccccttaaccctcggccaagaaattagtggctgggctcggatgctcgaaaagaccgagcaaatgatccgtgagagcatgatttatttgcaggaattagctatcggtggtacggctgtcggtacaggggttaacgcccatcccaagttcggagaaatggtggccgccgatatcgcaaatgaaaccgggaaacctttcaaatcagccgctaataaatttcacgcgctcacaagtcatgacgaactagtacacactcacggcgccctaaaagcgcttgctgccgatttgtttaaaattgcgaatgatattcgttggcttgcaagtgggcctaggggcggactaggagaactgatcattcctgctaatgagccgggaagctcaattatgccaggaaaggtcaatccaacacagagcgaggcattaacaatgatcacgtcgcaagtaatcggaaatgatgccacgatcgcttttgctgcaagtcaagggaactttgaactgaacgtatttaagccggtcattatttacaatttccttcagtccacaacgctgttaactgatggactccggacgttccatgacaaatgcttaatcggccttgaggcaaacgaaacgatcattaaaaagcatttaaatgagtcactcatgctcgtgacagcactcaaccctcacatcggttatgagaacgcagcaaaaattgcgaaaaaagcacatgccgaaggcttaactcttaaagaagccgcgatgcaaagcggcttgctaaccgaagaggagtttgaaaaaatggtcgatccggcaaaaatggttcacccacaaggctaa

SEQ ID NO: 6163 - protein, 462 aa, Bacillus halodurans
MNTRIERDTLGEMHVPQDKLWGAQTQRSYENFHIGTEKMPMEIIYAFALLKKAAANVNKKLGQLSAEKADAITWAANEVLAGKHDDHFPLFVWQTGSGTQSNMNMNEVLARRGNQLLQEKGLDVTIHPNDDVNRSQSSNDTFPTAMHIAAYNKLDDHLLPTLQMFKQTLHQKAKQFDDVIKLGRTHLQDATPLTLGQEISGWARMLEKTEQMIRESMIYLQELAIGGTAVGTGVNAHPKFGEMVAADIANETGKPFKSAANKFHALTSHDELVHTHGALKALAADLFKIANDIRWLASGPRGGLGELIIPANEPGSSIMPGKVNPTQSEALTMITSQVIGNDATIAFAASQGNFELNVFKPVIIYNFLQSTTLLTDGLRTFHDKCLIGLEANETIIKKHLNESLMLVTALNPHIGYENAAKIAKKAHAEGLTLKEAAMQSGLLTEEEFEKMVDPAKMVHPQG

SEQ ID NO: 6164 - DNA, 1386 bp, Vibrio cholerae
  CDS (1)..(1386)
atgactcgcgaataccgaattgaaaaagacagcatgggtgaggtcaaagtccctgctgatgcgctttatcaagcacaaactcaacgtgccgtagataactttacgttaagccgctacaccatgcctagcgcgtttattgctgccctcgcctacattaaacaagcggcggcgatgaccaatgcgcagttaggtcatttagaaggggacatcgcccaagcgattgccaatgcatcgcaagcggtgattgatggccagtatgcaaaacagttcccgattgatgttttccagacaggttcaggcaccagctccaatatgaacgccaatgaggtgattgccaccctcgcctcgcgtgaattgggctatgcggtgagtccaaacgatcatgtcaacatgggacaaagcagtaatgatgtgatcccaacagcaatccaagtcagtgcggccatcaatattgagcagcaactgctccccgccttggcgcatttaagtcaaactctcgcggataaacagtcagagctggctgatgtggtcaaaactggccgcacccatttgatggatgcgatgcccgtgactttcgcacaagaactgggtggatggaaaagccaaatcgaccacgccgcgcaaggcatcagccatgcgctttcccccatcaaagccttggcgcaaggcggcacagcggtcggcacaggcattaatgcggatccgcgttttgcacgtatttttgccgataacctcagtcaattgagtcatgttgcttttcagcccagcgacaattttttctataacctaagcagccaagactgcgtggtcggcctttctggtcagttgaaaaccgccgcggtcgcgctgatgaaaatcgctaacgatttgcgctggatgaactctggccctttggcggggttaggggaaattgagctgcaaggcttacaaccgggctcctcgatcatgccgggaaaagttaaccctgtgatcccggaagccgtgactatggtcgctgcgcaagtgattggcaatgacactaccattaccgtggctggccaatccggtaatttccagcttaatgtgatgctgcctgtgatcgcgcacaacctactggaatcaatagaattattgacaaatgcctgccatgcgctcgccgataaagccatcgcaacctttaaagttcgtcatgacaatctggaaaaagccttggctaaaaacccgattctcgtcaccgccttgaatcctgtcattggttatctcaaagcggctgatattgccaaaaaagcctaccagcaaggtcgcgcgattttggatgtcgctgcggaagagacggaccttgatcgcgccacgcttgaagcgctgcttgacccgaaaaagctcacacaaggtgggattgcccattaa

SEQ ID NO: 6165 - protein, 461 aa, Vibrio cholerae
MTREYRIEKDSMGEVKVPADALYQAQTQRAVDNFTLSRYTMPSAFIAALAYIKQAAAMTNAQLGHLEGDIAQAIANASQAVIDGQYAKQFPIDVFQTGSGTSSNMNANEVIATLASRELGYAVSPNDHVNMGQSSNDVIPTAIQVSAAINIEQQLLPALAHLSQTLADKQSELADVVKTGRTHLMDAMPVTFAQELGGWKSQIDHAAQGISHALSPIKALAQGGTAVGTGINADPRFARIFADNLSQLSHVAFQPSDNFFYNLSSQDCVVGLSGQLKTAAVALMKIANDLRWMNSGPLAGLGEIELQGLQPGSSIMPGKVNPVIPEAVTMVAAQVIGNDTTITVAGQSGNFQLNVMLPVIAHNLLESIELLTNACHALADKAIATFKVRHDNLEKALAKNPILVTALNPVIGYLKAADIAKKAYQQGRAILDVAAEETDLDRATLEALLDPKKLTQGGIAH

SEQ ID NO: 6166 - DNA, 1809 bp, Pseudomonas aeruginosa
  CDS (433)..(1809)
gaagaaaacaataatcaatctcattatcgtctggtgaggttgccatgtccttcgaggcgcacgacccgcaagcattggatcactggtactggctgggcacgcagatccgctgcgcgctcgatcccgacgaaccgcgcctgctcgaccagtacctcggcgaggcgcgctatctcgccggttgggaaggtgtggccgcctggccgctgttcgagaaagcctacaacctcctgctcgataccggtcgcgatccgatattgccctggcactggcgcagcctctgcctcgactacgcctaccggcccctctgcgaacttcagcgactgaccaccaacggcagccagcgacgccggctgcgccagctctccgtacgaatggccaggcaggacctggcgccgtcgatgagcttcgatcacccgcaacaaggaaaccaagatgactgacacccgcatcgaacgcgacagcatgggcgaactggcggtcccggcgaccgccctctatggcgcccagacccagcgcgcggtgaacaacttcccggtcagcggccaacgcatgccccaggccttcgtccgcgccctgctgctggccaaggccgcggcggcgcgggcgaacgtctccctgcagcaactggatgcaccgatgggcgaggcgatcgccgacacctgcctgcaactgctgcaggaggacttcatgcagcatttcccggtggatgtgttccagaccggctccggcaccagttccaacatgaacgccaacgaagtggtggcgaccctggccagtcgtcgcctgggcggcaaggtcaatccgaacgaccatgtgaactgcgggcagagcagcaacgacatcattccctcgaccatccacatcagtgccgccctcgagatcagcgaacgcctgctgccggcgctgcgccacctggagcagactatccagagcaaggccggcgaagtgcatgcctatgtgaagaccggccgcacccacctgatggatgcgatgccggtacgcatgagccaggtgctcggtggctgggcgcagcaggtgcgacaggccggcgtgcacatcgagagcgtacttcctgccttgcagcagttggcacagggcggcaccgcggtgggcaccgggatcaacgcccatcctcggttcgccgaacgtttcagccaggagctgaacgacctgaccgggctggcgttccgccccggcgacgacttcttcgccctgatcggttcgcaggacaccgcggtcgctgcgtccggccagttgaagaccctggcggtgaccctgatgaagctggccaacgacctgcgctggatgaactccgggccgcttgccgggctcggcgagatcgagctggaagcgctgcaaccaggctcctcgatcatgcccggcaaggtcaacccggtgatcccggaggccaccgcgatggtcgccgcccaggtgatcggcaatgacgctgccattgccgtcgccggccaatcgggcaacttcgaactgaacgtgatgctgccgctggtggcggacaacctgttgcacagcatccagttgctggccaacgtcagccggctgctggcggacaaggccatcgccagcttcaaggtcaaccagggcaagctcagcgaggcgttggcgcgcaacccgatcctggtcactgcgctgaacccgatcattggctaccagaaggctgcggaaatcgccaagcaggcctatcgcgagggacggccgatcatcgatgtggcgctggaaaacaccgatctggaccgtgcgcgcctggaggtgttgctggatccggaaaaactcacggctggcggcctctga

SEQ ID NO: 6167 - protein, 458 aa, Pseudomonas aeruginosa
MTDTRIERDSMGELAVPATALYGAQTQRAVNNFPVSGQRMPQAFVRALLLAKAAAARANVSLQQLDAPMGEAIADTCLQLLQEDFMQHFPVDVFQTGSGTSSNMNANEVVATLASRRLGGKVNPNDHVNCGQSSNDIIPSTIHISAALEISERLLPALRHLEQTIQSKAGEVHAYVKTGRTHLMDAMPVRMSQVLGGWAQQVRQAGVHIESVLPALQQLAQGGTAVGTGINAHPRFAERFSQELNDLTGLAFRPGDDFFALIGSQDTAVAASGQLKTLAVTLMKLANDLRWMNSGPLAGLGEIELEALQPGSSIMPGKVNPVIPEATAMVAAQVIGNDAAIAVAGQSGNFELNVMLPLVADNLLHSIQLLANVSRLLADKAIASFKVNQGKLSEALARNPILVTALNPIIGYQKAAEIAKQAYREGRPIIDVALENTDLDRARLEVLLDPEKLTAGGL

SEQ ID NO: 6168 - DNA, 1425 bp, Mycobacterium tuberculosis
  CDS (1)..(1425)
atggccgttgacgccgacagcgccaattaccgcatcgagcacgacaccatgggcgaagtccgggtgccggcaaaagcgttgtggcgcgcgcaaacccagcgcgcggtggagaacttcccgatatccggccgcgggttggagcgcacccagatccgcgcgctaggcctgctgaaaggcgcctgcgcgcaggtgaactccgacctcgggttgctggcgccggagaaagccgacgccatcatcgccgcggccgccgagatcgccgacggtcaacacgacgaccagtttcccatcgacgtcttccagaccggctcgggcaccagctccaacatgaacaccaacgaggtgattgcgtccatcgcggccaagggcggggtcacgttgcatcccaacgacgacgtgaacatgtcgcagtcgtccaacgacaccttcccgacggccacccacatcgcggccaccgaggccgcggtcgctcatctcatcccagcgctgcagcagctgcacgacgcattggccgccaaggctcttgattggcacacggtggtgaagtcgggccgaacgcatctgatggacgccgttccggtgacactcggccaggagttcagcggatatgcccgccagatcgaggccggcatcgagcgggtgcgcgcgtgtctgcccaggctgggcgagctggcgatcggcggcaccgcggtgggtaccggcctcaacgctcccgacgacttcggcgtcagagtggtcgcggtgctggtcgcgcagaccggtctgtcggaattgcgtacggcggctaattctttcgaagctcaggctgcccgcgacgggctggtggaggcgtccggggcgctgcgcacgatcgcggtatcgctgaccaagatcgccaacgacatccgctggatgggatcgggcccattgaccggcctggccgagatccaactgccagatctgcagccgggcagctcgatcatgccgggaaaggtgaatccggttctgccggaggcggttacgcaggtcgccgcgcaggtgatcggaaacgacgccgccatcgcctggggtggggccaacggcgcattcgaactcaacgtctacatcccgatgatggcccgcaacatcctcgagtccttcaagctgctgaccaatgtgtcacggctgttcgcccagcgctgcatagcagggctgaccgccaacgtcgagcacctgcggcggctggccgagtcctcaccgtcgatcgtgacaccgttgaattcggccatcggctacgaggaggcggccgccgtcgccaagcaagcactcaaggaacgcaaaacgattcgccaaaccgtgatcgaccgtggcctgatcggcgacaggctgtcgatcgaggatctggaccgccgtctggacgtgctggcaatggccaaggccgagcagctcgacagcgatcggctatga

SEQ ID NO: 6169 - protein, 474 aa, Mycobacterium tuberculosis
MAVDADSANYRIEHDTMGEVRVPAKALWRAQTQRAVENFPISGRGLERTQIRALGLLKGACAQVNSDLGLLAPEKADAIIAAAAEIADGQHDDQFPIDVFQTGSGTSSNMNTNEVIASIAAKGGVTLHPNDDVNMSQSSNDTFPTATHIAATEAAVAHLIPALQQLHDALAAKALDWHTVVKSGRTHLMDAVPVTLGQEFSGYARQIEAGIERVRACLPRLGELAIGGTAVGTGLNAPDDFGVRVVAVLVAQTGLSELRTAANSFEAQAARDGLVEASGALRTIAVSLTKIANDIRWMGSGPLTGLAEIQLPDLQPGSSIMPGKVNPVLPEAVTQVAAQVIGNDAAIAWGGANGAFELNVYIPMMARNILESFKLLTNVSRLFAQRCIAGLTANVEHLRRLAESSPSIVTPLNSAIGYEEAAAVAKQALKERKTIRQTVIDRGLIGDRLSIEDLDRRLDVLAMAKAEQLDSDRL

SEQ ID NO: 6170 - DNA, 1392 bp, Helicobacter pylori
  CDS (1)..(1392)
atgcaatttagaattgaacatgacacgatgggcgaaatcaaagtagatgacagccaatattggggggctcaaacgcaacgcagtcttgaaaactttaagatcggcactgaaaaaatgcctaaagaactcattggcgcgttcgccaaactcaaaaggagtttagcggttgtcaatcacaagttagggaaattaagcctggaaaaatcgcaagccattatcaaagcgtgcgattgcattttaaaaggcgagttgtgcggcgaattccccctagcgatatggcaaacagggagcgggactcaaacgaacatgaacctcaatgaagtcattgccaataaggctaccgaaattttagggggtaattttagggagaaaaaactcatccaccctaacgatgatgtgaacatgtctcaaagctccaacgacactttccctaccgcaatgcacgttgtgagcgtgctagaaatcacgcataaactgctgcctagtttagagaatctgttaaaaacctttaaagaaaaaagccaacaatttaaagagattgtcaaaatcgggcgcacgcatttacaagacgctacgcctttaactttggggcaagaatttagcgggtatgcgagcatgctagagcattctaaacaacaaattttagagagtttggagcatttaagggaattagccataggcgggactgccgtaggcacagggctaaacgctcataaggaattgagcgaaaaagtggctgaagaattgagccagtttagcggcgtgaaattcatctctgcacccaataaattccacgcgctcactagccatgacgctatcgcttatgcgcatggggcttttaaggctttagcggcgaatttaatgaaaatcgctaacgatattagatggcttgcgagcgggccgcgctgtggtttgggcgagcttaatatccctgaaaacgagccgggcagttctattatgcccggtaaagtcaatcccacgcaatgcgaagcgatgacaatggtagccgtgcaagtgatggggaatgataccgctattggcattgcggccagtcagggtaattttgaattgaatgtgttcaagccggtgattatttataacttcttgcaaagtttaaggctattgagcgacagcatggaaagtttcaatatccattgcgcgagcggtattgagcctaataaagaaaaaattgattattacttgcaccattctttaatgctagtaaccgcccttaatccgcatgtaggctatgaaaacgccgctaaaatcgctaaaaacgcccacaaaaaaggcatttctttaaaagaaagcgcgctggaactgaaactcttgagcgctgaagactttgaccaattcgtggtgcctgaaaagatgatcggacctaaggcttga

SEQ ID NO: 6171 - protein, 463 aa, Helicobacter pylori
MQFRIEHDTMGEIKVDDSQYWGAQTQRSLENFKIGTEKMPKELIGAFAKLKRSLAVVNHKLGKLSLEKSQAIIKACDCILKGELCGEFPLAIWQTGSGTQTNMNLNEVIANKATEILGGNFREKKLIHPNDDVNMSQSSNDTFPTAMHVVSVLEITHKLLPSLENLLKTFKEKSQQFKEIVKIGRTHLQDATPLTLGQEFSGYASMLEHSKQQILESLEHLRELAIGGTAVGTGLNAHKELSEKVAEELSQFSGVKFISAPNKFHALTSHDAIAYAHGAFKALAANLMKIANDIRWLASGPRCGLGELNIPENEPGSSIMPGKVNPTQCEAMTMVAVQVMGNDTAIGIAASQGNFELNVFKPVIIYNFLQSLRLLSDSMESFNIHCASGIEPNKEKIDYYLHHSLMLVTALNPHVGYENAAKIAKNAHKKGISLKESALELKLLSAEDFDQFVVPEKMIGPKA

SEQ ID NO: 6172 - DNA, 1395 bp, Pseudomonas aeruginosa
  CDS (1)..(1395)
atgagccggaccgaaaccgatagcctgggcaccatcgaggtgcccgacgacgcctactggggcgcccagacccagcgttcgctggagaacttcgccatcggcggccagcgcatgccgctcgccgtgatccacgccctggcgctgatcaagaaagccgccgcgcgggtcaacgaccacctcggcgaactgccgccggaagtcgcccggctgatcgaacaggccgccgacgaagtcctcgcaggccgccacgacgaacacttcccgctggtggtctggcagaccggcagcggcacccagaccaacatgaacgtcaacgaggtgatcgctggccgcgccaacgaactggccggcaatccgcgtggcggcaagtcgccggtgcatcccaacgaccacgtcaaccgcgcgcagagttccaacgacagcttccccaccgccatgcacatcgccgccgccaaggccgtgcacgaacaattgctgccggccatcgccgagctttccggcggtctcgccgaacagtcggcgcggcacgccagcctggtcaagaccgggcgcacccacctgatggacgccacgccgatcaccttcggccaggaactctcggccttcgtcgcccagctcgactacgccgagcgcgccatccgcgcggcgctgccggcggtctaccagttggcccagggcggcaccgcggtgggcaccgggctcaacgcgccgaagggcttcgccgacgccatcgccgcggaaatcgccgccgaatcgggcctgcccttcgtcgccgcgccgaacaagttcgccgccctggccggccacgagccgctggtcatcctctccggcgccctgaagagcctggcggtggccctgatgaagatcgccaacgacctgcgcctgctcggttccggcccacgcgccggcttcgccgaggtgaagctgccggccaacgagccgggcagctcgatcatgcccggcaaggtcaacccgacccagtgcgaggcgctgtcgatgctggcctgccaggtcatgggcaacgacagcacgatttccttcgccgccagccagggccatctgcaactcaacgtgttcaagccggtgatcgtctacaacctgctggagtccatccgcctgctcgccgacggctgccgcaacttcaacaagcattgcgtcgccggcctggagccggacgcccagcgcatggccgacctgctggagcgcggcctgatgctggtcaccgcactgaacccgcacatcggctacgacaaggccgccgaaatcgccaagaaggcctacgccgaaggcaccaccctgcgcgccgcggcgctgcagctgggctacctggacgaagcgcagttcgacgaatgggtacggccggagcagatgctggaggccggccaccatggttga

SEQ ID NO: 6173 - protein, 464 aa, Pseudomonas aeruginosa
MSRTETDSLGTIEVPDDAYWGAQTQRSLENFAIGGQRMPLAVIHALALIKKAAARVNDHLGELPPEVARLIEQAADEVLAGRHDEHFPLVVWQTGSGTQTNMNVNEVIAGRANELAGNPRGGKSPVHPNDHVNRAQSSNDSFPTAMHIAAAKAVHEQLLPAIAELSGGLAEQSARHASLVKTGRTHLMDATPITFGQELSAFVAQLDYAERAIRAALPAVYQLAQGGTAVGTGLNAPKGFADAIAAEIAAESGLPFVAAPNKFAALAGHEPLVILSGALKSLAVALMKIANDLRLLGSGPRAGFAEVKLPANEPGSSIMPGKVNPTQCEALSMLACQVMGNDSTISFAASQGHLQLNVFKPVIVYNLLESIRLLADGCRNFNKHCVAGLEPDAQRMADLLERGLMLVTALNPHIGYDKAAEIAKKAYAEGTTLRAAALQLGYLDEAQFDEWVRPEQMLEAGHHG

SEQ ID NO: 6174 - DNA, 1374 bp, Pseudomonas aeruginosa
  CDS (1)..(1374)
atgactgacacccgcatcgaacgcgacagcatgggcgaactggcggtcccggcgaccgccctctatggcgcccagacccagcgcgcggtgaacaacttcccggtcagcggccaacgcatgccccaggccttcgtccgcgccctgctgctggccaaggccgcggcggcgcgggcgaacgtctccctgcagcaactggatgcaccgatgggcgaggcgatcgccgacacctgcctgcaactgctgcaggaggacttcatgcagcatttcccggtggatgtgttccagaccggctccggcaccagttccaacatgaacgccaacgaagtggtggcgaccctggccagtcgtcgcctgggcggcaaggtcaatccgaacgaccatgtgaactgcgggcagagcagcaacgacatcattccctcgaccatccacatcagtgccgccctcgagatcagcgaacgcctgctgtcggcgctgcgccacctggagcagactatccagagcaaggccggcgaagtgcatgcctatgtgaagaccggccgcacccacctgatggatgcgatgccggtacgcatgagccaggtgctcggtggctgggcgcagcaggtgcgacaggccggcgtgcacatcgagagcgtacttcctgccttgcagcagttggcacaggccggcaccgcggtgggcaccgggatcaacgcccatccgcggttcgccgaacgtttcagccaggagctgaacgacctgaccgggctggcgttccgccccggcgacgacttcttcgccctgatcggttcgcaggacaccgcggtcgctgcgtccggccagttgaagaccctggccgtgaccctgatgaagctggccaacgacctgcgctggatgaactccgggccgcttgccgggctcggcgagatcgagctggaagcgctgcaaccaggctcctcgatcatgcccggcaaggtcaacccggtgatcccggaggccaccgcgatggtcggcgcccaggtgatcggcaatgacgccattgccgtcgctggccaatcgggcaacttcgaactgaacgtgatgctgccgctggtggcggacaccctgttgcacagcatccagttgctggccaacgtcagccggctgctggcggacaaggccatcgccagcttcaaggtcaaccagggcaagctcagcgaggcgttggcgcgcaacccgatcctggtcactgcgctgaacccgatcatcggttaccagaaggctgcggaaatcgccaagcaggcctatcgcgagggacggccgatcatcgatgtggcgctggaaaacaccgatctggaccgtgctcgcctggaggtgttgctggatccggaaaaactcacggctggcggcctctga

SEQ ID NO: 6175 - protein, 457 aa, Pseudomonas aeruginosa
MTDTRIERDSMGELAVPATALYGAQTQRAVNNFPVSGQRMPQAFVRALLLAKAAAARANVSLQQLDAPMGEAIADTCLQLLQEDFMQHFPVDVFQTGSGTSSNMNANEVVATLASRRLGGKVNPNDHVNCGQSSNDIIPSTIHISAALEISERLLSALRHLEQTIQSKAGEVHAYVKTGRTHLMDAMPVRMSQVLGGWAQQVRQAGVHIESVLPALQQLAQAGTAVGTGINAHPRFAERFSQELNDLTGLAFRPGDDFFALIGSQDTAVAASGQLKTLAVTLMKLANDLRWMNSGPLAGLGEIELEALQPGSSIMPGKVNPVIPEATAMVGAQVIGNDAIAVAGQSGNFELNVMLPLVADTLLHSIQLLANVSRLLADKAIASFKVNQGKLSEALARNPILVTALNPIIGYQKAAEIAKQAYREGRPIIDVALENTDLDRARLEVLLDPEKLTAGGL

SEQ ID NO: 6176 - DNA, 1317 bp, Sulfolobus solfataricus
  CDS (1)..(1317)
atgaaatataccgatactgcgcccaagctttttatgaatactggaaccaaatttcctagaagaattatctggtctatgggagttttaaagaagtcctgtgctaaagtcaacgcagatcttggattattagataaaaaaattgcggattcaattattaaggcatctgacgatttaattgatggaaaattagatgataagatagtgcttgatgtatttcaaacgggttcagggaccggacttaatatgaacgtaaatgaggttatagcagaagtagcttctagctattctaatcttaaagtacatccaaatgatcatgtaaattttggtcagtcctcaaacgatactgtgccaacagctataagaattgcagcagtagctgaggtaacaaataggctactgcctgcattacagcaaataatatcctctttaaataagaaggctgaggagtacaaggatgttataaaggctggtagaacccatttaagagacgcattaccagtaactttaggtcaagaactttcagcctacgcagacgctttccagcatgaacatgaacaagttatgaatattttggaatatgtgaaggaattgccaattggaggtactgcgactggtactgggctaaatagccacccagaattccaagaaagagttataaacgaaataaacagaattaccggtttaggatttaagccagctaataggtttagagcaatgagattgctcaccgatctcttattattaagcggagcactgaggaatattgcagtagacctatatagattagggcaagatataaggttaatgttttccggtcccttaactgggttaaatgaaattgatttacctacacaagaggagatagctggtagctcaataatgcctggtaaaactaatccagttacggttgaggctactttactaatctcagcacaagttgtgggattagatcatgcaaaccaattcgcatcaatgttaggcgaatttgagttatcaatgggaattccattagttggttataatatcgtaacccaagttaatttcatctcagaggctttagagaagatgtcaagattagtgattgatggaatggtagcaaatgtagagaagatgaagagatatgctgaatcctctccttcacttataaccatagtatctccagtaataggctatgataaagcaacagaaataggaaagaagttaaataagggaatgtccatacgtgaagcattaagggaattaggatatagcgataatgagataaataaaatattagacttaagcaaactagttaaaccagggttcacagctaaatga

SEQ ID NO: 6177 - protein, 438 aa, Sulfolobus solfataricus
MKYTDTAPKLFMNTGTKFPRRIIWSMGVLKKSCAKVNADLGLLDKKIADSIIKASDDLIDGKLDDKIVLDVFQTGSGTGLNMNVNEVIAEVASSYSNLKVHPNDHVNFGQSSNDTVPTAIRIAAVAEVTNRLLPALQQIISSLNKKAEEYKDVIKAGRTHLRDALPVTLGQELSAYADAFQHEHEQVMNILEYVKELPIGGTATGTGLNSHPEFQERVINEINRITGLGFKPANRFRAMRLLTDLLLLSGALRNIAVDLYRLGQDIRLMFSGPLTGLNEIDLPTQEEIAGSSIMPGKTNPVTVEATLLISAQVVGLDHANQFASMLGEFELSMGIPLVGYNIVTQVNFISEALEKMSRLVIDGMVANVEKMKRYAESSPSLITIVSPVIGYDKATEIGKKLNKGMSIREALRELGYSDNEINKILDLSKLVKPGFTAK

SEQ ID NO: 6178 - DNA, 1401 bp, Synechocystis sp
  CDS (1)..(1401)
atggtaaattcccaccgccttgaaaccgacagtatggggtccctggaagtccaagccgatcgcctgtggggagcgcaaacccaacgttccctgatgttttttgacattggtagcgatgtgatgccgccggatttaattcgggcctttgccatactcaaaaaggcagccgccattaccaatcaggatttgggtaaattaccagcggacaaggcagagttaatcattacggcagcggacgaaatcattgccgggcagtggttagaccatttccctctaaggatttggcaaacgggcagtggcactcaaaccaacatgaacgtgaacgaagtgattgccaatcgggcgatcgccatttgtgggggagaattgggcagtaaaaatcccatccatcccaatgaccacgtcaacatgtcccagtcgtctaacgatacttttcctacggcgatgcacattgcggcggtggcaggtttacaaaccaagttgattcccagtttgcaagctctgagagatagcctgaatgaaaaagcggaatgttttgcaggcatcactaaaattggccgcacccatttgatggacgcagtgcccctaacgttagggcaggaattttccggttacgtggcccagttagaccaagggctgacccaaattaattattgtttacccggtcttttggaattggccctggggggaacggcggtgggtacagggttaaatagtcatccccaatttgctaaaaaagtggccgaagaaattgcccagttaactggttataccttcatttctgcccccaacaaattcgccgccctagctggccacgaggcgatcgcctttgccagtggcgtgctgaaaagtattgccgcttccctgatgaaaattgccaatgatttgcgctggatggggtctgggccccgctgcggcttgggggaattagccttaccagccaatgaaccaggttcttcgatcatgcccgggaaagtaaaccccacccaatgcgaagccatgaccatggtttgtgtgcaggtaatggggaacgatgccaccattggttttgcggccagccaaggtaattttgagctcaatgtttttaagccagtgattattcataatttcctccattcgttacatttactcagcgatgcttgtgctagttttcgccaacatttagtggtgggattacaagtaaacgaaagcaaggttaaagactttttggacacctctttaatgttagtcaccgccctcaatccccacattggctacgacaatgcggccctcgtggctaaaactgcctttgcccaaggcattaccctcaaacaagccgcggtggatttaggtttactcaccccagcccagttcgacgcttgggtcgttccagagcagatgattgccccgattgctgactag

SEQ ID NO: 6179 - protein, 466 aa, Synechocystis sp
MVNSHRLETDSMGSLEVQADRLWGAQTQRSLMFFDIGSDVMPPDLIRAFAILKKAAAITNQDLGKLPADKAELIITAADEIIAGQWLDHFPLRIWQTGSGTQTNMNVNEVIANRAIAICGGELGSKNPIHPNDHVNMSQSSNDTFPTAMHIAAVAGLQTKLIPSLQALRDSLNEKAECFAGITKIGRTHLMDAVPLTLGQEFSGYVAQLDQGLTQINYCLPGLLELALGGTAVGTGLNSHPQFAKKVAEEIAQLTGYTFISAPNKFAALAGHEAIAFASGVLKSIAASLMKIANDLRWMGSGPRCGLGELALPANEPGSSIMPGKVNPTQCEAMTMVCVQVMGNDATIGFAASQGNFELNVFKPVIIHNFLHSLHLLSDACASFRQHLVVGLQVNESKVKDFLDTSLMLVTALNPHIGYDNAALVAKTAFAQGITLKQAAVDLGLLTPAQFDAWVVPEQMIAPIAD

SEQ ID NO: 6180 - DNA, 1401 bp, Thermus aquaticus
  CDS (1)..(1401)
atggaataccgggttgagcgggacaccatgggagaggtcaaggttccggcggaccgctactggggggcccagacccaacgctctctggagcacttccggatcggggcctggcgcttccggatgccgctggagatcatccgggcctacgggatgctgaagaaggccgccgccagagccaacctggagctgggggagctacccgaggagatcgccagggccatcatccaggcggccgaggaggtcatcgccgggaagctggacgaccacttccccctggtggtcttccagaccgggtccggaacccagaccaacatgaacgtcaacgaggtcatcgccaaccgggcctcggagatcctgggcaagcccctggggagcaagtacgtccaccccaatgaccacgtgaaccggggccagagctccaacgacaccttccccaccgccatgtacgtggccaccgtcttggctcttcaccagcacctttacccggcggtggagggcctcatcgccacctttgaggaaaaagccagggcctttgacggcatcgtcaaggtgggccgcacccacctcatggacgccgtccccatcaccctgggccaggaggtggggagctgggccgcccagcttaggaacaccctggccatggtcaaggaggcggaaaagggcctctacaacctggccatcggcggcaccgccgtgggcacgggcctcaacgcccacccccgcttcggggagctggtggcccggtatctggcggaggagaccggcctccccttccgggtggcggaaaaccgcttcgccgccctggccgcccacgacgagctggtccacgtcatgggggctctaaggaccctggccggggccctgatgaagatcggcaacgacatccgctggctggcctcggggccctacgggggtatcggcgagatcttcatccctgccaacgagcccgggagctccatcatgccgggcaaggtgaaccccacccaggtggaggccctaccatgggtggtggtgcgggtctttggcaacgaccaggccgtggccttcgccgggagccagggcaacttccagctcaacgtctacaagccggtcatggtggacgccgccttggagtccatcaagcttctgggcgacgctgtggcctcctttgaccagcacctggcccaggggattgagcccaacctggagcgcatagaggagcacctcaacaagaaccccatgctggccaccgccctcaacaaggccatcggctacgacaaggcggcggagatcgtcaagaaggccatcaaggagaagaagtccctgaagcaggcggccctggagctgggttacctcaccgaggaggagtttgaccggatcgtggtgcccatgcgcctggccaagccccacgaaaacgcttag

SEQ ID NO: 6181 - protein, 466 aa, Thermus aquaticus
MEYRVERDTMGEVKVPADRYWGAQTQRSLEHFRIGAWRFRMPLEIIRAYGMLKKAAARANLELGELPEEIARAIIQAAEEVIAGKLDDHFPLVVFQTGSGTQTNMNVNEVIANRASEILGKPLGSKYVHPNDHVNRGQSSNDTFPTAMYVATVLALHQHLYPAVEGLIATFEEKARAFDGIVKVGRTHLMDAVPITLGQEVGSWAAQLRNTLAMVKEAEKGLYNLAIGGTAVGTGLNAHPRFGELVARYLAEETGLPFRVAENRFAALAAHDELVHVMGALRTLAGALMKIGNDIRWLASGPYGGIGEIFIPANEPGSSIMPGKVNPTQVEALPWVVVRVFGNDQAVAFAGSQGNFQLNVYKPVMVDAALESIKLLGDAVASFDQHLAQGIEPNLERIEEHLNKNPMLATALNKAIGYDKAAEIVKKAIKEKKSLKQAALELGYLTEEEFDRIVVPMRLAKPHENA

SEQ ID NO: 6182 - DNA, 2489 bp, Saccharomyces cerevisiae
  CDS (830)..(2296)
taatcacttctacgagtctagtagatctcttctccttcctataagtggttaatgtattcttcgagaagctcatcatttttttttttcattttttttttttttttcagttttctacaatttcatcaaatcaatggttaaaccgggcagaaaaactaccaagcgttacttttactgatgttagtactactaccgcagttattgcgactactacattaactataactatacaagaaaaaaagtaaagagggctcgtaaagcaaagcttggtatctcctacatagtcaatacatagtagtgagtcgcctatagccattctgtaatgccatttgttaagacgtgtccttaaacccttccgaatcgccgcgggcgacatcataatgtcagtacctaataatggttattattcgtaccctgtggttagagagctatggaagctagcagtaaatgtctctagttcttgctatcactaccatattggagaggcttcaggcccctcccctgagccgatcctcggaatgactaccccgattcccggaatgggcgttcgatgattggctctttcctgtaaagcctttttgcgtttcttataggctatatataatcttcatcactgttgtagacgttaaacaagcatccaacaggaggccggaccgaacacacgggggagtgactctagctctttcttctgggatattcatatcgtttctccattacatacagtcatttttttgcatttttaaattcgtgacttttagtactgcagctgttttttttctcacgtcaagaaattccataaagtctaactattaaacggataagagatacaatcatgttgagatttaccaattgtagttgcaagactttcgtaaaatcgtcatataagcttaatataagaagaatgaactcctcgttcagaactgaaaccgatgcatttggtgagatacacgtgcctgctgataagtactggggtgcccaaactcaaagatcctttcaaaacttcaagattggtggcgctcgtgaaagaatgccattgcctttggtgcatgcatttggtgttttgaagaaatctgccgcgattgtgaatgagtctctggggggattggatcccaagatctccaaggctattcaacaggccgctgacgaagtggcttctggtaagctagacgaccactttccattggttgttttccaaacgggttccggtacccagtctaacatgaatgctaatgaagttatttccaatcgtgccattgagatcctaggaggcaagattggatctaaacaagtccatccaaacaatcattgcaaccaatctcaatcatccaatgatactttccccactgtcatgcatatcgctgccagtttgcaaattcaaaacgagttgatacctgagttgaccaatttaaagaacgcccttgaagccaaatccaaggaatttgaccatattgtgaagatcggtagaacacacttgcaagatgccacgcctttgacactaggtcaagagttttccggttacgtgcaacaagttgagaacggtatccaaagagtggcacattctttgaaaacattgagtttcctggcacaaggtggtactgccgttggtacagggttgaacaccaagcccggattcgatgtcaagatagccgagcaaatttccaaagaaactggactaaagtttcaaaccgcccctaataagttcgaggctttggctgctcacgacgccattgtcgaatgtagcggtgctctaaacacccttgcttgttctcttttcaaaatagcgcaagatataagatacttagggtccgggccacgttgcggctaccatgaactaatgctgccagagaatgaaccaggttcctcaatcatgcctggtaaagttaacccaacccaaaacgaggcattgactcaagtgtgtgtgcaagtcatgggtaacaatgcagctatcacgtttgccggctctcaaggtcaattcgagttaaatgtcttcaagccagtcatgatcgccaatctattgaattcgatcaggttaattactgatgccgcatattcatttagagtgcactgtgttgaaggtatcaaagccaatgagcctcgtattcatgagttgttgactaaatctttaatgttagtcaccgctttgaaccctaagatcggttatgatgccgcttccaaggtcgccaagaatgctcataagaagggcattaccttgaaggaaagtgcattggaattgggtgtattgactgaaaaggaatttgatgaatgggttgttcctgaacacatgctaggtcctaaataaacgagctaaatacctaataatatacaagttttttatgtcttattatatgaaggaaaataaggaagtggagagaatttgtgattcagcaatggtccctccgctaaggtcccgcctctggccagttatgtcagaagaggagcataggcatacattccatttttgatggcttaatggggcccataaatttacatca

SEQ ID NO: 6183 - protein, 488 aa, Saccharomyces cerevisiae
MLRFTNCSCKTFVKSSYKLNIRRMNSSFRTETDAFGEIHVPADKYWGAQTQRSFQNFKIGGARERMPLPLVHAFGVLKKSAAIVNESLGGLDPKISKAIQQAADEVASGKLDDHFPLVVFQTGSGTQSNMNANEVISNRAIEILGGKIGSKQVHPNNHCNQSQSSNDTFPTVMHIAASLQIQNELIPELTNLKNALEAKSKEFDHIVKIGRTHLQDATPLTLGQEFSGYVQQVENGIQRVAHSLKTLSFLAQGGTAVGTGLNTKPGFDVKIAEQISKETGLKFQTAPNKFEALAAHDAIVECSGALNTLACSLFKIAQDIRYLGSGPRCGYHELMLPENEPGSSIMPGKVNPTQNEALTQVCVQVMGNNAAITFAGSQGQFELNVFKPVMIANLLNSIRLITDAAYSFRVHCVEGIKANEPRIHELLTKSLMLVTALNPKIGYDAASKVAKNAHKKGITLKESALELGVLTEKEFDEWVVPEHMLGPK

SEQ ID NO: 6184 - DNA, 1452 bp, Vibrio cholerae O1 biovar eltor str. N16961
  CDS (1)..(1452): transl_table=11
atggctaccctatctgaagcgcctaaaacagcgactccggctacccgcgttgaagaagatctgttaggtcaacgtcacgttcctgctgatgcttactacggtattcatacccttcgcgctgtcgaaaacttcaacatctctaacgttacgatctctgacgtgcctgaatttgtacgcggcatgatcatgaccaaaaaagcggccactctggcaaacaaagagctgggcgtgattcctaaagatgtggcgaactacatccttcaagcgtgtgatttgattcttgaaacaggtaagtgcatggatcaattcccgtcagatgtattccaaggtggtgcgggcacgtcagtgaacatgaacaccaacgaagtgattgctaacgttgcactcgagctgatgggcaaacaaaaaggtcaatacgagttcatcaaccccaatgaccacgtaaacaagagccaatcaaccaactgtgcatacccaacgggtttccgcatcgcggtttacaacagcatcctgaaagtgattgatgcgattgaatacctaaaaggctcattcgaacttaaagcggctgagtacaaaaacatcctgaaaatgggtcgtactcagttgcaagacgctgtacctatgaccgtaggtcaagaattccacgcatgggctgtgacgctgaatgaagagatccgcgcgctgcaatacacttcaaaactgcttttggaagtgaacttgggcgcaaccgcgatcggtactggcctgaacgccgctccgggttaccaagagctggccgtgaaatatctggcgcaagtgacaggtttagaaaccgttccagcagaagatctgattgaagccacctctgactgtggtgcttacgtgatgactcacggcgcgttgaaacgtctagcgatgaagctctctaagatctgtaacgatctacgtctgctctcttctggtccacgtgcaggtctgaatgaaatcaacttgcctgaactgcaagcgggttcgtccatcatgccagcgaaagtaaacccagtaatcccagaagtggtgaaccaagtttgctttaaagtattcggtaacgacaacaccattacattcgccgcagaagcgggtcaactgcagttgaacgtcatggagcctgtgattgctcaagcgatgtttgagtctatctctctgctgactaacgcctgtgtcaacctacgcgacaagtgcattgatggcatcacagtcaacaaagaaatctgtgaaaacttcgtgtttaactctatcggtatcgtgacttacttaaacccatacattggccaccatgagggtgacattgtcggtaagatctgtgccgaaaccggtaagagcgtacgcgaagtggtacttgagcgcggcttgctaactgaagagcagctcgatgacatcttctcggttgagaacctgatgcatcctcagtacaaagcaaaacgttacgaataa

SEQ ID NO: 6185 - protein, 483 aa, Vibrio cholerae O1 biovar eltor str. N16961
MATLSEAPKTATPATRVEEDLLGQRHVPADAYYGIHTLRAVENFNISNVTISDVPEFVRGMIMTKKAATLANKELGVIPKDVANYILQACDLILETGKCMDQFPSDVFQGGAGTSVNMNTNEVIANVALELMGKQKGQYEFINPNDHVNKSQSTNCAYPTGFRIAVYNSILKVIDAIEYLKGSFELKAAEYKNILKMGRTQLQDAVPMTVGQEFHAWAVTLNEEIRALQYTSKLLLEVNLGATAIGTGLNAAPGYQELAVKYLAQVTGLETVPAEDLIEATSDCGAYVMTHGALKRLAMKLSKICNDLRLLSSGPRAGLNEINLPELQAGSSIMPAKVNPVIPEVVNQVCFKVFGNDNTITFAAEAGQLQLNVMEPVIAQAMFESISLLTNACVNLRDKCIDGITVNKEICENFVFNSIGIVTYLNPYIGHHEGDIVGKICAETGKSVREVVLERGLLTEEQLDDIFSVENLMHPQYKAKRYE

SEQ ID NO: 6186 - DNA, 1419 bp, Pasteurella multocida subsp. multocida str. Pm70
  CDS (1)..(1419): transl_table=11
atgacagtaacaagaaaagaagtggatttactcggagaacgtgaagtaccagcagacgcatactggggaattcataccttaagagcggtagaaaattttaatatttcgaatgccgttatctcagatgtgcctgattttgtacgcggtatggtgatggtgaaaaaggcgaccgccttagcaaacggtgaattaggggcgattcctgataaaattgcaaaagcgattgtagctgcttgtgatgaaatcttaaccacaggcaaatgcttagatcaattcccgtcagatatttatcaaggcggtgcaggtacctcagtgaatatgaataccaatgaggttgtggcgaatttggcgttagagttattaggacataagaaaggggaataccaatatttagatccaatggatcatgttaacgctagccaatcaaccaatgacgcctatccaacaggtttccgtattgctgtctataacagtattatgaagctcgtggcaaaagtgctttatttacaacaaggttttgaaaataaagcaaaagaattttcgcacattcttaaaatgggacgcacgcaattacaagatgctgtgccaatgacagtaggacaagaatttaaagccttctctgttttattagatgaagaagttcgcaatttaacacgtacagcagaatacttattagaagttaatttaggtgcgacagcaattggtacgggcttaaatacaccaaaagggtatgcgccattagcggtcaaatacctgtctgaagtcacaggattaccttgtgtattagctgaaaacttaatcgaagctacctcggattgtggggcgtatgtgatggtacacggtgcattaaaacgtactgcggtgaaactatcaaaagtatgtaatgacttacgtctattatcttcaggtccgcgtgcagggttaaatgagattaatttgcctgaattacaagcgggttcatcgattatgccagcaaaagtcaacccagtggtacccgaagtggttaaccaagtttgctataaagtgatggggaacgatactaccattacctttgccgcagaggctggacaattacaattaaatgtcatggagccagtgattgcacaagcgatgtttgagtctattgatattttaaccaatgcttgtgtgaacttacgcgataaatgtattgatggcattacggtgaataaagaaacttgtgaaaactatgtctttaattctatcggtatcgtgacttatttaaatccatttattggacaccataatggtgacttagtcggtaaaatctgtgcgaaaacagggcgcggagtgaaagaggtcgtactcgaaaaaggactcctcacagaagcagaattagatgatattctctcagtggagaacttaatgaatccaacctataaagcgaagttgaataaataa

SEQ ID NO: 6187 - protein, 472 aa, Pasteurella multocida subsp. multocida str. Pm70
MTVTRKEVDLLGEREVPADAYWGIHTLRAVENFNISNAVISDVPDFVRGMVMVKKATALANGELGAIPDKIAKAIVAACDEILTTGKCLDQFPSDIYQGGAGTSVNMNTNEVVANLALELLGHKKGEYQYLDPMDHVNASQSTNDAYPTGFRIAVYNSIMKLVAKVLYLQQGFENKAKEFSHILKMGRTQLQDAVPMTVGQEFKAFSVLLDEEVRNLTRTAEYLLEVNLGATAIGTGLNTPKGYAPLAVKYLSEVTGLPCVLAENLIEATSDCGAYVMVHGALKRTAVKLSKVCNDLRLLSSGPRAGLNEINLPELQAGSSIMPAKVNPVVPEVVNQVCYKVMGNDTTITFAAEAGQLQLNVMEPVIAQAMFESIDILTNACVNLRDKCIDGITVNKETCENYVFNSIGIVTYLNPFIGHHNGDLVGKICAKTGRGVKEVVLEKGLLTEAELDDILSVENLMNPTYKAKLNK

SEQ ID NO: 6188 - DNA, 1425 bp, Pseudomonas aeruginosa PAO1
  CDS (1)..(1425): transl_table=11
atgtcccccgttgcatcttcccgtatcgagaaagacctgctcggcaccctcgaagtgcccgctgacgcctactacggcatccagaccctgcgcgccgtgaacaacttccgcctctccggggtgccgctgtcgcactacccgaagctggtcgttgccctggccatggtcaagcaggccgccgccgacgccaaccgtcagctcggccatctcccggaagacaagcacgccgccatcagcgaggcctgcgcccgcctgatccgcggcgatttccacgagcagttcgtggtggacatgatccagggcggcgccggcacctccaccaacatgaacgcgaacgaagtgatcgcgaacatcgcgctggaagccatgggccacaccaagggtgagtacaagtacctgcacccgaacaacgatgtgaacatggcgcagtcgaccaacgacgcctacccaaccgccatccgcctgggcctgctgctcggccacgacaccctgctggccagcctcgacagcctgatccaggccttcgccgccaagggcgtcgaattcgccggcgtactgaagatgggccgcacccagttgcaggacgccgtgccgatgaccctcggccaggaattccacgctttcgccaccaccctcggcgaagacctcgaccgcctgcgtcgcctggcgccggagctgctcaccgaagtgaacctcggtggcaccgccatcggcaccggcatcaacgccgaccccggctaccagaagctcgccgtcgagcgcctggccgccatcagcgggcagccgctgaagccggccgccgacctgatcgaagccacctccgacatgggcgccttcgtgctgttctccggcatgctcaagcgcaccgcggtcaagctgtcgaagatctgcaacgacctgcgcctgctctccagcggcccgcgcaccggcatcaacgagatcaacctgccgccgcgccagccgggcagttcgatcatgccgggcaaggtcaacccggtgatcccggaagcggtcaaccaggtcgccttcgaagtgatcggcaacgacctcgccctgaccctggcggccgaaggcggccagttgcaactgaacgtgatggagccgctgatcgcctacaagatcttcgactcgatccgcctgctgcaacgcgccatggacatgctccgcgagcactgcatcaccggcatcaccgccaacgtcgagcgctgccacgaactggtcgagcacagcatcggtctggtcaccgcgctgaacccgtacatcggctacgagaactccacgcggatcgccaagaccgccctggagagcggccgcggcgtcctggaactggtacgcgaggaaaagctgctggacgaagccaccctggccgacatcctgctgccggaaaacatgatcgcgccgcgcctgattccgctgcgcgcctga

SEQ ID NO: 6189 - protein, 474 aa, Pseudomonas aeruginosa PAO1
MSPVASSRIEKDLLGTLEVPADAYYGIQTLRAVNNFRLSGVPLSHYPKLVVALAMVKQAAADANRQLGHLPEDKHAAISEACARLIRGDFHEQFVVDMIQGGAGTSTNMNANEVIANIALEAMGHTKGEYKYLHPNNDVNMAQSTNDAYPTAIRLGLLLGHDTLLASLDSLIQAFAAKGVEFAGVLKMGRTQLQDAVPMTLGQEFHAFATTLGEDLDRLRRLAPELLTEVNLGGTAIGTGINADPGYQKLAVERLAAISGQPLKPAADLIEATSDMGAFVLFSGMLKRTAVKLSKICNDLRLLSSGPRTGINEINLPPRQPGSSIMPGKVNPVIPEAVNQVAFEVIGNDLALTLAAEGGQLQLNVMEPLIAYKIFDSIRLLQRAMDMLREHCITGITANVERCHELVEHSIGLVTALNPYIGYENSTRIAKTALESGRGVLELVREEKLLDEATLADILLPENMIAPRLIPLRA

SEQ ID NO: 6190 - DNA, 1398 bp, Neisseria meningitidis MC58
  CDS (1)..(1398): transl_table=11
atgactgtccgtatcgaacacgatttattgggcgaccgcgagattcccgccgaagtgtattggggcatccacaccctgcgcgccattgaaaactttaaaatctccacacaaaaaatttctgacgtgccgcagtttgtccgcagtatggtgatggtgaaaaaggcgacggcacaggcaaacggtgagttgggcgcggtcaagcccgaaatcgccgccgccattgaaaaagcctgcgacgaagttctgctgaacaaccgctgcctcgaccaattcccgtccgacgtgtatcagggcggtgcgggtacttcggtcaatatgaacaccaacgaagtcatcgccaacctcgcattggaagtcttgggatacgaaaaaggccgctacgacatcgtcaatccgatggatcacgtcaatgccagccaatcgaccaacgatgcctatcccacgggcttccgccttgccgtgtattacagcatcggcgaattgctcgacaaactgactgtcctgaaaaacgcctttgccgccaaagccgaagaatttaaagacgttttgaaaatgggccgcacccagcttcaagatgccgtgccgatgactgccggccaagaattccaatctttccaagtgttgttggaagaagaaatcctcaacctcgaccgcacccgccaactgctgttggaagtcaatttgggcgcaacggcaatcggcacgggcgtgaacacgcccaaaggctacgccgaactggtggtcaaaaaactctccgaagtcagcggcttgccttgcaaactgaccgaaaacctgattgaggcgacctccgactgcggcgcatatgtgatggtacacggcgcattgaagcgcacggcggtcaaactctccaaaatctgcaacgacttgcgcctgctctcttccggcccgcgtgccggcttgaaagaaatcaacctgcccgaattgcaggccggttcttccataatgcccgccaaagtcaatcccgtgattcccgaagtggtcaaccaagtctgcttcaaagtcatcggcaacgacacgacgattaccttcgccgccgaagccgggcaactgcaattaaacgtgatggagccggtcatcgcccaatgtatgtttgaaaccatttccctcttgggcaatgccgcagtcaacctgtccgacaaatgcgtcaaaggcattacggtcaaccgcgaaatctgcgaacgttacgttttcaactccatcggtttggtgacttatctgaatccgtatatcggacaccacaacggcgatttggtcggcaaaatctgcgcccaaaccggcaaaggcgtgcgcgaggttgtcttggaacgcgggctgttgagcgaagaagaactcaaccgcatcctctctcccgagaacctgatgaacccccatctgtaa

SEQ ID NO: 6191 - protein, 465 aa, Neisseria meningitidis MC58
MTVRIEHDLLGDREIPAEVYWGIHTLRAIENFKISTQKISDVPQFVRSMVMVKKATAQANGELGAVKPEIAAAIEKACDEVLLNNRCLDQFPSDVYQGGAGTSVNMNTNEVIANLALEVLGYEKGRYDIVNPMDHVNASQSTNDAYPTGFRLAVYYSIGELLDKLTVLKNAFAAKAEEFKDVLKMGRTQLQDAVPMTAGQEFQSFQVLLEEEILNLDRTRQLLLEVNLGATAIGTGVNTPKGYAELVVKKLSEVSGLPCKLTENLIEATSDCGAYVMVHGALKRTAVKLSKICNDLRLLSSGPRAGLKEINLPELQAGSSIMPAKVNPVIPEVVNQVCFKVIGNDTTITFAAEAGQLQLNVMEPVIAQCMFETISLLGNAAVNLSDKCVKGITVNREICERYVFNSIGLVTYLNPYIGHHNGDLVGKICAQTGKGVREVVLERGLLSEEELNRILSPENLMNPHL

SEQ ID NO: 6192 - DNA, 1407 bp, Campylobacter jejuni subsp. jejuni NCTC 11168
  CDS (1)..(1407): transl_table=11
atgggaacaagaaaagaacatgattttattggggaattggaaatctctgatgaggtttattatggagtgcaaacttttagagctgttgaaaattttgatatttctcatgatagattaaaagattttcctcgctttgttagggctttggctagagtaaaaaaagctgcagctatggcaaatcatgaattaggtcttttggataaaaatatccaagatgcgattattaaagcgtgtgataaaattttagaaggtgggtattatgatcaatttgtagtagatatgatccaaggaggtgctggaacaagtacaaatatgaatgctaatgaagttatagcaaacataggacttgaacttatgggtcataaaaaaggtgaataccaatatcttcatccaaatgatcatgttaatttaagccaaagtactaatgatgcttatcctacagctttacaccttgccttgcatgattatttaagtgatttggcaaaagctatggaacatctaaaaaaagcttatgagagaaaagctgaagaatttaaagatgttcttaaaatgggtagaacccaactgcaagatgctgtacctatgactttaggtcgtgaatttaaaacttttgccgtaatgataggtgaagatatacaaagagtattagaagctagaaaattgattttagagatcaatttgggtggaactgctattggaacaggaattaattctcatcctgattatccgaaggttgtagaaagaaaaataagagaagtgacaggttttgaatatactgtggctgaggatttaatcgaggcgactcaagatacgggagcttatgtacaaatttcaggtgttttaaaacgtgttgcaacaaaactttctaaagtatgtaatgacttaagacttttaagtagtggtccaaaatgtggtcttaatgagattaatcttccaaaaatgcaaccaggtagttctatcatgccaggtaaggtaaatcctgttattcctgaagtagttaatcaagtttgttattttgttattggagcagacgtaactgtaacttttgcttgtgagggtggacaattacaacttaatgtttttgaaccagttgtagcatatagcttatttaattctgttgtaatgctagaaaaagcaatgtatactttagctgataaatgtatagatggtattaccgcaaatgaaaaaatttgttcagactttgtctataattcagtaggtatagtaacagctttaaatccttatattggttatgaaaattcagcttctatagccaaagaggcaatgaacactggaaaaagagtggctgatattgcgcttgaaagagggcttttaagcaaagaacaaattgatgaaattttaactccatcaaatatgctaaatcctcacatggaagctaaaaaatag

SEQ ID NO: 6193 - protein, 468 aa, Campylobacter jejuni subsp. jejuni NCTC 11168
MGTRKEHDFIGELEISDEVYYGVQTFRAVENFDISHDRLKDFPRFVRALARVKKAAAMANHELGLLDKNIQDAIIKACDKILEGGYYDQFVVDMIQGGAGTSTNMNANEVIANIGLELMGHKKGEYQYLHPNDHVNLSQSTNDAYPTALHLALHDYLSDLAKAMEHLKKAYERKAEEFKDVLKMGRTQLQDAVPMTLGREFKTFAVMIGEDIQRVLEARKLILEINLGGTAIGTGINSHPDYPKVVERKIREVTGFEYTVAEDLIEATQDTGAYVQISGVLKRVATKLSKVCNDLRLLSSGPKCGLNEINLPKMQPGSSIMPGKVNPVIPEVVNQVCYFVIGADVTVTFACEGGQLQLNVFEPVVAYSLFNSVVMLEKAMYTLADKCIDGITANEKICSDFVYNSVGIVTALNPYIGYENSASIAKEAMNTGKRVADIALERGLLSKEQIDEILTPSNMLNPHMEAKK

SEQ ID NO: 6194 - DNA, 1398 bp, Neisseria meningitidis Z2491
  CDS (1)..(1398): transl_table=11
atgactgtccgtatcgaacacgatttattgggcgaccgcgagatttccgccgaagtatattggggcatccacaccctgcgcgccattgaaaactttaaaatttccacacaaaaaatttccgacgtaccgcaatttgtccgcagtatggtgatggtcaaaaaggcgacggcacaggcaaacggcgaattgggtgcagtaaaacccgaaatcgccgccgccatcgaaaaagcctgcgacgaagttttgttaaacaaccgctgcctcgaccaattcccgtccgatgtgtatcagggcggtgcgggtacttcggtcaatatgaacaccaacgaagtcatcgccaacctcgcattggaagtcttgggatacgaaaaaggccgctacgacatcgtcaatccgatggatcatgtcaacgccagccaatccaccaacgatgcctaccctaccggcttccgccttgccgtgtattacagcatcggcgaattgctcgacaaactggctgtcctgaaaaacgcctttgccgccaaagccgaagaatttaaagacgttttgaaaatgggccgcacccagcttcaagatgccgtaccgatgacggcaggccaggaattccaatctttccaagtgttgttggaagaagaaatcctcaacctcgaccgtactcgccaactgcttttggaagtcaacctcggcgccaccgccatcggtacaggcgtgaacacgcctaaaggctacgccgaactggtggtcaaaaaactctccgaagtcagcggcctgccttgcaaactgactgaaaacctgattgaggcgacctccgactgcggcgcatatgtgatggtacacggcgcattgaagcgcacggcggtcaaactctccaaaatctgcaacgacttgcgcctgctctcttccggcccgcgtgccggcttgaaagaaatcaacctgcccgaattacaggccggttcttccattatgcctgccaaagtcaatcccgtgattcccgaagtcgtcaaccaagtctgcttcaaagtcatcggcaacgacaccaccatcactttcgccgccgaagcaggtcagcttcaactgaacgttatggaaccggtcatcgcccaatgtatgtttgaaacgatttccctcttgggcaatgccgccgtcaacctgtccgacaaatgtgtcaaaggcattacggtcaaccgcgaaatctgcgaacgttacgttttcaactccatcggtttggtcacttatctgaatccgtacatcggccaccacaacggcgatttggtcggcaaaatttgcgcccaaaccggcaaaggcgtgcgcgaggttgttttggaacgcggactgttgagcgaggaagaactcaaccgcatcctctctcccgagaacctgatgaatcctcatctgtaa

SEQ ID NO: 6195 - protein, 465 aa, Neisseria meningitidis Z2491
MTVRIEHDLLGDREISAEVYWGIHTLRAIENFKISTQKISDVPQFVRSMVMVKKATAQANGELGAVKPEIAAAIEKACDEVLLNNRCLDQFPSDVYQGGAGTSVNMNTNEVIANLALEVLGYEKGRYDIVNPMDHVNASQSTNDAYPTGFRLAVYYSIGELLDKLAVLKNAFAAKAEEFKDVLKMGRTQLQDAVPMTAGQEFQSFQVLLEEEILNLDRTRQLLLEVNLGATAIGTGVNTPKGYAELVVKKLSEVSGLPCKLTENLIEATSDCGAYVMVHGALKRTAVKLSKICNDLRLLSSGPRAGLKEINLPELQAGSSIMPAKVNPVIPEVVNQVCFKVIGNDTTITFAAEAGQLQLNVMEPVIAQCMFETISLLGNAAVNLSDKCVKGITVNREICERYVFNSIGLVTYLNPYIGHHNGDLVGKICAQTGKGVREVVLERGLLSEEELNRILSPENLMNPHL

SEQ ID NO: 6196 - DNA, 1446 bp, Agrobacterium tumefaciens str. C58
  CDS (1)..(1446): transl_table=11
gtggaggaaaaagtgagtgtgacgcgcagggagcatgatttgctcgggacgaaggaaattccggctgatgtctattggggcgtgcacaccgcgcgcgccgtggaaaacttcaagatcaccggggtaaccattggccataacccttatctcgtcaggggactggcctatgtgaaggaggcagccgcacgcgcaaatcacgaactcggcctgctcgacaaggagcgcatggaagcgatcgcggaagcctgccgcgaaatccgcgccggcgcgctgcacgagcaattcgtggtcgacgagatccaggggggagccggcacttccactaacatgaacgccaacgaggtcatttccaaccgtgcgctggaactgctcggccacgaaaaaggcgattattcccgtcttcacccgaatgaccatgtcaatctcagccagtccaccaacgacgcctatccaacggcgatcaatgtcgggctgatcgaggcgatcgacgatctggcggtctccatgggcgtgctgaaagacgctttcgaccgcaaggcgcaggaatttgccggcttcatcaagatcggtcgcacccagctgcaggatgccgtgccgatgacgctcggccaggaattccgcactttcgtggtgatgctcggcgaagatcaggctcgcctgatcgaatccgccgcactgctgcacgaaatcaatctcggcgccaccgccatcggcaccggtctcaatgcgccgcgcggttatgccgagcttgcctgccagcatctggctaagctgaccggacggccactggtgacggcagcagacctgatcgaagccacacaggatcccggtgccttcgtgcacctttccggcgtgctgaagcgcgttgccgtcaagctgtccaagacctgcaacgaccttcgcctgctctcctccggtccgcgcgccggcatcggcgagatcaccctgccctccgttcaggcgggttccagcatcatgcctggcaagatcaacccggtcattcccgaagtggtcaaccaggtcgcctatgcggtgatcggcaacgacatcaccatcaccatggcggccgaagccgggcagctgcaattgaacgcctttgaacccatcatcgtgcgggcattgtcgcagagcatcagccagctcagcgccgcctgccgcacattggcggaacgctgcgttgagggcatcgtcgcaaaccccggcatcatggcgcagcgcgtggaagaatcgatcggtctcgccaccgcgctcaatccgctgatcggttattacgccgcgacggaagtggcgaaggaagcgcttgccagcggccgcaccgtgccgcaggtcgttctggaacggggttatctgacggaaacgcaattgcagcaggcgctcagcccgcgtcatcttgccaacctgcccgcggttaccgttacggctggcgaagccgatcttcgccgatga

SEQ ID NO: 6197 - protein, 481 aa, Agrobacterium tumefaciens str. C58
MEEKVSVTRREHDLLGTKEIPADVYWGVHTARAVENFKITGVTIGHNPYLVRGLAYVKEAAARANHELGLLDKERMEAIAEACREIRAGALHEQFVVDEIQGGAGTSTNMNANEVISNRALELLGHEKGDYSRLHPNDHVNLSQSTNDAYPTAINVGLIEAIDDLAVSMGVLKDAFDRKAQEFAGFIKIGRTQLQDAVPMTLGQEFRTFVVMLGEDQARLIESAALLHEINLGATAIGTGLNAPRGYAELACQHLAKLTGRPLVTAADLIEATQDPGAFVHLSGVLKRVAVKLSKTCNDLRLLSSGPRAGIGEITLPSVQAGSSIMPGKINPVIPEVVNQVAYAVIGNDITITMAAEAGQLQLNAFEPIIVRALSQSISQLSAACRTLAERCVEGIVANPGIMAQRVEESIGLATALNPLIGYYAATEVAKEALASGRTVPQVVLERGYLTETQLQQALSPRHLANLPAVTVTAGEADLRR

SEQ ID NO: 6198 - DNA, 1437 bp, Yersinia pestis CO92
  CDS (1)..(1437): transl_table=11
atgtcaaataacattcgtattgaagaagacctgttaggtacacgagaagtccccgcagaggcttactacggtgttcataccctgcgtgcgattgaaaacttctatatcagtaacagtaaaatcagtgacgtgccggaatttgtacgtggcatggtcatggtaaaaaaagcggcggcaatggctaacaaagagttgcataccatcccgcgtaaaattgcagacatcattattcaggcatgtgatgaagttctggataaagggaaatgtatggatcagttccccgttgatgtgttccagggcggcgcaggtacctctctcaatatgaacaccaacgaggtcttggccaatattggcctggagctgatgggccaccaaaaaggggaatatcagtaccttaaccctaacgaccatctgaacaaatgccagtccaccaacgatgcctacccaaccggtttccgcattgcggtctacgcctccatcctcaagttgatcgatgctatcaaccaattaggcgaaggtttcggtagaaaatctaaagaattcgagaaaattctgaaaatgggccgtacccaattacaggatgccgtacccatgactctgggccaggaattccgcgctttccaggtgttattgaatgaagaaaccaagaacctgcaacggaccgccgagttgctattggaagtcaacctgggtgccactgccatcggcactgcgctgaatacaccagaaggttattcacaacttgccgtgcagaaactggcagaaatcagcggattagcctgtgttcctgccgaagatttgatcgaagcgacctctgattgcggcgcttacgtgatggtacacagcgccctgaaacgcctggctgttaagatgtcaaaaatctgtaacgacctacgtttgctctcatctggcccacgtactggtttgaatgaaatcaacctgccagaattgcaggcgggctcttctatcatgcctgcaaaagtgaacccggtgatccctgaagttgtaaatcaggtttgttttaaggtgatcggcaacgatacttgcattactatggcggctgaagcgggtcagcttcagttaaacttgatggaaccggtaattggtcaggccatgtttgagtctatccatatcctgactaatgcgtgttacaacctgttagagaagtgcatcaatggcattaccgctaacaaagaggtctgcgagcgctacgtctttaactccataggcatcgtcacttatcttaacccgttcattggccaccataatggtgacattgtgggtaaaatctgtgcggaaaccggtaaaaatgtgcgggaagtggttctggagcgcggtttgttaactgaagccgaactggacgacattttctctgttgaaaacctgatgcacccagcctataaagcgaaacgttataccgatgaaaatgaacaataa

SEQ ID NO: 6199 - protein, 478 aa, Yersinia pestis CO92
MSNNIRIEEDLLGTREVPAEAYYGVHTLRAIENFYISNSKISDVPEFVRGMVMVKKAAAMANKELHTIPRKIADIIIQACDEVLDKGKCMDQFPVDVFQGGAGTSLNMNTNEVLANIGLELMGHQKGEYQYLNPNDHLNKCQSTNDAYPTGFRIAVYASILKLIDAINQLGEGFGRKSKEFEKILKMGRTQLQDAVPMTLGQEFRAFQVLLNEETKNLQRTAELLLEVNLGATAIGTALNTPEGYSQLAVQKLAEISGLACVPAEDLIEATSDCGAYVMVHSALKRLAVKMSKICNDLRLLSSGPRTGLNEINLPELQAGSSIMPAKVNPVIPEVVNQVCFKVIGNDTCITMAAEAGQLQLNLMEPVIGQAMFESIHILTNACYNLLEKCINGITANKEVCERYVFNSIGIVTYLNPFIGHHNGDIVGKICAETGKNVREVVLERGLLTEAELDDIFSVENLMHPAYKAKRYTDENEQ

SEQ ID NO: 6200 - DNA, 1437 bp, Yersinia pestis KIM
  CDS (1)..(1437): transl_table=11
atgtcaaataacattcgtattgaagaagacctgttaggtacacgagaagtccccgcagaggcttactacggtgttcataccctgcgtgcgattgaaaacttctatatcagtaacagtaaaatcagtgacgtgccggaatttgtacgtggcatggtcatggtaaaaaaagcggcggcaatggctaacaaagagttgcataccatcccgcgtaaaattgcagacatcattattcaggcatgtgatgaagttctggataaagggaaatgtatggatcagttccccgttgatgtgttccagggcggcgcaggtacctctctcaatatgaacaccaacgaggtcttggccaatattggcctggagctgatgggccaccaaaaaggggaatatcagtaccttaaccctaacgaccatctgaacaaatgccagtccaccaactatgcctacccaaccggtttccgcattgcggtctacgcctccatcctcaagttgatcgatgctatcaaccaattaggcgaaggtttcggtagaaaatctaaagaattcgagaaaattctgaaaatgggccgtacccaattacaggatgccgtacccatgactctgggccaggaattccgcgctttccaggtgttattgaatgaagaaaccaagaacctgcaacggaccgccgagttgctattggaagtcaacctgggtgccactgccatcggcactgcgctgaatacaccagaaggttattcacaacttgccgtgcagaaactggcagaaatcagcggattagcctgtgttcctgccgaagatttgatcgaagcgacctctgattgcggcgcttacgtgatggtacacagcgccctgaaacgcctggctgttaagatgtcaaaaatctgtaacgacctacgtttgctctcatctggcccacgtactggtttgaatgaaatcaacctgccagaattgcaggcgggctcttctatcatgcctgcaaaagtgaacccggtgatccctgaagttgtaaatcaggtttgttttaaggtgatcggcaacgatacttgcattactatggcggctgaagcgggtcagcttcagttaaacttgatggaaccggtaattggtcaggccatgtttgagtctatccatatcctgactaatgcgtgttacaacctgttagagaagtgcatcaatggcattaccgctaacaaagaggtctgcgagcgctacgtctttaactccataggcatcgtcacttatcttaacccgttcattggccaccataatggtgacattgtgggtaaaatctgtgcggaaaccggtaaaaatgtgcgggaagtggttctggagcgcggtttgttaactgaagccgaactggacgacattttctctgttgaaaacctgatgcacccagcctataaagcgaaacgttataccgatgaaaatgaacaataa

SEQ ID NO: 6201 - protein, 478 aa, Yersinia pestis KIM
MSNNIRIEEDLLGTREVPAEAYYGVHTLRAIENFYISNSKISDVPEFVRGMVMVKKAAAMANKELHTIPRKIADIIIQACDEVLDKGKCMDQFPVDVFQGGAGTSLNMNTNEVLANIGLELMGHQKGEYQYLNPNDHLNKCQSTNYAYPTGFRIAVYASILKLIDAINQLGEGFGRKSKEFEKILKMGRTQLQDAVPMTLGQEFRAFQVLLNEETKNLQRTAELLLEVNLGATAIGTALNTPEGYSQLAVQKLAEISGLACVPAEDLIEATSDCGAYVMVHSALKRLAVKMSKICNDLRLLSSGPRTGLNEINLPELQAGSSIMPAKVNPVIPEVVNQVCFKVIGNDTCITMAAEAGQLQLNLMEPVIGQAMFESIHILTNACYNLLEKCINGITANKEVCERYVFNSIGIVTYLNPFIGHHNGDIVGKICAETGKNVREVVLERGLLTEAELDDIFSVENLMHPAYKAKRYTDENEQ

SEQ ID NO: 6202 - DNA, 1617 bp, Corynebacterium efficiens YS-314
  CDS (1)..(1617): transl_table=11
atgtcgaacgaggataagaaggtgtccgaggacacgtccagcgagcaggcggagcaggtggaccagacggaccagaccggaaacccggaggattccgcggtggacggggaggccctggtgaccaccacggagaccacctccaccggtgagaagaccgcggcggcgaaggccgcggaaaaccgcaggaagatcaagaggaatttccgtgtggaatccgacctgctgggggagatggagatcccggccgatgcctactacggtgtccacaccctgcgtgccgtggagaacttccagatctcacgcaccaccatcaaccacgtcccggagttcatccgcggcatggtgcaggtgaagaaggccgccgccctggccaaccgccgcctgcacaccctgcccgccgacaaggccaaggcgatcatctgggcctgtgatcagatcctcgtcgagggccgctgcatggaccagttcccgatcgacgtgttccagggcggggcgggcaccagcaccaacatgaacaccaatgaggtggtggccaacctggcgctggagtacatggggtacgagaagggacgctacgacatcctgcaccccatggatgacgtgaacatgtcccagtccaccaatgatgcctatcccacgggtttccgactcggcatctatgctgcgatgaccaacctcatcgcggagatcgaacagctccaggtcgccttccgggagaagggcaatgagttcatcgacatcatcaagatgggccgcacccagctccaggatgcggtgccgatgagcctgggtgaggagttccaggccttcgccgcgaacctggccgaggaacagtccgtgctgcgcgcctccatggaccgtctcctcgaggtcaacctcggtgccaccgccatcggtaccggcgtgaacaccccggccggataccggcaccaggtggtcgcctccctctccgaggtcaccggcctggagatcaaatccgcccgtgatctcatcgaggccacctcggacaccggtgcctacgtcctggcgcattccgcggtcaagcgtgcagccatgaaactgtccaagatctgcaacgatctgcgcctgctgtcctccggcccgcgcgccggactcaacgagatcaacctcccgccgcgtcaggccggatcctccatcatgccggcgaaggtcaacccggtcatccccgaggtggtcaaccaggtctgcttcaaggtcttcggcaatgacctcaccgtggccatggccgccgaggccggtcagctgcagctcaatgtgatggaaccggtcatcggggagtcgctgttccagtcgatccgtatcctgggcaatgcgagcaagaccctgcgggagaagtgcgtggtgggcatcaccgcgaatgcggatgtctgccggtcctatgtggagaactccatcggcatcatcacctacctcaacccgtttttgggccatgacatcggtgatgccatcggtaaggaggccgcggagacgggccggtccgtccgggagctgatcctggagaagaacctcatggatgcggcgaccctggataccgtgttgtccaaggagaacctgatgcacccgatcttccggggcaagctgtacctggatcagtag

SEQ ID NO: 6203 - protein, 538 aa, Corynebacterium efficiens YS-314
MSNEDKKVSEDTSSEQAEQVDQTDQTGNPEDSAVDGEALVTTTETTSTGEKTAAAKAAENRRKIKRNFRVESDLLGEMEIPADAYYGVHTLRAVENFQISRTTINHVPEFIRGMVQVKKAAALANRRLHTLPADKAKAIIWACDQILVEGRCMDQFPIDVFQGGAGTSTNMNTNEVVANLALEYMGYEKGRYDILHPMDDVNMSQSTNDAYPTGFRLGIYAAMTNLIAEIEQLQVAFREKGNEFIDIIKMGRTQLQDAVPMSLGEEFQAFAANLAEEQSVLRASMDRLLEVNLGATAIGTGVNTPAGYRHQVVASLSEVTGLEIKSARDLIEATSDTGAYVLAHSAVKRAAMKLSKICNDLRLLSSGPRAGLNEINLPPRQAGSSIMPAKVNPVIPEVVNQVCFKVFGNDLTVAMAAEAGQLQLNVMEPVIGESLFQSIRILGNASKTLREKCVVGITANADVCRSYVENSIGIITYLNPFLGHDIGDAIGKEAAETGRSVRELILEKNLMDAATLDTVLSKENLMHPIFRGKLYLDQ

SEQ ID NO: 6204 - DNA, 1437 bp, Pseudomonas putida KT2440
  CDS (1)..(1437): transl_table=11
atgatatacatcatgtcctctgctgcatcgttccgcgtcgaaaaagacttgttgggtacccttgaagttcctgcagatgcctactacggcatccagaccctgcgcgctgccaacaacttccacctctccggtgttccgctgtcgcactacccgaagctggtcgtggccctggccatggtcaagcaggccgctgccgacgccaaccgtgagctgggtcacctgagcgatgccaagcacgctgccatttccgcagcctgcgcccgcctgatcaaaggcgatttccacgaccagttcgtggtagacatgatccagggcggcgctggtacttctaccaacatgaacgccaacgaagtcattgccaacgttgcgctggaggccatgggccaccagaagggtgagtaccagtacctgcaccctaacaacgacgtgaacatggcgcagtcgaccaacgacgcctacccgaccgcaatccgcctgggcctgctgctgggccacgacgcgctgctggccagccttgatagcctgatccaggccttcgctgccaagggtaaagaattcgaccacgtactgaagatgggccgtacccagctgcaggacgccgtaccgatgaccctgggccaggaattccgcgccttcgccaccaccatgactgaagacctgcagcgcctgcgctcgctggctccggaactgctgaccgaaatcaacctgggcggtaccgccatcggtactggcatcaacgccgaccctggctaccaggccttggccgtacagcgcctggccaccatcagcggccacccgctggtaccggctgccgacctgatcgaagccacctccgacatgggcgccttcgtgctgttctccggcatgctcaagcgcaccgcggtcaagctgtcgaagatctgcaacgacctgcgcctgctgtccagcggcccacgcaccggcatcaacgagatcaacctgccagcgcgtcagccaggcagctcgatcatgccaggcaaggtcaacccggttattccagaagctgtgaaccaggtggccttcgccatcatgggcaacgacctggccctgaccgtcgccgccgaaggtggtcagctgcagctgaacgtgatggagccgctgatcgcctacaagatcttcgactcgatccgcctgctgcaacgcgccatggacatgctgcgcgagcactgcatcgtcggcatcaccgccaacgaacagcgctgccgtgaactggtcgagcactcgatcggcctggttaccgcactgaacccgtacatcggctacgaaaacgccacccgtattgcccgcgttgccctggaaagcggccgcggcgtactggaactggtgcgcgaagagaagctgctggacgacgcgatgctcgacgacatcctgcgtccggaaaacatgatcgctccacgtctggttccgctgaaggcgtaa

SEQ ID NO: 6205 - protein, 478 aa, Pseudomonas putida KT2440
MIYIMSSAASFRVEKDLLGTLEVPADAYYGIQTLRAANNFHLSGVPLSHYPKLVVALAMVKQAAADANRELGHLSDAKHAAISAACARLIKGDFHDQFVVDMIQGGAGTSTNMNANEVIANVALEAMGHQKGEYQYLHPNNDVNMAQSTNDAYPTAIRLGLLLGHDALLASLDSLIQAFAAKGKEFDHVLKMGRTQLQDAVPMTLGQEFRAFATTMTEDLQRLRSLAPELLTEINLGGTAIGTGINADPGYQALAVQRLATISGHPLVPAADLIEATSDMGAFVLFSGMLKRTAVKLSKICNDLRLLSSGPRTGINEINLPARQPGSSIMPGKVNPVIPEAVNQVAFAIMGNDLALTVAAEGGQLQLNVMEPLIAYKIFDSIRLLQRAMDMLREHCIVGITANEQRCRELVEHSIGLVTALNPYIGYENATRIARVALESGRGVLELVREEKLLDDAMLDDILRPENMIAPRLVPLKA

SEQ ID NO: 6206 - DNA, 1452 bp, Vibrio vulnificus CMCP6
  CDS (1)..(1452): transl_table=11
atggctaccctaactgaagctccaaaagcatcaactccggccactcgtattgaagaagatctattaggccaacgtcacgttccggctgacgcttactacggtattcacacgctgcgcgccatcgaaaacttcaacatctcaaatgtcactatttctgacgtaccagaattcgttcgtggcatggttatgaccaaaaaagccgctgcgcttgctaacaaagaattgggcgcaattcctaagaatgtcgcggattacatcattcaagcgtgtgacctaatgttggaaactggcaaatgcatggatcagttcccatcagacgtattccaaggcggtgcgggcacttctgtgaacatgaacaccaacgaagtacttgccaacattgctctagaattaatgggcaaagagaaaggcgattacgacgtggtgaacccaaacgatcacgtgaacaagagccaatcaaccaactgtgcctacccaacgggcttccgtattgcggtttacaacagcatccataaattgatggaagcgattgaatacctaaaaggtgcgtttgagctgaaatctcaagagtttaacggcatcctaaaaatgggccgtactcagttgcaagatgcggttccaatgacagtaggtcaagagtttcacgcttgggcagtgacgctaaacgaagagatccgtgcgctagactacacctcgaagctacttcttgaagtgaacctaggtgcaacggcaatcggtactggcttgaacacacctcctggttaccaagcacttgccgtgaaacacctagcggaagtgactggcctagcagtggttccagcagaagaccttatcgaagcaacttcagactgtggtgcttacgtaatggcacacggcgctctaaaacgcctagcggtgaaattgtctaagatctgtaacgacttgcgtctgctttcttctggtcctcgcgctggtttgaacgaacttaacttgccagaaatgcaagccggttcttcaatcatgccagcaaaagttaacccagttatcccagaagtggttaaccaagtgtgtttcaaagtactgggtaacgacaacacgatttctttcgcagccgaaggcggtcagctacagctgaacgtaatggagcctgtgattggtcaagcgatgtttgaatcgatttcactactacaaaacgcgtgtgtgaacctacgtgacaagtgtatcgacggcatcactgtgaacaaagagatctgtgaaaactacgtttacaactctatcggtatcgttacttacctaaacccatacatcggccaccacgaaggtgacatcgttggtaagatctgtgcggaaaccggtaagagcgtccgtgaagtagtgcttgagcgtggcttgctgacatctgaagagttggatgacatcctgtctgtgcagaacttcatgcacccaacttacaaagcaaaacgttacgaataa

SEQ ID NO: 6207 - protein, 483 aa, Vibrio vulnificus CMCP6
MATLTEAPKASTPATRIEEDLLGQRHVPADAYYGIHTLRAIENFNISNVTISDVPEFVRGMVMTKKAAALANKELGAIPKNVADYIIQACDLMLETGKCMDQFPSDVFQGGAGTSVNMNTNEVLANIALELMGKEKGDYDVVNPNDHVNKSQSTNCAYPTGFRIAVYNSIHKLMEAIEYLKGAFELKSQEFNGILKMGRTQLQDAVPMTVGQEFHAWAVTLNEEIRALDYTSKLLLEVNLGATAIGTGLNTPPGYQALAVKHLAEVTGLAVVPAEDLIEATSDCGAYVMAHGALKRLAVKLSKICNDLRLLSSGPRAGLNELNLPEMQAGSSIMPAKVNPVIPEVVNQVCFKVLGNDNTISFAAEGGQLQLNVMEPVIGQAMFESISLLQNACVNLRDKCIDGITVNKEICENYVYNSIGIVTYLNPYIGHHEGDIVGKICAETGKSVREVVLERGLLTSEELDDILSVQNFMHPTYKAKRYE

SEQ ID NO: 6208 - DNA, 1401 bp, Bradyrhizobium japonicum USDA 110
  CDS (1)..(1401): transl_table=11
atgagccgtacggagcaggatttcctcggacagcgtgagatcgccgacgatatttactacggcgtccagaccatccgcgggaaggagaacttccacatcaccggcattccgatgaaccaggagccttacttcgtgaaggcgctgggttacgtgaagaaggccgcggcgatggccaatcgcgatctcggcgtgatcgacgccagggtggccgatgcgatcatcctcggctgcgaccgcgtgattgccggcgacatgatggatcaattcgtcaccgacttcatccagggcggcgccggcacctcgaccaacatgaacgccaacgaggtgatcgccaacctcgcgctggaatcgctgggcttcaagaagggcgactaccagcacgtcagcccgaacgatcatgtgaactacggccagtcgaccaacgacacctatccgaccgcctttcgcctcgcgctgatcctgcggctcgagagctacatgacggcgctgcgccagctccaggaggcgttcttcgccaagggccgtgagttcgatcgcgtgctgaagatgggccgtacgcatcttcaggacgccgtgccgatgtcgctcggcgccgaattccgcggctggggtaccaccatgggcgaggaggtcgatcgtatctccgaggcacgggcgctgctgcgcgagatcaatctcggcgcgaccgcgatcggcacctccgtcaccgcggcgcacggctatcccaagctcgccgtccggcatctgagcgcgctgaccggcatcgacttcattctcgccggcgacctcgtcgaagcgacctcggacaccggtgcctatgtgcagctctccggcgtgctcaagcgcacggcgagcaagctgacaaaaatctgcaacgacatccggttgctggcttcgggcccgcgcgccggcttcaacgagatcaacctgccgcagctccagccgggctcctcgatcatgccggggaaggtcaatcccgtgatccccgaggtcgtcaaccagaccagcttccttgtcatcggcctcgacaccacggtgacgcttgccgcgtccgccggccagctccaactcaatgtgatggaaccggtgatctcgttcgcgctgttcttctcgatccgcaccatggagcgcgcggtcaacagcctgcgcgagaactgcgtcgtcggcatcaccgccaacgcggagcacacccgcaacatggtgctgaactcgctcggtatcgtcacggtgctgaagccgctgctcggctacaagcaatgcgccgagatcgcgcgcgagggttacaagagcggcaagtcgctgcaccagatcgtggtggtcgagcgcaagctgctgacgcaggagaagtgggacgagatgttctcgttcgagcggctgatcaatccggacctgattgcgtga

SEQ ID NO: 6209 - protein, 466 aa, Bradyrhizobium japonicum USDA 110
MSRTEQDFLGQREIADDIYYGVQTIRGKENFHITGIPMNQEPYFVKALGYVKKAAAMANRDLGVIDARVADAIILGCDRVIAGDMMDQFVTDFIQGGAGTSTNMNANEVIANLALESLGFKKGDYQHVSPNDHVNYGQSTNDTYPTAFRLALILRLESYMTALRQLQEAFFAKGREFDRVLKMGRTHLQDAVPMSLGAEFRGWGTTMGEEVDRISEARALLREINLGATAIGTSVTAAHGYPKLAVRHLSALTGIDFILAGDLVEATSDTGAYVQLSGVLKRTASKLTKICNDIRLLASGPRAGFNEINLPQLQPGSSIMPGKVNPVIPEVVNQTSFLVIGLDTTVTLAASAGQLQLNVMEPVISFALFFSIRTMERAVNSLRENCVVGITANAEHTRNMVLNSLGIVTVLKPLLGYKQCAEIAREGYKSGKSLHQIVVVERKLLTQEKWDEMFSFERLINPDLIA

SEQ ID NO: 6210 - DNA, 1425 bp, Pseudomonas syringae pv. tomato str. DC3000
  CDS (1)..(1425): transl_table=11
atgtcctcgcctgcatcatcgcgcatcgaaaaagacctgctaggtgttctcgaagtacctgccaacgcttattacggcatccagaccctgcgagcggtgaacaactttcacctttcgggcgtaccgctttcgcactatccgaaactggtagtagcgctggccatggtcaagcaggcggcagccgatgcaaaccatcagcttgggcacctcaacgataccaagcattcagcgatcagcgaggcgtgcgcccggctgatccgcggcgacttccatgaccagttcgtggtcgacatgattcagggcggcgctggcacttcgaccaacatgaatgccaacgaagtcatcgccaacatcgcgctggaaaccatgggtttcgagaagggcgaatacaaacacctgcaccccaacaacgacgtgaacatggcgcagtccaccaacgacgcctacccgaccgcgatccgcctgggtctgctgctgggtcatgacgcccttctcgccagccttgccagcctgatccaggcgttcgccgccaaaggcgaagaattcaaccatgtgctgaagatgggtcgtacccagttgcaggacgccgttccaatgactctgggccaggaattccgcgcctttgccaccacgctgaccgaagacctcaaccgtctgcgcagcctggcacccgaactgttgaccgaagtcaacctgggcggcacggccatcggtaccggcatcaacgccgaccccggctaccagaagcttgctgtcgaccgtttggcgctgatcagcggtcagccgctggtgccggcagccgacctgatcgaagcgacctccgacatgggcgcgttcgtactgttctcgggcatgctcaaacgcaccgcggtcaagctgtcgaagatctgcaacgacctgcgcctgttgtccagcggcccgcgcaccggcatcaacgaaatcaacctgccggcgcgccagccaggcagctctatcatgcccggcaaggtcaacccggtaatcccggaagcggtcaatcaggtggccttcgagatcatcggcaacgacctgtcgctgaccatggcagccgaaggtggccagttgcagctcaacgtcatggagccgctgatcgcctacaagatcttcgactcgatccgcttgctgcagcgcgccatggacatgctgcgcgaacactgcatcgtcggcatcaccgccaacgaacagcgctgccgcgaactggtcgagcactcgatcggtctggtcaccgcactgaacccgtacatcgggtatgaaaactccacccgtatcgcccgtatcgcgctggaaaccggccgtggcgtactggaactggtccgcgaagaaggtctgctcgacgacgccatgctcgacgacattctgcgaccggaaaacatgatcgctccacgtctggcccccttgaaggcctga

SEQ ID NO: 6211 - protein, 474 aa, Pseudomonas syringae pv. tomato str. DC3000
MSSPASSRIEKDLLGVLEVPANAYYGIQTLRAVNNFHLSGVPLSHYPKLVVALAMVKQAAADANHQLGHLNDTKHSAISEACARLIRGDFHDQFVVDMIQGGAGTSTNMNANEVIANIALETMGFEKGEYKHLHPNNDVNMAQSTNDAYPTAIRLGLLLGHDALLASLASLIQAFAAKGEEFNHVLKMGRTQLQDAVPMTLGQEFRAFATTLTEDLNRLRSLAPELLTEVNLGGTAIGTGINADPGYQKLAVDRLALISGQPLVPAADLIEATSDMGAFVLFSGMLKRTAVKLSKICNDLRLLSSGPRTGINEINLPARQPGSSIMPGKVNPVIPEAVNQVAFEIIGNDLSLTMAAEGGQLQLNVMEPLIAYKIFDSIRLLQRAMDMLREHCIVGITANEQRCRELVEHSIGLVTALNPYIGYENSTRIARIALETGRGVLELVREEGLLDDAMLDDILRPENMIAPRLAPLKA

SEQ ID NO: 6212 - DNA, 1452 bp, Vibrio parahaemolyticus RIMD 2210633
  CDS (1)..(1452): transl_table=11
atggctaccctatctgatgctccaaaaacagcaaaccaagccactcgtattgaagaagatctattaggtcaacgtcatgtccctgctgatgcgtactacggcattcataccctacgtgcgatcgaaaacttcaacatctctaacgtaactatttctgacgtacctgagttcgtacgcggcatggtgatgacgaagaaagcagcggcgttggcgaacaaagaacttggcgctattcctaaagaagttgctaactacatcctagaagcgtgtgatttgatcctagaaacaggcaagtgtatggatcagttcccttcagacgtattccaaggcggcgcgggtacttccgttaacatgaacactaacgaagttatcgcgaacgttgcacttgaactaatgggcaaagaaaaaggccaatacgagttcatcaacccgaacgaccacgttaacaagagccaatctactaactgtgcgtacccaactggtttccgtatcgcggtttacaacagcgtacacaaactaatggaagcgattgaatacctaaaaggcgcattcgatcttaaagcaactgaattcaaagacgtattgaagatgggtcgtactcagcttcaagacgcggtaccaatgactgttggtcaagagttccacgcttgggctgtaacgctaaacgaagagattcgtgctctagattacacatctaaactcctactagaaatcaacctaggtgcaaccgcaatcggtactggtcttaacacaccaactggttaccaagctctagcagtaaaacacctagcggaagtaactggccttgacgttgtgcctgcagaagacctaatcgaagcgacttctgactgtggtgcatacgtaatgactcacggcgcgctaaaacgtctagcagtgaaactatcgaagatctgtaacgaccttcgtctactttcttctggtcctcgcgcgggtctaaacgaattgaacctacctgaaatgcaagcaggttcttcaatcatgccagcgaaagtaaacccagttatcccagaagtagtaaaccaagtttgcttcaaagttctaggtaacgacaacacggtttctttcgcagcagaaggcggtcagctacagctaaacgtaatggaaccagttatcgcacaaagcatgtttgagtctatctctctactacacaatgcgtgtgtgaacctacgtgataaatgtatcgacggcatcactgtaaacaaagaaatctgtgagaactacgtttacaactcaatcggtatcgtaacttacctaaacccatacattggccaccacgaaggtgacattgtcggtaagatttgtgcagaaactggtaagagtgttcgtgaagtcgtgcttgagcgcggcctgctaactgcagaagaacttgatgaaatcttaacagttgaaaacttcatgcatcctacttacaaagcgaaacgctacgagtaa

SEQ ID NO: 6213 - protein, 483 aa, Vibrio parahaemolyticus RIMD 2210633
MATLSDAPKTANQATRIEEDLLGQRHVPADAYYGIHTLRAIENFNISNVTISDVPEFVRGMVMTKKAAALANKELGAIPKEVANYILEACDLILETGKCMDQFPSDVFQGGAGTSVNMNTNEVIANVALELMGKEKGQYEFINPNDHVNKSQSTNCAYPTGFRIAVYNSVHKLMEAIEYLKGAFDLKATEFKDVLKMGRTQLQDAVPMTVGQEFHAWAVTLNEEIRALDYTSKLLLEINLGATAIGTGLNTPTGYQALAVKHLAEVTGLDVVPAEDLIEATSDCGAYVMTHGALKRLAVKLSKICNDLRLLSSGPRAGLNELNLPEMQAGSSIMPAKVNPVIPEVVNQVCFKVLGNDNTVSFAAEGGQLQLNVMEPVIAQSMFESISLLHNACVNLRDKCIDGITVNKEICENYVYNSIGIVTYLNPYIGHHEGDIVGKICAETGKSVREVVLERGLLTAEELDEILTVENFMHPTYKAKRYE

SEQ ID NO: 6214 - DNA, 1461 bp, Bacteroides thetaiotaomicron VPI-5482
  CDS (1)..(1461): transl_table=11
atgtgttattgttataaaacaaccgatatggaacagaaattatcaaaaaaaactcgtacagagagcgacttgataggtagtcgtgaagtgccggaaagtgcattgtatggagtacagacactccgtggtattgaaaactttcgcatcagcaagtttcatttgaatgagtatcccctgtttattcaggcattggccatcactaaaatgggagctgccgttgccaaccgtgaactggatttattgactgaggaacagacggatgccatactgaaggcttgtaaagaaatactggaaggaaaacatcatgaccaattccctgtagatatgatacagggtggagccggaaccaccaccaatatgaatgccaatgaagtgattgccaaccgtgcactggaactgatgggacatgcacgcggagagtatcactactgctcgcctaacgatcacgtcaatcgttcgcaatctaccaatgatgcgtatcctacagccattcacattggtctgtattatacccatcttaaattggtgaaacactttgcaacactgatcgaggctttccgaaagaaaggagcggagtttgcacacatcatcaagatgggacgtacccaactggaagatgccgtaccgatgacactaggacaaacctttaatggattcgcaagtattttggaacatgaactgaagaatctcgattttgccgcacaggattttctgacggtcaacatgggtgcgacagccatcggaaccggaattaccgccgaaccggaatatgcggaaaagtgcattgctgccctgcgcaagattacaggactggatatcaaactggcagatgacctgataggcgctacttcggatacttcctgcatggtaggatattcttcggccatgcggcgtgtagctgtcaagatgaacaagatttgtaatgatctgaggctattggcttccggtcctcgttgcggactgggagaaatcaatctgcctgccatgcagccgggctcttccattatgccgggaaaggtgaatcctgtcattccggaagtcatgaatcaggtctcttataaagtgataggaaacgacctttgtgtggctatgagtggagaggctgcgcagatggaactgaatgcgatggaacctgtcatggcacaatgctgttttgaatctgcggatttgttgatgaacggttttgatacattgcgtaccttatgtattgatggtatcacagccaatgaagaaaaatgccgtcgggatgtacacaacagtatcggagtagtgaccgcactgaatcccgtaattggctataaacattctacaaagatagcgaaggaggctctggaaacgggtaaaggagtgtatgagctggtgctggaacataacattctttccaaagaagacctggatacgatcttgaaaccggaaaatatgattaaaccggtgaaactggatattcatccgaatcattga

SEQ ID NO: 6215 - protein, 486 aa, Bacteroides thetaiotaomicron VPI-5482
MCYCYKTTDMEQKLSKKTRTESDLIGSREVPESALYGVQTLRGIENFRISKFHLNEYPLFIQALAITKMGAAVANRELDLLTEEQTDAILKACKEILEGKHHDQFPVDMIQGGAGTTTNMNANEVIANRALELMGHARGEYHYCSPNDHVNRSQSTNDAYPTAIHIGLYYTHLKLVKHFATLIEAFRKKGAEFAHIIKMGRTQLEDAVPMTLGQTFNGFASILEHELKNLDFAAQDFLTVNMGATAIGTGITAEPEYAEKCIAALRKITGLDIKLADDLIGATSDTSCMVGYSSAMRRVAVKMNKICNDLRLLASGPRCGLGEINLPAMQPGSSIMPGKVNPVIPEVMNQVSYKVIGNDLCVAMSGEAAQMELNAMEPVMAQCCFESADLLMNGFDTLRTLCIDGITANEEKCRRDVHNSIGVVTALNPVIGYKHSTKIAKEALETGKGVYELVLEHNILSKEDLDTILKPENMIKPVKLDIHPNH

SEQ ID NO: 6216 - DNA, 1413 bp, Streptomyces avermitilis MA-4680
  CDS (1)..(1413): transl_table=11
atgaccgccgcagcccaccgcagcgaacacgacctgctcggagaccgcgacgtccccgccgaggcgtactggggcatccactccctgcgcgccaaggagaacttccccatcacggggacgccgatctccacgtacccgcatctgatcgacgccctcgccgccgtgaaggaggccgccgccctcgccaacgaggaactcggcctgctggagccgaagaaggccgcggccatcgtggccgcctgccgggagatccgggacggcaagctgcacgaccagttcgtcgtcgacgtcatccagggcggcgcgggcacctcgacgaacatgaacgccaacgaggtcatcgccaaccgggcccttgaactgctcggccacgccaagggcgagtaccggcacctgcaccccaacgaggacgtcaacctcggccagtcgaccaacgacgtctacccgaccgccgtgaagatcgcgaccgtgttcgcggtgcgcggtctgctcaaggccatggcggtgctccaggacgccttcgcccgcaaggccgtcgagttccgtgacgtgctgaagatgggccgcacccagctccaggacgcggtgcccatgacgctggggcaggagttctccgcgtacgccgtcatgctcgacgaggaccgcagccggctcgccgaggccgtcgaactgatccacgagatcaacctgggcgccacggcgatcggcaccggactcaacgcgcccgccggatacgccgagtcggcccgccgccagctcgccgccctcaccgggctgccgctggtcaccgccgccaacctggtcgaggccacccaggactgcggtgccttcgtccagatgtcgggggtgctcaagcggatcgccgtcaagctctccaagagctgcaacgacctgcggctgctgtcgtccgggccgcgcgcggggctcaacgagatcaacctgccgccggtacaggccggttcgagcatcatgcccggcaaggtcaacccggtcatccccgaggtcgtcaaccaggtcgccttcgaggtcatcggcaacgacgtcgcgatcaccatggccgccgaggcggggcagctccagctcaacgccttcgagccgatcatcctgcactcgctgtccgagagcatcacgcatctgcgggccgcctgcctgacgctcgccgagcggtgcgtcgacgggatcacggccaacaccgaggaactgcgcgccgccgtggagaactccatcggcctggtgaccgccctcaacccgcacatcgggtacacggcggccaccgccatcgccaaggaggccctcgccaccgggcgcggggtcgccgaactcgtcctggagaagggcctgttgccggccgaccggctcgcgtcgctgctgcggcccgaggtgctcgcgggcagcggctccccgcagatctga

SEQ ID NO: 6217 - protein, 470 aa, Streptomyces avermitilis MA-4680
MTAAAHRSEHDLLGDRDVPAEAYWGIHSLRAKENFPITGTPISTYPHLIDALAAVKEAAALANEELGLLEPKKAAAIVAACREIRDGKLHDQFVVDVIQGGAGTSTNMNANEVIANRALELLGHAKGEYRHLHPNEDVNLGQSTNDVYPTAVKIATVFAVRGLLKAMAVLQDAFARKAVEFRDVLKMGRTQLQDAVPMTLGQEFSAYAVMLDEDRSRLAEAVELIHEINLGATAIGTGLNAPAGYAESARRQLAALTGLPLVTAANLVEATQDCGAFVQMSGVLKRIAVKLSKSCNDLRLLSSGPRAGLNEINLPPVQAGSSIMPGKVNPVIPEVVNQVAFEVIGNDVAITMAAEAGQLQLNAFEPIILHSLSESITHLRAACLTLAERCVDGITANTEELRAAVENSIGLVTALNPHIGYTAATAIAKEALATGRGVAELVLEKGLLPADRLASLLRPEVLAGSGSPQI

SEQ ID NO: 6218 - DNA, 1434 bp, Bacillus cereus ATCC 14579
  CDS (1)..(1434): transl_table=11
atgatagcaacgaaggatatacgtatagaaaaagattttttaggtgaaaaagaagtaccaagtgcagcttattatggtgtacaaacattacgtgccgtagaaaacttcccaattacaggatatcgcattcatccatcactcattacagcaatggcaattgtgaaaaaagcggcggcgcttgcgaatatagatactggttacttagctaaagacattggacatgaaattgcagaagcagcgcaagaaattgttgatggaaagtttcatgatcaatttatcgtggatcctattcaaggcggagccggaacttctattaatatgaatacaaatgaagtaattgcgaatagagcgttagaacgtatgggatatgaaaaaggggcgtatgcgaaaattagcccaaacactcatgtgaacatggcccaatcaacgaacgatgcgtttccaacagggattcatattgcaactcttatgatgttagaaaagcttcttattacaatggaagaacttcattctgcttttcgtaaaaaagcaaaagagtttgatcacgttattaaaatgggacgcacacatttacaagatgcagttccaattcgccttggacaagaatttgaagcgtatagccgagtgcttgcgcgtgatataaaaagaattaaacagtctcgtcagcatttatatgaagtgaatatgggggcgacagctgttggtacaggattgaatgcaaatcctatgtatattgaacaagtggtaaaacatttaagaacgtttagtggattcccacttgttggtgcagagcatttagttgatgcaacgcaaaatacagatgcatacacagaagtatctgcagcacttaaagtatgtatgatgaacatgtctaaaattgcaaacgatcttcgtattatggcgtctggaccacgtgttgggttagctgaaattcaattgccagcacgtcagccaggttcatcgattatgccaggtaaagtaaatccagttatggcagaagtgattaaccaagtcgcattccaagtaatcggaaacgatcatacaatttgcttagcatcagaagcaggacaattagagttaaacgtaatggagcctgtgcttgtatttaatttaattcaatctattagtattatgaataatggattccgtgtattccgtgaatattgtattgaaggaattacggcaaatgaagaattgctgaagcaatatgttgagaaaagtgttggaattattacagcagttaatcctcatattggttatgaagtagcatctcgtattgcacgtgaagcaattgaaacagggaaatctgttagggagttatgtttagaacatggtgtactgacagaagaggaattggatattattttagatccattcgaaatgactcaccctgaaattgctggagcttctttattaaaaaataaaaaaatgtaa

SEQ ID NO: 6219 - protein, 477 aa, Bacillus cereus ATCC 14579
MIATKDIRIEKDFLGEKEVPSAAYYGVQTLRAVENFPITGYRIHPSLITAMAIVKKAAALANIDTGYLAKDIGHEIAEAAQEIVDGKFHDQFIVDPIQGGAGTSINMNTNEVIANRALERMGYEKGAYAKISPNTHVNMAQSTNDAFPTGIHIATLMMLEKLLITMEELHSAFRKKAKEFDHVIKMGRTHLQDAVPIRLGQEFEAYSRVLARDIKRIKQSRQHLYEVNMGATAVGTGLNANPMYIEQVVKHLRTFSGFPLVGAEHLVDATQNTDAYTEVSAALKVCMMNMSKIANDLRIMASGPRVGLAEIQLPARQPGSSIMPGKVNPVMAEVINQVAFQVIGNDHTICLASEAGQLELNVMEPVLVFNLIQSISIMNNGFRVFREYCIEGITANEELLKQYVEKSVGIITAVNPHIGYEVASRIAREAIETGKSVRELCLEHGVLTEEELDIILDPFEMTHPEIAGASLLKNKKM

SEQ ID NO: 6220 - DNA, 1434 bp, Bacillus anthracis str. Ames
  CDS (1)..(1434): transl_table=11
atgatagcaacgaaggatatacgtatagaaaaagactttttaggtgaaaaggaagtaccaagtatagcttattacggtgtacaaacattacgcgctgtagaaaacttcccgattacaggatatcgcattcatccgtcactcattacggcaatggcaattgtgaaaaaagcggcggcacttgcaaatatggatactggatacttagcgaaagatattggacatgaaattgcggaggcagcgcaagagattgttgatggaaagttccatgatcaatttattgtggatccaatccaaggtggtgctggaacttctattaatatgaatacaaacgaagtaatcgctaatcgagcgttagaacgtatgggatatgaaaaaggcgagtatgcaaaaattagcccaaatacgcatgtaaacatggctcaatcaacgaatgatgcgtttccaacggggattcatattgcaactcttatgaggttagaagaacttcttattacaatggaagaacttcatgctgcttttcgtgcaaaagcaaaagagttcgatcacgtcattaaaatgggacgtacacatttacaagatgctgtgccgattcgtcttggtcaagaatttgaagcgtatagccgagtgcttgcgcgtgatataaaaagaattaaacagtctcgccaacatttatatgaagtgaatatgggggcgacagctgttggtacgggattaaatgcaaaccctacgtacattgaacaagtggttaaacacttgcgaacatttagcggatttccacttgttggtgcagagcatttggttgatgcaacgcaaaatacagatgcatacacagaagtatctgcagcattaaaagtatgtatgatgaatatgtctaaaattgcgaatgaccttcgtattatggcatctggtccacgtgttggattggcggaaattcaattaccagctcgccaaccaggttcatctattatgccgggtaaagtaaatcctgttatggcagaagtaattaatcaagtggctttccaagtaattggtaatgatcatacaatttgcttagcgtcagaagccggacaattggagctcaacgtaatggagccggtgcttgtatttaatttaattcaatctattagtattatgaataacggattccgtgtattccgtgaatattgtattaaaggaattacagcaaatgaagaattgctgaagcaatatgttgagaaaagtgttggaattattacagcagttaaccctcatattggttatgaagcagcatctcgcattgcacgtgaagcgattgaaacaggaaaatctgttagggagttatgtttagaacatggtgtactgacagaagaagaattggatattattttagatccattcgaaatgacgcatcctgaaattgctggggcttctttattaaaggataagaagatgtaa

SEQ ID NO: 6221 - protein, 477 aa, Bacillus anthracis str. Ames
MIATKDIRIEKDFLGEKEVPSIAYYGVQTLRAVENFPITGYRIHPSLITAMAIVKKAAALANMDTGYLAKDIGHEIAEAAQEIVDGKFHDQFIVDPIQGGAGTSINMNTNEVIANRALERMGYEKGEYAKISPNTHVNMAQSTNDAFPTGIHIATLMRLEELLITMEELHAAFRAKAKEFDHVIKMGRTHLQDAVPIRLGQEFEAYSRVLARDIKRIKQSRQHLYEVNMGATAVGTGLNANPTYIEQVVKHLRTFSGFPLVGAEHLVDATQNTDAYTEVSAALKVCMMNMSKIANDLRIMASGPRVGLAEIQLPARQPGSSIMPGKVNPVMAEVINQVAFQVIGNDHTICLASEAGQLELNVMEPVLVFNLIQSISIMNNGFRVFREYCIKGITANEELLKQYVEKSVGIITAVNPHIGYEAASRIAREAIETGKSVRELCLEHGVLTEEELDIILDPFEMTHPEIAGASLLKDKKM

SEQ ID NO: 6222 - DNA, 1440 bp, Helicobacter hepaticus ATCC 51449
  CDS (1)..(1440): transl_table=11
atgggcaaacgagtagaacacgattttattggcgaactagagattgccgatgatatgtattatggtgtgcaaacctttagagcattacaaaatttcaatattacaggcgataagctaagtagctatccaagctttatcaaggcttttgcgcaagtaaaaaaagctgcttgtttggcaaattatgaacttaaattgcttgatgagcaaaaaaaagatgctatttgcaaagcttgtgataggcttattgcaggcgagctaagagagcaatttgtagtagatatgcttcaaggtggagctggaacaagcacaaatatgaacacaaatgaagttgtagcaaatttggcattagagattatgggacataaaaaaggtgaatatcaatactgccacccaaatgaccacgtcaatctctcacaatctacaaatgattcatatcccactgctattcacgtagcactatatgacgagctttcagctcttgccaaagatatggaagtgctaaaagaatcttttaataaaaaatctcaagaatttaaagatgtgcttaaaatggggcgaactcaacttcaagatgctgtgcctatgactttaggacaagagtttcacacttttgcagtgatgatgggagaagatattgcgcgtgtgcttgaagcaagaaaccttgtaactgaaatcaatatgggtgggaccgcaattgggacaggcataaactcacaccctgattatcctaaaattgtccaaaagaaactctgtgaggttacaggacaccctttcaaaactgcagatgacctcattgaggccacacaagatacaggtgcgtatgtgcaagtaagtggtgtgcttaaaagagtagctgtgaaactctctaaagtctgtaatgacttacgactactaagctctggaccaagagcggggcttaatgaaatcaacctccccaaaatgcagcccggaagctccattatgcccggtaaagtaaatcctgtaatccctgaagttgttaatcaagtatgctatgcagtgattggtaatgatgtaactgtgagctttgcaagtgagggcggacaattgcagcttaatgtatttgagcctgtgattgcttatggattatttaactctatttctatgatgagaaatgctatgcttacacttgcaagcaaatgtattgacggaatcactgcaaatgaaaagatttgtagtgattttgtttataatagcattggtattgttacagctcttaatccttatattggctatgagaattctgcatcaattgctaaagaatctttacaaacaggcaaacctgttaaagaaattgcattagaaagaaagcttttaagcgaagagcaactcaatgagatttttcaaccaaaaaatatgctcaatccacatatgagcgcagaagataaggcgaaattccaaaaaaattcgccttttgcataa

SEQ ID NO: 6223 - protein, 479 aa, Helicobacter hepaticus ATCC 51449
MGKRVEHDFIGELEIADDMYYGVQTFRALQNFNITGDKLSSYPSFIKAFAQVKKAACLANYELKLLDEQKKDAICKACDRLIAGELREQFVVDMLQGGAGTSTNMNTNEVVANLALEIMGHKKGEYQYCHPNDHVNLSQSTNDSYPTAIHVALYDELSALAKDMEVLKESFNKKSQEFKDVLKMGRTQLQDAVPMTLGQEFHTFAVMMGEDIARVLEARNLVTEINMGGTAIGTGINSHPDYPKIVQKKLCEVTGHPFKTADDLIEATQDTGAYVQVSGVLKRVAVKLSKVCNDLRLLSSGPRAGLNEINLPKMQPGSSIMPGKVNPVIPEVVNQVCYAVIGNDVTVSFASEGGQLQLNVFEPVIAYGLFNSISMMRNAMLTLASKCIDGITANEKICSDFVYNSIGIVTALNPYIGYENSASIAKESLQTGKPVKEIALERKLLSEEQLNEIFQPKNMLNPHMSAEDKAKFQKNSPFA

SEQ ID NO: 6224 - DNA, 1440 bp, Wigglesworthia glossinidia endosymbiont of Glossina brevipalpis
  CDS (1)..(1440): transl_table=11
atgttaaattctattcgaatcgaacaagatatgattggaatacgtgaaatttcaaatgaattttattatggcattcatactcttagagctatagaaaatttcaaaattagtaaaaatactattaacgattatcctgaattaatcaagggaatggtgatggtgaaaaaagcatctgctcttgcaaacaaacatttaaaagttttatcagaaaaaaacgcaaaaattatagtaagagcttgtgattgtattttaaaaaaacaaaatatttatcttgatcaatttccagtagacgcttttcaaggaggagctggaacatctgtaaatatgaatgttaatgaagttttgactaatattggattagaaataatgggtaagaaaaaaggagattataagtttcttaatccaaatgatcatttaaatttaagtcaatccacaaacgatgcatatccaactggacttcgtttatcaatatataaatctatatacaaattaattaaatcaatcatattaattgaagatagtttttataaaaaatcaaaagaattttctaaaataataaaaatgggtagaacgcaattacaagatgctgtcccaatgacattgggtcaagaattttatgcttttaaaacatctttaaaaaaagaaagaataaatttaattaatacatctaaattattattagatattaatcttggaggaacagcaataggaactaaattaaatactcctaaaggatatcaaaaagtagttgtaaaacaattatcaattgttagcggaatacagttcaatccagtaaaagatcttatagaatctacatatgattgtggaatatatactattgtgcatggaaatttaaaaaatttagctattagattatctaaaatttgtaatgatttaagattattgtcatctgggccaagagctgggttaaatgaaataaatttacctgaacttcaagctggatcttcgataatgcctgctaaagttaacccagttttaccagaagtagttaatcaggtatgttttaaggtatgtggaaatgatatttgcgtaatgatggcagcagagtcaggtcaattacaattaaatgctatggaaccagtaataagtcaatctatatttgaatcaataaatattctcaaaaatgctattttatctttaaaagaaaaatgtatagatggaatcacagcaaataaaaaaatttgtgaatcttatgtattaaattctataggaatagttgcatatttaaatccttttattggtcatcataacggagatataatcggaaaaatttgttctaaaagcggtagaagtgtaaaagaagttgtattggaaaaaggatttttaacagaaaaagaacttaatgatattttttcatttaataatttaatacatccaaaatataaaaataaaaatagttctgaagatttatcaatctaa

SEQ ID NO: 6225 - protein, 479 aa, Wigglesworthia glossinidia endosymbiont of Glossina brevipalpis
MLNSIRIEQDMIGIREISNEFYYGIHTLRAIENFKISKNTINDYPELIKGMVMVKKASALANKHLKVLSEKNAKIIVRACDCILKKQNIYLDQFPVDAFQGGAGTSVNMNVNEVLTNIGLEIMGKKKGDYKFLNPNDHLNLSQSTNDAYPTGLRLSIYKSIYKLIKSIILIEDSFYKKSKEFSKIIKMGRTQLQDAVPMTLGQEFYAFKTSLKKERINLINTSKLLLDINLGGTAIGTKLNTPKGYQKVVVKQLSIVSGIQFNPVKDLIESTYDCGIYTIVHGNLKNLAIRLSKICNDLRLLSSGPRAGLNEINLPELQAGSSIMPAKVNPVLPEVVNQVCFKVCGNDICVMMAAESGQLQLNAMEPVISQSIFESINILKNAILSLKEKCIDGITANKKICESYVLNSIGIVAYLNPFIGHHNGDIIGKICSKSGRSVKEVVLEKGFLTEKELNDIFSFNNLIHPKYKNKNSSEDLSI

SEQ ID NO: 6226 - DNA, 1428 bp, Haemophilus ducreyi 35000HP
  CDS (1)..(1428): transl_table=11
atgagtaatgtgcgtattgaagtggatttactcggcgaaagagaagtgccaaatcaggtctattggggaattcatactttaagagcggttgaaaattttaatatttctaacaatactatttcagatatacctgaatttgtccgtggtatggttatggtgaaaaaagccaccgcattagcaaatggcgaattaggtgcaattcccaaaaaagtggcacaggctattgtgcaagcgtgtgatgaaattttagtgaatggtcgttgtatggatcaatttccgtcagatgtttatcaaggcggtgccggtacctcggttaatatgaacactaatgaggttattgctaacttagcgcttgaaatgctagggcataaaaaaggggaatatcatattattgatccaatggatcacgttaatgctagtcaatcaacgaatgatgcttatcctacaggattccgcattgctgtgtataacagcttaatgcatttaattgaacaagtcctttatttacaacagggctttgaagagaaagcggtcgaatttgccaatgttcttaaaatggggcggacacagttgcaagatgcagtgcctatgacagttggtcaagaatttaaagcatttgcggtgttattagcagaagaagtacgtaatttaaaacgtactgctcaattattacttgaggttaacttaggcgcaactgcaattggcacggggttaaatacaccggcaggttattcagaattagcggtaaaatatttatcagaagtaacaggtttagcttgtgttttatcagaaaatttaattgaagcaacttcagattgtggtgcttatgtaatggtacacggtgcgttgaaacgtactgcggttaagttatctaaagtatgtaatgatttacgcttactttcatctggacctagagcgggtttgaatgaaattaatctgccggaattgcaagcgggttcttctattatgccagctaaagtaaatccagtggtacctgaggtggttaatcaagtatgctttaaagtgataggtaatgatacaaccgttacttttgcagcagaagcggggcagttacaattgaatgtaatggagccggtgattggacaggcaatgtttgaatctattgccattttagcaaatgcgtgtgtcaatttacgtgataaatgcgtcgatggcatcagtgtcaataaagaaatctgcgaaaattttgtgtttaattcaattgggattgtcacttatcttaatccatttattggccatcataatggcgatattgtgggtaagatttgtgctgaaacggggaaaggtgtacgtgaagtcattctcgaaaaaggattgctcaccgaagctcagttagatgatattctttcagtggaaaatttaatgcacccaatttataaagcaaaacggtttacggaagatgaataa

SEQ ID NO: 6227 - protein, 475 aa, Haemophilus ducreyi 35000HP
MSNVRIEVDLLGEREVPNQVYWGIHTLRAVENFNISNNTISDIPEFVRGMVMVKKATALANGELGAIPKKVAQAIVQACDEILVNGRCMDQFPSDVYQGGAGTSVNMNTNEVIANLALEMLGHKKGEYHIIDPMDHVNASQSTNDAYPTGFRIAVYNSLMHLIEQVLYLQQGFEEKAVEFANVLKMGRTQLQDAVPMTVGQEFKAFAVLLAEEVRNLKRTAQLLLEVNLGATAIGTGLNTPAGYSELAVKYLSEVTGLACVLSENLIEATSDCGAYVMVHGALKRTAVKLSKVCNDLRLLSSGPRAGLNEINLPELQAGSSIMPAKVNPVVPEVVNQVCFKVIGNDTTVTFAAEAGQLQLNVMEPVIGQAMFESIAILANACVNLRDKCVDGISVNKEICENFVFNSIGIVTYLNPFIGHHNGDIVGKICAETGKGVREVILEKGLLTEAQLDDILSVENLMHPIYKAKRFTEDE

SEQ ID NO: 6228 - DNA, 1404 bp, Chromobacterium violaceum ATCC 12472
  CDS (1)..(1404): transl_table=11
atgtccacccgtatcgaacacgacctgctcggcaaccgcgacgtgccggccgacgcctactggggcgtgcacacgctgcgcgccatcgaaaacttcccgatcaccggccagaccatcgccggctacggcgacctgatccgcgcgctggcctgcatcaagcaagccgccgcccaggccaaccgcgatctcggcattctcgaccccaagctggcccaggccatcgtcgacgcctgcgaggagatccgcgccggcaagctgcacgaccagttcgtcgtcgacgtgatccagggcggcgccggcacttccaccaatatgaacgccaacgaggtgatcgccaaccgcgcgctggagctgctgggccacgccaagggcgagtaccagcatctgcacccgaacgagcacgtcaacctgtgccagagcaccaacgacgtctacccgaccgcgctgcgcctggccgccttctggggcgtgctgaagctggtgtcgcggatggaaacgctgcgcaaggccttcgaggacaaggccgaggaattcaaggacatcctgaagatgggccgcacccagctgcaggacgcggtgccgatgacgctgggccaggagttccagacctatgctgtgatgctgggcgaggacgagcagcgtctgaaggaagccagcgccctgatgctggagatcaacctcggcgccaccgcgatcggcaccggcatcaccgcccacccggactacgccaagctggtgtgcctgcatctgtccgagctggtgggcagccagctgatcaccgcgcccaacctgatcgaggccacccaggactgcggcgccttcgtccagctgtccggcgtgatcaagcgcgcggcggtcaaactgtccaagacctgcaacgacctgcgcctgctgtcgtccggcccgcgcgcaggcttcggcgagatcaatctgccggcgcgccaggccggctcgtccatcatgccgggcaaggtcaatccggtgattccggaagtggtgagccaggtggcgtatgaagtcatcggcaacgacgtcaccatcaccatggcggccgaggccggccagctgcagctgaacgccttcgagccggtgatcgcctacagcctgttccgcagcgccggccacctggccaacgcctgcgacacgctgaccgagcactgcgtcaagggcatcaccgccaaccgcgagcggctgcgcctgagcgtggaaagctcgatcggcctggtcaccgcgctgaacccggtgatcggctacgaggccgccacccgcgtcgccgccgaagcccacgccaacggcagcagcgtcgccgacgtggtgctggcccatggcctgctcacccgcgagcagctggacgacatcctgcagccggagaccctgacccggccgcgctgggtgacgctgtaa

SEQ ID NO: 6229 - protein, 467 aa, Chromobacterium violaceum ATCC 12472
MSTRIEHDLLGNRDVPADAYWGVHTLRAIENFPITGQTIAGYGDLIRALACIKQAAAQANRDLGILDPKLAQAIVDACEEIRAGKLHDQFVVDVIQGGAGTSTNMNANEVIANRALELLGHAKGEYQHLHPNEHVNLCQSTNDVYPTALRLAAFWGVLKLVSRMETLRKAFEDKAEEFKDILKMGRTQLQDAVPMTLGQEFQTYAVMLGEDEQRLKEASALMLEINLGATAIGTGITAHPDYAKLVCLHLSELVGSQLITAPNLIEATQDCGAFVQLSGVIKRAAVKLSKTCNDLRLLSSGPRAGFGEINLPARQAGSSIMPGKVNPVIPEVVSQVAYEVIGNDVTITMAAEAGQLQLNAFEPVIAYSLFRSAGHLANACDTLTEHCVKGITANRERLRLSVESSIGLVTALNPVIGYEAATRVAAEAHANGSSVADVVLAHGLLTREQLDDILQPETLTRPRWVTL

SEQ ID NO: 6230 - DNA, 1428 bp, Porphyromonas gingivalis W83
  CDS (1)..(1428): transl_table=11
atggaattaaaaaagactacacgtatcgaaagcgatcttatcggagaacgcgagatacccggccatattctatatggcgtacagacgctgcgtggtatagaaaacttccccatcagcaattttcatctgaacgattaccccctgtttatcaatggcttggccatgacgaaatgggcggctgcagtggccaatcatcggctcggtctcttgaccgatgcccagaaagacggcatcgtgaaagcctgcaaggaaatcctcgaaggcaagcaccacgagcatttccccgtggatatgatccaaggcggtgcaggaacgaccacgaatatgaacgccaacgaggtgatttgcaaccgtgccttgcagatcatgggacacgaggcaggcgaatttgcccacctctcccccaatgatcacgtgaactgctcgcagagcaccaacgatgcttatccgacagctatccacctcggcctttacgctacatatctgaagttccgcccccatcttctggatctcatcgagtcgctgcgtgccaagagccgcgaatttgcccatgtactcaagatgggacgtactcagctcgaagatgctgtgcctatgtctctgggacagacgttcggcggatttgcttccatcttgcaggatgaaatcaaaaatctggactttgccgccgaagagttcctgaccgtgaatatgggtgctacggctatcggcacgggtatctgcgcccagccgaactatgccgaatactgcatagaggctcttcgtgaagtcaccggctgggacattcgtctcagtgccgatctggtaggggcaacgagcgacacttccgtgatggtaggatattcgtctgccttgcgccgtatctgtgtgaaggtgaacaagatttgcaacgacctgcgtctccttgccagcggtcctcgttgcggtttgcacgaattcaatctgcctgccatgcagccgggttcgtccatcatgccgggtaaggtgaatcctgtgattccggaagtaatgaatcagatctgctataaggtgatgggcaacgacctgaccgtaacgatggcaggcgatgcagcccaaatggagctgaacgctatggagcctgtgatggcacaatgctgcttcgaaagttcggatctgctcatgaacggattcgatacgctgcgtacactctgtatcgatggcatcacggccaacgaggacgaatgccgtgggtatatccgcaacagcatcggtatcgttacggctctgaatccgatcatcggctataagaattcgaccaagatcgccaaggaagcgatggaaacgggacgtggcgtttacgacctcgttttggaacacgacatcctgtcgaaagaggatctggatacgatactctcaccggagaatatgatcaagccggtcaagctcgacatcaaaccgcgtcgctga

SEQ ID NO: 6231 - protein, 475 aa, Porphyromonas gingivalis W83
MELKKTTRIESDLIGEREIPGHILYGVQTLRGIENFPISNFHLNDYPLFINGLAMTKWAAAVANHRLGLLTDAQKDGIVKACKEILEGKHHEHFPVDMIQGGAGTTTNMNANEVICNRALQIMGHEAGEFAHLSPNDHVNCSQSTNDAYPTAIHLGLYATYLKFRPHLLDLIESLRAKSREFAHVLKMGRTQLEDAVPMSLGQTFGGFASILQDEIKNLDFAAEEFLTVNMGATAIGTGICAQPNYAEYCIEALREVTGWDIRLSADLVGATSDTSVMVGYSSALRRICVKVNKICNDLRLLASGPRCGLHEFNLPAMQPGSSIMPGKVNPVIPEVMNQICYKVMGNDLTVTMAGDAAQMELNAMEPVMAQCCFESSDLLMNGFDTLRTLCIDGITANEDECRGYIRNSIGIVTALNPIIGYKNSTKIAKEAMETGRGVYDLVLEHDILSKEDLDTILSPENMIKPVKLDIKPRR

SEQ ID NO: 6232 - DNA, 1416 bp, Wolinella succinogenes DSM 1740
  CDS (1)..(1416): transl_table=11
atggcatctacacgaatagaacacgatcttattggggacttagagctaagtaacgactgctattatggagttcaaactgctagagcgaaagagaacttccacatctcaggcgtcctactctcaagcatgcccactttcattgcttcactcgctaaagtcaaaaaagccgctgcactcgccaactttgagcttgggctcttggatgagaagatcaaaaacgccatctgcgaagcgtgcgatctcatcatcgctggaaaatatcacgaccaattcgtcgtggatgccatccaaggaggcgctggaacttccaccaacatgaacgccaatgaagtgatcgccaacgtcgcacttgagctcatgggacataaaaagggtgaatataaacattgccaccccaacaaccacgtcaacctctcacaatctactaatgatgcctatcctacggcattccgcgttgccctgtatgaaaaactcatcgagctcaccgtctccatgggaatcctaagagactcttttgccaaaaaggccgaggaattcaaagatatcatcaagatgggtcgaacccagctccaagacgctgtgcccatgaccctaggtcaagagtttaaaacctacgccgtcatgatgaccgaagatatcgatcgcgtgctagaggctagaaaccttgttcgagagatgaaccttggggcaaccgcgattggaacaggaatcaactctcaccctgactacgctacgcttgtagagaaaaaacttcaagaggtcacaggccgaccctttatcaccgccagcgatcttgttgaggcgactcaagacacaggggcttatgtccaaatctctggtgttcttaagcgtgtctccaccaaagtctccaaaatctgcaacgatctaagactccttagctcaggcccaagagcgggacttagcgagatcaatcttccccctatgcagcctggtagctccattatgcctggaaaggttaatcctgtgattcccgaagtggtcaatcaggtctgctaccacgttattggcgccgacatgactgtaactattgcctctgaagggggtcagcttcagctcaacgtttttgagcccgtcatcgcctttagcctctttagctctatcaacatgatgagaagagcttttgaaactttggctgaaaaatgcgtgaatggaatcaccgccaacgctgacaactgccgcgactatgtccttaagagcatcggactcgtcacagcgctcaacccctacatcggatatgagaactccacttcagtggccaaagaggcgctagagtcaggcaagtccgtccacgatatcgtcctagagcgcaaacttcttagcaaagaagagctagaagagattattcgacccgaaaacatgatcaagcccaaagtcgtcactctaacaaaaaaataa

SEQ ID NO: 6233 - protein, 471 aa, Wolinella succinogenes DSM 1740
MASTRIEHDLIGDLELSNDCYYGVQTARAKENFHISGVLLSSMPTFIASLAKVKKAAALANFELGLLDEKIKNAICEACDLIIAGKYHDQFVVDAIQGGAGTSTNMNANEVIANVALELMGHKKGEYKHCHPNNHVNLSQSTNDAYPTAFRVALYEKLIELTVSMGILRDSFAKKAEEFKDIIKMGRTQLQDAVPMTLGQEFKTYAVMMTEDIDRVLEARNLVREMNLGATAIGTGINSHPDYATLVEKKLQEVTGRPFITASDLVEATQDTGAYVQISGVLKRVSTKVSKICNDLRLLSSGPRAGLSEINLPPMQPGSSIMPGKVNPVIPEVVNQVCYHVIGADMTVTIASEGGQLQLNVFEPVIAFSLFSSINMMRRAFETLAEKCVNGITANADNCRDYVLKSIGLVTALNPYIGYENSTSVAKEALESGKSVHDIVLERKLLSKEELEEIIRPENMIKPKVVTLTKK

SEQ ID NO: 6234 - DNA, 1425 bp, Photorhabdus luminescens subsp. laumondii TTO1
  CDS (1)..(1425): transl_table=11
atgtcaaacaacattcgtatcgaagaagacctgttaggtaaacgagaagtccctgctgaagcctattatggtattcacaccttacgtgcgattgaaaacttccatatcagtaacaacaccattaatgatgtacccgaattcatccgtggcatggtgatggtaaaaaaagccgcagccttagctaacaaagagctacaaactattcctaaaaaaattgctgacatcatcatcaaagcatgtgacgaagtgctctataccggcagatgcatggatcagtttccggtcgatgtgtttcaaggcggtgccggtacttcactcaacatgaataccaatgaggttctggcaaacattggtctggaactgttaggccataaaaaaggcgaatatgagtacctgaatcccaatgaccatctgaataaaagccagtcaactaacgacgcctacccaactggcttccgcatcgcggtttataactccatcctgaaactgatcgagtctattgagctgttaattgtgggtttcgataaaaaatccagagaatttaatgacattctaaaaatgggtcgtacccaattacaggatgctgttcccatgacactggggcaggaattcaacgcattctctatcctgttgaaagaagaagttaaaaacctcaaccgaacctctgaattactgctggaaattaaccttggcgctactgctatcggtacccgcttgaatacagcaccaggttatcagaaattggcggttgaaaaactggcggaagtttcaggtttaccttgcgtaccagccgaagacctgattgaagccacttctgactgtggggcttacgttatggtccacggtgctctgaagcgcctggctgtcaaactgtctaaaatttgtaatgacctgcgtttgctttcttctggccctcgtgctggcctgaatgaaatcaacctaccagaattacaggcaggctcttctattatgccggcaaaagtgaacccggttattccagaagttgtgaatcaggtttgcttcaaagttattggtaacgatatttgtgttactatggcgtccgaagcaggccagttacagctcaatgtaatggaacctgctatcggtcaggccatgtttgaatctatctccctgctaagcaacgcttgccgcaacctggtagaaaaatgcgttaatggcatcacggctaacaaagaagtttgcgaaaatttcgtattcaactcgatcggtatcgtgacatatctgaacccattcatcggtcaccataatggtgacattgttggtaaaatttgtgctgaaaccggtaaaagtgttcgtgaagtcgttctggaacgaggcttactgaccgaaactcaattggatgacatcttctctgtagagaacctaaaatgcccatcttacaaggcaaaacgttttgacgattaa

SEQ ID NO: 6235 - protein, 474 aa, Photorhabdus luminescens subsp. laumondii TTO1
MSNNIRIEEDLLGKREVPAEAYYGIHTLRAIENFHISNNTINDVPEFIRGMVMVKKAAALANKELQTIPKKIADIIIKACDEVLYTGRCMDQFPVDVFQGGAGTSLNMNTNEVLANIGLELLGHKKGEYEYLNPNDHLNKSQSTNDAYPTGFRIAVYNSILKLIESIELLIVGFDKKSREFNDILKMGRTQLQDAVPMTLGQEFNAFSILLKEEVKNLNRTSELLLEINLGATAIGTRLNTAPGYQKLAVEKLAEVSGLPCVPAEDLIEATSDCGAYVMVHGALKRLAVKLSKICNDLRLLSSGPRAGLNEINLPELQAGSSIMPAKVNPVIPEVVNQVCFKVIGNDICVTMASEAGQLQLNVMEPAIGQAMFESISLLSNACRNLVEKCVNGITANKEVCENFVFNSIGIVTYLNPFIGHHNGDIVGKICAETGKSVREVVLERGLLTETQLDDIFSVENLKCPSYKAKRFDD

SEQ ID NO: 6236 - DNA, 1452 bp, Vibrio vulnificus YJ016
  CDS (1)..(1452): transl_table=11
atggctaccctaactgaagctccaaaagcatcaactccggccactcgtattgaagaagatctattaggccaacgtcacgttccggctgacgcttactacggtattcacacgctgcgcgccatcgaaaacttcaacatctcaaatgtcactatttctgacgtaccagaattcgttcgtggcatggttatgaccaaaaaagccgctgcgcttgctaacaaagaattgggcgcaattcctaagaatgtcgcggattacatcattcaagcgtgtgacctaatgttggaaactggcaaatgcatggatcagttcccatcagacgtattccaaggcggtgcgggcacttctgtgaacatgaacaccaacgaagtacttgccaacattgctctagaattaatgggcaaagagaaaggcgattacgacgtggtgaacccaaacgatcacgtgaacaagagccaatcaaccaactgtgcctacccaacaggcttccgtatcgcggtttacaacagcatccataaattgatggaagcgattgaatacctaaaaggtgcgtttgagctgaaatctcaagagtttaacgacatcctaaaaatgggccgtactcagttgcaagatgcagttccaatgactgtcggtcaagagttccacgcttgggcagtgacactaaacgaagagatccgtgcgctagactacacctcgaagctacttcttgaagtgaacctaggtgcaacggcaatcggtactggcttaaacacacctcctggttaccaagcacttgccgtgaaacacctagcggaagtaactggcctagaagtggttccagcagaagaccttatcgaagcaacttcagactgtggtgcttacgtaatggcacacggcgctctaaaacgcctagcggtgaaattgtctaagatctgtaacgacttgcgtctgctttcttctggtcctcgcgctggtttgaacgaacttaacttgccagaaatgcaagccggttcttcaatcatgccagcaaaagttaacccagttatcccagaagtggttaaccaagtgtgtttcaaagtactgggtaacgacaacacgatttctttcgcagccgaaggcggtcagctacagctgaacgtaatggagcctgtgattggtcaagcgatgtttgaatcgatttcactactacaaaacgcgtgtgtgaacctacgtgacaagtgtatcgacggcatcactgtgaacaaagagatctgtgaaaactacgtttacaactctatcggtatcgttacttacctaaacccatacatcggccaccacgaaggtgacatcgttggtaagatctgtgcggaaaccggtaagagcgtccgtgaagtagtgcttgagcgtggcttgctgacatctgaagagttggatgacatcctgtctgtgcagaacttcatgcacccaacttacaaagcaaaacgttacgaataa

SEQ ID NO: 6237 - protein, 483 aa, Vibrio vulnificus YJ016
MATLTEAPKASTPATRIEEDLLGQRHVPADAYYGIHTLRAIENFNISNVTISDVPEFVRGMVMTKKAAALANKELGAIPKNVADYIIQACDLMLETGKCMDQFPSDVFQGGAGTSVNMNTNEVLANIALELMGKEKGDYDVVNPNDHVNKSQSTNCAYPTGFRIAVYNSIHKLMEAIEYLKGAFELKSQEFNDILKMGRTQLQDAVPMTVGQEFHAWAVTLNEEIRALDYTSKLLLEVNLGATAIGTGLNTPPGYQALAVKHLAEVTGLEVVPAEDLIEATSDCGAYVMAHGALKRLAVKLSKICNDLRLLSSGPRAGLNELNLPEMQAGSSIMPAKVNPVIPEVVNQVCFKVLGNDNTISFAAEGGQLQLNVMEPVIGQAMFESISLLQNACVNLRDKCIDGITVNKEICENYVYNSIGIVTYLNPYIGHHEGDIVGKICAETGKSVREVVLERGLLTSEELDDILSVQNFMHPTYKAKRYE

SEQ ID NO: 6238 - DNA, 1575 bp, Corynebacterium diphtheriae NCTC 13129
  CDS (1)..(1575): transl_table=11
atggcttcccaagctaaaaacacaaagggctcgaaaaacgccgaggtaaccaatgatgttctcgacggaaaaaccgaaggcaccgcggagaaagtaaacgatgcccccattgcatcagatgtaacaacaaagcacgccactaagaaagctgcaccaggattccgtatcgaagaagacctcttgggtgagatggaagttcccgacgaggtttattatggcgtccatactcttcgtgccatcgacaattacaagatctctagcaccaccattaatgatgtgccagagttcattcgtggcatggttcaggtaaaaaaggccaccgcgcttgccaaccgacgactccatactctgccgaaagacaagtgcgatgccattgtatgggcttgcgatcaaatcttggatcacggtcgttgcatggatcagttcccaatcgatgtgttccaaggaggcgctggcacaagcgtcaacatgaacactaatgaggtaatcgccaacctcgcactggagcatctgggtaagccaaagggatcctatgacatcatcaacccaaacgatgacgtcaacatgagccaatcaactaacgatgcctacccaactggattccgtttgggtgtctatgaggcgatgcaggaactgatcactcgtattgacaatctacagttcgcattccatgccaaaggtgatgagttcaccgatattctgaagatgggtcgcacacagctccaagatgctgtaccgatgactttaggcgaggaattccaggcattcgctcataacttggctgaggagcaaagcgttctgcgtatggcttccgaccggctcaaggaagttaacttgggcgcaaccgctatcggtactggcttgaacaccccagccggttaccgttatcaggttgtagccgcattgtccgagtgcaccggcttggaaattaagtctgcacgcgatcttattgaagctacttcagacactggtgcgtatgtccttgcccatgcagctgttaagcgtactgcgatgaagctttctaagatctgcaatgatcttcgactgctcagctccggaccacgcgcaggtctcaacgagattaatcttcccgctcgagctgcaggttcatcgatcatgccggcaaaggtcaacccagttatccctgaggttgttaaccaggtttgcttcaaggtttttggtaacgatcttactgtcaccatggcggcagaagctggccagctccagctcaatgtgatggaaccggttatcggccaagccttgtttgagtcgattcgaattctcggtaatgctgcagtcacccttcagcacaagtgtgtcgaagggattaccgcaaatgctgacgtatgtcgcgcctacgtagataattccattggtatcgttacctatctcaaccctttcattggtcaccatatgggtgacgtgattggcaaggaagctgctgagaccggcaagtccgtacgtgagcttgtattggaaaagggactaatggatgaagagactttgaaccaaatcctgtccaaggaaaatctaatgcacccttcgtttcgtggaaccctctacctagataactag

SEQ ID NO: 6239 - protein, 524 aa, Corynebacterium diphtheriae NCTC 13129
MASQAKNTKGSKNAEVTNDVLDGKTEGTAEKVNDAPIASDVTTKHATKKAAPGFRIEEDLLGEMEVPDEVYYGVHTLRAIDNYKISSTTINDVPEFIRGMVQVKKATALANRRLHTLPKDKCDAIVWACDQILDHGRCMDQFPIDVFQGGAGTSVNMNTNEVIANLALEHLGKPKGSYDIINPNDDVNMSQSTNDAYPTGFRLGVYEAMQELITRIDNLQFAFHAKGDEFTDILKMGRTQLQDAVPMTLGEEFQAFAHNLAEEQSVLRMASDRLKEVNLGATAIGTGLNTPAGYRYQVVAALSECTGLEIKSARDLIEATSDTGAYVLAHAAVKRTAMKLSKICNDLRLLSSGPRAGLNEINLPARAAGSSIMPAKVNPVIPEVVNQVCFKVFGNDLTVTMAAEAGQLQLNVMEPVIGQALFESIRILGNAAVTLQHKCVEGITANADVCRAYVDNSIGIVTYLNPFIGHHMGDVIGKEAAETGKSVRELVLEKGLMDEETLNQILSKENLMHPSFRGTLYLDN

SEQ ID NO: 6240 - DNA, 1431 bp, Bdellovibrio bacteriovorus HD100
  CDS (1)..(1431): transl_table=11
ttggagttagtgatggaaaagttccgcgtagaaaaagatttgctgggtgaaaagaaagtccctgcggaagcttattacggcattcataccctgcgggcgatggagaactttcagatctcgggcatccctgtcggagccaatcaaagtttcgtgcgtggtctggcactggtgaaaaaagcctgcgcgttggccaatggtgaactgggcacaatcccggcggatgtttccaagtccttggttgaagcctgtgacatcgttttgcaggacccgaaaaaatggggtcagcagttcccatccgacgtttatcagggcggcgcggggacttcgatcaacatgaatgccaacgaagtgattgccaatatcgcattggaaaaacgcggtctgcaaaaaggcacctacgcggtgatcaaccctaatgatcacgtgaataagtgccagtccacgaatgatgcttatccgaccgctttccgagtggcgctgtatgaacacctgaacggaactttggcggcgctggattctttggctttggccttcgagaaaaaaggcaaagaattccagagcgttttgaaaatgggccgcacgcagttgcaggatgcagttcccatgtctttggggcaggagtttaacgcttttgccactttactaaaagaagacggtcgtctgatccgcactgttcagaaattcatgctggaagtgaacttgggggccaccgcgattgggactggcatcaacacacctccgggttatgcgtctttggcggtgcaaaagctggctgaggtcaccgggcatccgtttgttcagtcggaagattacatcgaagccaccagcgactgtggtgcctacatcattatctctggcgcactgaaacgcacggcagtgaaactttcgaaaatctgcaacgacttgcgcttgcttagttctggtccgcgtgcgggcttgaaagaaatcaacctgcctgaaatgcaggcgggttcttccatcatgccggcaaaagtgaatccggtgattccggaagttgtgaatcaggtcagcttcaaaatcatcggcaatgacctggcgatcaccctggcggccgaagcagggcagctgcagctgaatgtgatggaacctgtgatcgcctccagtctgtttgagtctttggatcttttgaagaatgcctgtgaaaccctggaacataaatgtgtgaagggtattacggccaatgcagaacgctgccgggactacgtcatgaacagcatcggtattgtgacttatctggatccgatcatcggtcacgatgaaggcgaccgtatcggaaaaatctgtgcggagaccggtcgcaacgtggctgaagtggccctggagcgaggcgtggtgactcaggcgcaactggatgaactgttctcaatggaaaatctgctgaacccgaaatacgtcggcaagaagcactag

SEQ ID NO: 6241 - protein, 476 aa, Bdellovibrio bacteriovorus HD100
MELVMEKFRVEKDLLGEKKVPAEAYYGIHTLRAMENFQISGIPVGANQSFVRGLALVKKACALANGELGTIPADVSKSLVEACDIVLQDPKKWGQQFPSDVYQGGAGTSINMNANEVIANIALEKRGLQKGTYAVINPNDHVNKCQSTNDAYPTAFRVALYEHLNGTLAALDSLALAFEKKGKEFQSVLKMGRTQLQDAVPMSLGQEFNAFATLLKEDGRLIRTVQKFMLEVNLGATAIGTGINTPPGYASLAVQKLAEVTGHPFVQSEDYIEATSDCGAYIIISGALKRTAVKLSKICNDLRLLSSGPRAGLKEINLPEMQAGSSIMPAKVNPVIPEVVNQVSFKIIGNDLAITLAAEAGQLQLNVMEPVIASSLFESLDLLKNACETLEHKCVKGITANAERCRDYVMNSIGIVTYLDPIIGHDEGDRIGKICAETGRNVAEVALERGVVTQAQLDELFSMENLLNPKYVGKKH

SEQ ID NO: 6242 - DNA, 1434 bp, Bacillus cereus ATCC 10987
  CDS (1)..(1434): transl_table=11
atgatagcaacgaaggatatacgtatagaaaaagattttttaggtgaaaaggaagtaccaagtagagcttattatggtgtacaaacattacgtgcggtagaaaatttcccgattacagggtatcgcattcatccatcactcattacggcaatggcaattgtgaaaaaagcggcggcacttgcaaatatggatactggttacttagcgaaagacattggacacgaaattgcagaggcagcacaagaaattgttgatgggaaatttcatgatcaatttattgtagatccaattcagggcggtgctggaacttctattaatatgaatacaaatgaagtaatcgctaatcgagcgttagaacgtatgggatatgaaaaaggcgagtatgcaaaaattagcccaaatacgcatgtaaacatggctcagtcaacgaatgatgcgtttccaacaggaattcatattgcaactcttatgatgttagaagaacttcttattacaatggaagaacttcatgctgctttccttgcaaaagcaaaagagttcgatcacgtcattaaaatgggacgtacgcatttacaagatgctgttccgattcgtcttggacaagaatttgaagcgtatagcagagtgcttgcgcgtgatataaaaagaattaaacaatctcgccaacatttatatgaagtgaatatgggggcgacagctgttggtacgggattaaatgcaaaccctacctacattgaacaagtggttaaacacttacgaacatttagcggattcccacttgttggtgcagagcatttagttgatgcaacacaaaatacagatgcatacacagaagtatctgcagcattaaaagtatgtatgatgaatatgtctaaaattgcgaacgaccttcgtattatggcatctggtccacgtgttggattggcggaaattcaattaccagctcgtcaaccaggttcatctattatgccaggtaaagtaaatcctgttatggcagaagtaattaatcaagtcgctttccaagtaattggtaatgatcacacaatttgcttagcgtcagaagcaggacaactggagctcaacgtaatggagcctgtgcttgtatttaatttaattcaatctatcagtattatgaataacggattccgtgtattccgtgaatattgtattaaaggaattacagcaaatgaagaactgctgaagcaatatgttgagaaaagtgttggaattattacagcagttaaccctcatattggttatgaagtagcatcacgtattgcacgtgaagcaattgaaacaggaaaatctgttcgggagttatgtttagaacatggtgtactgacagaagaagaattagatattattttagatccattcgaaatgacgcatcctgaaattgctggtgcttctttactaaagaataagaagatgtaa

SEQ ID NO: 6243 - protein, 477 aa, Bacillus cereus ATCC 10987
MIATKDIRIEKDFLGEKEVPSRAYYGVQTLRAVENFPITGYRIHPSLITAMAIVKKAAALANMDTGYLAKDIGHEIAEAAQEIVDGKFHDQFIVDPIQGGAGTSINMNTNEVIANRALERMGYEKGEYAKISPNTHVNMAQSTNDAFPTGIHIATLMMLEELLITMEELHAAFLAKAKEFDHVIKMGRTHLQDAVPIRLGQEFEAYSRVLARDIKRIKQSRQHLYEVNMGATAVGTGLNANPTYIEQVVKHLRTFSGFPLVGAEHLVDATQNTDAYTEVSAALKVCMMNMSKIANDLRIMASGPRVGLAEIQLPARQPGSSIMPGKVNPVMAEVINQVAFQVIGNDHTICLASEAGQLELNVMEPVLVFNLIQSISIMNNGFRVFREYCIKGITANEELLKQYVEKSVGIITAVNPHIGYEVASRIAREAIETGKSVRELCLEHGVLTEEELDIILDPFEMTHPEIAGASLLKNKKM

SEQ ID NO: 6244 - DNA, 1437 bp, Yersinia pestis biovar Medievalis str. 91001
  CDS (1)..(1437): transl_table=11
atgtcaaataacattcgtattgaagaagacctgttaggtacacgagaagtccccgcagaggcttactacggtgttcataccctgcgtgcgattgaaaacttctatatcagtaacagtaaaatcagtgacgtgccggaatttgtacgtggcatggtcatggtaaaaaaagcggcggcaatggctaacaaagagttgcataccatcccgcgtaaaattgcagacatcattattcaggcatgtgatgaagttctggataaagggaaatgtatggatcagttccccgttgatgtgttccagggcggcgcaggtacctctctcaatatgaacaccaacgaggtcttggccaatattggcctggagctgatgggccaccaaaaaggggaatatcagtaccttaaccctaacgaccatctgaacaaatgccagtccaccaacgatgcctacccaaccggtttccgcattgcggtctacgcctccatcctcaagttgatcgatgctatcaaccaattaggcgaaggtttcggtagaaaatctaaagaattcgagaaaattctgaaaatgggccgtacccaattacaggatgccgtacccatgactctgggccaggaattccgcgctttccaggtgttattgaatgaagaaaccaagaacctgcaacggaccgccgagttgctattggaagtcaacctgggtgccactgccatcggcactgcgctgaatacaccagaaggttattcacaacttgccgtgcagaaactggcagaaatcagcggattagcctgtgttcctgccgaagatttgatcgaagcgacctctgattgcggcgcttacgtgatggtacacagcgccctgaaacgcctggctgttaagatgtcaaaaatctgtaacgacctacgtttgctctcatctggcccacgtactggtttgaatgaaatcaacctgccagaattgcaggcgggctcttctatcatgcctgcaaaagtgaacccggtgatccctgaagttgtaaatcaggtttgttttaaggtgatcggcaacgatacttgcattactatggcggctgaagcgggtcagcttcagttaaacgtgatggaaccggtaattggtcaggccatgtttgagtctatccatatcctgactaatgcgtgttacaacctgttagagaagtgcatcaatggcattaccgctaacaaagaggtctgcgagcgctacgtctttaactccataggcatcgtcacttatcttaacccgttcattggccaccataatggtgacattgtgggtaaaatctgtgcggaaaccggtaaaaatgtgcgggaagtggttctggagcgcggtttgttaactgaagccgaactggacgacattttctctgttgaaaacctgatgcacccagcctataaagcgaaacgttataccgatgaaaatgaacaataa

SEQ ID NO: 6245 - protein, 478 aa, Yersinia pestis biovar Medievalis str. 91001
MSNNIRIEEDLLGTREVPAEAYYGVHTLRAIENFYISNSKISDVPEFVRGMVMVKKAAAMANKELHTIPRKIADIIIQACDEVLDKGKCMDQFPVDVFQGGAGTSLNMNTNEVLANIGLELMGHQKGEYQYLNPNDHLNKCQSTNDAYPTGFRIAVYASILKLIDAINQLGEGFGRKSKEFEKILKMGRTQLQDAVPMTLGQEFRAFQVLLNEETKNLQRTAELLLEVNLGATAIGTALNTPEGYSQLAVQKLAEISGLACVPAEDLIEATSDCGAYVMVHSALKRLAVKMSKICNDLRLLSSGPRTGLNEINLPELQAGSSIMPAKVNPVIPEVVNQVCFKVIGNDTCITMAAEAGQLQLNVMEPVIGQAMFESIHILTNACYNLLEKCINGITANKEVCERYVFNSIGIVTYLNPFIGHHNGDIVGKICAETGKNVREVVLERGLLTEAELDDIFSVENLMHPAYKAKRYTDENEQ

SEQ ID NO: 6246 - DNA, 1407 bp, Desulfovibrio vulgaris subsp. vulgaris str. Hildenborough
  CDS (1)..(1407): transl_table=11
atggaatacaggacagaacgtgacagcctcggagaaaaacgggttcctgccggtgtctactacggcgtgcagacattgcgtgccttggagaatttccagataacggccatgccggtggcgacgtttccgcggttcatacaggcactcgccgccgtcaagaaggctgcggccctcgccaacatggaactcggtctgcttgatgcgggcgtcggtgaagccatcgtcaatgcctgccgcgacgtgcgcgcgggcaggttcgacgaccagtttcccgtggatgtcatccagggcggggcgggaacctcggtgaacatgaacgccaacgaggtcatcgccaaccgggcgctggaactcctggggcacccgaaagggcgctatgaggtcataagccctctcaatcacgtgaacctctcgcagtcgaccaacgatgtctatccgacggcgctacgcatcgccctcgtctggtatgcacgcgagttgtcaacggcgctgcgcgacctgcgggccgccttcgacgcgaaaggtgacgagtttgccggggtcatcaagatggcgcgcacccagttgcaggacgcggtccccatcacgctgggtgccgaattcgcggcatggggcgtcaccatcggcgaggacatcgacaggcttgatgacgctgcgcgtctgctgtgcgaggtgaacataggtgccacggccgtcggcaccggcatcaacagtgtgccgggatatgcctcgctggtacgtgaacgtctcgcggatatatgcggtctgcctctggtcaccgccgccaacctcgtggaggcgaccagtgacgcaggtgcctatgtcatgctgtccggtctgctcaaacgcgtggccgtgaagctgtcgaagatatgcaacgacctgcggctgcttgcttccgggccgttcaccggtctgcatgaaatcaacctgccacccatgcagccggggtcgagcatcatgccgggcaaggtcaaccccgtcattcccgaagtggtcaatcaggtctgctatcaggtgatcggcaacgacctcacggtgaccttcgccgccgagggggggcagcttgaactcaatgtctttctgcctgtcatcgccctcaacctcttccagtcgttgcagatgctcacgaaggcgtcgcgcaccctgcgcgagcggtgtgttgtcggcatcaccgccaaccccgaacggtgcctcgagcttgtgcggcattctctcggggtcgtcacggcgcttgctccggtgataggctatgagaccgccgcccgactggccaaggaggcgcaggagagcgggcgttccgtgcccgaggtgctgcaggccgagggcatcatgacgccggaggagttcgaagagcttctggaccctgccaagatgctctccccacgcgatgttcgccggaggtga

SEQ ID NO: 6247 - protein, 468 aa, Desulfovibrio vulgaris subsp. vulgaris str. Hildenborough
MEYRTERDSLGEKRVPAGVYYGVQTLRALENFQITAMPVATFPRFIQALAAVKKAAALANMELGLLDAGVGEAIVNACRDVRAGRFDDQFPVDVIQGGAGTSVNMNANEVIANRALELLGHPKGRYEVISPLNHVNLSQSTNDVYPTALRIALVWYARELSTALRDLRAAFDAKGDEFAGVIKMARTQLQDAVPITLGAEFAAWGVTIGEDIDRLDDAARLLCEVNIGATAVGTGINSVPGYASLVRERLADICGLPLVTAANLVEATSDAGAYVMLSGLLKRVAVKLSKICNDLRLLASGPFTGLHEINLPPMQPGSSIMPGKVNPVIPEVVNQVCYQVIGNDLTVTFAAEGGQLELNVFLPVIALNLFQSLQMLTKASRTLRERCVVGITANPERCLELVRHSLGVVTALAPVIGYETAARLAKEAQESGRSVPEVLQAEGIMTPEEFEELLDPAKMLSPRDVRRR

SEQ ID NO: 6248 - DNA, 1434 bp, Bacillus thuringiensis serovar konkukian str. 97-27
  CDS (1)..(1434): transl_table=11
atgatagcaacgaaggatatacgtatagaaaaagactttttaggtgaaaaggaagtaccaagtatagcttattacggtgtacaaacattacgcgctgtagaaaacttcccgattacaggatatcgcattcatccgtcactcattacggcaatggcaattgtgaaaaaagcggcggcacttgcaaatatggatactggatacttagcgaaagatattggacatgaaattgcggaggcagcgcaagagattgttgatggaaagttccatgatcaatttattgtggatccaatccaaggcggtgctggaacttctattaatatgaatacaaacgaagtaatcgctaatcgagcgttagaacgtatgggatatgaaaaaggcgagtatgcaaaaattagcccaaatacgcatgtaaacatggctcaatcaacgaatgatgcgtttccaacggggattcatattgcaactcttatgatgttagaagaacttcttattacaatggaagaacttcatgctgcttttcgtgcaaaagcaaaagagttcgatcacgtcattaaaatgggacgtacacatttacaagatgctgtgccgattcgtcttggtcaagaatttgaagcgtatagccgagtgcttgcgcgtgatataaaaagaattaaacagtctcgccaacatttatatgaagtgaatatgggggcgacagctgttggtacgggattaaatgcaaaccctacgtacattgaacaagtggttaaacacttgcgaacatttagcggattcccacttgttggtgcagagcatttggttgatgcaacgcaaaatacagatgcatacacagaagtatctgcagcattaaaagtatgtatgatgaatatgtctaaaattgcgaatgaccttcgtattatggcatctggtccacgtgttggattggcggaaattcaattaccagctcgccaaccaggttcatctattatgccgggtaaagtaaatcctgttatggcagaagtaattaatcaagtggctttccaagtaattggtaatgatcatacaatttgcttagcgtcagaagccggacaattggagctcaacgtaatggagccggtgcttgtatttaatttaattcaatctattagtattatgaataacggattccgtgtattccgtgaatattgtattaaaggaattacagcaaatgaagaattgctgaagcaatatgttgagaaaagtgttggaattattacagcagttaaccctcatattggttatgaagcagcatctcgcattgcacgtgaagcgattgaaacaggaaaatctgttagggagttatgtttagaacatggtgtactgacagaagaagaattggatattattttagatccattcgaaatgacgcatcctgaaattgctggggcttctttattaaaggataagaagatgtaa

SEQ ID NO: 6249 - protein, 477 aa, Bacillus thuringiensis serovar konkukian str. 97-27
MIATKDIRIEKDFLGEKEVPSIAYYGVQTLRAVENFPITGYRIHPSLITAMAIVKKAAALANMDTGYLAKDIGHEIAEAAQEIVDGKFHDQFIVDPIQGGAGTSINMNTNEVIANRALERMGYEKGEYAKISPNTHVNMAQSTNDAFPTGIHIATLMMLEELLITMEELHAAFRAKAKEFDHVIKMGRTHLQDAVPIRLGQEFEAYSRVLARDIKRIKQSRQHLYEVNMGATAVGTGLNANPTYIEQVVKHLRTFSGFPLVGAEHLVDATQNTDAYTEVSAALKVCMMNMSKIANDLRIMASGPRVGLAEIQLPARQPGSSIMPGKVNPVMAEVINQVAFQVIGNDHTICLASEAGQLELNVMEPVLVFNLIQSISIMNNGFRVFREYCIKGITANEELLKQYVEKSVGIITAVNPHIGYEAASRIAREAIETGKSVRELCLEHGVLTEEELDIILDPFEMTHPEIAGASLLKDKKM

SEQ ID NO: 6250 - DNA, 1419 bp, Acinetobacter sp. ADP1
  CDS (1)..(1419): transl_table=11
atgaacgctgaaattcaaactcgtacagaaaaggatttactgggtctacgtgaagtaccaaatcaattttacttcggtatccaaactttacgagcaattgaaaacttcaatctaagctctaataaaatcaatcaatatccaaatttgatcaaatcattagcgatggtgaagcatgcatgtgcagaagcaaaccatactttgggtaaattaagtgatttaaaatttaatgcaatcaaatatagctgtgatcagttaattcaaggtttttaccacgaacagttccccattgacctcattcagggtggtgcgggtacctctaccaacatgaatgccaatgaagtaattgcaaatattgcattagagcatttgggtcataaaaaaggtgaatacaactttttacatccaaacaatgatgtgaatatgtctcaatcgaccaatgacgtttatccaactgcaattcgcttaggtttattattcagcttagatgatttaaatacgccttttgaaaatttgattgctagcctacgccgtaagggtgatgaatttgcacatattttgaaaatgggccgtactcagcttcaagacgccgttccaatgactttgggtcaagaatttaatgcttttgcttctacacttgaaaaagatttgatcaagattagagaaatcgcgcctcaaactctaaattatatgaatcttggcggtactgcgattggtacaggaatcaatacagaacaaaaatatacccaacttgccattgatgcacttgcgacaattagccagaaagatatcaagtctgctcccgatttaatcgaagcgacttcagatatgggtgattttgtattgttgtcaggattacttaaacgtacagcaactaaactctcaaaaatcgccaatgatctacgtttactttcaagtggtccacgtactgggatcaatgaaattaatctagagccgcgccaacctggcagctcaatcatgccaggtaaagtaaacccagttattccagaggcaatgaatcttgtatgtttccagattattgcgaatgatttggctgtaactttatctgctgaagcgggtcaattacaattaaatgcaatggaacccctgattgcattcaaactgtttgaatcaattgagttacttggtaatgcgctcgtcatgttccaaaccaagtgtatcgataccgtgactgcaaacgaacaacattgtaaagcacttgtcgataattccattggaattgtgactgctctgaatccttatcttggatatgaaaccacaacacgtattgctaaaactgcaaatgaaagtggtttaagcgtattgagtctgatcaaatctgaaaacctgttgtctgatgatcaactttcagaaattttagcggttgacaatatggtgcaaccgaaagctgaaatggtttaa

SEQ ID NO: 6251 - protein, 472 aa, Acinetobacter sp. ADP1
MNAEIQTRTEKDLLGLREVPNQFYFGIQTLRAIENFNLSSNKINQYPNLIKSLAMVKHACAEANHTLGKLSDLKFNAIKYSCDQLIQGFYHEQFPIDLIQGGAGTSTNMNANEVIANIALEHLGHKKGEYNFLHPNNDVNMSQSTNDVYPTAIRLGLLFSLDDLNTPFENLIASLRRKGDEFAHILKMGRTQLQDAVPMTLGQEFNAFASTLEKDLIKIREIAPQTLNYMNLGGTAIGTGINTEQKYTQLAIDALATISQKDIKSAPDLIEATSDMGDFVLLSGLLKRTATKLSKIANDLRLLSSGPRTGINEINLEPRQPGSSIMPGKVNPVIPEAMNLVCFQIIANDLAVTLSAEAGQLQLNAMEPLIAFKLFESIELLGNALVMFQTKCIDTVTANEQHCKALVDNSIGIVTALNPYLGYETTTRIAKTANESGLSVLSLIKSENLLSDDQLSEILAVDNMVQPKAEMV

SEQ ID NO: 6252 - DNA, 1440 bp, Erwinia carotovora subsp. atroseptica SCRI1043
  CDS (1)..(1440): transl_table=11
atgtcaacgaatatccgtattgaagaagacctgttaggcactcgtgaagtccccgctgacgcgtattatggtatccatacgctgcgtgcgattgagaacttttatatcagcaatagcactattagcgatattccagaatttgttcgtgccatggtgatggtaaaaaaagcagccgcactggcgaataaagaactgcaaaccatcccgcgtaaaattgccgacactattctgcaagcctgtgatgaagtgctgaataacggtaaatgtctggatcagttccctgtcgatgtgtatcagggtggtgcgggtacgtcagtcaacatgaacaccaacgaagtgctggcgaatatcggtctggaactgatgggtcatcagaaaggtgaataccagtacctgaacccgaacgaccacctgaacaaatgccagtccaccaacgatgcttacccgacggggttccgtattgcggtatacacctcaatcctgaagctggtagaagccattactcagttgagcgatggctttgagcgtaaagcaaaagagttcgaaaacatcctgaaaatgggtcgtacccagttgcaggacgccgtgccgatgaccctcggccaagaattccacgcgttcaacgtactgctgaaagaagaaaaccgtaacctgctgcgtaccgcagagctgctgctggaagtaaaccttggcgcaaccgccatcggtacccgtctgaacacgccggatgagtaccagaagcttgctgttcagcacttggcaaaaatcagcggcctgccttgcgtaccggctgaagacctgatcgaggcgacctccgactgcggtgcttacgtgatgatgcacagcgccctgaaacgcgtagcggttaaaatgtcgaagatctgtaacgacttgcgcctgctgtcttccggcccacgtactggtctgaacgaaatcaacctgccagaattgcaggcgggatcatccatcatgccagccaaagttaaccctgtagtaccggaagtggtgaatcaggtgtgcttcaaggtcatcggcaacgatacctgcgtgaccatggcggcagaagcaggccagttgcagttgaacgtgatggaaccggttatcggacaagccatgttcgaatctatccagattctgtctaacgcctgctacaacctgctggaaaaatgtgtcaacggcatcaccgccaacaaagaagtgtgtgaagcttatgtcttcaactctatcggtatcgtgacctacctgaacccgttcatcggtcaccacaacggcgatatcgttgggaaaatctgtgccgaaaccggcaaaagcgtgcgtgaagtcgtgctggagcgcggcctgctgaccgaagaacagctggacgacattttctccatccagaacctgatgcacccagcctacaaagccaaacgctacaccgacgaaaacgaagccgtttaa

SEQ ID NO: 6253 - protein, 479 aa, Erwinia carotovora subsp. atroseptica SCRI1043
MSTNIRIEEDLLGTREVPADAYYGIHTLRAIENFYISNSTISDIPEFVRAMVMVKKAAALANKELQTIPRKIADTILQACDEVLNNGKCLDQFPVDVYQGGAGTSVNMNTNEVLANIGLELMGHQKGEYQYLNPNDHLNKCQSTNDAYPTGFRIAVYTSILKLVEAITQLSDGFERKAKEFENILKMGRTQLQDAVPMTLGQEFHAFNVLLKEENRNLLRTAELLLEVNLGATAIGTRLNTPDEYQKLAVQHLAKISGLPCVPAEDLIEATSDCGAYVMMHSALKRVAVKMSKICNDLRLLSSGPRTGLNEINLPELQAGSSIMPAKVNPVVPEVVNQVCFKVIGNDTCVTMAAEAGQLQLNVMEPVIGQAMFESIQILSNACYNLLEKCVNGITANKEVCEAYVFNSIGIVTYLNPFIGHHNGDIVGKICAETGKSVREVVLERGLLTEEQLDDIFSIQNLMHPAYKAKRYTDENEAV

SEQ ID NO: 6254 - DNA, 1440 bp, Erwinia carotovora subsp. atroseptica SCRI1043
  CDS (1)..(1440): transl_table=11
atgtcagaaaacatccgtattgaagaagacctgttaggcacccgagaagttcccgcagacgcgtattatggcgttcatacgctgcgcgccgtcgaaaacttctatatcagtaacaataaaatcagtgacattcccgagttcgtacgcggcatggtcatggtgaagaaagccgccgcgctggcgaacaaagagctacaaactatcccgaaaaaaatcgccgacgtcatcatccgcgcctgtgatgaagttctgaataacggcaaatgcatggaccagttcccagtagatgtgtatcaggggggagcaggtacgtcggtcaacatgaataccaacgaagtattagccaatattggtctggagctgatgggccaccagaaaggcgaataccagtatctgaaccccaacgatcatctgaataaatgccaatccaccaatgatgcctaccccaccggatttcgtatcgcggtctacgcggccatactgaaattgacggatgcgatagcgaagttgagcgatggcttcgagcacaaagccaaagaatttgaagacgttctgaagatggggcggacccagttgcaggacgccgtgccaatgacgctcggtcaggaatttcatgcgtttaacgtgctgttgcaagaggaaatcaaaaacctgctgcgcacggcggaactgctacttgaagtcaatctgggggccaccgcgatcggtacacgcctgaacacaccagacggctaccagcaactggcggtacagcgtttggcggaagtcagcggcctgccgtgtgtgccagcagaagacttgatcgaagccacgtcagactgtggtgcctatgtaatggtacacagttcgctgaagcgtctggctgtgaagctgtcgaagatttgtaatgacctgcgtttgctctcttccggccctcgcgctggcctgaatgaaatcaacctgccagagttgcaggcgggttcctccatcatgcctgccaaagttaaccccgtggtgccggaagtcgtcaatcaagtgtgcttcaaggtcatcggtaacgacacctgcgtcactatggcgtcggaggccgggcaattacagttaaacgtgatggagccggttatcggtcaggcaatgtttgaatcaacccacattctgactaacgcctgctacaacctgctggagaaatgcgtcagcggtatcaccgctaataagggcgtctgcgaagcctatgttttcaactccatcggaattgtgacgtacctgaacccgttcatcggccaccacaatggcgacattgtcggcagaatctgtgcggaaacaggaaagagcgtgcgtgaagtcgtactggagcgcggtctgctgacagaagctgagctggatgacattttctccatccagaacctgatgcacccagcgtacaaagccaaacgctacactgatgaaaacgagcttccttaa

SEQ ID NO: 6255 - protein, 479 aa, Erwinia carotovora subsp. atroseptica SCRI1043
MSENIRIEEDLLGTREVPADAYYGVHTLRAVENFYISNNKISDIPEFVRGMVMVKKAAALANKELQTIPKKIADVIIRACDEVLNNGKCMDQFPVDVYQGGAGTSVNMNTNEVLANIGLELMGHQKGEYQYLNPNDHLNKCQSTNDAYPTGFRIAVYAAILKLTDAIAKLSDGFEHKAKEFEDVLKMGRTQLQDAVPMTLGQEFHAFNVLLQEEIKNLLRTAELLLEVNLGATAIGTRLNTPDGYQQLAVQRLAEVSGLPCVPAEDLIEATSDCGAYVMVHSSLKRLAVKLSKICNDLRLLSSGPRAGLNEINLPELQAGSSIMPAKVNPVVPEVVNQVCFKVIGNDTCVTMASEAGQLQLNVMEPVIGQAMFESTHILTNACYNLLEKCVSGITANKGVCEAYVFNSIGIVTYLNPFIGHHNGDIVGRICAETGKSVREVVLERGLLTEAELDDIFSIQNLMHPAYKAKRYTDENELP

SEQ ID NO: 6256 - DNA, 1473 bp, Propionibacterium acnes KPA171202
  CDS (1)..(1473): transl_table=11
ttgactgagatccggatcgaagaagatcttcttgggaaacgggaaatctcgaatgagcactactatggaattcatactttgcgggctttagagaacttccaaatatcacgcggatgtatgaatgacgagcctgacttcattcgtggaatggttcaggtaaagaaggcaacagctctgacgaataagcagttgaaggttctcccgagtgatgtcgctgacgccattgtcgctgcatgcgatgcgatcttggatgatgggcgctgtatggaccaattcccgactgattccttccaaggaggagcgggaacctcgatcaacatgaacaccaatgaggttgtcgccaatttggccctcgaaatgttgggatacccgaaaggcacctatgacgtcatccaccccaacgatgatgtcaataagtcccagtcgactaacgacgcttaccccaccgggttccggctcggggtgtacgctttgctagaggggctgaagcgagccgtcgccgacctcgcagacagtttcgatgccaaggctgaggaatttgccgatgtactgaagatggggcgtacccaattgcaggatgccgtccccatgactttgggtgaggagtttgacgggtacgcacacaacatccgtgctgaactggaccggcttgatattggaagcgatcttctcgtagaggtcaacctgggcggcaccgccatcggaactcggatcaacaccccagacggatatgctgaacttgctgctgagaaactggccgaggtgaccggatacccgattcgtccctccaccaacctcatggaatcgtcttacgacaacggcgcctacattgctgtccattctattatcaaacgcctagcagcgaagatctccaagatctgcaacgatttacgattgctttcatctggaccgagggctgggctcaaggaaatcaaccttccagagatgcaggcgggatcgtccatcatgccggcgaaggtgaatccggtcattcccgaggtcgtcaatcagatctgcttcaaagtatttggaaacgatgtcaccgtctgtttcgctgccgaggccggtcagctagaacttaatgtgatggaaccggcgctgtcgcaagcaatgttcgagtccatccacctgctgaccaatgcctgcgacacgttgcgtagcaagtgcattgacgggatcaccgcaaatgtggagcggtgccgggagtatgtcaccaattccatcggtatcgtgacctacttgaatgatgtgattggacaccatcaaggcgatctcattggcgaggaagctgcccgtaccggaaagtcagttcgtgaggtcgtcctcgaacacgacctcatcccggaggaaaggctggacgagatcatgtcgacccagaacttcctgcacccccggtattccggacgtacctacgagccgagtgaccgcggtctcccggaggatcccaggacattcgtgtccgagcgttgctga

SEQ ID NO: 6257 - protein, 490 aa, Propionibacterium acnes KPA171202
MTEIRIEEDLLGKREISNEHYYGIHTLRALENFQISRGCMNDEPDFIRGMVQVKKATALTNKQLKVLPSDVADAIVAACDAILDDGRCMDQFPTDSFQGGAGTSINMNTNEVVANLALEMLGYPKGTYDVIHPNDDVNKSQSTNDAYPTGFRLGVYALLEGLKRAVADLADSFDAKAEEFADVLKMGRTQLQDAVPMTLGEEFDGYAHNIRAELDRLDIGSDLLVEVNLGGTAIGTRINTPDGYAELAAEKLAEVTGYPIRPSTNLMESSYDNGAYIAVHSIIKRLAAKISKICNDLRLLSSGPRAGLKEINLPEMQAGSSIMPAKVNPVIPEVVNQICFKVFGNDVTVCFAAEAGQLELNVMEPALSQAMFESIHLLTNACDTLRSKCIDGITANVERCREYVTNSIGIVTYLNDVIGHHQGDLIGEEAARTGKSVREVVLEHDLIPEERLDEIMSTQNFLHPRYSGRTYEPSDRGLPEDPRTFVSERC

SEQ ID NO: 6258 - DNA, 1425 bp, Leifsonia xyli subsp. xyli str. CTCB07
  CDS (1)..(1425): transl_table=11
gtgcgggtcgagaccgattcgctgggcgcccgcgacatccccgccgacgcctattggggtgttcacacctcccgggcgctcgagaatttcccgatcgccaagcgcccgatctccgtgtaccccgacctcatcgtggccctcgcgagcgtcaagcaggccgccgcgcgcgccaacctcgagatcggtgtgctggacgcgcacaaggccggcctcatcgaccgcgcctgccagctgatcatcgacggccggttccacgatcagttcgtggtgggcgtcatgcaaggcggggcgggcacctcgacgaacatgaacgccaatgaggtcatcgccaacatcgccctggaactcgacggccacgccaaggccgagtaccagcgtctcagcccgatcgacgatgtcaaccgcagccagagcaccaatgacacctacccgacggcgatcaagatcggactgaccttcgcgctcggccatctcctggacgagctggcgctgctccgcgactcattcgcgagcaaaggtgcggagttccggcacattctcaaggtcggccggacgcagctccaggatgccgtgccgatggcgctcggccaggagttcagcggtttcgccaccacgctcaccgaggaccacgcccgcctcacagagacgaagtccctcctcgccgagatcaaccttggcgccacagcgatcggcaccgggatcaccgcggacgccggctatgccgctgcggcggtcaaacacctcaacctcatcaccggcctcagcctcgagaccgcccccgacctcatcgaatcgaccagcgacgcgggcgctttcatgtcgttctccggatcgctgaagcgcagcgcgatcaaactctcgaagatctgcaacgacctgcgcctgctctcctccggaccgcaggccggactcggcgagatcaacctcccgccgcgtcaggccggttcgagcatcatgccgggcaaagtcaaccccgtcatccccgaggtcgtcaaccaggtcgccttctcggtggccggggctgacgtcaccgtcacgatggcggcggagggcggccagctccagctgaacgccttcgagccggtgatcgcccattcgctgctccagagcatcacctggatggctcaggcgttccacactctccgcgtcaactgcgtggacggcatcactgccaatgaggagcgactcggcgggatggtcggttcctcggtcggcgtcatcaccgcgctcactccgcacatcggctacgcggccgcggccgcgctcgcgaaatcggcgctgctgaccggccggaacgtggccgacctcgtggtcgaggcgaacctcatgagccgtgtggaggtcatgcgcctgctgtccccggcgcgcctgtcggggctggaagcgatcacgacagccatcccggtgatcgaccagcaggcgtga

SEQ ID NO: 6259 - protein, 474 aa, Leifsonia xyli subsp. xyli str. CTCB07
MRVETDSLGARDIPADAYWGVHTSRALENFPIAKRPISVYPDLIVALASVKQAAARANLEIGVLDAHKAGLIDRACQLIIDGRFHDQFVVGVMQGGAGTSTNMNANEVIANIALELDGHAKAEYQRLSPIDDVNRSQSTNDTYPTAIKIGLTFALGHLLDELALLRDSFASKGAEFRHILKVGRTQLQDAVPMALGQEFSGFATTLTEDHARLTETKSLLAEINLGATAIGTGITADAGYAAAAVKHLNLITGLSLETAPDLIESTSDAGAFMSFSGSLKRSAIKLSKICNDLRLLSSGPQAGLGEINLPPRQAGSSIMPGKVNPVIPEVVNQVAFSVAGADVTVTMAAEGGQLQLNAFEPVIAHSLLQSITWMAQAFHTLRVNCVDGITANEERLGGMVGSSVGVITALTPHIGYAAAAALAKSALLTGRNVADLVVEANLMSRVEVMRLLSPARLSGLEAITTAIPVIDQQA

SEQ ID NO: 6260 - DNA, 1884 bp, Desulfotalea psychrophila LSv54
  CDS (1)..(1884): transl_table=11
ttggaggatattatgaagttagatgaaaatactcttaagcaggcagcgctgacggcgggaattgaagaggtagatttacagacattttttgctcagggtgagcgtatagagtatgcagccggtgattggctctttcaggaatcaactcctagaaactgggcaggaattattcttgccggagagattcagcttgttcgtggcctgcatggtagctctcaccgtgttggtaccgtttctgcgggaggattgatatccgagggtgtctttattgatcaggattcccatgccaatggaggttatacccgtttaggggcggtggtctggcaggtttcccgggaaaagattgatgttttcagaaaggagcaaccggagatattttatcgattggtttcccgggtcgcggtggccatcaataggcgtatgcgcacactttccgagcagctttatggtgaaacctgtaaaagacggacgatgagcggttttcgcctggaacatgattccctgggacatagggagattcccggtgatgcctattatggggtgcaaactcagagagctatagagaattttccgatctccggggtgccggtaagtaattttagtcatctcatcgaaggatttgcctttattaagattgctgctgctcgcgctaactttgagcttggggtgatggatggggagaagatggaggctctctgtggagcttgtgttgagctcttagagggtaaattgcatgagcattttgcagtggatatgttccagggcggggcgggcacctccaccaatatgaatgccaacgaggtcataaccaaccgtggtctggagcttatggggcatgagaagggagagtatcagtacctgcatcccaacgatcatgccaactgttctcagtcgaccaacgatacctatcccacggcggtcaaacttgccgtactgctctcgcatcgtaacctggcccgagggatggaggatctgaaaaatgcccttctgcaaaaatccgttgagtttaaggatgttttgaagatgggacgaacggaaaatcaggatgcggtgcccatgactcttggccaggaatttagtgcctatgctgtaatggtgggaagtgccatgcgtgccatagagggtgcatccgaagagtttatgcatattaatatgggggctactgccattggcaccggcattaactgtcctctaggctatgccgatctggtaactgaaaagcttgttgaggtgagtggctttcccctgaaaagagcaggaaatcttgttgaggccacccaaaatgcgggtacctttgtccagatgtctgcgaccatgaaacgggctgcggtgcaaatttcaaagatatgtaatgatctgcgctggctctcctccgggccccgttgtggtctcaatgagataaacctgccacccatgcagccaggctcttccatcatgccgggcaaggttaatcctgttattcctgaggtggtcaatcagatctgctatcaggttattggctacgatactgtggtttccatggccgccgagtccagtgagttggagctctgtatggcggagccaattattgcctacgacctgctccacggtatgatgattcttaaaaatgcctgcgtcaccttggcctctcgttgcatcgtcggtattgaggcgaatcgtgacgtctgtcgttcctatgtggaaaatagcattggtcttgttaccgctttggtcccggttatcggttatgagccgtctgctgccattgccaaggaggccctgaagacaggtggcagcgtttataatcttgtcctggagaagggtctgcttaccaagaaggagctggatgatatgctctcgcctgaaaagatgaccgatccacgggatattcctcagcacctctag

SEQ ID NO: 6261 - protein, 627 aa, Desulfotalea psychrophila LSv54
MEDIMKLDENTLKQAALTAGIEEVDLQTFFAQGERIEYAAGDWLFQESTPRNWAGIILAGEIQLVRGLHGSSHRVGTVSAGGLISEGVFIDQDSHANGGYTRLGAVVWQVSREKIDVFRKEQPEIFYRLVSRVAVAINRRMRTLSEQLYGETCKRRTMSGFRLEHDSLGHREIPGDAYYGVQTQRAIENFPISGVPVSNFSHLIEGFAFIKIAAARANFELGVMDGEKMEALCGACVELLEGKLHEHFAVDMFQGGAGTSTNMNANEVITNRGLELMGHEKGEYQYLHPNDHANCSQSTNDTYPTAVKLAVLLSHRNLARGMEDLKNALLQKSVEFKDVLKMGRTENQDAVPMTLGQEFSAYAVMVGSAMRAIEGASEEFMHINMGATAIGTGINCPLGYADLVTEKLVEVSGFPLKRAGNLVEATQNAGTFVQMSATMKRAAVQISKICNDLRWLSSGPRCGLNEINLPPMQPGSSIMPGKVNPVIPEVVNQICYQVIGYDTVVSMAAESSELELCMAEPIIAYDLLHGMMILKNACVTLASRCIVGIEANRDVCRSYVENSIGLVTALVPVIGYEPSAAIAKEALKTGGSVYNLVLEKGLLTKKELDDMLSPEKMTDPRDIPQHL

SEQ ID NO: 6262 - DNA, 1410 bp, Symbiobacterium thermophilum IAM 14863
  CDS (1)..(1410): transl_table=11
atgcagcagacgcgcaccgaacgggatctgctgggcgaaaaacaggttcccgcagacgcctactacggcatccagacgacgcgtgcgctggagaacttccgcattaccggccagcggctgcaccctgccctggtgcggggcctcgcccaggtgaagaaggccgcggcccaggcgaatcaccagctgggatacttgccggacgacgtcgcccgtgccatcgtgcaggcgtgcgacgagatcctcgcgggccggctggccgaccagttccccatcgatccggtacagggcggcgccgggacgtccgccaacatgaacgccaacgaggtgatcgccaaccgggccatcgagatcctgggggggcgtaagggcgactacagcctggtctcccccaacgaccacgtgaacttcgcccagtccaccaacgacgccttccccaccgccctgcggctggcgctcatggagcgggcggacgtgctggtggagagcctggtcgggctggaggaggccctgcgcgccaaggccgccgagttcgacgacgtggtgaaggtcggccgcacccacctgcaggacgccgtgccgatccggctggggcaggagttttcggcctggtgcgcggcggtggagcgggggcggcggcgcatccagcaggctgtggaggccctgtgcgaggtcaacatgggcgcgaccgcggtggggacgggcctcaacgccgacccggcgtacccgccgctggtcatcgagttgctcagccgcaacaccgggcggagcctccgtccgccggctgacctcgtggacgccacccagaacgtcgacccgctggtggccctcagcggcagcctgaaggcgctggcggtgagcctctccaagatcgccaacgacatccggctgatggcctcggggccgcgctgcgggctctacgagatcaggctgccggagatgcagccgggctcctccatcatgcccggcaaggtgaaccccgtcatggcggaggtgctgaaccagacctgcttcctggtgatcggcctggacctgacggtgaccctcgcgggcgaggccggccagctggagctgaacgtgatggagccggtgatgggccacgccctcttcaccagcatcgacgccctggagagcgtcgtgcggctgttcaccgaccggtgcgtgcggggcatccaggccaaccgggagcgctgcgaggagctggtcaaccggtccatcgggctggtgaccgccatcaaccccatcgtcgggtacaagaacgcctctgaggtggcgcgcgaggccacgctcacgggccgcccggtccgggagatcgtgctggagaagggtctgctcactgccgaggagatcgacgagatcctgtcgcccaagcacctgacgaccatggggatcgcccggcggacccacgactga

SEQ ID NO: 6263 - protein, 469 aa, Symbiobacterium thermophilum IAM 14863
MQQTRTERDLLGEKQVPADAYYGIQTTRALENFRITGQRLHPALVRGLAQVKKAAAQANHQLGYLPDDVARAIVQACDEILAGRLADQFPIDPVQGGAGTSANMNANEVIANRAIEILGGRKGDYSLVSPNDHVNFAQSTNDAFPTALRLALMERADVLVESLVGLEEALRAKAAEFDDVVKVGRTHLQDAVPIRLGQEFSAWCAAVERGRRRIQQAVEALCEVNMGATAVGTGLNADPAYPPLVIELLSRNTGRSLRPPADLVDATQNVDPLVALSGSLKALAVSLSKIANDIRLMASGPRCGLYEIRLPEMQPGSSIMPGKVNPVMAEVLNQTCFLVIGLDLTVTLAGEAGQLELNVMEPVMGHALFTSIDALESVVRLFTDRCVRGIQANRERCEELVNRSIGLVTAINPIVGYKNASEVAREATLTGRPVREIVLEKGLLTAEEIDEILSPKHLTTMGIARRTHD

SEQ ID NO: 6264 - DNA, 1434 bp, Bacillus cereus E33L
  CDS (1)..(1434): transl_table=11
atgatagcaacgaaggatatacgtatagaaaaagactttttaggtgaaaaggaagtaccaagtatagcttattacggtgtacaaacattacgcgctgtagaaaacttcccgattacaggatatcgcattcatccgtcactcattacggcaatggcaattgtgaaaaaagcggcggcacttgcaaatatggatactggatacttagcgaaagatattggacatgaaattgtggaggcagcgcaagagattgttgatggaaagttccatgatcaatttattgtggatccaatccaaggcggtgctggaacttctattaatatgaatacaaacgaagtaatcgctaatcgagcgttagaacgtatgggatatgaaaaaggcgagtatgcaaaaattagcccaaatacgcatgtaaacatggctcaatcaacgaatgatgcgtttccaacggggattcatattgcaactcttatgatgttagaagaacttcttattacaatggaagaacttcatgctgcttttcgtgcaaaagcaaaagagttcgatcacgtcattaaaatgggacgtacacatttacaagatgctgtgccgattcgtcttggtcaagaatttgaagcgtatagccgagtgcttgcgcgtgatataaaaagaattaaacagtctcgccaacatttatatgaagtgaatatgggggcgacagctgttggtacgggattaaatgcaaaccctacgtacattgaacaagtggttaaacacttgcgaacatttagcggattcccacttgttggtgcagagcatttggttgatgcaacgcaaaatacagatgcatacacagaagtatctgcagcattaaaagtatgtatgatgaacatgtctaaaattgcgaatgaccttcgtattatggcatctggtccacgtgttggattggcggaaattcaattaccagctcgccaaccaggttcatctattatgccaggtaaagtaaatcctgttatggcagaagtaattaatcaagtggctttccaagtaattggtaatgatcatacaatttgcttagcgtcagaagccggacaattggagctcaacgtaatggagccggtgcttgtatttaatttaattcaatctattagtattatgaataacggattccgtgtattccgtgaatattgtattaaaggaattacagcaaatgaagaattgctgaagcaatatgttgagaaaagtgttggaattattacagcagttaaccctcatattggttatgaagcagcatctcgcattgcacgtgaagcaattgaaacaggaaaatctgttagggagttatgtttagaacatggtgtactgacagaagaagaattggatattattttagatccattcgaaatgacgcatcctgaaattgctggggcttctttattaaaggataagaagatgtaa

SEQ ID NO: 6265 - protein, 477 aa, Bacillus cereus E33L
MIATKDIRIEKDFLGEKEVPSIAYYGVQTLRAVENFPITGYRIHPSLITAMAIVKKAAALANMDTGYLAKDIGHEIVEAAQEIVDGKFHDQFIVDPIQGGAGTSINMNTNEVIANRALERMGYEKGEYAKISPNTHVNMAQSTNDAFPTGIHIATLMMLEELLITMEELHAAFRAKAKEFDHVIKMGRTHLQDAVPIRLGQEFEAYSRVLARDIKRIKQSRQHLYEVNMGATAVGTGLNANPTYIEQVVKHLRTFSGFPLVGAEHLVDATQNTDAYTEVSAALKVCMMNMSKIANDLRIMASGPRVGLAEIQLPARQPGSSIMPGKVNPVMAEVINQVAFQVIGNDHTICLASEAGQLELNVMEPVLVFNLIQSISIMNNGFRVFREYCIKGITANEELLKQYVEKSVGIITAVNPHIGYEAASRIAREAIETGKSVRELCLEHGVLTEEELDIILDPFEMTHPEIAGASLLKDKKM

SEQ ID NO: 6266 - DNA, 1419 bp, Mannheimia succiniciproducens MBEL55E
  CDS (1)..(1419): transl_table=11
atggcagcgacaagaaaagaagtagatttactcggtgaacgtgaagtgcccgccgatgcttattggggaattcatacattaagagcggtagaaaactttaatatttctaaagtaactatttctgatgtgcctgaatttgtaaaaggcatggtaatggttaaaaaagcaactgctcttgccaacggcgaactaggcgctattcctgcggatattgccaaagcaatcgtagcggcttgcgacgaaattttaactaccgggaaatgcttggatcaattcccttcagacgtatatcaaggcggtgcaggtacttccgtaaacatgaataccaatgaagtggtggcgaatctggcattagaaaaaatcggtcatcaaaaaggcgaatacaatgtgattaacccgatggatcacgttaatgccagccaatcaactaatgatgcttatccgacagggttccgcattgccgtttataacagcattttaaaattaatggataagatccaatatttacacgacggctttgataacaaagcgaaagaatttgccaatattctgaaaatgggtcgtactcaattacaggatgcggtgccaatgacagtggggcaagaatttaaagcatttgccgtactattggaagaagaagtacgtaacttaaaacatgcggcggatttacttttagaagtgaatctaggtgcgacggctatcggtaccggcttgaatacgcctgcgggatattccgaattagcggtgaaacgccttgccgaagtgacaggtttaccttgcgttaaagcgtcaaacttaatcgaagcgacatcagactgcggttcttatgttatggttcacggcgcattaaaacgtactgcggtaaaactttcaaaaatttgtaatgacctgcgtttactttcatcaggtccgcgcgccggtttaaatgaaattaacttacctgaattacaagccggttcttcaatcatgccggcaaaagttaaccctgttgtgccggaggtagtgaatcaggtttgctttaaagtaatgggtaacgacacaaccgttactttcgctgcggaagccggtcaattgcaattgaacgtaatggaaccggtaattggtcaggctatgttcgaatctatcgacattttagctaatgcctgtgtgaatttacgtgataaatgtatcgacggaattaccgtaaacaaagaaatttgtgaaaactacgtgttgaattcaatcggtatcgtaacttatctgaacccgttcatcggtcaccataatggcgacatcgtcggtaaaatctgcgcgcaaaccggccgtagcgtacgcgatgtagtattggaaaaagggttactcacagaagcggaattagacgatattctttctgttgaaaacttaatgaatccgacttacaaagcgaagttaagtaaatag

SEQ ID NO: 6267 - protein, 472 aa, Mannheimia succiniciproducens MBEL55E
MAATRKEVDLLGEREVPADAYWGIHTLRAVENFNISKVTISDVPEFVKGMVMVKKATALANGELGAIPADIAKAIVAACDEILTTGKCLDQFPSDVYQGGAGTSVNMNTNEVVANLALEKIGHQKGEYNVINPMDHVNASQSTNDAYPTGFRIAVYNSILKLMDKIQYLHDGFDNKAKEFANILKMGRTQLQDAVPMTVGQEFKAFAVLLEEEVRNLKHAADLLLEVNLGATAIGTGLNTPAGYSELAVKRLAEVTGLPCVKASNLIEATSDCGSYVMVHGALKRTAVKLSKICNDLRLLSSGPRAGLNEINLPELQAGSSIMPAKVNPVVPEVVNQVCFKVMGNDTTVTFAAEAGQLQLNVMEPVIGQAMFESIDILANACVNLRDKCIDGITVNKEICENYVLNSIGIVTYLNPFIGHHNGDIVGKICAQTGRSVRDVVLEKGLLTEAELDDILSVENLMNPTYKAKLSK

SEQ ID NO: 6268 - DNA, 1398 bp, Neisseria gonorrhoeae FA 1090
  CDS (1)..(1398): transl_table=11
atgactgtccgtatcgaacacgatttattgggcgaccgcgagattcccgccgaagtgtattggggcatccacaccctgcgcgccattgaaaactttaaaatctccacacaaaaaatttccgacgtgccgcagtttgtccgcagtatagtgatggtgaaaaaagcaaccgcgcaggcaaacggcgaattgggtgcagtaaaacccgaaatcgccgccgccattgaaaaggcttgcgacgaagttctgctgaacaaccgctgcctcgaccaattcccgtccgacgtgtatcagggcggggcgggaacttcggtcaatatgaacaccaacgaagtcatcgccaaccttgcattggaagccttgggctatgagaaaggccgctacgacatcgtcaatccgatggatcacgtcaacgccagccaatccaccaacgatgcctatcccacgggcttccgccttgccgtgtattacagcatcggcgaattgctcgacaaactgaccgtattgaaaaacgcctttgccgccaaagccgaagcgtttaaagacgttttgaaaatgggtcgcacccagcttcaagatgccgtaccgatgacggcaggccaggaattccaatctttccaagtattgttggaagaggaaatcctcaaccttgaccgcacccgccaactgctcttggaagtcaatttgggcgcaacggcaatcggcacgggcgtgaacacgcccaaaggctacgccgaactggtggtcaaaaaactctccgaagtcagcggcttgccttgcaaactgactgaaaacctgatcgaagcgacctccgactgcggtgcatatgtgatggtacacggcgcattgaaacgcacggccgtcaaactctctaaaatctgcaacgatttgcgccttctctcttccggtccgcgcgccggtttgaaagaaatcaacctgcccgaattgcaggccggttcttccatcatgcctgccaaagtcaatcccgtgattcccgaagtcgtcaaccaagtctgcttcaaagtcatcggcaacgatacgacgattaccttcgccgccgaatccgggcaactgcaattaaacgttatggagccggtcatcgcccaatgtatgtttgaaaccatttccctcttgggcaatgccgcagtcaacctatccgacaaatgcgtcaaaggcattacggtcaaccgcgaaatctgcgagcggtatgtcttcaactccatcggtttggtcacttatctgaatccgtacatcggccaccgcaacggcgacttggtcggcaaaatctgcgcccaaaccggcaaaggcgtgcgcgaagtcgtactggagcgcggcctgttaagcgaagaagaaatcaaccgcatcctctcccccgagaacctgatgaatcctcatctgtaa

SEQ ID NO: 6269 - protein, 465 aa, Neisseria gonorrhoeae FA 1090
MTVRIEHDLLGDREIPAEVYWGIHTLRAIENFKISTQKISDVPQFVRSIVMVKKATAQANGELGAVKPEIAAAIEKACDEVLLNNRCLDQFPSDVYQGGAGTSVNMNTNEVIANLALEALGYEKGRYDIVNPMDHVNASQSTNDAYPTGFRLAVYYSIGELLDKLTVLKNAFAAKAEAFKDVLKMGRTQLQDAVPMTAGQEFQSFQVLLEEEILNLDRTRQLLLEVNLGATAIGTGVNTPKGYAELVVKKLSEVSGLPCKLTENLIEATSDCGAYVMVHGALKRTAVKLSKICNDLRLLSSGPRAGLKEINLPELQAGSSIMPAKVNPVIPEVVNQVCFKVIGNDTTITFAAESGQLQLNVMEPVIAQCMFETISLLGNAAVNLSDKCVKGITVNREICERYVFNSIGLVTYLNPYIGHRNGDLVGKICAQTGKGVREVVLERGLLSEEEINRILSPENLMNPHL

SEQ ID NO: 6270 - DNA, 1434 bp, Bacteroides fragilis NCTC 9343
  CDS (1)..(1434): transl_table=11
atgaaagaagaattatcgaaagcaactcgtacagagagtgatttaataggtgaacgtgaagtacccgaaaccgccttatatggcgtacaaacccttcggggaatagagaacttccgcattagcaaatatcatctttgtgagtatcccttatttatcaatgcactggccattaccaagatgggagccgctatggctaactttgaacttggactgctgaccgaagagcaggcaaatgccattcttcgtgcatgtaaagaaattctggaagggaagcatcatgaccagttcccggtagacatgatccagggtggagccggaaccaccaccaacatgaatgccaacgaggtgatagccaaccgcgcactcgagttgatgggacataaacgtggggaatatcaatattgttcgcccaatgatcatgttaaccgttcgcagtctaccaatgacgcttatccgaccgctattcatatcggtatgtattatacgcacctcaaactggtgaaacattttaaggaggtgatcgatgctttcagaagaaagggcgaagagtttgcacatgtgatcaagatggggcgcacccagctggaagatgcggtgccgatgacgctcggacagacgttcaatggttttgccagtatccttcaggatgaagtcaagaacctggactttgctgctcaggacttcctgaccgtcaatatgggagctactgccatcggaaccggaatcaccgccgagccggaatatgcaagcaaatgcatagcggctctccggaagattaccggactggatatccgtttggccgatgatctgataggagctacttccgacacttcttgtctggtaggttactcttctgctatgcgccgtatagctgtaaaaatgaataagatatgcaatgacttgcgccttttggcatccggcccgcgttgcgggttgggcgaaatcaatctgccggccatgcagcccggttcgtccattatgccgggtaaggtcaatccggttattcccgaagtgatgaatcagattgactataaagtaataggtaacgacctttgtgtagctatgagtggtgaagcggcccagatggaactgaatgcgatggaaccggtcatggcccagtgctgtttcgaatctgccgatttgctgatgaatggtttcgatacgctgcgtaccttgtgtatagacggcatcacggccaatgaggaaaaatgccggaaagatgttcacaacagtatcggtgtggtgactgcactgaatcctgttatcggatataaaaactctaccaagattgccaaagaagcacaggagaccggtaagggagtctatgaactggtgttggaacatgacattctttcaaaagaagacctcgatacgatccttaaaccggaaaatatgattcatccggtgaaactcgatattaagcccaatcattga

SEQ ID NO: 6271 - protein, 477 aa, Bacteroides fragilis NCTC 9343
MKEELSKATRTESDLIGEREVPETALYGVQTLRGIENFRISKYHLCEYPLFINALAITKMGAAMANFELGLLTEEQANAILRACKEILEGKHHDQFPVDMIQGGAGTTTNMNANEVIANRALELMGHKRGEYQYCSPNDHVNRSQSTNDAYPTAIHIGMYYTHLKLVKHFKEVIDAFRRKGEEFAHVIKMGRTQLEDAVPMTLGQTFNGFASILQDEVKNLDFAAQDFLTVNMGATAIGTGITAEPEYASKCIAALRKITGLDIRLADDLIGATSDTSCLVGYSSAMRRIAVKMNKICNDLRLLASGPRCGLGEINLPAMQPGSSIMPGKVNPVIPEVMNQIDYKVIGNDLCVAMSGEAAQMELNAMEPVMAQCCFESADLLMNGFDTLRTLCIDGITANEEKCRKDVHNSIGVVTALNPVIGYKNSTKIAKEAQETGKGVYELVLEHDILSKEDLDTILKPENMIHPVKLDIKPNH

SEQ ID NO: 6272 - DNA, 1425 bp, Pseudomonas syringae pv. syringae B728a
  CDS (1)..(1425): transl_table=11
atgtcctcgcctgcatcatcgcgcatcgaaaaagacctgcttggtgttctcgaagtacctgccaacgcttattacggcatccagaccctgcgagcggtgaacaactttcacctctccggcgtgccactttcgcactacccgaaactggtagtggcgctggccatggtcaagcaggcggcggcggatgcaaaccatcagcttggacacctcaatgctgccaagcatgcggccatcagcgaggcctgcgcgcgcctgatccgcggcgacttccatgatcagttcgtggtcgacatgatccagggcggcgctggcacgtccaccaacatgaatgccaacgaagtcatcgccaacatcgctctggaaaccatgggtttcgagaaaggcgactacaaacacctgcaccccaacaacgatgtcaacatggcgcagtcgaccaacgacgcctaccccactgcgatccgtctgggtctgctgctgggtcacgacgccctgctcgccagcctgtccagcctgattcaggcgttcgccgccaagggcgaagaattcaaccacgtgctgaagatgggccgcacccagttgcaggacgccgttccgatgactctgggtcaggaattccgcgccttcgccaccaccctgaccgaagacctcaaccgcctgcgcagcctggcccccgagctgttgaccgaagtgaacctgggcggaaccgccatcggtaccggcatcaacgccgaccccggctatcagaagctggcggtcgatcgtctggcgctcatcagcggccagcctctggtgcctgccgccgacctgatcgaagcgacctccgacatgggcgccttcgtgctgttctcgggcatgctcaagcgtactgcggtcaagctgtcgaaaatctgcaacgacctgcgtctgctgtccagcggaccgcgcaccggcatcaacgaaatcaacctgccggcacgccagccaggcagctcgatcatgcccggcaaggtcaacccggtgatcccggaagcggtcaatcaggtggctttcgaaatcatcggcaacgacctgtcgctgaccatggctgccgaaggcgggcaattgcagctcaacgtgatggagccgctgatcgcctacaagatcttcgactcgatccgcctgctgcaacgtgccatggacatgctgcgcgagcactgcatcgtcggcatcacggccaacgaacagcgctgccgcgagctggtcgagcattcgatcggtctggtcaccgccctgaacccttacatcggttacgagaactccacccgtatcgcccgcatcgcgctggaaaccggccgcggcgtgctggaactggtgcgtgaggaaggtctgctcgacgacgccatgctcgacgacatcctgcgcccggaaaacatgatcgctccgcgtctggcccccttgaaggcctga

SEQ ID NO: 6273 - protein, 474 aa, Pseudomonas syringae pv. syringae B728a
MSSPASSRIEKDLLGVLEVPANAYYGIQTLRAVNNFHLSGVPLSHYPKLVVALAMVKQAAADANHQLGHLNAAKHAAISEACARLIRGDFHDQFVVDMIQGGAGTSTNMNANEVIANIALETMGFEKGDYKHLHPNNDVNMAQSTNDAYPTAIRLGLLLGHDALLASLSSLIQAFAAKGEEFNHVLKMGRTQLQDAVPMTLGQEFRAFATTLTEDLNRLRSLAPELLTEVNLGGTAIGTGINADPGYQKLAVDRLALISGQPLVPAADLIEATSDMGAFVLFSGMLKRTAVKLSKICNDLRLLSSGPRTGINEINLPARQPGSSIMPGKVNPVIPEAVNQVAFEIIGNDLSLTMAAEGGQLQLNVMEPLIAYKIFDSIRLLQRAMDMLREHCIVGITANEQRCRELVEHSIGLVTALNPYIGYENSTRIARIALETGRGVLELVREEGLLDDAMLDDILRPENMIAPRLAPLKA

SEQ ID NO: 6274 - DNA, 1428 bp, Haemophilus influenzae 86-028NP
  CDS (1)..(1428): transl_table=11
gtgattaaaatgactcaatttagaaaagaagtagatttacttggcgaacgtgatgtgcctgcagaagcatactgggggattcatacattaagagcggtagaaaatttcaatatttctaacgtaaccatttctgacgtgcctgagtttgtacgtggtatggtaatggtaaaaaaagcaacggctttagccaatggcgaattaggtgcaattccaagtgatattgcaaaagcgattgtagcagcttgtgatgaaatccttaccactggaaaatgcttagatcaattcccatcagatgtatatcaaggtggtgcaggtacgtctgtcaatatgaatactaatgaagtggttgctaatcttgcccttgaaaaaattggtcataaaaaaggcgaatataacgtgattaatccgatggatcacgttaatgcaagccaatcaaccaacgatgcgtatcctactggtttccgtattgcagtgtataacagcatcttaaaattgatcgataaaattcaatatttacacgacggttttgataataaagcaaaagagtttgcaaatatcttaaaaatgggtcgtacccaattgcaagatgcggtgccaatgactgttggtcaagaattcaaagctttctccgtattacttgaagaagaagtgcgtaacttaaaacgtacagcaggtttattacttgaagtaaaccttggtgcgactgcaatcggtactggtttaaatacgccacaaggctatacagaattagttgtaaaacaccttgctgaagtgactggattagcttgtgtaccagcagaaaacttaattgaagcaacatctgactgtggtgcttatgtcatggttcacggtgcattaaaacgtactgcagtgaaactttctaaagtatgtaatgacttacgtttactttcttctggccctcgtgcaggtttaaaagaaattaatcttcctgaattacaagcaggttcttctattatgccagcaaaagtaaacccagttgttccagaggtggtaaaccaagtgtgctttaaagtaattggtaacgataccactgtgactttcgcatctgaagctggtcaattacaattaaacgtaatggaaccagtgattggtcaagcaatgttcgaatctatcgacatcttaaccaatgcttgtgtgaacttacgcgataaatgcgtggatggcatcactgtaaacaaagaaatttgtgaaaactacgtgtttaattcaatcggtatcgtgacttacttaaatccatttattggtcaccacaacggcgacttagtgggtaaaatctgtgcgcaaacaggtaaaggcgtacgtgaagttgtgttagaaaaaggtttattaacagaagaacaattggatgacattctttctgtagaaaacttaatgaatccaacttacaaagcgaaattaaataaataa

SEQ ID NO: 6275 - protein, 475 aa, Haemophilus influenzae 86-028NP
MIKMTQFRKEVDLLGERDVPAEAYWGIHTLRAVENFNISNVTISDVPEFVRGMVMVKKATALANGELGAIPSDIAKAIVAACDEILTTGKCLDQFPSDVYQGGAGTSVNMNTNEVVANLALEKIGHKKGEYNVINPMDHVNASQSTNDAYPTGFRIAVYNSILKLIDKIQYLHDGFDNKAKEFANILKMGRTQLQDAVPMTVGQEFKAFSVLLEEEVRNLKRTAGLLLEVNLGATAIGTGLNTPQGYTELVVKHLAEVTGLACVPAENLIEATSDCGAYVMVHGALKRTAVKLSKVCNDLRLLSSGPRAGLKEINLPELQAGSSIMPAKVNPVVPEVVNQVCFKVIGNDTTVTFASEAGQLQLNVMEPVIGQAMFESIDILTNACVNLRDKCVDGITVNKEICENYVFNSIGIVTYLNPFIGHHNGDLVGKICAQTGKGVREVVLEKGLLTEEQLDDILSVENLMNPTYKAKLNK

SEQ ID NO: 6276 - DNA, 1437 bp, Pseudomonas fluorescens Pf-5
  CDS (1)..(1437): transl_table=11
atgatctccgtcatgtcctccgctgcatctttccgcacagaaaaagacctgcttggcgtactcgaagtaccggctcaagcgtattacggcatccagaccctgcgagcggtgaacaacttccgcctctccggcgttccgatttcgcactacccaaaactggtcgtggccctggcaatggtcaagcaggcagctgctgacgccaaccgcgaactgggtcatctgagcgaagccaagcatgcagccatcagcgaggcttgtgcccgcctgatccgcggcgacttccacgaagagttcgtggtggacatgattcaaggcggcgctggcacttcgaccaacatgaatgccaacgaagtcatcgccaacatcgcgctggaggccatgggccacagcaagggcgaataccagtacctgcacccgaacaacgacgtgaacatggcgcagtccaccaacgacgcctacccgaccgcgatccgcctgggtctgctgctgggccacgacgccctgctggccagcctcgacagcctgatccagtcgttcgccgccaagggtgaagaattcagccacgtcctgaaaatgggccgtacccagctgcaagacgccgtgccgatgaccctcggccaggaattccgcgccttcgccaccaccctgggtgaagacctggctcgcctgaagaccctggcgccggaagtgctgaccgaagtcaacctgggcggcaccgccatcggcaccggcatcaacgccgacccgcgctaccaggccctggccgtacaacgcctggccaccatcagcggccagccgctggtaccggccgccgacctgatcgaagccacctccgacatgggcgccttcgtgctgttctccggcatgctcaagcgcaccgcggtcaagctgtcgaagatctgcaacgacctgcgtctgctgtccagcggcccacgcaccggcatcaacgaaatcaacctgccagcgcgtcagcccggcagctcgatcatgcctggcaaggtcaacccggtcatcccggaagcggtcaaccaagtggcgttccagatcatcggcaacgacctggccctgaccatcgcggccgaaggcggccagctgcaactgaacgtgatggagccgctgatcgccttcaagatcttcgactcgatccgcctgctgcaacgcgccatggacatgctgcgcgagcactgcatcaccggcatcaccgccaacgaaacccgttgccgtgaactggtggagcactccatcggcctggtcaccgcgctgaacccgtacatcggctatgaaaacgccacccgtatcgcccgcatcgccctggaaagtggccgtggcgtactggaactggtgcgcgaagaaggcctgctggacgacgccatgctcgacgacatcctgcgtccggaaaacatgattgccccgcgtctggttccgctgaaagcctaa

SEQ ID NO: 6277 - protein, 478 aa, Pseudomonas fluorescens Pf-5
MISVMSSAASFRTEKDLLGVLEVPAQAYYGIQTLRAVNNFRLSGVPISHYPKLVVALAMVKQAAADANRELGHLSEAKHAAISEACARLIRGDFHEEFVVDMIQGGAGTSTNMNANEVIANIALEAMGHSKGEYQYLHPNNDVNMAQSTNDAYPTAIRLGLLLGHDALLASLDSLIQSFAAKGEEFSHVLKMGRTQLQDAVPMTLGQEFRAFATTLGEDLARLKTLAPEVLTEVNLGGTAIGTGINADPRYQALAVQRLATISGQPLVPAADLIEATSDMGAFVLFSGMLKRTAVKLSKICNDLRLLSSGPRTGINEINLPARQPGSSIMPGKVNPVIPEAVNQVAFQIIGNDLALTIAAEGGQLQLNVMEPLIAFKIFDSIRLLQRAMDMLREHCITGITANETRCRELVEHSIGLVTALNPYIGYENATRIARIALESGRGVLELVREEGLLDDAMLDDILRPENMIAPRLVPLKA

SEQ ID NO: 6278 - DNA, 1458 bp, Colwellia psychrerythraea 34H
  CDS (1)..(1458): transl_table=11
atgtctaagaaacaggttactaaagctcaaactataactgcgccaaaagaacgaatagaaaaagatttactaggtgaaagaagtttgcctgttgatgtctattatggtgtacaaacattacgggcaacggaaaactttaatattacctctatttgtgtaggtgactttcccgccctagttaaagccttagctatggtaaaaaaggcctgcgctttggctaataaaaaattaaacttacttgaaaataacaaagcagaagctataacacaggcctgtgacgaagttatcagtggtaaatttgataatcaatttgtggtcgatatgatccaaggaggagctggtacttcaaccaacatgaacgccaatgaagttatagcaaatagagcattagaaattcttggccatgaaaagggctgttacgacataattagtccaaataaccatgttaatttgtcacaatctaccaatgatgtttatccaacagccttacgtttggcattaattatgtcgacacctgagctttacgagtctatagctttattgggttatcagtgcaagcaaaaagccgtagaattttccagtgtgattaaaatgggtcgaacgcaattacaagatgccgtacctatgactttgggccaagagtttgaagcatactacgccacactgaaagaagatttggatatgttaaaggcggttactgataactttagagaaatcaatttaggcgctacagcgataggtacaggaattaatactgaccctgaatattcaagcttagttattgaagagttatgctggattgccgacatacatttcattagagcaaccaacttaattgaagccacaagtgatatgggggcatttattaccctatcaagtatgctaaaaagaactgccataaaagtttcaaaaatgtgtaatgatctacgtttaatgagcagcggtcctagagctggcttgaatgagattaacctgccagctatgcaaccaggctcatcaatcatgccaggcaaggtaaaccctgttatccctgaagtagtaaatcaagtcgcttatgaagttataggcaatgacttggctataactatggcagcagaagccggtcaactgcagttaaacgttatggagcctgtaattgcttttaatctattaagatccatcaaattcttaaccaacgcttttaatgctcttgccactcgctgtatttcaggtatcactgctaacgaagagcattgtaaatcaatggtttataacagtattggtattgttaccgctatcaatccttatttgggttatgaagtatcgacccgtattgcaaaagaggcattagcaacaggggagaatattatcaatttgattaaacgagatggtttattaactgagaagcaacttgctgatattcttaaccctgaaaatatgactcagcctagacgacaattttcttccgataaaaaatag

SEQ ID NO: 6279 - protein, 485 aa, Colwellia psychrerythraea 34H
MSKKQVTKAQTITAPKERIEKDLLGERSLPVDVYYGVQTLRATENFNITSICVGDFPALVKALAMVKKACALANKKLNLLENNKAEAITQACDEVISGKFDNQFVVDMIQGGAGTSTNMNANEVIANRALEILGHEKGCYDIISPNNHVNLSQSTNDVYPTALRLALIMSTPELYESIALLGYQCKQKAVEFSSVIKMGRTQLQDAVPMTLGQEFEAYYATLKEDLDMLKAVTDNFREINLGATAIGTGINTDPEYSSLVIEELCWIADIHFIRATNLIEATSDMGAFITLSSMLKRTAIKVSKMCNDLRLMSSGPRAGLNEINLPAMQPGSSIMPGKVNPVIPEVVNQVAYEVIGNDLAITMAAEAGQLQLNVMEPVIAFNLLRSIKFLTNAFNALATRCISGITANEEHCKSMVYNSIGIVTAINPYLGYEVSTRIAKEALATGENIINLIKRDGLLTEKQLADILNPENMTQPRRQFSSDKK

SEQ ID NO: 6280 - DNA, 1425 bp, Pseudomonas syringae pv. phaseolicola 1448A
  CDS (1)..(1425): transl_table=11
atgtcctcgcctgcatcatcgcgcatcgaaaaagacctgcttggtgttctcgaagtacctgccaacgcttactacggcatccagaccctgcgagcggtgaacaactttcacctctccggcgtgccgctttcgcactacccgaaactggtagtcgcgctggccatggtcaagcaggcggcagcagatgcaaaccatcagctcggacacctcaatgacgccaagcatgcggcgatcagcgaggcctgcgcccgcctgatccgtggcgacttccacgatcagtttgtggtggacatgattcagggcggcgccggcacgtccaccaacatgaatgccaacgaagtcatcgccaacatcgctctggaaaccatgggtttcgagaaaggcgaatacaaacacctgcaccccaacaacgatgtcaacatggcgcagtcgaccaacgacgcctaccccaccgcgatccgtctgggtctgctgctgggtcacgacgccctgctcgccagcctgtccagcctgattcaggccttcgccgccaagggcgaagaattcaaccatgtgctgaagatgggccgcacccagttgcaggacgccgttccaatgaccctgggtcaggaattccgcgcctttgccaccaccctgaccgaagacctcaaccgcctgcgcagcctggcacccgagctgttgaccgaagtgaacctgggcggaaccgccatcggtaccggcatcaacgccgaccccggctatcagaagctggcggtcgatcgtctggcgctcatcagcggtcagccgctggtgccggcagccgatctgatcgaagcgacctccgacatgggcgcgttcgtactgttctcgggcatgctcaagcgtactgcggtcaagctgtcgaagatctgcaacgacctgcgcctgctgtccagcggcccgcgcaccgggatcaacgaaatcaacctgccggcacgccagcccggcagctcgatcatgcccggcaaggtcaacccggtaatcccggaagcggtcaatcaggttgctttcgaaatcatcggcaacgacctgtcgctgaccatggccgctgaaggcggacaattgcagctcaacgtgatggagccactgatcgcttacaagatcttcgactctatccgcctgttgcagcgcgccatggacatgctgcgcgaacactgcattgtgggcatcacggccaacgaacagcgctgccgcgagctggtcgagcattcgatcggcctggtgaccgcactgaacccctacatcggttacgaaaactccacccgtatcgcccgcatcgcgctggaaaccggccgcggcgtgctggaactggtgcgtgaggaaggtctgctcgacgatgccatgctcgacgacatcctgcgcccggaaaacatgatcgctccgcgtctggcccccttgaaggcctga

SEQ ID NO: 6281 - protein, 474 aa, Pseudomonas syringae pv. phaseolicola 1448A
MSSPASSRIEKDLLGVLEVPANAYYGIQTLRAVNNFHLSGVPLSHYPKLVVALAMVKQAAADANHQLGHLNDAKHAAISEACARLIRGDFHDQFVVDMIQGGAGTSTNMNANEVIANIALETMGFEKGEYKHLHPNNDVNMAQSTNDAYPTAIRLGLLLGHDALLASLSSLIQAFAAKGEEFNHVLKMGRTQLQDAVPMTLGQEFRAFATTLTEDLNRLRSLAPELLTEVNLGGTAIGTGINADPGYQKLAVDRLALISGQPLVPAADLIEATSDMGAFVLFSGMLKRTAVKLSKICNDLRLLSSGPRTGINEINLPARQPGSSIMPGKVNPVIPEAVNQVAFEIIGNDLSLTMAAEGGQLQLNVMEPLIAYKIFDSIRLLQRAMDMLREHCIVGITANEQRCRELVEHSIGLVTALNPYIGYENSTRIARIALETGRGVLELVREEGLLDDAMLDDILRPENMIAPRLAPLKA

SEQ ID NO: 6282 - DNA, 1425 bp, Dechloromonas aromatica RCB
  CDS (1)..(1425): transl_table=11
atgaccaccactcccttccgcctcgagcatgacctgcttggtgaccgcgaggttccgaccgccgcctactacggggtacacaccctgcgagcccttgagaatttcccgatcaccggcatctcgatcgccgtctatcccgacctgatccgcgccctggcccagatcaagaaggccgccgcccaggccaaccagcaactcggcctgctcgatgcccggcgcgccggcgccatcgccgaagcctgcggcgagatcatcgacggccagtggcacaaccagttcgtcgtcgatgtcattcagggcggcgccggcacctcgaccaacatgaatgccaacgaggtgatcgccaaccgtgcgctggaactgctcggcaagacgcgcggcgactacaagacgctgcacccgaacgaacacgtcaacatgagccagtcgaccaacgacgtctatccgacggcgctgaagctggccacctatgtcggcatcttccgcctggtcgaggccatggcttatctgcgcaaagctttcgagcgcaaggccgacgagttcgccgacgtgctgaagatgggccgtacccagttgcaggacgccgtgccgatgaccctcggccaggagttctcgacctacgccgtgatgttgggcgaggacgaagaacgcctgaaggaagccgcactgctcatccgcgaaatgaatctcggtgccaccgccattggcaccggcatcaacgcccacccggactacgccccgctggtctgccgcaagctggccgaaatcagcggcatcccggtcgtcaccgcgcccaacctgatcgaggcgacgcaggattgcggcagcttcgtgcaactgtccggcgtcctgaagcgcgtcgccgtcaagctatccaaggtctgcaacgacctgcgcctgctctcttccggcccgcgtgccggcttcaacgagatcaatctgccgccgcgccaggccggttcgtcgatcatgccgggcaaggtcaatccggtgatcccggaagtggtcaaccagatcgccttcgaagtgatcggcaacgacaccaccgtcactttcgccgccgaagccggccagctgcagctcaatgccttcgagccgatcatcgcccacagcctgttcaagagcgccctgcacctgaccaacggctgccgcgtgctggccgaccattgcgtcaatggcatcaccgccaaccgcgatcagctgcgcgaatcggtcgagcgctcgatcggcatcgtcaccgccctcaacccgtacattggttacgccaacgccaccgaagtcgctgccgaagccttccgtagcgggcgcggcgtggccgaggtggtcatcgaacgcggtctgatgagcccggaacagctggccgaagtgctgcgtcccgaggtgctgacccgcccacaagtcatccccctgcctgtcgccgcctga

SEQ ID NO: 6283 - protein, 474 aa, Dechloromonas aromatica RCB
MTTTPFRLEHDLLGDREVPTAAYYGVHTLRALENFPITGISIAVYPDLIRALAQIKKAAAQANQQLGLLDARRAGAIAEACGEIIDGQWHNQFVVDVIQGGAGTSTNMNANEVIANRALELLGKTRGDYKTLHPNEHVNMSQSTNDVYPTALKLATYVGIFRLVEAMAYLRKAFERKADEFADVLKMGRTQLQDAVPMTLGQEFSTYAVMLGEDEERLKEAALLIREMNLGATAIGTGINAHPDYAPLVCRKLAEISGIPVVTAPNLIEATQDCGSFVQLSGVLKRVAVKLSKVCNDLRLLSSGPRAGFNEINLPPRQAGSSIMPGKVNPVIPEVVNQIAFEVIGNDTTVTFAAEAGQLQLNAFEPIIAHSLFKSALHLTNGCRVLADHCVNGITANRDQLRESVERSIGIVTALNPYIGYANATEVAAEAFRSGRGVAEVVIERGLMSPEQLAEVLRPEVLTRPQVIPLPVAA

SEQ ID NO: 6284 - DNA, 1428 bp, Ralstonia eutropha JMP134
  CDS (1)..(1428): transl_table=11
atgactgccggacccttcagaaccgaacatgacctgctgggcgaccgggaagtcccggcccaggcttactacggtgtccacaccctgcgcgccgtcgagaacttcccgatcacgggcacgccaatttccatctacccggaactgatcaaggcgctggccgcgatcaagcaagccgcggcgcaagcgaaccatgagcttgagctgctagaccaggcacgctgcgacgcgatcgtcgctgcctgtcaggaactgatggccggaaagctgcacgatcagttcgtggtcgacgtgatccagggcggcgctggcacctcgacaaacatgaacgccaatgaggtcatcgccaatcgcgcgctcgagcttctcgggcatcagaagggcgagtaccagcacctgcatccgaacgaacacgtcaatatcggccagagcaccaacgatgtctatccgaccgcgttgaaggtcgcgacatggttcggcatccgtgggcttgtggaggccatggcggtactgcgccaggcgttcgaggcgaaggccgaggagttcgcccacatcatcaagatgggccgcacgcaattgcaggatgcggtgccgatgacgctcggccaggaattcagcacctatgccgtgatgctcggcgaagacgaggcgcgcttgcgtgaagccgcgatgctgatctgcgagatcaacctcggcgccaccgccattggcaccggcattaccgcgcacccatcctatgcgccggtggtgctgcggcggctgcgcgacatcactggcattccgcttgagacagcgccaaacctgatcgaagctacgcaggattgcggcgccttcgtgcaactgtccggcgtgctaaaacgcgttgcggtgaagctttcaaagacctgcaacgacctgcggctgttgtcgagcggcccgcgtgcggggctgtgcgaaatcaacctgccgccgatgcaggccggctccagcatcatgcccggcaaggtgaatccggtgatccccgaagtcgtgaaccagattgccttcgaggtcatcggcaacgacgtgacggtcagcttcgcagccgaagccggccagctgcagctcaatgcgttcgagccgatcattgcccacagcctgttcaagagcgtcagccatctgcgcaacggttgcctgacgctcgccgagcgttgcgtcaagggcatcacggcaaatgcagatcggctgcgggctaccgtcgagaactcgatcgggatcgtcacggcgctcaacccttacatcggctatgcgaacgcaacagccgtcgcgcaggaagcccacgccaccggcggcagcgtctatgagatcgtgctgcgcaagggcctgttgtcgaaagaggagcttgaccacatcctgcggcccgagacgctgacacagcccgtgccgctcgatctgcatgggaagtcgcactga

SEQ ID NO: 6285 - protein, 475 aa, Ralstonia eutropha JMP134
MTAGPFRTEHDLLGDREVPAQAYYGVHTLRAVENFPITGTPISIYPELIKALAAIKQAAAQANHELELLDQARCDAIVAACQELMAGKLHDQFVVDVIQGGAGTSTNMNANEVIANRALELLGHQKGEYQHLHPNEHVNIGQSTNDVYPTALKVATWFGIRGLVEAMAVLRQAFEAKAEEFAHIIKMGRTQLQDAVPMTLGQEFSTYAVMLGEDEARLREAAMLICEINLGATAIGTGITAHPSYAPVVLRRLRDITGIPLETAPNLIEATQDCGAFVQLSGVLKRVAVKLSKTCNDLRLLSSGPRAGLCEINLPPMQAGSSIMPGKVNPVIPEVVNQIAFEVIGNDVTVSFAAEAGQLQLNAFEPIIAHSLFKSVSHLRNGCLTLAERCVKGITANADRLRATVENSIGIVTALNPYIGYANATAVAQEAHATGGSVYEIVLRKGLLSKEELDHILRPETLTQPVPLDLHGKSH

SEQ ID NO: 6286 - DNA, 1437 bp, Pseudomonas fluorescens PfO-1
  CDS (1)..(1437): transl_table=11
atgatttctatcatgtcctccgctgcatcattccgcacagaaaacgacctgcttggcaccctcgaagtccctgctcaagcgtattacggcatccagaccctgcgagcggtgaacaacttccgtctctccggcgttccgatttcgcactacccgaagctggttgtcggtctggcgatggtcaaacaggctgccgctgacgccaaccgcgagctgggtcacctgagcgaagccaagcacgctgccatcagcgaagcctgtgcccgtctgatccgcggcgatttccacgaagagttcgtggtcgacatgattcaaggtggcgccggtacctccaccaacatgaacgccaacgaagtgatcgccaacatcgcgctggaagcgatgggtcaccagaaaggcgaataccagtacctgcacccgaacgacgacgtgaacatggcgcagtcgaccaacgacgcctatccgaccgcgatccgtctgggtctgctgctgggtcacgacgcgctgctggccagcctcgacagcctgattcaggcgttcgcggccaagggtgaagaattcaatcacgtcctgaagatgggccgtacccaactgcaagacgccgtaccgatgaccctgggtcaggaattccgtgctttcgccaccaccatgggcgaagacctggcccgtctgaagacgctggccccggaactgctgactgaagtgaacctgggcggcaccgcgatcggtaccggcatcaacgctgacccgcgttaccaggccctggccgtacagcgtctggcgctgatcagcggtcaaccgctggttccagccgccgacctgatcgaagccacctccgacatgggcgcctttgtactgttctctggcatgctcaagcgcaccgcggtcaaactgtcgaagatctgcaacgacctgcgcctgctgtccagcggcccgcgcaccggcatcaacgaaatcaacctgccggcgcgtcagccaggcagctcgatcatgccaggcaaggtcaacccggtaatcccggaagccgtgaaccaggtggcattccaagtcatcggtaacgatctggcgctgaccatggcagccgaaggcggccaactgcagctgaacgtgatggagccgctgatcgccttcaagatcctcgactcgatccgcctgctgcaacgcgccatggacatgctgcgcgagcactgcatcgtcggcatcaccgccaacgaagcgcgctgccgcgaactggtcgaacactcgatcggcctggtcaccgcactgaacccgtacatcggctacaaaaacgccacccgcatcgcccgtatcgcccttgaaagcggccgcggcgtactggaactggtgcgcgaagaaggtctgctcgacgaagccatgctcgccgacatcctgcgcccggaaaacatgattgctccgcgtctggtgcctctgaaggcctga

SEQ ID NO: 6287 - protein, 478 aa, Pseudomonas fluorescens PfO-1
MISIMSSAASFRTENDLLGTLEVPAQAYYGIQTLRAVNNFRLSGVPISHYPKLVVGLAMVKQAAADANRELGHLSEAKHAAISEACARLIRGDFHEEFVVDMIQGGAGTSTNMNANEVIANIALEAMGHQKGEYQYLHPNDDVNMAQSTNDAYPTAIRLGLLLGHDALLASLDSLIQAFAAKGEEFNHVLKMGRTQLQDAVPMTLGQEFRAFATTMGEDLARLKTLAPELLTEVNLGGTAIGTGINADPRYQALAVQRLALISGQPLVPAADLIEATSDMGAFVLFSGMLKRTAVKLSKICNDLRLLSSGPRTGINEINLPARQPGSSIMPGKVNPVIPEAVNQVAFQVIGNDLALTMAAEGGQLQLNVMEPLIAFKILDSIRLLQRAMDMLREHCIVGITANEARCRELVEHSIGLVTALNPYIGYKNATRIARIALESGRGVLELVREEGLLDEAMLADILRPENMIAPRLVPLKA

SEQ ID NO: 6288 - DNA, 1407 bp, Burkholderia sp. 383
  CDS (1)..(1407): transl_table=11
atgacagaaaacggcttccgcgtcgaagcggatcttttaggtaaacgaagtattccggacgacgcgtactacggcgtccatacgctgcgcgcgaaggagaatttcgacatttcgggccgcaccattgcgtcgctgccgtacctcgtgatggcgctcgccgcggtgaaggaggccgcagccgacgccaactgcgagctcgggctgctgccgcagccgtgccgcgatgcgatcgccgccgcgtgcgtcgagatccgcgaagggcgcctgcacgaccagttcgtcgtcgacatcatccagggcggcgccggcacgtcgaccaacatgaacgcgaacgaggtgatctgcaaccgcgcgctcgaaatcatggggcacgcgcgcgggcagtacgaatacctgcatccgaacgagcacgtgaaccttgcgcagagcaccaacgacgtctatccgaccgcgatccgcgtcgcgacctgcttcgcggtcgagcacctgctcgaagcgatggcgcgcctgcgcgatgcgttcgccgagcgggccgacgcgttcgccggcttgctgaagctcggccgcacgcagctgcaggacgcggtgccgatgacgctcggccaggagttctcgacctacgcggtgatgctgacggaagacatcgcgcgcctgcaggaagccggctggctgattcgcgagatcaacctcggcgcgaccgcgatcggcacggggatcaccgcgcatccgcagtacgcggagaaggcgctggcggcgctgcggcgcatcaccgggctcgacctgagcaccgcgccgaacctgatcgaagcaacgcaggattgcggcgcgttcgtccaggtgtcgggtgtgctcaagcggatcgccgtgaagctgtcgaagatctgcaacgacctgcggctgctgtcgagcggcccgcgcgcggggttcggcgaaatcaacctgccgcccgtgcaggccggctcgtcgatcatgcccggcaaggtgaatccggtgatcccggaagtcgtcaaccaggtcgcgttcgaggtgttcggcaacgacctgaccgtgaccttcgccgccgaggccgggcagcttcagttgaacgcgttcgagccggtgatcgccagcgcgctgttccgcagcttcagccacctgacggccgcctgcacgacgctcgcgcagcggtgcgtgagcgggatcaccgcgaacccggagcggctgcgcgaaacgatggagcgctcggtcgcgctcgcgaccgcgctgaacccgtacatcggttacaagcgcgcgaccgccgtggcggccgaagcgcatgcgaccggcaagtcgatccgcgaggtcgtgctggagcgcgagtggatgaccgatgcgcaggtcgaagaagcgctgcagcccgaagcactgatccggccgcgcgtgctttga

SEQ ID NO: 6289 - protein, 468 aa, Burkholderia sp. 383
MTENGFRVEADLLGKRSIPDDAYYGVHTLRAKENFDISGRTIASLPYLVMALAAVKEAAADANCELGLLPQPCRDAIAAACVEIREGRLHDQFVVDIIQGGAGTSTNMNANEVICNRALEIMGHARGQYEYLHPNEHVNLAQSTNDVYPTAIRVATCFAVEHLLEAMARLRDAFAERADAFAGLLKLGRTQLQDAVPMTLGQEFSTYAVMLTEDIARLQEAGWLIREINLGATAIGTGITAHPQYAEKALAALRRITGLDLSTAPNLIEATQDCGAFVQVSGVLKRIAVKLSKICNDLRLLSSGPRAGFGEINLPPVQAGSSIMPGKVNPVIPEVVNQVAFEVFGNDLTVTFAAEAGQLQLNAFEPVIASALFRSFSHLTAACTTLAQRCVSGITANPERLRETMERSVALATALNPYIGYKRATAVAAEAHATGKSIREVVLEREWMTDAQVEEALQPEALIRPRVL

SEQ ID NO: 6290 - DNA, 1425 bp, Desulfovibrio desulfuricans G20
  CDS (1)..(1425): transl_table=11
atgacctaccgtacggaacatgacagtcttggcgaacgcaaggttcccgcacaggcttactacggcattcagacactgagggctctggagaattttgaaatcacaactattcctgtttcgcattacagcaggttcatacaggcgctggctgtggttaaaaaagctgcggccatggccaatatggagttgggagaactcgattccgccgtcggcgaagctattatccatgcctgcaaagacgtgcggcagggcaagctggatgaccagtttgtagtggatgtcattcagggcggggcgggaacgtcggtaaacatgaacgccaatgaagtgatctgcaacagggctcttgagctgagcgggcatgaaaaagggaggtatgacattatccatccgctcaatcatgtgaatctttcgcagtccaccaatgatgtttaccccacggctttgcgcatagcgcttgtgtggtacagccgcgaactgctgcacgggctgcgcgaactgcgcgacgctttgagccgcaaaggtgcagaattcggcaatgtcattaaaatggcccgcacacagctgcaggatgccgttcccatcacgctcggagccgagtttgcggcatatgctgttaccgtcaatgaagacattgaccgtctggaagaggtgatgcgcctgctttgcgaagtcaatctgggggctacggcagtgggaacaggcatcaattccgttccgggctacggagcccgcgcctgcgccattctggctgatgtgacaggcctgcccatatctcagtcggcgaatctggtagaagcaaccagcgatgccggcgcatatgtgactctttcaggactgctgaaacgcaccagtgtgaaactttcaaagatatgtaatgatctcagattgatgtcttcagggccgtttaccggcctgcacgaaatcaatctgccgccggtgcagcccggatcatccataatgccgggcaaggtcaaccctgtcattcctgaagtggtcacccagatatgctaccagattatcggcaatgacatgacagtgaccatggctgcggaggcagggcagcttgagcttaatgttttcggacccattatcgcatttaatctgtttcagtcactggaaattctgaccagaggtgtgcacaccctgagaaagcggtgcatcgagggcataaccgctaatgatgagcgttgtcttgaattgctcaaaggttctctgggggtggtgacggctttagctcccgccataggatatgaggcggctgcaaaagtggtcaaacaggcacaggaaacgcgcaagcctgtgggacaggtgcttgacgagcaggggcttatgaccgccgaagagtataacgagctgctggatccgagcaagatgcttgctccgagaaagttgccgaaccgtaaagcggcagaggataaatga

SEQ ID NO: 6291 - protein, 474 aa, Desulfovibrio desulfuricans G20
MTYRTEHDSLGERKVPAQAYYGIQTLRALENFEITTIPVSHYSRFIQALAVVKKAAAMANMELGELDSAVGEAIIHACKDVRQGKLDDQFVVDVIQGGAGTSVNMNANEVICNRALELSGHEKGRYDIIHPLNHVNLSQSTNDVYPTALRIALVWYSRELLHGLRELRDALSRKGAEFGNVIKMARTQLQDAVPITLGAEFAAYAVTVNEDIDRLEEVMRLLCEVNLGATAVGTGINSVPGYGARACAILADVTGLPISQSANLVEATSDAGAYVTLSGLLKRTSVKLSKICNDLRLMSSGPFTGLHEINLPPVQPGSSIMPGKVNPVIPEVVTQICYQIIGNDMTVTMAAEAGQLELNVFGPIIAFNLFQSLEILTRGVHTLRKRCIEGITANDERCLELLKGSLGVVTALAPAIGYEAAAKVVKQAQETRKPVGQVLDEQGLMTAEEYNELLDPSKMLAPRKLPNRKAAEDK

SEQ ID NO: 6292 - DNA, 1464 bp, Rhodococcus sp. RHA1
  CDS (1)..(1464): transl_table=11
ttgagcgacagcgatgtgcggatcgagcacgattcgatcggagatctggcggtaccggcgggggcgtactacggcgtccacaccgccagggcgatggacaatttcgcgatcaccgggtctgccatcggtcagtacccggcactggtcgcggcgttggcgaccgtgaaacaggctgcctgcctggcgaaccgggacctgggtctcctcgacgaccggcgggccgtagcgatcgtggccgcgtgcacggaaattcgcgccggggcactgctcgaccagtttccgatcgatccgatccagggcggagcgggcacttcgtcgaacatgaacgtcaacgaggtcatcgcgaaccgcgcactcgagatcctcgggttcgggcgcggcgcctacaccgaactcgaccctctcgctcacgtgaacctggggcagtccaccaacgatgtgtacccgaccgcgatcaagctcgcgctggtcgagcacctccgaatgttgatcgcgtcgctcggtcggctcgcggagtcgttcgagcgcaagtcgatcgaattcgacgacatcgtcaagatgggtcgcacccagctgcaggacgcggtaccgatgaccctcgggcaggagttcgccgcctactcgatcatgctgaacgaggactgcgcccggctctccgagggagcgcttctgctgctggaatcgaacctcggcggcaccgccatcggcacggggatcaacggacatcccgagtactccgcgctcgcctgcgactacttgcgcgagctgaccggtgaaccggtcgtcccggccggcaatctgatcgaggcaacccaggactgcggagcattcgtgcaggtctccggaatcctcaaacgtgtcgccgtgaaactgtccaagacgtgcaacgatctgcggctcacctcctccgggccgaccgccgggctcggtgagatcaatctgcctccggcccaagccggttcgtcgatcatgcccggcaaggtcaacccggtcatccccgaaatggtgaaccaggtcgcgttcgaggtgatcggcaacgatctgacggtcacgatggccgccgagggtgggcaactccagctcaacgcgttcgaacccgtgatcgtctacagcctgctgcgctcgacgacgcacctggccgcggcatcggacaccctggcggtgaagtgcgtcgacgggatcaccgccaaccgcgaccatctcgagcggggtgttcggcgctcgatcggcatcgtcaccgcgctctcgccgttcatcggctatgcggccagcgcggatatcgccaagagggccctggcgaccggcgcttacgtcggcgacctcgccgtcgacgacggtctgctcactcgcgcgcaggtcgatgacatcctgtccccccggcgactcgccggtctgctcaccgcgcccaccgtggacagcgaattctccgcactcgaccatctcaccggtgtcgccgcgcactga

SEQ ID NO: 6293 - protein, 487 aa, Rhodococcus sp. RHA1
MSDSDVRIEHDSIGDLAVPAGAYYGVHTARAMDNFAITGSAIGQYPALVAALATVKQAACLANRDLGLLDDRRAVAIVAACTEIRAGALLDQFPIDPIQGGAGTSSNMNVNEVIANRALEILGFGRGAYTELDPLAHVNLGQSTNDVYPTAIKLALVEHLRMLIASLGRLAESFERKSIEFDDIVKMGRTQLQDAVPMTLGQEFAAYSIMLNEDCARLSEGALLLLESNLGGTAIGTGINGHPEYSALACDYLRELTGEPVVPAGNLIEATQDCGAFVQVSGILKRVAVKLSKTCNDLRLTSSGPTAGLGEINLPPAQAGSSIMPGKVNPVIPEMVNQVAFEVIGNDLTVTMAAEGGQLQLNAFEPVIVYSLLRSTTHLAAASDTLAVKCVDGITANRDHLERGVRRSIGIVTALSPFIGYAASADIAKRALATGAYVGDLAVDDGLLTRAQVDDILSPRRLAGLLTAPTVDSEFSALDHLTGVAAH

SEQ ID NO: 6294 - DNA, 1449 bp, Rhodococcus sp. RHA1
  CDS (1)..(1449): transl_table=11
gtgctcgaaacgcgaacagaacacgatctgctcggcgaccgccaagtgcctgcggattcctactggggaatccacacgctgcgggccgtggagaacttccccatcaccggccggccgatctccaccaacccgtatctgatccgcgggctcgcctacgtcaaatgggccgcggcaaccgccaacgagaaactcgggatcctcgaccaccgccgggccgacgccatcgggcaggcgtgccgggagatcgtcgacggccgctggcacgagcagttcgtcgtcgacgtcatccagggcggcgccgggacgtcgacgaacatgaacgccaacgaggtgatcgccaaccgggcactcgagatcctcggacacgggcgcggggagtacgcggagctccatcccaacgagcacgtgaacctcagccagtcgaccaacgacgtctaccccaccgcggtcaacatcgcgacgatcttcgcgatcgacgacctgctggacgcgatgcgcgtcctgcaggaggccttcgcgaccaaggcggtcgagttcaccgacaccgtgaagatggggcgcacccaactccaggacgcggtgccgatgacactcggccaggaattcgccacctactcggtgatgatcgacgaggaccgcacccgcctcgacgaggccgctctcctcgtccacgagatcaacctcggcgccaccgcgatcggcacgggcctgaacgcacccgccggctacgccgaggcagcctgcgacacgctgcgggaactcaccggattccccctcgtcctggccacagacctggtcgaggcaacccaggacgtcggtcagttcgtccacctctcgggcgtgctcaagcggatcgcggtcaagttgtcgaaggtgtgcaacgacctccgcctgctgtcgtcggggccgcgcgcgggcctgaacgagatcaatctcccaccggtacaggccggttcgtcgatcatgcccggcaaggtcaatccggtgatcccggaagtcctcaaccaggtggcctacgaggtcatcggcaacgacgtcaccatcacgatggccgccgaatccgggcagctccagctcaatgcgttcgagccgatcatcgtgcactccctgtccgaggggatgcgccacctcggcgccgcctgccggatcctggcggaccgctgcgtactcggcatcacggccaacaccgatctgctgcgtgcccgggtcgaggactccatcggactcgtcaccgcgctcaacccgtacatcggctacaccgcctcgactcggatcgcgcaggaagcgctggtctccggccgcagggtcgccgacctcgtgatcgaggcgggtctgctcgaccgcgaggaactcgaccgcctcctcagccccgagcacctcgccaacttgagagcgtccggttcgccacggcagacacccgtcgccgctgccgcggaggtggtctcgtga

SEQ ID NO: 6295 - protein, 482 aa, Rhodococcus sp. RHA1
MLETRTEHDLLGDRQVPADSYWGIHTLRAVENFPITGRPISTNPYLIRGLAYVKWAAATANEKLGILDHRRADAIGQACREIVDGRWHEQFVVDVIQGGAGTSTNMNANEVIANRALEILGHGRGEYAELHPNEHVNLSQSTNDVYPTAVNIATIFAIDDLLDAMRVLQEAFATKAVEFTDTVKMGRTQLQDAVPMTLGQEFATYSVMIDEDRTRLDEAALLVHEINLGATAIGTGLNAPAGYAEAACDTLRELTGFPLVLATDLVEATQDVGQFVHLSGVLKRIAVKLSKVCNDLRLLSSGPRAGLNEINLPPVQAGSSIMPGKVNPVIPEVLNQVAYEVIGNDVTITMAAESGQLQLNAFEPIIVHSLSEGMRHLGAACRILADRCVLGITANTDLLRARVEDSIGLVTALNPYIGYTASTRIAQEALVSGRRVADLVIEAGLLDREELDRLLSPEHLANLRASGSPRQTPVAAAAEVVS

SEQ ID NO: 6296 - DNA, 1395 bp, Rhodococcus sp. RHA1
  CDS (1)..(1395): transl_table=11
atgacccgcaccgaacacgacctcctcggcgaccgcgaggtccccgaggacgcctactacggcatccacactttgcgggcgacggagaacttcccgatcaccggcattccgctggccagccatcccgacctcgtgtcggcgctggcgtccgtcaagcaggctgcggcgcagaccaacgcgggcctcggcctgttgccgcggcgcgaggcggacgccatcgtggcggcctgcgaggagatccgggccggcgccctgcgcgaccagttcgtcgtggacgtcatccagggcggtgcaggcacgtcgacgaacatgaacgcgaacgaggtggtggccaaccgggctctggaattgctcggtcaccggcgcagtcgctacgagtatctccatccgctcgagcacgtgaacatgagccagagcacgaacgacgtctaccccaccgcgatcaaggccggcctgcaaaccgccctgaccaggctgcgggcggccatgcgggacttggcggcggagttcgcggtgaagtcgacggagttctccgacgtcctcaaggtcggccgcacccagttgcaggatgcggttccgatgaccctgggccaggagatcgcgacgttcgctctcatgatcgacgaggattcccagcggctcggggaggcggcgacgctcatctccgagatcaatctgggcggaacggcgatcgggaccggtctcaacgcgcaccacgagtacgcgtggcgggtgcgcgaacatcttgccgcgatcaccgggatcgaggtgacgacggcgtccgacctgatcgaagccacgcaggacgtcggggcgttcgtccagctgtccggggtgctcaaacgtaccgcggtgaagctgtccaagatctgcaacgaccttcggctcctgtcgtcgggcccgcgtgccggtttcggtgagatcacgttgccgcccgtgcaggcaggatcgtcgatcatgccgggcaaggtgaacccggtgatcccggaggtggtgaaccagatcgccttccgggtggtcggtaacgacctgacggtgacgatggcggccgagggtgggcagcttcagctcaatgccttcgagccggtgatcgcgcacagcctgttcgagacgatcgaactgctcactcgtggatgcaccgtcctgcgtgaacgctgcgtggtcggtatcggcgcgaacatcgaccatctgaagaacatggtggacgcgtccatcggcgtggtcacggccctcaacccgcacatcgggtacaccgcggccaccgcgatcgccgccgacgcactcgcgaccgggcgcaccgtcgccgcgctcgtgctcgagcggggtctgctcagccgcgagcaactcgacgacgtgctgcggccggagaacctcactcgaccgctcgtgccctga

SEQ ID NO: 6297 - protein, 464 aa, Rhodococcus sp. RHA1
MTRTEHDLLGDREVPEDAYYGIHTLRATENFPITGIPLASHPDLVSALASVKQAAAQTNAGLGLLPRREADAIVAACEEIRAGALRDQFVVDVIQGGAGTSTNMNANEVVANRALELLGHRRSRYEYLHPLEHVNMSQSTNDVYPTAIKAGLQTALTRLRAAMRDLAAEFAVKSTEFSDVLKVGRTQLQDAVPMTLGQEIATFALMIDEDSQRLGEAATLISEINLGGTAIGTGLNAHHEYAWRVREHLAAITGIEVTTASDLIEATQDVGAFVQLSGVLKRTAVKLSKICNDLRLLSSGPRAGFGEITLPPVQAGSSIMPGKVNPVIPEVVNQIAFRVVGNDLTVTMAAEGGQLQLNAFEPVIAHSLFETIELLTRGCTVLRERCVVGIGANIDHLKNMVDASIGVVTALNPHIGYTAATAIAADALATGRTVAALVLERGLLSREQLDDVLRPENLTRPLVP

SEQ ID NO: 6298 - DNA, 1416 bp, Haemophilus somnus 2336
  CDS (1)..(1416)
atgataacgagaaaagaaattgatttgcttggtgaacgtgacgttccagctgatgcgtattggggcattcatacattaagagcggtagaaaattttaacatttctaatgtaacgatttctgatgtacctgaatttgtacgtggtatggtcatggtaaaaaaagcaaccgcacttgcaaatggagaattgggtgcaattccggataaaattgctcaggcgattgtgaaagcttgtgatgcgattttaattgatggtaaatgtatggatcaatttccttcagatgtatatcaaggtggtgctggtacttccgtaaatatgaataccaacgaagtggtcgctaatttagcattagaaattttaggtcataagaaaggggaatatgatattttagatccgatggatcatgttaatgccagccaatctacaaatgatgcttatccgacaggtttccgcattgctgtttataacagtattatgaaactggtaactaaagtactttatttacaacaaggttttgaaaataaagcaaaagagttttcgaatatcttaaaaatgggacgtactcaattacaagatgcagttcctatgactgtggggcaagaatttaaagcattttctgtattattagatgaagaagtgcgtaatttaacccgcacggctgaattactgttagaagtaaatttgggtgcaacagctatcggtaccggcttaaatactcctcaaggttattcagaattagttgttaagcgtttatctgaggtttcaggtttaccttgtacagttgcaccaaacttaattgaagccacttcagactgtggtgcttatgttatggtacacggtgcgttaaaacgtactgcggtaaaattatctaaagtatgcaatgatttacgtttactttcatcaggtccacgtgcaggtttaaatgaaattaatttacctgagttacaggctggatcttcaattatgccggcaaaagtcaacccggttgtacctgaggtagtcaaccaagtttgtttcaaagtgattggtaatgatactaccgtaacttttgcagctgaagcggggcaattgcagttaaatgtgatggaaccggtaattggtcaagccatgtttgaaagtattgaaattttaacgaatgcttgcgtgaatttacgtgataaatgtattgatggaattactgcaaataaagaaatttgtgaaaattatgtctttaattccatcggaatcgtaacttatttgaatccgtttattggtcatcataatggcgatatagtaggtaaaacatgtgctaaaacaggacgtggagtgcgtgaagttgtactggaaatgggcttattaacagaagagcagttagataatattctttctgtggagaatttaatgaacccaacctacaaagctacattacataagtaa

SEQ ID NO: 6299 - protein, 471 aa, Haemophilus somnus 2336
MITRKEIDLLGERDVPADAYWGIHTLRAVENFNISNVTISDVPEFVRGMVMVKKATALANGELGAIPDKIAQAIVKACDAILIDGKCMDQFPSDVYQGGAGTSVNMNTNEVVANLALEILGHKKGEYDILDPMDHVNASQSTNDAYPTGFRIAVYNSIMKLVTKVLYLQQGFENKAKEFSNILKMGRTQLQDAVPMTVGQEFKAFSVLLDEEVRNLTRTAELLLEVNLGATAIGTGLNTPQGYSELVVKRLSEVSGLPCTVAPNLIEATSDCGAYVMVHGALKRTAVKLSKVCNDLRLLSSGPRAGLNEINLPELQAGSSIMPAKVNPVVPEVVNQVCFKVIGNDTTVTFAAEAGQLQLNVMEPVIGQAMFESIEILTNACVNLRDKCIDGITANKEICENYVFNSIGIVTYLNPFIGHHNGDIVGKTCAKTGRGVREVVLEMGLLTEEQLDNILSVENLMNPTYKATLHK

SEQ ID NO: 6300 - DNA, 1419 bp, Haemophilus influenzae R2846
  CDS (1)..(1419)
atgactcaatttagaaaagaagtagatttactcggcgaacgtgatgtgcctgcagaagcatattgggggattcatacattaagagcggtagaaaattttaatatttctaacgtaaccatttctgacgtaccagagtttgtacgtggtatggtaatggtaaaaaaagcaacggctttagccaatggcgaattaggtgcaattccaagtgatattgcaaaagcgattgtagcagcttgtgatgaaatccttaccactggaaaatgcttagatcaattcccatcagatgtatatcaaggtggtgcaggtacctcagtgaatatgaataccaatgaagttgtggcgaatttggcgttagagttattaggacataagaaaggggaataccaatatttagatccaatggatcatgttaacgctagccaatcaaccaacgatgcgtatcctaccggtttccgtattgcagtgtataacagcatcttaaaattgatcgataaaattcaatatttacacgacggttttgacaataaagcgaaagaatttacgaatatcttaaaaatgggacgtacccaattgcaagatgcggtgccaatgactgttggtcaagaattcaaagctttcgccgtattacttgaagaagaagtgcgtaacttaaaacgtacagcaggtttattacttgaagtaaaccttggtgcgactgcaatcggtactggtttaaatacgccacaaggctatacagaattagttgtaaaacatcttgctgacgtgactggattagcttgtgtaccagcagaaaacttaattgaagcaacatctgactgtggtgcttatgtcatggttcacggtgcattaaaacgtactgcagtgaaactttctaaagtatgtaatgacttacgtttactttcttctggccctcgtgcaggtttaaaagaaattaatcttcctgaattacaagcaggttcttctattatgccagcaaaagtaaacccagttgttcctgaagtggtgaaccaagtatgctttaaagtaattggtaacgataccactgtgactttcgcatctgaagcaggtcaattacaattaaacgtaatggaacccgtgattggtcaagcaatgtttgaatctatcgacatcttaaccaatgcttgtgtgaacttacgcgataaatgcgtggatggcatcactgtaaacaaagaaatttgtgaaaactacgtgtttaattcaattggtattgtgacttacttgaatccatttatcggtcaccacaacggcgacttagtgggtaaaatctgtgcacaaacaggcaaaggcgtacgtgaagttgtgttagaaaaaggtttattaacagaagaacaattggatgacattctttctgtagaaaacttaatgaatccaacttacaaagcgaaattaaataaataa

SEQ ID NO: 6301 - protein, 472 aa, Haemophilus influenzae R2846
MTQFRKEVDLLGERDVPAEAYWGIHTLRAVENFNISNVTISDVPEFVRGMVMVKKATALANGELGAIPSDIAKAIVAACDEILTTGKCLDQFPSDVYQGGAGTSVNMNTNEVVANLALELLGHKKGEYQYLDPMDHVNASQSTNDAYPTGFRIAVYNSILKLIDKIQYLHDGFDNKAKEFTNILKMGRTQLQDAVPMTVGQEFKAFAVLLEEEVRNLKRTAGLLLEVNLGATAIGTGLNTPQGYTELVVKHLADVTGLACVPAENLIEATSDCGAYVMVHGALKRTAVKLSKVCNDLRLLSSGPRAGLKEINLPELQAGSSIMPAKVNPVVPEVVNQVCFKVIGNDTTVTFASEAGQLQLNVMEPVIGQAMFESIDILTNACVNLRDKCVDGITVNKEICENYVFNSIGIVTYLNPFIGHHNGDLVGKICAQTGKGVREVVLEKGLLTEEQLDDILSVENLMNPTYKAKLNK

SEQ ID NO: 6302 - DNA, 1419 bp, Haemophilus influenzae R2866
  CDS (1)..(1419)
atgacagtaacaagaaaagaagtagatttactcggcgaacgtgatgtgcctgcagaagcatactgggggattcatacattaagagcggtagaaaatttcaatatttctaacgtaaccatttctgacgtgcctgagtttgtacgtggtatggtaatggtaaaaaaagcaacggctttagccaatggcgaattaggtgcaattccaagtgatattgcaaaagcgattgtagcagcttgtgatgaaatccttaccactggaaaatgcttagatcaattcccatcagacgtatatcaaggtggtgcaggtacgtctgtcaatatgaatactaatgaagtggttgctaatcttgcccttgaaaaaattggtcataaaaaaggcgaatataacgtgattaatccgatggatcacgttaatgcaagccaatcaaccaacgatgcgtatcctaccggtttccgtattgcggtgtacaacagcatcttaaaattgatcgataaaattcaatatttacacgacggttttgataataaagcaaaagagtttgcaaatatcttaaaaatgggtcgtacccaattgcaagatgcggtgccaatgactgttggtcaagaattcaaagctttctccgtattacttgaagaagaagtgcgtaacttaaaacgtacagcaggtttattacttgaagtaaaccttggtgcgactgcaatcggtactggtttaaatacgccacaaggctatacagaattagttgtaaaacatcttgctgaagtgactggattagcttgtgtaccagcagaaaacttaattgaagcaacatctgactgtggtgcttatgtcatggttcacggtgcattaaaacgtactgctgttaaactttctaaagtatgtaatgacttgcgtttactttcttctggcccacgtgcaggtttaaaagaaattaatcttcctgaattacaagcgggttcttctattatgccagcaaaagtaaacccagttgttccagaagtggtgaaccaagtatgctttaaagtaattggtaacgataccactgtgactttcgcatctgaagcaggtcaattgcaattaaacgtaatggaaccagtgattggtcaagcaatgttcgaatctattgatatcttaaccaatgcttgtgtgaacttacgcgataaatgcgtggatggcatcactgtaaacaaagaaatttgtgaaaactacgtgtttaattcaattggtattgtgacttacttaaatccatttattggtcaccacaacggcgacttagtgggtaaaatctgtgcgcaaacaggtaaaggcgtgcgtgaagttgtgttagaaaaaggtttattaacagaagaacaattagatgacattctttctgtagaaaacttaatgaatccaacttacaaagcgaaattaaataaataa

SEQ ID NO: 6303 - protein, 472 aa, Haemophilus influenzae R2866
MTVTRKEVDLLGERDVPAEAYWGIHTLRAVENFNISNVTISDVPEFVRGMVMVKKATALANGELGAIPSDIAKAIVAACDEILTTGKCLDQFPSDVYQGGAGTSVNMNTNEVVANLALEKIGHKKGEYNVINPMDHVNASQSTNDAYPTGFRIAVYNSILKLIDKIQYLHDGFDNKAKEFANILKMGRTQLQDAVPMTVGQEFKAFSVLLEEEVRNLKRTAGLLLEVNLGATAIGTGLNTPQGYTELVVKHLAEVTGLACVPAENLIEATSDCGAYVMVHGALKRTAVKLSKVCNDLRLLSSGPRAGLKEINLPELQAGSSIMPAKVNPVVPEVVNQVCFKVIGNDTTVTFASEAGQLQLNVMEPVIGQAMFESIDILTNACVNLRDKCVDGITVNKEICENYVFNSIGIVTYLNPFIGHHNGDLVGKICAQTGKGVREVVLEKGLLTEEQLDDILSVENLMNPTYKAKLNK

SEQ ID NO: 6304 - DNA, 1434 bp, Bacillus cereus G9241
  CDS (1)..(1434): transl_table=11
atgatagcaacgaaggatatacgtatagaaaaagactttttaggtgaaaaggaagtaccaagtgcagcttattacggtgtacaaacattacgtgctgtagaaaacttcccgattacagggtatcgcattcatccgtcactcattacggcaatggcaattgtaaaaaaagcggcggcacttgcaaatatggatactggttacttagcgaaagacattggatacgaaattgcagaggcagcgcaagaaattgttgatggaaaatttcatgatcaattcatcgtagatccaattcaaggcggtgcgggaacttctattaatatgaatacaaatgaagtaatcgctaatcgagcgttagaacgtatgggatatgaaaaaggcgagtatgcaaaaatcagcccaaatacgcatgtaaacatggctcaatcaacgaatgatgcgtttccaacggggattcatattgcaactcttatgatgttagaagaacttcttagtacaatggaagaacttcatgctgcttttcgtgcaaaagcaaaagagttcgatcacgttattaaaatgggacgtacacatttacaagatgctgtgccgattcgtcttggtcaagaatttgaagcgtatagccgagtgcttgcgcgtgatataaaaagaattaaacagtctcgccaacatttatatgaagtgaatatgggggcgacagctgttggtacgggattaaatgcaaaccctacctacattgaacaagtggttaaacacttgcgaacatttagcggattcccacttgttggtgcagagcatttagttgatgcaacgcaaaatacagatgcatacacagaagtatctgcagcattaaaagtatgtatgatgaacatgtctaaaattgcgaatgaccttcgtattatggcatctggtccacgtgttggattggcggaaattcaattaccagctcgtcaaccaggttcatctattatgccgggtaaagtaaatcctgttatggcagaagtaattaatcaagtcgctttccaagtaattggtaatgatcatacaatttgcttagcgtcagaagcaggacagttggagctcaacgtaatggagcctgtgctcgtatttaatttaattcaatctattagtattatgaataacggattccgtgtattccgtgaatattgtattaaaggaattacagcaaatgaagaattgctgaagcaatatgttgagaaaagtgttggaattattacggcagttaaccctcatattggttacgaagcagcatctcgcattgcacgtgaagcaattgaaacaggaaaatctgttagggagttatgtttagaacatggtgtactaacagaagaagaattggatattattttagatccattcgaaatgacgcatcctgaaattgctggagcttctttattaaagaataagaagatgtaa

SEQ ID NO: 6305 - protein, 477 aa, Bacillus cereus G9241
MIATKDIRIEKDFLGEKEVPSAAYYGVQTLRAVENFPITGYRIHPSLITAMAIVKKAAALANMDTGYLAKDIGYEIAEAAQEIVDGKFHDQFIVDPIQGGAGTSINMNTNEVIANRALERMGYEKGEYAKISPNTHVNMAQSTNDAFPTGIHIATLMMLEELLSTMEELHAAFRAKAKEFDHVIKMGRTHLQDAVPIRLGQEFEAYSRVLARDIKRIKQSRQHLYEVNMGATAVGTGLNANPTYIEQVVKHLRTFSGFPLVGAEHLVDATQNTDAYTEVSAALKVCMMNMSKIANDLRIMASGPRVGLAEIQLPARQPGSSIMPGKVNPVMAEVINQVAFQVIGNDHTICLASEAGQLELNVMEPVLVFNLIQSISIMNNGFRVFREYCIKGITANEELLKQYVEKSVGIITAVNPHIGYEAASRIAREAIETGKSVRELCLEHGVLTEEELDIILDPFEMTHPEIAGASLLKNKKM

SEQ ID NO: 6306 - DNA, 1407 bp, Burkholderia vietnamiensis G4
  CDS (1)..(1407): transl_table=11
atgacggaacgcggctttcgcgtcgaagcggatctattagggcagcgaaacgtgcccgactcggcgtactacggcgtccatacgctgcgcgcgcaggagaacttcgacatctccgggcgcacgatcgcgtcgctgccgtacctcgtcgtcgcgctggcggcggtcaaggaagcggccgccgacgcgaactgcgagctcgggctgctgccgcgtgcgtatcgcgacgcgatcgccgccgcctgcgccgaaatccgcgacggccgcctgcacgaccagttcgtggtcgacgtcatccagggcggggcgggcacgtcgaccaacatgaacgcgaacgaggtgatctgcaaccgcgcgctcgaaatcatggggcatgcacgcggccagtacgaacatctgcatccgaacgagcacgtcaacctcgcacagagcaccaacgacgtctacccgaccgcgatccgcatcgcgacctgcttcgcggtcgagcaactgctcgaggcgatggcgcacctgcgcgacgcgttcgcgcagaaggccgacgcattcgccgatctgctcaagctcggccgcacgcagttgcaggacgcggtgccgatgacgctcggccaggagttctcgacctatgcggtgatggtgagcgaagacatcgcgcgcctgcaggaggccggctggctgatgcgcgagatcaacctcggcgcgaccgcgatcggcaccggcatcaccgcgcatcccgactatgcggcgaaggcgctggccgcgctgcggcgcatcaccggcctcgacctgagcaccgcgccgaacctgatcgaggcgacgcaggattgcggcgcgttcgtgcagatgtcgggcgtgctgaagcggatcgccgtcaagctgtcgaagatctgcaacgacctgcggctgctgtcgagcggcccgcgcgccggcttcggcgagatcaatctgccgccggtgcaggccggttcgtcgatcatgccgggcaaggtgaacccggtgattccggaagtcgtgaaccaggtcgcgttcgaggtgttcggcaacgacctgaccgtgacgttcgccgccgaggccggccagctgcagctcaacgcgttcgagccggtgatcgccagcgcgctgttccgcagcttcggccatctgagcgcggcctgcacgacgctcgccgatcgctgcgtgagcggcatcaccgcgaaccccgagcggctgcgcgacacgatggagcgctcggtcgcgctcgccaccgcgctgaacccgtacatcggctacaagcgcgccaccgccgtcgccaaggaggcgcacgagagcggcaagtcgattcgcgaggtcgtgctggaacaccggctgatgaccgatgcgcaactcgacgacgcgctgcaacccgaagcgctgatccgcccgcgcgcttactga

SEQ ID NO: 6307 - protein, 468 aa, Burkholderia vietnamiensis G4
MTERGFRVEADLLGQRNVPDSAYYGVHTLRAQENFDISGRTIASLPYLVVALAAVKEAAADANCELGLLPRAYRDAIAAACAEIRDGRLHDQFVVDVIQGGAGTSTNMNANEVICNRALEIMGHARGQYEHLHPNEHVNLAQSTNDVYPTAIRIATCFAVEQLLEAMAHLRDAFAQKADAFADLLKLGRTQLQDAVPMTLGQEFSTYAVMVSEDIARLQEAGWLMREINLGATAIGTGITAHPDYAAKALAALRRITGLDLSTAPNLIEATQDCGAFVQMSGVLKRIAVKLSKICNDLRLLSSGPRAGFGEINLPPVQAGSSIMPGKVNPVIPEVVNQVAFEVFGNDLTVTFAAEAGQLQLNAFEPVIASALFRSFGHLSAACTTLADRCVSGITANPERLRDTMERSVALATALNPYIGYKRATAVAKEAHESGKSIREVVLEHRLMTDAQLDDALQPEALIRPRAY

SEQ ID NO: 6308 - DNA, 1452 bp, Vibrio sp. Ex25
  CDS (1)..(1452)
atggctaccctatctgatgctccaaaaacagcaaacccagccactcgtattgaagaagatctattaggtcaacgtcatgtccctgcagatgcgtactacggtattcatacgctacgtgcgatcgagaacttcaacatctctaatatgaccatctctgacgtaccagaatttgtacgcggtatggtaatgaccaaaaaagcagcggcgttggcaaacaaagaacttggtgcgattccaaaagacgttgcaaactacatcatcgaagcgtgtgatttgatcctagaaactggcaagtgcatggatcagttcccatcagacgtattccaaggtggtgcgggcacttccgtgaacatgaacacaaacgaagtgatcgcaaacgttgcgcttgagctaatgggtaaagagaaaggtcaatacgaatttgtcaacccaaatgaccacgtaaacaagagccaatcaaccaactgtgcgtatccaacgggtttccgtatcgcggtttacaacagcgtacacaaactaatggaagcaattgagtacctaaaaggcgcattcgaacttaaagcaattgagtttaaagatgtactgaaaatgggtcgtactcagctacaagacgcggtaccgatgactgtaggtcaagagttccacgcttgggcagtaacactaaacgaagagattcgtgctctagattacacctctaaactactcctagaaatcaacctaggcgcaaccgcaatcggtacaggtctaaatacaccgactggctaccaagcgcttgcagtaaaacacctagcggaagtaacaggtcttgacgttgttgcggcagaagaccttatcgaagcgacttctgactgtggcgcatacgtaatgacgcacagtgcactaaaacgtctagcggtaaaactatcgaagatctgcaacgaccttcgtctactttcttctggccctcgcgcaggtctaaatgaattgaacctacctgaaatgcaagcaggttcttcaatcatgccagcaaaagtaaacccagttatcccagaagtagtaaaccaagtttgctttaaagttctaggtaacgacaacacggtttctttcgcagcagaaggcggtcagctacagctaaacgtaatggaaccagttatcgcacaaagcatgtttgagtctatctctctactacacaatgcgtgtgtgaacctacgtgataaatgtatcgacggcatcacagtcaataaagagacttgtgaaaactacgtttacaactcaatcggtatcgtcacttacctaaacccatacatcggccaccacgaaggtgacatcgtaggtaagatttgtgcggaaaccggtaagagtgttcgcgaagttgtgctagagcgcggtctgctaaccgcagaagagcttgatgaaatcttgtcagtagaaaacttcatgcatccaacttacaaagcgaaacgctacgagtaa

SEQ ID NO: 6309 - protein, 483 aa, Vibrio sp. Ex25
MATLSDAPKTANPATRIEEDLLGQRHVPADAYYGIHTLRAIENFNISNMTISDVPEFVRGMVMTKKAAALANKELGAIPKDVANYIIEACDLILETGKCMDQFPSDVFQGGAGTSVNMNTNEVIANVALELMGKEKGQYEFVNPNDHVNKSQSTNCAYPTGFRIAVYNSVHKLMEAIEYLKGAFELKAIEFKDVLKMGRTQLQDAVPMTVGQEFHAWAVTLNEEIRALDYTSKLLLEINLGATAIGTGLNTPTGYQALAVKHLAEVTGLDVVAAEDLIEATSDCGAYVMTHSALKRLAVKLSKICNDLRLLSSGPRAGLNELNLPEMQAGSSIMPAKVNPVIPEVVNQVCFKVLGNDNTVSFAAEGGQLQLNVMEPVIAQSMFESISLLHNACVNLRDKCIDGITVNKETCENYVYNSIGIVTYLNPYIGHHEGDIVGKICAETGKSVREVVLERGLLTAEELDEILSVENFMHPTYKAKRYE

SEQ ID NO: 6310 - DNA, 1464 bp, Photobacterium sp. SKA34
  CDS (1)..(1464): transl_table=11
atgtctcagatgattgatcttgaaaaaaataacgaagcagcactgaatgttgcaactagaatcgaagaagatcttcttggtaagcgtcacgttccaacagacgcgtattggggtattcacactctacgtgcaatcgaaaactttaatatctctaataccactatctcagacgtacctgagtttgttcgcggcatggttttcaccaaaaaagcagcggcaatggcgaacaaagaactcggtgcgatcccttcagatgtcggtaactacatcgagcaagcgtgtgatcttattttagaaacaggccgttgtatggatcaattcccttctgatgtataccaaggtggcgctggcacatctgtaaatatgaacaccaatgaagtgattgcaaaccttgctcttgagcttatgggcaaagagaaaggcgaatatgacatcattaacccgaacgatcacgtaaacaagtcccaatcaactaactgtgcttaccctactggtttccgcgttgcggtatataacagcatcattaacatgctagaagcattagagtacctaaagacagccttcgatgtgaaagcaacggaatttgctagcatcttaaaaatgggccgtactcagctacaagacgcagtacctatgactgtaggccaagaattccatgcttatagtgtattgctaaaagaagaaatcaaaaacctgcattacaccgcgcaattactgcttgaggtcaacctaggtgcaactgctatcggtactggtttgaatgcagctacgggttaccaacacctagcggttcaacgcctagctgaaattacaggcctacctgttacaccagcagaagacttgattgaagcaacatccgactgtggtgcttacgttatggttcacggcgcgctaaaacgtactgcagtgaaactatctaaaatctgtaacgatctacgtctactctcttctggtcctcgtgccggtattaacgaaattaaccttcctgaaatgcaggcaggctcttctatcatgccagcaaaagtaaatcctgttatcccagaagtggttaaccaaatttgctttaaagtgatcggtaacgatacaaccattacttttgctgcagaagcaggtcagcttcaacttaacgtaatggagcctgtgattggtcaagcgttgtttgagtcaatcagcttactgaaaaatgcgtgtgttaatttacgtgagaaatgtatcgaaggcatcacagtgaataaagatgtatgtgagagccacgtatttaactctatcggtatcgtgacttatttaaacccattcattggtcaccatgaaggcgatatcgtaggtaaaatctgtgcagaaacaggaaagagcgtacgtgaagttgttctagaacgcggtcttcttactgaagatcaattaaatgatatcttctctattgaaaacttgatgcaccctcaatacaaggcacaacgatacagctaa

SEQ ID NO: 6311 - protein, 487 aa, Photobacterium sp. SKA34
MSQMIDLEKNNEAALNVATRIEEDLLGKRHVPTDAYWGIHTLRAIENFNISNTTISDVPEFVRGMVFTKKAAAMANKELGAIPSDVGNYIEQACDLILETGRCMDQFPSDVYQGGAGTSVNMNTNEVIANLALELMGKEKGEYDIINPNDHVNKSQSTNCAYPTGFRVAVYNSIINMLEALEYLKTAFDVKATEFASILKMGRTQLQDAVPMTVGQEFHAYSVLLKEEIKNLHYTAQLLLEVNLGATAIGTGLNAATGYQHLAVQRLAEITGLPVTPAEDLIEATSDCGAYVMVHGALKRTAVKLSKICNDLRLLSSGPRAGINEINLPEMQAGSSIMPAKVNPVIPEVVNQICFKVIGNDTTITFAAEAGQLQLNVMEPVIGQALFESISLLKNACVNLREKCIEGITVNKDVCESHVFNSIGIVTYLNPFIGHHEGDIVGKICAETGKSVREVVLERGLLTEDQLNDIFSIENLMHPQYKAQRYS

SEQ ID NO: 6312 - DNA, 1404 bp, Oceanospirillum sp. MED92
  CDS (1)..(1404): transl_table=11
atggtcactcgtatcgaacacgacatgctaggtgagatgcaaattcctagcgacgtctggtacggagtacaaacccttcgagcaaaggaaaacttctccattacaggcgtgccgatcagtcactttcctcacttaatcaaagcactggcaatggtgaagtggtccgcggcacaaaccaataaagaattgaagctgcttgaagaacataaagctgacgccattatggccgcctgtcgtgacattatcgacggagcactgcatcagcaatttgtcgtcgatctcattcagggcggcgcaggcacttcaaccaatatgaatgccaatgaggtgattgctaacctggcactgagcaagttgggcaaagagaaaggtgactaccaacacctgcatccaaacgatgacgtaaactgctctcaatccactaacgacgcttatccaaccgcagtatgtttgggcattcaattcgcggctgaacctctgaccgagcacctggaaagcttgatccaagcctttaacaacaaaggccaagaatttaacgatgtggtcaaaatgggtcgtacccaactacaagatgccgtacccatgacgctggggcaggagttcgaagcctttgcagtcaccctaagtgaagatatcgaccgtataaaggaagcctgcaagctgttgtgtgaggttaacctcggtggcaccgctattggtaccgggatcaacacgcacccggagtatgcaagccgtgtcgttaagaggttagcagaaatctctggcaaacctatgattcctgccagccacttggtagaagccacctcagacctgggcgcatttgttctgttctctggcattcttaaacgtatggcagtcaagctcggtaagatatgtaatgaccttcgattactttcaagcggcccgcgcactggctttgctgagatccatcttccaccgatgcaacccggatcatctatcatgcctggcaaggtgaacccggtgatacctgaagcggtcaatcaaactgcctaccaggtgatcgctaacgacctggccgtcacacttgccgctgaatcaggtcagctgcagctgaatgcgatggaaccgctgatcgtttataacctgcttagctcgatgaagatgctgtgtaacgcctgtgaaatgctggaggaacgctgtgtcagtggtattaaagcgaatcgggaacaatgctcgcgacatctggataacagcatcggtgtaatcactgctctggtaccacacatcggttatgccaatgcctctcgtatcgccaaaaccgcgttaaatacgggctcgacggtacgcgaactggtgattggtgaaggtctgctggacagtatccagcttgatcgcctacttagccctgaatcgatgctagcccctggagagcgagtttcatga

SEQ ID NO: 6313 - protein, 467 aa, Oceanospirillum sp. MED92
MVTRIEHDMLGEMQIPSDVWYGVQTLRAKENFSITGVPISHFPHLIKALAMVKWSAAQTNKELKLLEEHKADAIMAACRDIIDGALHQQFVVDLIQGGAGTSTNMNANEVIANLALSKLGKEKGDYQHLHPNDDVNCSQSTNDAYPTAVCLGIQFAAEPLTEHLESLIQAFNNKGQEFNDVVKMGRTQLQDAVPMTLGQEFEAFAVTLSEDIDRIKEACKLLCEVNLGGTAIGTGINTHPEYASRVVKRLAEISGKPMIPASHLVEATSDLGAFVLFSGILKRMAVKLGKICNDLRLLSSGPRTGFAEIHLPPMQPGSSIMPGKVNPVIPEAVNQTAYQVIANDLAVTLAAESGQLQLNAMEPLIVYNLLSSMKMLCNACEMLEERCVSGIKANREQCSRHLDNSIGVITALVPHIGYANASRIAKTALNTGSTVRELVIGEGLLDSIQLDRLLSPESMLAPGERVS

SEQ ID NO: 6314 - DNA, 1437 bp, Oceanospirillum sp. MED92
  CDS (1)..(1437): transl_table=11
atgggaagtagtgtgctgtcaaaagcgcaggatgttgggcgtattgagaaagatcttttgggggaagccaaggttccttctgaagcctattacggtattcagacccaacgggcatgcgccaactttgatcttagcggtgtgaagctacgccactttcctgaattagtaaaagcgctggcaatggtgaaactggcctgtgctaaagcgaataattcacttgggctattggatgatagccactgtgaggcgattgatcaggcagcccaggcaattatctctggcaactttcatggtgaatttgtcgtggatatggtccagggaggagcgggtacatcgaccaatatgaatgctaatgaggtgatcgccaatgtgggtcttgaataccttgggtacgggaaaggtgagtataaacacctgcacccgaataaccatgtcaatatgtcccagtccaccaacgatgcctacccgacggctgtgcgcctgtcgatcttattaaagcatgctgatctggttcattcgcttgcttctctccgtgatgtttttaccgctaaagcagaggaatttagtgacatcatcaagatggggcggacccagcttcaagatgctgtaccaatgacgctgggacaagaatttcagtcctttgcgaccactctcggtgaagatatagagcgaattgccggactgtctgagctgcttaaagagatcaatctgggggggaccgcgattgggacgggaatcaatactgacccagagtacgctcgtttggcgataggccatctatcagagatcagtggttttgaatttaagcgggcgtccgatctggttgaagccagctccgacatgggcgcatttgttcttttctcctcaatgcttaaacgacttgcggtcaagctttcaaagattgccaatgatctgcggatgctcagcatggggcctcgttgtggattaaatgagattaacttgccgccacagcagccaggtagctcgattatgccagggaaaattaacccggttattccagaagcggtcaatcaggtggcctatcaggtcgttggtaatgatctggcagtgaccatggctgctgaagctggtcagttgcagttaaatgccatggaaccactgatcgcatacaacgtgcttgaatcgatccgcatgcttaagcagtcgatggatatgcttaaaaaccgctgtgtcagagatattacagcgaatcgggatcgttgccaggagctggtggaccagagcatagggattatcacagcagtggtgccgtacatcggctacgaaaactccagtcgtatcgctaaggaagctttggcttcagggcgtggggtgctggaactcatccgggatgagcagttaatgactgaagaagatcttcaggcggtgctcagcccctcatacatgattaagcctcaaccgaggcgcaattcataa

SEQ ID NO: 6315 - protein, 478 aa, Oceanospirillum sp. MED92
MGSSVLSKAQDVGRIEKDLLGEAKVPSEAYYGIQTQRACANFDLSGVKLRHFPELVKALAMVKLACAKANNSLGLLDDSHCEAIDQAAQAIISGNFHGEFVVDMVQGGAGTSTNMNANEVIANVGLEYLGYGKGEYKHLHPNNHVNMSQSTNDAYPTAVRLSILLKHADLVHSLASLRDVFTAKAEEFSDIIKMGRTQLQDAVPMTLGQEFQSFATTLGEDIERIAGLSELLKEINLGGTAIGTGINTDPEYARLAIGHLSEISGFEFKRASDLVEASSDMGAFVLFSSMLKRLAVKLSKIANDLRMLSMGPRCGLNEINLPPQQPGSSIMPGKINPVIPEAVNQVAYQVVGNDLAVTMAAEAGQLQLNAMEPLIAYNVLESIRMLKQSMDMLKNRCVRDITANRDRCQELVDQSIGIITAVVPYIGYENSSRIAKEALASGRGVLELIRDEQLMTEEDLQAVLSPSYMIKPQPRRNS

SEQ ID NO: 6316 - DNA, 1383 bp, Oceanobacter sp. RED65
  CDS (1)..(1383): transl_table=11
atggacgtacgcactgaaagcgattcattaggtacaaaacagattggcagtcatcattattacggtattcaaactcaaagagccgtagaaaatttttcgatcacagatattccactcagtattgatccggaaatggtgattgctttggccatggtgaaaaaagcttgcgccttaaccaactgcgatcttggggtgcttcctaaagaaaaaaccgatgccatcgtcgctgcatgcgatgaaattattgcgggtaagcaccatcaagagttcgttgttgatgtcattcaaggtggtgcaggtacttctgccaatatgaacgccaatgaagtcatcgccaaccgtgcgcttgaaatcatgggttatagcaagggtcactatcagcatctacacccaaacaatgatgttaatgcctctcaatcgactaatgacgtttatccatctgcacttcgcttggctctttataataagtcccaagatttaatctcagcactagaagaattagttgatgcatttggtgtaaaagcagaagcgtttaaagacgtttataaaatcggtcgcacccagttgcaagatgcggtgcctatgacgttgggcatggaatttggtgcttttgctacggctattgcagaagacattgttcaaataaaacatacagcgcatcttttactcgacaccaacttaggcgccacggctatcggtactggcatcaatacgcctaaaggttatagcacaaaagtgatagagcatttacgtgaagtaagtggtgtacaagtgcgatcagcggaaaacctaattgaagccacctgggatactggcgactttgttcaattaagcggtaccttaaaacgctatgccaccaagatcagtaaaatttgcaatgatttgcgtttgttaagttcaggaccattatgcggcttaggtgaaatcaacttacctaaaatgcagccaggttcatccatcatgcctggcaaagtgaatcccgttattcctgaagtcatgaatcaaattgcttatgacgttatcggtaaagacgttactgtttccatggcatctgaaggcggacaaatgcagctaaacgcatttgaaccagttattgccaactgcctctttttatctttaggcatgcttacccgtggttctcgcattttacgtgaaaagtgcattcaaggtatcacggctaaccgtgagaaatgcgaagaatatttggataaatcagtaggtatcgtaaccgcattaaacccgattctaggttatgaagtcacatcggcacttgctcaagaagccgtcgcagaaggtaagtccattaaaaaattagtgattgagaaacagcttttgccagcagagcaggttgatgctttgctgcaaagcgcgatgggtcaataa

SEQ ID NO: 6317 - protein, 460 aa, Oceanobacter sp. RED65
MDVRTESDSLGTKQIGSHHYYGIQTQRAVENFSITDIPLSIDPEMVIALAMVKKACALTNCDLGVLPKEKTDAIVAACDEIIAGKHHQEFVVDVIQGGAGTSANMNANEVIANRALEIMGYSKGHYQHLHPNNDVNASQSTNDVYPSALRLALYNKSQDLISALEELVDAFGVKAEAFKDVYKIGRTQLQDAVPMTLGMEFGAFATAIAEDIVQIKHTAHLLLDTNLGATAIGTGINTPKGYSTKVIEHLREVSGVQVRSAENLIEATWDTGDFVQLSGTLKRYATKISKICNDLRLLSSGPLCGLGEINLPKMQPGSSIMPGKVNPVIPEVMNQIAYDVIGKDVTVSMASEGGQMQLNAFEPVIANCLFLSLGMLTRGSRILREKCIQGITANREKCEEYLDKSVGIVTALNPILGYEVTSALAQEAVAEGKSIKKLVIEKQLLPAEQVDALLQSAMGQ

SEQ ID NO: 6318 - DNA, 1416 bp, Wolinella succinogenes
  CDS (1)..(1416): transl_table=11
atggcatctacacgaatagaacacgatcttattggggacttagaggtaagtaacgactgctattatggagttcaaactgctagagcgaaagagaacttccacatctcaggcgtcctactctcaagcatgcccactttcattgcttcactcgctaaagtcaaaaaagccgctgcactcgccaactttgagcttgggctcttggatgagaagatcaaaaacgccatctgcgaagcgtgcgatctcatcatcgctggaaaatatcacgaccaattcgtcgtggatgccatccaaggaggcgctggaacttccaccaacatgaacgccaatgaagtgatcgccaacgtcgcacttgagctcatgggacataaaaagggtgaatataaacattgccaccccaacaaccacgtcaacctctcacaatctactaatgatgcctatcctacggcattccgcgttgccctgtatgaaaaactcatcgagctcaccgtctccatgggaatcctaagagactcttttgccaaaaaggccgaggaattcaaagatatcatcaagatgggtcgaacccagctccaagacgctgtgcccatgaccctaggtcaagagtttaaaacctacgccgtcatgatgaccgaagatatcgatcgcgtgctagaggctagaaaccttgttcgagagatgaaccttggggcaaccgcgattggaacaggaatcaactctcaccctgactacgctacgcttgtagagaaaaaacttcaagaggtcacaggccgaccctttatcaccgccagcgatcttgttgaggcgactcaagacacaggggcttatgtccaaatctctggtgttcttaagcgtgtctccaccaaagtctccaaaatctgcaacgatctaagactccttagctcaggcccaagagcgggacttagcgagatcaatcttccccctatgcagcctggtagctccattatgcctggaaaggttaatcctgtgattcccgaagtggtcaatcaggtctgctaccacgttattggcgccgacatgactgtaactattgcctctgaagggggtcagcttcagctcaacgtttttgagcccgtcatcgcctttagcctctttagctctatcaacatgatgagaagagcttttgaaactttggctgaaaaatgcgtgaatggaatcaccgccaacgctgacaactgccgcgactatgtccttaagagcatcggactcgtcacagcgctcaacccctacatcggatatgagaactccacttcagtggccaaagaggcgctagagtcaggcaagtccgtccacgatatcgtcctagagcgcaaacttcttagcaaagaagagctagaagagattattcgacccgaaaacatgatcaagcccaaagtcgtcactctaacaaaaaaataa

SEQ ID NO: 6319 - protein, 471 aa, Wolinella succinogenes
MASTRIEHDLIGDLEVSNDCYYGVQTARAKENFHISGVLLSSMPTFIASLAKVKKAAALANFELGLLDEKIKNAICEACDLIIAGKYHDQFVVDAIQGGAGTSTNMNANEVIANVALELMGHKKGEYKHCHPNNHVNLSQSTNDAYPTAFRVALYEKLIELTVSMGILRDSFAKKAEEFKDIIKMGRTQLQDAVPMTLGQEFKTYAVMMTEDIDRVLEARNLVREMNLGATAIGTGINSHPDYATLVEKKLQEVTGRPFITASDLVEATQDTGAYVQISGVLKRVSTKVSKICNDLRLLSSGPRAGLSEINLPPMQPGSSIMPGKVNPVIPEVVNQVCYHVIGADMTVTIASEGGQLQLNVFEPVIAFSLFSSINMMRRAFETLAEKCVNGITANADNCRDYVLKSIGLVTALNPYIGYENSTSVAKEALESGKSVHDIVLERKLLSKEELEEIIRPENMIKPKVVTLTKK

SEQ ID NO: 6320 - DNA, 1452 bp, Candida glabrata
  CDS (1)..(1452)
atgttgagggctagcagtagggcaaagacatcgctcatcgggtacagcgcgcggatgatgcattacagagtagagacggacactttcggcgagatcaaggtacccgcggacaagtactggggcgcgcagacgcagcggtcgttccagaacttcaagatcggcggcgcgcgcgagcgcatgccggagcccatcgtgagggcgttcggtgtgctgaagaagtcagccgccatagtcaacgagaagctcgggacgctagacagcgagatcgcggggcccatccagcaggccgctgacgaggtcgccaagggcaagctcaacgaccacttccccttggtggtgttccagaccgggtcaggcacgcagtctaacatgaacgccaacgaggtcatctccaacagggcgattgagctgatcggcggcgagctcggctccaagaagatccacccaaacaaccactgcaatcaggcgcagtcctccaacgacactttcccctcggtgatgcacatcgccgcggtcacggagatcaccaactccctcttgccggagatcacccagctgaaggacgccctccacaagaaggccgaggagttccaggacatcgtcaagatcggcagaacacacctgcaggacgccacaccgctgaccctcggacaggaattcagcggctacgtccagcagctcgtcaacggcatcgcaagaatcgagaacaccctgccacacctgaagtacctcgcacaaggtggtaccgctgtcggcacagggctgaacacgaaggagggcttcgacaagctgatcgccgagcagatctccaaggaaacgggcatcgacttcaaaaccgcccctaacaagttcgaagctctcgcagctcacgacgcgatcgtcgaggccagcggtgccctgaacaccgtggcttgctctctgttcaagatcgcacaggacatcaggtacctgggctccggccctcgttgcggctacggtgaactgcacttgccagagaacgagccaggttcctccatcatgcctggtaaggtcaacccaacacagaacgaggccatgacccaggtctgtgtccaggtcatgggtaacaacgcagctgtgaccttcgcgggcgccaacggtcagttcgaactgaacgtcttcaagccggtcatgatctcaaacttgttgagctccatcagattgctggcagacgcttgccactccttcagagtccactgtgtcgaaggcatcgaggcaaaccgcgagaagatcaaccacaacttgcacaactcattgatgctggtcaccgctctgaacccaaagatcggctacgacgccgcctccaagatcgcaaagaacgctttcaagaagaacatcaccttgaaagagtccgccttggagttgaaatacttgacctcagaagagttcgacgaatgggtcattcctgaaaacatggttggaccaaccaagtaa

SEQ ID NO: 6321 - protein, 483 aa, Candida glabrata
MLRASSRAKTSLIGYSARMMHYRVETDTFGEIKVPADKYWGAQTQRSFQNFKIGGARERMPEPIVRAFGVLKKSAAIVNEKLGTLDSEIAGPIQQAADEVAKGKLNDHFPLVVFQTGSGTQSNMNANEVISNRAIELIGGELGSKKIHPNNHCNQAQSSNDTFPSVMHIAAVTEITNSLLPEITQLKDALHKKAEEFQDIVKIGRTHLQDATPLTLGQEFSGYVQQLVNGIARIENTLPHLKYLAQGGTAVGTGLNTKEGFDKLIAEQISKETGIDFKTAPNKFEALAAHDAIVEASGALNTVACSLFKIAQDIRYLGSGPRCGYGELHLPENEPGSSIMPGKVNPTQNEAMTQVCVQVMGNNAAVTFAGANGQFELNVFKPVMISNLLSSIRLLADACHSFRVHCVEGIEANREKINHNLHNSLMLVTALNPKIGYDAASKIAKNAFKKNITLKESALELKYLTSEEFDEWVIPENMVGPTK

SEQ ID NO: 6322 - DNA, 1389 bp, Bartonella quintana str
  CDS (1)..(1389)
atggttgaaacacgtcaggaaacagatagctttggaacgatttcagtacgtcaagatcgttattggggagcacaaactgaacgttctctgcataattttaatattggcacagaaaaacaacctctcaccatcatctatgccttaagccttatcaaaaaagctgcagctgttgtcaatatggaaaaaggcaagcttgcacaaaacatcggaaaagcaatcattactgccgccgatgaagtgctcgcaggagcatttgatacgcattttccactttctgtctggcaaactggttctggcacacaaagtaatatgaacgtcaatgaagtcatcgccaaccatgccagcatgcttttgggaggaaaacttggcagtaaagcacccgttcaccccaatgatcacgtaaatatgagccaatcgtcaaacgattcctttcccacagcacttcacattgccaccacactccaaacacgccaacacttatttcccatccttgacgctcttattactactttaagaaaaaaagaagaagaatttgccgatatcatcaaaatcggacgcacccatacccaggatgcaacacctctgacattaggacaggaattttcaggttatcgcgcagcactagaagccaaccgccaacgcattgaaagtgcgcttgccgatgtccaaatgcttgcccaaggagggacagctgttggaacaggactcaatgcaccgcaaggttttgacgttgcttttgcgcaaacaatcagcaccctcacaggaataacctttaagactgccagcaataaatttgaagcactcgcccatcatggagcccttgcacattttcatggaagcttgaatgcattagcagctgatctgtttaaaattgccaatgacattcggtttttgggatccggtccacgctcagggttgggtgaactaagccttccagaaaatgaaccaggatcttccattatgccaggcaagatcaatcccacgcagtgtgaagcaatgactatggttgcttgccaggttttcggcaatcataccagtataacatttgccgcaagccagggacattttgaactcaatgtttataaacctgttattggctataatgttttacagtcgattacgcttcttggtgattgcatgcgttcttttgacatgcattgcattcaaggattacgtgccaatcgagtccatattcactctctcatggaacgctctctcatgttaataacagctcttgcaccggaaattggctatgaaaaagctgccgaaattgctaaagcagcacataaaaatgacacgactttgcgtactgaagctatcaaagcgggagtttctggagatgattatgatcggctggttgatcccaaaaagatgatccacccgcaataa

SEQ ID NO: 6323 - protein, 462 aa, Bartonella quintana str
MVETRQETDSFGTISVRQDRYWGAQTERSLHNFNIGTEKQPLTIIYALSLIKKAAAVVNMEKGKLAQNIGKAIITAADEVLAGAFDTHFPLSVWQTGSGTQSNMNVNEVIANHASMLLGGKLGSKAPVHPNDHVNMSQSSNDSFPTALHIATTLQTRQHLFPILDALITTLRKKEEEFADIIKIGRTHTQDATPLTLGQEFSGYRAALEANRQRIESALADVQMLAQGGTAVGTGLNAPQGFDVAFAQTISTLTGITFKTASNKFEALAHHGALAHFHGSLNALAADLFKIANDIRFLGSGPRSGLGELSLPENEPGSSIMPGKINPTQCEAMTMVACQVFGNHTSITFAASQGHFELNVYKPVIGYNVLQSITLLGDCMRSFDMHCIQGLRANRVHIHSLMERSLMLITALAPEIGYEKAAEIAKAAHKNDTTLRTEAIKAGVSGDDYDRLVDPKKMIHPQ

SEQ ID NO: 6324 - DNA, 1389 bp, Bartonella henselae
  CDS (1)..(1389)
atggttgaaacacgtcaagaaacggatagctttgggacgatttcagtccgtcaagaccgttattggggcgcacaaactgaacgctcattgcataattttaatattggcatagaaaaacaacccctcaccatcatctatgccttaagccttatcaaaaaagcagcagctgttgtgaatatggaaaaaggcaaactcgcaaaaaacattggaaaagccatcattactgctgccgatgaagtgctttccggtgcatttgacacgcatttccccctttctgtttggcaaacaggttctggaacacaaagcaatatgaacgtcaatgaagtgatcgccaatcatgccaatatgcttttgggaggaaaattgggtagcaaaacacctgtgcatcccaatgatcacgtcaatatgagccaatcgtcaaacgattcctttcccacagcacttcacattgctactaccctacaaacgcgccaacacctctttcctatccttgacgcacttattaccactttaaagaaaaaagaagaagaatttgccgatatcatcaaaattggacgtactcatacccaggatgccacacccttaactttagcgcaagaattttcgggctatcgcactgcactcgaagccaaccgccaacgcattgaaaatgctctttgtgatgttcaaatgcttgcccaaggaggtacagctgttggaacagggctgaacgcaccgcaaggctttgacatagcttttgcgcaaacaatcagtacatttacaggaataccctttaaaaccgctagcaataaatttgaagccctcgctcatcatggagctcttgcgcatttccatggtagcttaaatgcattagcagctgatctgtttaaaattgccaatgacattcggtttttgggatccggtccacgctcaggcttgggggaactaagcttaccagaaaatgaaccaggatcttccatcatgccaggcaaggttaaccccacacagtgtgaagcaatgaccatggttgcttgccaagtctttggcaatcataccagtgtaacatttgccgcaagccaagggcattttgaactcaacgtttataaacctgtcattggctacaatgttttacaatcgattacgcttcttggggattgcatgcgctcttttgatcttcattgtattcaaggattacgcgccaatcgagttcacattcattctctcatggaacgttctctcatgttggtgacagcgcttgcaccagaaattggctatgaaaaagctgccgcaattgccaaagcagcgcataaaaatgacacaactttgcgtaccgaagcactcaaactaggagtttctggagaagattatgatcggttggttgatcccaaaaagatgatccatccacaataa

SEQ ID NO: 6325 - protein, 462 aa, Bartonella henselae
MVETRQETDSFGTISVRQDRYWGAQTERSLHNFNIGIEKQPLTIIYALSLIKKAAAVVNMEKGKLAKNIGKAIITAADEVLSGAFDTHFPLSVWQTGSGTQSNMNVNEVIANHANMLLGGKLGSKTPVHPNDHVNMSQSSNDSFPTALHIATTLQTRQHLFPILDALITTLKKKEEEFADIIKIGRTHTQDATPLTLAQEFSGYRTALEANRQRIENALCDVQMLAQGGTAVGTGLNAPQGFDIAFAQTISTFTGIPFKTASNKFEALAHHGALAHFHGSLNALAADLFKIANDIRFLGSGPRSGLGELSLPENEPGSSIMPGKVNPTQCEAMTMVACQVFGNHTSVTFAASQGHFELNVYKPVIGYNVLQSITLLGDCMRSFDLHCIQGLRANRVHIHSLMERSLMLVTALAPEIGYEKAAAIAKAAHKNDTTLRTEALKLGVSGEDYDRLVDPKKMIHPQ

SEQ ID NO: 6326 - DNA, 1389 bp, Bacillus thuringiensis serovar konkukian str
  CDS (1)..(1389)
atggagtacagaattgaaagagatacattaggagaaataaaagttccagctgataaattatgggcagcacaaacacaacgtagtaaagaaaacttcccgattggaacagagcaaatgccgcttgaaattgtaaaagcatttgcaattttaaagaagagtgcagcacttagcaatcaaaaattaggaaagttatcagaagaaaaagcagaagcaattgtggcagcagctgacgaagtgattgcagggaaatggaatgaacattttccgcttgtcgtgtggcaaacaggtagtggtacacaatcaaacatgaatgtgaatgaagtaattgcaaatcgtgggaatcaaattttgaaagaaaagggatctgacgtacatattcatccgaatgatgatgtgaacatgtcccaaagttcaaatgatacatttccaacagcgcttcatgtagcatgtgtaatagcagtagaaaatcacgtattaccagctattacgaaattaaaagaaacgttagcagaaaaagtaactgcatttgaacatattataaaaattggtcgtacacatttacaagatgcgacaccgttaacattaggacaagaaattagtggatggcaccgtatgcttgaaaaaacagagcgtatgattgcagagagcaatacatatatgaaagagcttgcgattggtggtacagcagttggaacaggtattaacgctcatcctaaatttggtgagatggtatcagaggaaattagccaatttacaggtaaacaatttatttctgcaccaaataagttccacgcattaacgagccatgatgaagttgtgtatacgcatggtgcattaaaagcattagcagcggatttaatgaagatcgctaacgatgtacgttggcttgcaagtggtccacgtagtggtcttggagaaattattattccagcaaatgaaccgggaagctctattatgccaggtaaagtaaatccaacgcaaagtgaagcattaacgatggttgtagcgcaagtgatgggaaatgacgcaacaatcggatttgctgcgagtcaaggtaattttgagttgaacgtatttaaacctgttattgcatataacttcttacaatccgctcacttattagcagatgcaattgtttcatttaatgataattgtgcagttggtattgaagctgatgaagaagtcattaaagagaatgtgaatcgttcattaatgcttgttacagcattaaacccgcatatcggatatgaaaatgcagcgaaaattgcgaagcatgctcataaagaagggttaactttaaaagaagcagcattgcaatctggactactaacagaagagcaatttgatgaaattgtcgatccgaaaaaaatgattgctccgaaagagtaa

SEQ ID NO: 6327 - protein, 462 aa, Bacillus thuringiensis serovar konkukian str
MEYRIERDTLGEIKVPADKLWAAQTQRSKENFPIGTEQMPLEIVKAFAILKKSAALSNQKLGKLSEEKAEAIVAAADEVIAGKWNEHFPLVVWQTGSGTQSNMNVNEVIANRGNQILKEKGSDVHIHPNDDVNMSQSSNDTFPTALHVACVIAVENHVLPAITKLKETLAEKVTAFEHIIKIGRTHLQDATPLTLGQEISGWHRMLEKTERMIAESNTYMKELAIGGTAVGTGINAHPKFGEMVSEEISQFTGKQFISAPNKFHALTSHDEVVYTHGALKALAADLMKIANDVRWLASGPRSGLGEIIIPANEPGSSIMPGKVNPTQSEALTMVVAQVMGNDATIGFAASQGNFELNVFKPVIAYNFLQSAHLLADAIVSFNDNCAVGIEADEEVIKENVNRSLMLVTALNPHIGYENAAKIAKHAHKEGLTLKEAALQSGLLTEEQFDEIVDPKKMIAPKE

SEQ ID NO: 6328 - DNA, 1392 bp, Parachlamydia sp
  CDS (1)..(1392)
atggactatcgaacagaaaaagacaccttaggagaagttagagtttctgcagactgttattatggagctcaaacgaagcgttcctacgataatttttcgattggaatagaaaaaatgcctaaggaagtaattcatgcgcttgctctaatcaagaaagcggccgccttaactaacgaacagcttggtttattaccaaaaaataaacaactcgtgatttgtgaagtttgcgacgaaattttatctggctgcttagatgatcaatttccgttatctgtttggcagacagggtctggaacgcaaacaaacatgaacctcaatgaagtgattagtaatagggccattgaaaagctgggtggggtgcttggttctaaatatccgatccatcccaatgatgatgtcaacttatctcaatcgtctaatgatgtgtttccttcagccatgcatattgcggtgatgtttgatatatctaagaagttgttaccaagtttaagagaactaaaagaaactttagaagcgaaagttgaagcttttaaagatattgtaaaaattgggcgtacgcatttaatggatgcgacccctttaacacttggacaagaattttcggggtatgtcagccaaatagagcatggaatacaagctctaaaaaatacgtttgcgcatctttctgaattggccttgggagcaactgctgtgggaacgggaatgaatacgcatcccaactacgcaaaattagtggctgaaaaaattagtgagttgtccggatttaattttgtttctgccaggaataaatttgagtcgctcgcgactaatgacgctcttgtagaagttagcggggctttaaaaagggtggccgtttcagtgtttaaaattgccaatgatattcggtggctttcttcaggccctagatgtgccataggagaaatcgttattcctgctaatgaaccaggctcatcgattatgccaggaaaagttaatcctacacaaagtgaagccttaatgatgattgccattcaagtaatggggaatgatgggatcattggttttgcaggttcgcaaggcaatctagaattgaatgtttttcgccctcttattatttataacttaattcaatctattcgattattgagcgatgctatttctaattttaaccaaaaatgtgttgtcggaatagaggctaaccaaacaagaattgcagaacatctgaatcgttccttaatgttagcaactgctcttaatcatgcaattggttatgatcgtgcaagtcaaattgtaaaaaaagcatacttagaaaatataacattaaaagaagctgcactagctttagcctttttaaccgaagatgaatttgatcagattatggatcctaaaaaaatgattgggccaatgacttaa

SEQ ID NO: 6329 - protein, 463 aa, Parachlamydia sp
MDYRTEKDTLGEVRVSADCYYGAQTKRSYDNFSIGIEKMPKEVIHALALIKKAAALTNEQLGLLPKNKQLVICEVCDEILSGCLDDQFPLSVWQTGSGTQTNMNLNEVISNRAIEKLGGVLGSKYPIHPNDDVNLSQSSNDVFPSAMHIAVMFDISKKLLPSLRELKETLEAKVEAFKDIVKIGRTHLMDATPLTLGQEFSGYVSQIEHGIQALKNTFAHLSELALGATAVGTGMNTHPNYAKLVAEKISELSGFNFVSARNKFESLATNDALVEVSGALKRVAVSVFKIANDIRWLSSGPRCAIGEIVIPANEPGSSIMPGKVNPTQSEALMMIAIQVMGNDGIIGFAGSQGNLELNVFRPLIIYNLIQSIRLLSDAISNFNQKCVVGIEANQTRIAEHLNRSLMLATALNHAIGYDRASQIVKKAYLENITLKEAALALAFLTEDEFDQIMDPKKMIGPMT

SEQ ID NO: 6330 - DNA, 1401 bp, Bdellovibrio bacteriovorus
  CDS (1)..(1401)
atgatggcagagggcggattcagaatcgaaaaagacaccatgggtgaagtgaaagttcccgcagacaagttctggggagcacagacccaaaggtccacagaaaacttccgcatcgggggcgatcgtttcccgcgcgagatgatccgggccttgggtgtcttgaagaagtccgccgctatcaccaacgaaaaactgggtctgcttgatccgaaaaaagcctcggtcatcgtgaaagccgccgatgaagtgatcgtcggcaaactcgacgcccatttcccgctggtggtgtggcagacgggttcaggcacacagaccaacatgaatgccaacgaagttatcgccaatcgtgcgatggacatgatgggcatcaaacttcccagcaaggaagttcatcccaatgatgatgtgaacaagggccagtcttcgaatgacactttccccaccgccatgcacattgctgtgggcgagcagattcatcatcgcctgattccgatgctggaaaagctgcacaaagctctggaaaacaaacagaaagaatttaaagacatcgtgaaaatcggtcgcacccatttgatggatgcaacccccctgaccctggggcaggagttttccggttacagcacccaggtgaaacactccatccagcgcgtgaaaaacaccttgccgcatctgtacgagctggcattgggcgggacggcggtgggaacgggtttgaacacgcatccgaaatttgcggttgaagccgctgcggaaatcgctcgcgagacggggattgcctttgtttcggctgaaaacaagtttgaagccctggcggcccatgacgctttggtggaagtcagcggggcgctgaactcggtcgcggtgtccctgatgaaaattgcgaacgacatccgcctgctgggttccggcccgcgctgcgggatcggggagcttcatttgcccgaaaatgaaccgggaagctccatcatgccgggcaaagtgaatcccacccagagcgaggctatgaccatggtctgtgcccaggtgatgggaaatcacgtggccgccacaattggcggggcgacggggcattttgagctgaacgtgtttaagcccgtgattgtgttcaatgttctgaattccgtgcgcctgttggcggacgcggcagaatccttcaccgatcactgtgtggtgggcattgaagccaaccgtaaacagattcagaagcatctggagcagtctttgatgctggtgacggcactgaatcctcacattggctatgacaacgcagccaaaattgccaaaactgcccataaaaacggcacaacactgcgcgaagaagccatcaatcttggactgctctctggcgaagaatttgataagatagtaaaaccggaaaacatggtcggccccagccgatag

SEQ ID NO: 6331 - protein, 466 aa, Bdellovibrio bacteriovorus
MMAEGGFRIEKDTMGEVKVPADKFWGAQTQRSTENFRIGGDRFPREMIRALGVLKKSAAITNEKLGLLDPKKASVIVKAADEVIVGKLDAHFPLVVWQTGSGTQTNMNANEVIANRAMDMMGIKLPSKEVHPNDDVNKGQSSNDTFPTAMHIAVGEQIHHRLIPMLEKLHKALENKQKEFKDIVKIGRTHLMDATPLTLGQEFSGYSTQVKHSIQRVKNTLPHLYELALGGTAVGTGLNTHPKFAVEAAAEIARETGIAFVSAENKFEALAAHDALVEVSGALNSVAVSLMKIANDIRLLGSGPRCGIGELHLPENEPGSSIMPGKVNPTQSEAMTMVCAQVMGNHVAATIGGATGHFELNVFKPVIVFNVLNSVRLLADAAESFTDHCVVGIEANRKQIQKHLEQSLMLVTALNPHIGYDNAAKIAKTAHKNGTTLREEAINLGLLSGEEFDKIVKPENMVGPSR

SEQ ID NO: 6332 - DNA, 1434 bp, Rhodopseudomonas palustris
  CDS (1)..(1434)
atgatcatggcccgcacgccccgctctccccgccccgcgcgttctgccgccacgcgaagcgagaccgatagtttcggtccgatcgatgtcgccgccgaccgttactggggcgcgcagaccgagcgttcgcggcaaaacttccgcatcggcaccgagcggatgccgatcggcatcatccgggcgctggcaatcgtgaaactggccgcggccgagaccaacaaggagctcggcctgctcgacaaccgccgcgccggcgccatcgtccgcgccgcccgcgaagtgatcgacggcacccatgacgatcacttcccgttggtggtgtggcagaccggctccggcacccagaccaacatgaacctcaacgaggtaattgctaatcgcgccaacgaactgctcggcggcgagcggggatcgaagaagccggtacatcccaacgatcacgtcaacatgagccagtcgtcgaacgactcgttcccgaccgcgatgcatatcgccgccgcgcaagcgattacggccgacctgatcccagcgctgacgctgctgcacgatgcgttacgcaagaaggagaaggcgttcgccaagatcgtcaagatcggccggactcacacccaggacgccaccccgctgacgctcggccaggaattttccggctacgcggcacagctcgccagcggcatcgcgcggatcaaatcggcgctgaaggagctgtatccgctggcgcagggcggcaccgcggtcggcaccggactgaacacgcatccgaaattcgccaaggcgttcgccaagcgcgccgcggcgattaccaagctgccgttcgtcaccgcgccgaacaaattcgaagcgctcgccgccaacgacgcctacgtgttcgtgcacggcgcactgaacgccgccgccaccgcgctgtttaagatcgccaacgacatccgcctgctcggctccggcccgcgctccgggcttggcgaactgatcctgccggagaacgagcccggctcatcgatcatgcccggcaaggtcaacccgacccagtgcgaggcgatgaccatggtgtgctgccaggtgttcggcaatcagaccaccctcaccgtcgccggcagccagggtcacttcgaactcaacgtctacaagccggtgatggcgcaggcgatgctgcagtcgatcgggctgctcgccgatgccgcacgctcgttcacgaccaactgcgtcgatggcatccgcgccgacgagcagcggatcggcgaactgatgcagcgctcgctgatgctggtgaccgcgctggcgccgagcatcggctacgacaatgccgccaagatcgccaaggcggcgcatcagcgtggtacgaccttgaaggacgaagcggtgcgttcggaactgatcagcgccgccgaattcgaccggctggtgcggccggacaaaatgacgcatccgggctga

SEQ ID NO: 6333 - protein, 477 aa, Rhodopseudomonas palustris
MIMARTPRSPRPARSAATRSETDSFGPIDVAADRYWGAQTERSRQNFRIGTERMPIGIIRALAIVKLAAAETNKELGLLDNRRAGAIVRAAREVIDGTHDDHFPLVVWQTGSGTQTNMNLNEVIANRANELLGGERGSKKPVHPNDHVNMSQSSNDSFPTAMHIAAAQAITADLIPALTLLHDALRKKEKAFAKIVKIGRTHTQDATPLTLGQEFSGYAAQLASGIARIKSALKELYPLAQGGTAVGTGLNTHPKFAKAFAKRAAAITKLPFVTAPNKFEALAANDAYVFVHGALNAAATALFKIANDIRLLGSGPRSGLGELILPENEPGSSIMPGKVNPTQCEAMTMVCCQVFGNQTTLTVAGSQGHFELNVYKPVMAQAMLQSIGLLADAARSFTTNCVDGIRADEQRIGELMQRSLMLVTALAPSIGYDNAAKIAKAAHQRGTTLKDEAVRSELISAAEFDRLVRPDKMTHPG

SEQ ID NO: 6334 - DNA, 1458 bp, Rhodopseudomonas palustris
  CDS (1)..(1458)
atggcgagcgagactgtgacaccgaccctgcgtgacgtgccgatcggcctcacggcgacaggccagcgccgcgaattcgacagcatgggcagcgtcgacgttccggcggatcgttattggggcgcgcagacgcagcgctcgttgcagcatttctcgatcggcggcgaccgcatgccgaaagcggtgtaccacgcctatggctacgtcaagaaagcctgcgcgctggtcaaccacgccgcgggccggctgccggcctggaagaccgaggccatcgtccgcgcagccgacgagacgatctcgggcgcgctggacgatcactacccgctgttcgtttggcagaccggctccggcacccagagcaacatgaacgtcaacgaagtcgtctccaaccgggcgatccagctgctcgggggtacgctcggcacgcagcagccggtcggccccaatgacgacgtcaatatgggtcagtcgtcgaacgacaccttcccgaccgccatgcacatcgcggcggtgacagcgatcgacgatcaggtcgtgccgcggctttccaagctgatcgagattatcgaacagaaagccgacggctggatggacgtggtcaagatcggccgcacccatctggaagacgccgtgccgctgacggtcggccaggaatggcacggctgggccggtcaattgcgcgacgcccgcgatgcgatcgaagccagccgcgccggcctgtatcagctcgcggtcggcggcaccgcggtcggcaccggcctcaacgcccccaagggcttcgctgccgacgttgctgccaggatcgccgagctgaccggcaagccgttcgtcaccgcaccgaacaagtttgccgcgcagggctcgctcgacgcgatggtccgcgcccacggcgcgctgcgcgatctcgcggtggcgctgatgaagatcgccaacgacatgcgctggctcgcttctggtccgcgctgcggcttcggcgaattgctgctgccgagcaacgagcccggctcctcgatcatgcccggcaaggtcaacccgacgcaatgcgaggcgatggtgatgatctgcatccaggtgatgggcaacgacagcgccgtcgccttcgccggcagccagggcaatttcgaactcaacgcgatgcggccggtgatcatcaacaacttcctgcattcggcgcgcatcctcgccgacggctgtgagaagttccggacctattcggtcgagggcaccgagctcaaccgcgatcgtgtcgcgcagtacgtcgaaggcagcgtgatgctggtcaccgcgctgtcaccggtgatcggctatcagaacgccgcgcatatcgccgaagatgcgatcgccaagaatctcacgctgaagcaggcggcactcgcctccggcaaggtcgacgaggcgacgttcgaccgcatcgtccggccgatcgacatggtcggcagcggtcttgcgggcgcctga

SEQ ID NO: 6335 - protein, 485 aa, Rhodopseudomonas palustris
MASETVTPTLRDVPIGLTATGQRREFDSMGSVDVPADRYWGAQTQRSLQHFSIGGDRMPKAVYHAYGYVKKACALVNHAAGRLPAWKTEAIVRAADETISGALDDHYPLFVWQTGSGTQSNMNVNEVVSNRAIQLLGGTLGTQQPVGPNDDVNMGQSSNDTFPTAMHIAAVTAIDDQVVPRLSKLIEIIEQKADGWMDVVKIGRTHLEDAVPLTVGQEWHGWAGQLRDARDAIEASRAGLYQLAVGGTAVGTGLNAPKGFAADVAARIAELTGKPFVTAPNKFAAQGSLDAMVRAHGALRDLAVALMKIANDMRWLASGPRCGFGELLLPSNEPGSSIMPGKVNPTQCEAMVMICIQVMGNDSAVAFAGSQGNFELNAMRPVIINNFLHSARILADGCEKFRTYSVEGTELNRDRVAQYVEGSVMLVTALSPVIGYQNAAHIAEDAIAKNLTLKQAALASGKVDEATFDRIVRPIDMVGSGLAGA

SEQ ID NO: 6336 - DNA, 1404 bp, Corynebacterium diphtheriae
  CDS (1)..(1404)
atgactgagcagcagtaccgcatcgagcacgacaccatgggtgaagttaaggtgcctatcgacgccctctggcgcgcacagacccagcgcgctgttgagaacttcccaatttctggccgtggcctcgaagccgcacagatccgcgctatggggctgctcaaggccgcttgtgctcaggttaataaggaccgcggacttctggctccagagcaggctgatgcaatcatcgccgcagctaccgaggtagccgagggcaagcacgacgaccagttccctatcgacgtcttccagaccggttccggcacctcgtcgaacatgaactccaacgaggttatcgcctcgatcgctaaggctaacggcgttgaggttcaccctaacgaccacgtcaacatgggccagtcctccaacgacaccttcccaactgctactcacatcgccgcaactgaggccgccgtcaaggacctcattccaggtctgaaggttctccatgcctccctagccaagaaagctgccgagtgggagaacgttgtaaagtccggccgtacccacctaatggatgccgttccagttaccttgggccaggagttctccggctacgctcgccagattgaggctggcatcgagcgcgtcgaggcatgcttgccacgtcttggcgagctctccatcggcggcaccgctgtaggcaccggcctgaacaccccagcagacttcggccagaaggtcactgccgagctcgttaagctgaccggggtttctgaacttcgcgagtgcgtgaaccactttgaggctcaggcaagccgcgacggcctcgtcgagttctccggcgcaatgcgcaccatcgctgtgtctttgaccaagattgctaacgacatccgctggatgggatccggcccgctgactggcctcggcgagatccacttgccagacctgcagccaggttcttccatcatgccaggcaaggtcaacccagttctgtgcgaaaccgcaactcaggtggcagctcaggttattggtaacgacgcagccatcgctttcggcggcgcacagggcgcattcgagctcaacgtcttcattccaatgatggcccgcaacgtcctcgagtcctctcgcctgttggctaacaccgcccgcgtattcgcagagcgtcttgtcgacggcatccatccaaatgaggagcgcatgcgcaccttggccgagtcttccccatcgatcgttaccccactgaactccgctatcggctatgaagctgcagcgaaggtggcaaagaccgcgctaaaggaaggcaagaccatccgccagactgtcatcgacttgggctttgttgatggcgaaaagctcaccgaggaagagctggacaagcgcctcaacgttctcgcaatggccaacaccgatcgcgacaagtaa

SEQ ID NO: 6337 - protein, 467 aa, Corynebacterium diphtheriae
MTEQQYRIEHDTMGEVKVPIDALWRAQTQRAVENFPISGRGLEAAQIRAMGLLKAACAQVNKDRGLLAPEQADAIIAAATEVAEGKHDDQFPIDVFQTGSGTSSNMNSNEVIASIAKANGVEVHPNDHVNMGQSSNDTFPTATHIAATEAAVKDLIPGLKVLHASLAKKAAEWENVVKSGRTHLMDAVPVTLGQEFSGYARQIEAGIERVEACLPRLGELSIGGTAVGTGLNTPADFGQKVTAELVKLTGVSELRECVNHFEAQASRDGLVEFSGAMRTIAVSLTKIANDIRWMGSGPLTGLGEIHLPDLQPGSSIMPGKVNPVLCETATQVAAQVIGNDAAIAFGGAQGAFELNVFIPMMARNVLESSRLLANTARVFAERLVDGIHPNEERMRTLAESSPSIVTPLNSAIGYEAAAKVAKTALKEGKTIRQTVIDLGFVDGEKLTEEELDKRLNVLAMANTDRDK

SEQ ID NO: 6338 - DNA, 1338 bp, Thermoproteus tenax
  CDS (1)..(1338)
atggactttgaagagagggcgaggagggtctatctggacactggaactaagttccagaggcctattatctggagcatggggctcatcaagtacgcggccgcctacgccaacgccgagctgggcctcctgccccggaggctggccgccgccatcatgggggcctccctggaggtaatggagggggtccacgacgctgaggtttatgtggacgtctttcagaccggctctggcacaggtctcaatatgaacatcaacgacgtgattgcgcggagagcctcggagatcgcaggctccagagttcatcctaacgaccacgttaatatgggccagtcctccaacgacgtagtgccgagcgccgtcagaatcgccgcgatcaagacggcggaggacgagctgatgcctgcgttgagcgccttgataggccgcttgagcgagaaatcggccgagttctccaaagtagtcaagcccggcagaacccacttaagagacgccttgcccgtcacgctcggccaagagctgggcgcctatgcggacgctcttgctcacggctgtcgggagctacgagacgtactcgcctatgtcggagagataccgctggggggcactgccgtcggcacaggtttcgggacgcatccccgcttcagacgtctggctattgacgccataaacaagacctcgggcctgcggctctccgaggggaacacgttcagaggaatgaggctcttgaccgatgtattgtatctatccgcagcgctccggaacatcgcggtagagctcatgagactagcgcaagacgtaagactcatgttctccggtcctactgcgggcctcgccgagatcgacctcccctcgcaggctgaagtgccagggagctctatgatgcccggcaaaataaacccagtcacggccgaggccgttatgttggccgcggcccagatcgtcggactggaccacgcgaaccaagccgccgccggcctaggcgagtttgagctcgccatgggcatcccgttgatagggtacaacgtagtggcccagattaacctcctatctgaagcatcgggaaagctctcagagctcgtaatagccgatatgaagccgcggagagaccgcttgagggacctcgcagagaggtcgcccgcgttggccacagctctggcgccagcgttgggatacgagggggtctcccaggttgtaaggaagatttccgagggcaaatccatcagagtggccttagaggaggtgggccgcccggatctggcgcaggagatccccgacgtcgataatatggcgcaggctccggaggcggagaggcggatcgattgtgatagctacaaatag

SEQ ID NO: 6339 - protein, 445 aa, Thermoproteus tenax
MDFEERARRVYLDTGTKFQRPIIWSMGLIKYAAAYANAELGLLPRRLAAAIMGASLEVMEGVHDAEVYVDVFQTGSGTGLNMNINDVIARRASEIAGSRVHPNDHVNMGQSSNDVVPSAVRIAAIKTAEDELMPALSALIGRLSEKSAEFSKVVKPGRTHLRDALPVTLGQELGAYADALAHGCRELRDVLAYVGEIPLGGTAVGTGFGTHPRFRRLAIDAINKTSGLRLSEGNTFRGMRLLTDVLYLSAALRNIAVELMRLAQDVRLMFSGPTAGLAEIDLPSQAEVPGSSMMPGKINPVTAEAVMLAAAQIVGLDHANQAAAGLGEFELAMGIPLIGYNVVAQINLLSEASGKLSELVIADMKPRRDRLRDLAERSPALATALAPALGYEGVSQVVRKISEGKSIRVALEEVGRPDLAQEIPDVDNMAQAPEAERRIDCDSYK

SEQ ID NO: 6340 - DNA, 1368 bp, Listeria monocytogenes str
  CDS (1)..(1368)
atggaacgaatagagcgagatacgcttggagaaatttctgtagatgcgacgaaatattggggagcgcaaacagaacgaagtaaaaggaactttgctattggtgataatcctatgccgatagaaattatatatgcttttgctcaattaaagaaagccactgcaaaagtaaacgcagcagaaggaaaactatccgaagaaaaagcgatagcgattggccaggtttgtgatcaaatcattcaaggagaactagatgagcattttcctttagtcgtttggcaaaccggaagcggaacgcagagcaacatgaatgtcaatgaagttatcgcacatgttgccaacttaactttaggcgaaggacaaattcatccgaatgatgatgtcaacatgtcgcaaagctcgaacgacacatttccaacagcgatgcatatcgctgcatacggggctttagtaacaaaacttttacctgaaataactaaaatggaagctgttttggcagagaagaaaagtaaatacatgcatctcgttaaaattggcagaacacatttgcaagacgcaaccccattaacacttggccaagaaattagtggctgggaagcatgtcttacaaataataaaaactatcttgaaacaagtatgaaagcaattttgccacttgcgattggtgggacggcagttggaactggcttaaatgcctcacgtgattttggtgataaggttgccgaagaattgatgaaacaaacgggatatccttttacttctgattccaataagtattttgctctaactagtcatagtccgattaattttgttcatggatccattcgtagccttgcttcggatctaatgaaaattgctaatgatatccgtttattagcaagtggaccacgtagcggcataggtgagttaacgatcccagttaatgaaccaggaagctccattatgccaggaaaagtaaatcctactcaatgtgaagcaatgacgatggtagcggctcaagtcatgggaaatgatgtgacaattaatgttgctgccagccaaggaaactttgaactcaatgtctacaagccagttatcatttttaatttcttagaatctgtcaaactgctttcagatagcatgcgttcgttccgattgcattgtttggaaggactcactgcgaatgaaaaagttattgaaacaaaagtaaatgactccctaatgcttgtgacagcattgaatccgcatatcggctatgaaaaagctgccaaaattgccaagctggcttttgatgaaaatacgacattaaaagaagcggcaatcaaaaccggttttgtgacagaaaagcaatttgatttatggattgatccgttaaaaatgactaatttgtaa

SEQ ID NO: 6341 - protein, 455 aa, Listeria monocytogenes str
MERIERDTLGEISVDATKYWGAQTERSKRNFAIGDNPMPIEIIYAFAQLKKATAKVNAAEGKLSEEKAIAIGQVCDQIIQGELDEHFPLVVWQTGSGTQSNMNVNEVIAHVANLTLGEGQIHPNDDVNMSQSSNDTFPTAMHIAAYGALVTKLLPEITKMEAVLAEKKSKYMHLVKIGRTHLQDATPLTLGQEISGWEACLTNNKNYLETSMKAILPLAIGGTAVGTGLNASRDFGDKVAEELMKQTGYPFTSDSNKYFALTSHSPINFVHGSIRSLASDLMKIANDIRLLASGPRSGIGELTIPVNEPGSSIMPGKVNPTQCEAMTMVAAQVMGNDVTINVAASQGNFELNVYKPVIIFNFLESVKLLSDSMRSFRLHCLEGLTANEKVIETKVNDSLMLVTALNPHIGYEKAAKIAKLAFDENTTLKEAAIKTGFVTEKQFDLWIDPLKMTNL

SEQ ID NO: 6342 - DNA, 1407 bp, Desulfovibrio vulgaris
  CDS (1)..(1407)
atgatgacaccggccgtacgcatcgaacatgacagcatgggggctgtggaggttcccgccgaccgctactggggggcccagacgcagcgcgcactggagcatttccgcatcggcacggaacggatgccgcaggagatggtgcaggcgctagggctcatcaagagggcggcggccgagaccaatgccgcgttggagctcctgccccggcagactgcggacgccgtggcgcgtgccgccaccgaggtggcgtccggtgcactgcccaaccattttcccctctgtgtgtggcagacaggtagcggcacccagaccaacatgaatgtcaacgaggtggtggccaaccgtgcatgtgaactgctgggcggtgtgcgtggcgaccggaaactcgtgcaccccaacgaccacgtcaacctctgccagtcgtccaacgatgtctttcctgcggccatgcacatcgcagcggcgctgggcctgcgcagcatgctgctgccctcgcttcaagcgctggaggccgaactggaggcacgggcacacgagttcgcgggtctggtgaaggtgggccgaacccacttgcaggacgcggttcccctcactctggggcaggaattctcggggtatgcggctcagcttgcgttgtgccgccgtcaactggagggcatgatgcccctcttgtgcgccctcgcgctggggggcactgccgtgggcaccgggctcaatgcccatcccgagttcgcgcggcgtgccgtggcgcgtctggcggggtacaccggcctgccgttcctgccagtggacaatcctttcgccgctcttgcggggcacgaggcccttgtggcctatagcggtgccctgcgtacgctggcagtggcccttttcaaggtgggcaacgacatccggttgctggcgtccggcccgcgctgcggtatcggtgaactggaactgcctgccaacgaacccggttcttccatcatgcccggcaaggtgaaccccacccagtgcgaggccctgaccatggtggcggtgcaggtcatgggtctggacaacgccgtgggcatcgccggttcgcaagggcatctcgaactcaacgtgttcaagccactcatcgcgagaaatgtgctcgaatcggcgcgtctgctggccgacagcatgcgttcattccgtatgcatgcggtgcgggggctgcgggcggtgcccgaacgcatcgcctcgcatgtcgaccggtcgctcatgctcgtcacggccctgtcgcggcatgtgggctatgaccgggcggcagaggtcgcccatcttgcccatgccgagggactgacgctacgggaggcgtgcctgcgccttggcctcatggacggcgaagccttcgacagggccgtcgaccctgtccggatggcgcacccgcacgacatgggctga

SEQ ID NO: 6343 - protein, 468 aa, Desulfovibrio vulgaris
MMTPAVRIEHDSMGAVEVPADRYWGAQTQRALEHFRIGTERMPQEMVQALGLIKRAAAETNAALELLPRQTADAVARAATEVASGALPNHFPLCVWQTGSGTQTNMNVNEVVANRACELLGGVRGDRKLVHPNDHVNLCQSSNDVFPAAMHIAAALGLRSMLLPSLQALEAELEARAHEFAGLVKVGRTHLQDAVPLTLGQEFSGYAAQLALCRRQLEGMMPLLCALALGGTAVGTGLNAHPEFARRAVARLAGYTGLPFLPVDNPFAALAGHEALVAYSGALRTLAVALFKVGNDIRLLASGPRCGIGELELPANEPGSSIMPGKVNPTQCEALTMVAVQVMGLDNAVGIAGSQGHLELNVFKPLIARNVLESARLLADSMRSFRMHAVRGLRAVPERIASHVDRSLMLVTALSRHVGYDRAAEVAHLAHAEGLTLREACLRLGLMDGEAFDRAVDPVRMAHPHDMG

SEQ ID NO: 6344 - DNA, 1389 bp, Bacillus cereus
  CDS (1)..(1389)
atggagtacagaattgaaagagacacattaggagaaattaaagttccagctgataaattatgggcagcacaaacacaacgtagtaaagaaaactttccgattggcacagagcaaatgccgcttgaaattgtaaaagcatttgccattttaaagaagagtgcagcacttactaataaaaaattaggaaagttatcagaagaaaaagcagaagcaattgtgacagcagctgacgaagtgattgcagggaaatggaatgaacattttccacttgtcgtatggcaaacaggtagtggtactcagtcaaatatgaatgtgaatgaagtaattgcaaaccgagggaatcaaattttgaaagagaagggatttgacgtacatattcatccgaatgatgatgtgaacatgtctcaaagttcaaatgatactttcccaactgcgcttcatgtagcatgtgtactcgcagtagaaaatcacgtgttaccagcaattacgaaattaaaagaaacgttagcagaaaaagtaaaagcatttgaaaatattataaaaattggtcgtacacatttacaagatgcgacaccgttaacattaggacaagaaattagtggatggcaccgtatgcttgaaaaaacagagcgtatgattgcagagagcaatacatatatgaaagagcttgcgattggtggtactgcagttggaacaggtataaacgcccatcctaaatttggtgagatggtatctgaggaaattagccaatttacaggtaagcaatttatttctgcaccaaataaattccatgcattaacgagtcatgatgaagttgtatatacacatggggcattaaaagcattagcagcggatttaatgaagatcgctaacgatgtgcgctggctggcaagtggtccacgtagtgggctaggagaaattattattccagcaaatgagccaggaagctctattatgccaggaaaagtaaatccaacgcaaagtgaagcgttaacgatggttgtagcacaagtgatgggaaatgacgcaacaattggatttgcagcgagccaaggcaattttgagttaaatgtatttaaacctgttattgcatataacttcttacaatctgctcacttattagcagatgcaattgtttcatttaatgataattgtgcagttggtattgaagcagatgaagaagtcattaaagagaatgtgaatcgttcattaatgcttgttacagcattaaacccgcatatcggatatgaaaatgcagcgaaaattgcgaagcatgctcataaagaagggctaactttaaaagaagcagcgttgcaatctggactactaacagaagtacaatttgatgaaattgtcgatccgaaaaaaatgattgctccgaaagagtaa

SEQ ID NO: 6345 - protein, 462 aa, Bacillus cereus
MEYRIERDTLGEIKVPADKLWAAQTQRSKENFPIGTEQMPLEIVKAFAILKKSAALTNKKLGKLSEEKAEAIVTAADEVIAGKWNEHFPLVVWQTGSGTQSNMNVNEVIANRGNQILKEKGFDVHIHPNDDVNMSQSSNDTFPTALHVACVLAVENHVLPAITKLKETLAEKVKAFENIIKIGRTHLQDATPLTLGQEISGWHRMLEKTERMIAESNTYMKELAIGGTAVGTGINAHPKFGEMVSEEISQFTGKQFISAPNKFHALTSHDEVVYTHGALKALAADLMKIANDVRWLASGPRSGLGEIIIPANEPGSSIMPGKVNPTQSEALTMVVAQVMGNDATIGFAASQGNFELNVFKPVIAYNFLQSAHLLADAIVSFNDNCAVGIEADEEVIKENVNRSLMLVTALNPHIGYENAAKIAKHAHKEGLTLKEAALQSGLLTEVQFDEIVDPKKMIAPKE

SEQ ID NO: 6346 - DNA, 1395 bp, Wolbachia pipientis wMel
  CDS (1)..(1395)
atggatagaaagacgagaatagaatcagacagcttaggggaagtaaaagtaccaagtgaacattactggggagcacagactcagcgttctttagaaaattttaagattggcacagaaaaaatgccagagcctctgattaaagcattagcaatagtaaaacttgcagcagcgcgtgttaatatgaaacatggtgttatagatgatagggtaggggacgcaatttgcacagccgcgagggaagtaatagatggcaaatttaataatgaatttccgcttgttgtttggcaaaccggatccggaacgcagactaatatgaatatgaatgaagtgatcagcaatcgtgcaatagagattttaggtggtaatttgggtagtaaatctccaatacatccaaatgatcatgtgaattatggtcagtcgtcaaatgacacctttccaacagcaatgcatatagcagcagcagagcaaataaactgcttgcttattccaaatcttgaaaaattgcataaggtgctggataataaggttcaggaatttaaagatataataaaagtaggacgtactcatctgcaagatgcaacgcccctaacactaggacaggagttttctggctatgcagcccagattaaaaaggggatagagagagtaaaatcaactttaagtggtatatacgagcttgcacaaggtggcactgcggttggcacgggactcaatactaaaaagggttttgctgaagattttgcaaagcaagttgcaggaattactaaccttccatttacttcagcaggcaataaatttgaagcgctagcagcaaatgatgctttagttgagctcagtggaacactcaatacagtagcagtcagtttaatgaaaattgcaaatgatataaggttgcttggttctggtccaagatgcggaattggggaaataatgttaccggaaaatgagcctggttcttcaattatgccaggtaaagtgaatccaactcagtgtgaagcggtgactatggtatgcactcaagttatgggaaatcatgttgctgtaaccattagtggttcaaacggtcattttgaattgaatgtgtttaagccagtgataatttacaatgttttgcagtctataagacttttagctgacgcaagtttaaattttacagaaaaatgtgtagttggtattaaagcaaatgaagagaggataaaagatttactgaatcagtcgttgatgttggtcactatattaaatacgcatatagggtacgacaatgcagcaaaaatagcgaagcttgcttataaagaaaatatcactctaaaggaagcagcagcaaaacttcaactgctcactgaggaagagtttgaaaggatagtgaaaccagaagaaatggtaaattatttgtaa

SEQ ID NO: 6347 - protein, 464 aa, Wolbachia pipientis wMel
MDRKTRIESDSLGEVKVPSEHYWGAQTQRSLENFKIGTEKMPEPLIKALAIVKLAAARVNMKHGVIDDRVGDAICTAAREVIDGKFNNEFPLVVWQTGSGTQTNMNMNEVISNRAIEILGGNLGSKSPIHPNDHVNYGQSSNDTFPTAMHIAAAEQINCLLIPNLEKLHKVLDNKVQEFKDIIKVGRTHLQDATPLTLGQEFSGYAAQIKKGIERVKSTLSGIYELAQGGTAVGTGLNTKKGFAEDFAKQVAGITNLPFTSAGNKFEALAANDALVELSGTLNTVAVSLMKIANDIRLLGSGPRCGIGEIMLPENEPGSSIMPGKVNPTQCEAVTMVCTQVMGNHVAVTISGSNGHFELNVFKPVIIYNVLQSIRLLADASLNFTEKCVVGIKANEERIKDLLNQSLMLVTILNTHIGYDNAAKIAKLAYKENITLKEAAAKLQLLTEEEFERIVKPEEMVNYL

SEQ ID NO: 6348 - DNA, 1413 bp, Mycobacterium paratuberculosis
  CDS (1)..(1413)
atggccactgacgacggcgacaccgactaccgcatcgagcgcgacaccatgggcgaggtccgggtacccgcaaaagcgttgtggcgcgcgcaaacccagcgcgcggtcgagaacttcccgatctcgggccggggcctggaacgcacccagatccgcgccctgggcctgctgaagggcgcctgcgcgcaggtcaacaaggatctggggctgctggcgccggagaaggccgacgcgatcatcgccgcggccgccgagatcgccgacggtcgccacgacgaccagtttcccatcgacgtcttccagaccggctcgggcaccagctcgaacatgaacaccaacgaggtgatcgcgtccatcgcggccgccaacggggtgaccgtgcatcctaacgacgacgtcaacatgtcgcagtcgtcgaacgacaccttccccaccgcaacccacatcgcggccacggaagccgcagtgcgccatctgattccggcgctgcaggtgctgcacgacgccctggcgagcaaggcccgcgagtggcacaccgtggtcaagtcgggccgcacccacctgatggacgccgtgccggtgacactcggccaggagttcagcggctacgcccgccagatcgaggccggcatcgaacgggtgcgggccacgctgccccggctgggtgagctggcgatcggcgggaccgcggtgggcaccggcctcaacgctcccgacggcttcggcgccaaggtggtcgagacgctgatcgcctccaccggattgagcgaattgcgcacggcgacaaactcgttcgaggcccaggcggcgcgcgacgggctggtcgaggcctccggcgcgctgcgcaccatcgcggtgtcgctgaccaagatcgccaacgacatccgctggatgggctcggggccgctgaccggcctggccgagatcgcccttcccgatctgcagccgggcagctcgatcatgccgggcaaggttaatccggttatccccgaagcggttacgcaggtcgccgcgcaggtgatcggcaacgacgcggcggtggccgtcggcggcttgtcgggcgccttcgagctcaacgtgtacatcccgatgatggcccgcaacatcctggagtcgttcaagctgctgaccaacgtgtcgaggctgttcgccgagcgctgcatcagcgggctgagcgccaacgtggagcacctgcgcgagctcgccgaatcctcaccgtccatcgtgacgccgctgaactcggcgatcggctacgaggaggcggcggcggtggccaagcaggcgctcaaggagcgcaagacgattcggcagaccgtcatcgaccgcgggctgatcggcgacaagctgtcgctcgaggagctcgaccgccggctcgacgtgctggccatggccaaggtcaagccgcaggactga

SEQ ID NO: 6349 - protein, 470 aa, Mycobacterium paratuberculosis
MATDDGDTDYRIERDTMGEVRVPAKALWRAQTQRAVENFPISGRGLERTQIRALGLLKGACAQVNKDLGLLAPEKADAIIAAAAEIADGRHDDQFPIDVFQTGSGTSSNMNTNEVIASIAAANGVTVHPNDDVNMSQSSNDTFPTATHIAATEAAVRHLIPALQVLHDALASKAREWHTVVKSGRTHLMDAVPVTLGQEFSGYARQIEAGIERVRATLPRLGELAIGGTAVGTGLNAPDGFGAKVVETLIASTGLSELRTATNSFEAQAARDGLVEASGALRTIAVSLTKIANDIRWMGSGPLTGLAEIALPDLQPGSSIMPGKVNPVIPEAVTQVAAQVIGNDAAVAVGGLSGAFELNVYIPMMARNILESFKLLTNVSRLFAERCISGLSANVEHLRELAESSPSIVTPLNSAIGYEEAAAVAKQALKERKTIRQTVIDRGLIGDKLSLEELDRRLDVLAMAKVKPQD

SEQ ID NO: 6350 - DNA, 1407 bp, Lactobacillus johnsonii
  CDS (1)..(1407)
atggtgaaaaaaggttatcgtgttgaaagtgatacattaggcccagtagaaattcctaaaaaggcattgtggggtccacaaacacaaagaagtaaggataatttccatactggagcgttaatgccaattggtattattcgtgcgcttcttcaaataaagctagctgctgctcaagctaatattgaagcaggaactgaaacagaagaaaaaggacgtgccattattgaagcaattcatcaactacttgatttaaacaatgaagaattgcaaccatattttccattgcatgtctatcaaactggatcaggtacccaaactaatatgaatgttaatgaagtggtggctaatcttgctaataaaaatcatcccggtttagatattttacctaatgatgatgtgaacatgggacaatcatcaaatgatacttttccaactgcaatgaatttagttgcaacacaagcgttagatgacttaaaaccttctattaaacacttgattaaagaactaaaagtgaaacaagatgagtattggacaacggttaaagtaggaagaacccacttgcaagatgcggttccattgacttttggtcaggaactatcaggctatatttctgctcttaatcatgatttatcctacattaacgagttagaagaaacactttatgaattaccaattggaggaactgcggttggcactggacttaatgcagctcctggtatggcagaagatatcgctgagcgtttatcaagaaagtatggacataattttaaagttgatacaaataaattctttggtttagcaaatcactcaggcttaaatgttgtgcatggcgctttaaaagctttggcagctgatatgttcaaaattgctcaagatattcgtttcttaggatctggcccaagagctggtttaggagaacttaatttacctgcaaacgaacctggttcatcaattatgccaggtaaagtaaatccgactcaagcagaagctgttaccatggcatgtttgagagtctttggaaatgatacaactattactatggctgcatctcaaggaaactttgaaatgaatgtctttaagccagtgatgattgcagcatttttagagtctgccaatgttttatctggaactatttctggctttgcagataagatgattcatggtatgactgttaataaagaaagaatggctaaggatgtagcaaattcattaatgacagttactgcactttcaccacatattggttaccatgaagctgctactattgcacagactgcagctaaaaataatacgactttgcgtacagcggctttaaagagcggcttagttactaaagaacaatatgataagtggatgaaaccaattaccatgactaatgcaatgaatactaagccaattgatgattag

SEQ ID NO: 6351 - protein, 468 aa, Lactobacillus johnsonii
MVKKGYRVESDTLGPVEIPKKALWGPQTQRSKDNFHTGALMPIGIIRALLQIKLAAAQANIEAGTETEEKGRAIIEAIHQLLDLNNEELQPYFPLHVYQTGSGTQTNMNVNEVVANLANKNHPGLDILPNDDVNMGQSSNDTFPTAMNLVATQALDDLKPSIKHLIKELKVKQDEYWTTVKVGRTHLQDAVPLTFGQELSGYISALNHDLSYINELEETLYELPIGGTAVGTGLNAAPGMAEDIAERLSRKYGHNFKVDTNKFFGLANHSGLNVVHGALKALAADMFKIAQDIRFLGSGPRAGLGELNLPANEPGSSIMPGKVNPTQAEAVTMACLRVFGNDTTITMAASQGNFEMNVFKPVMIAAFLESANVLSGTISGFADKMIHGMTVNKERMAKDVANSLMTVTALSPHIGYHEAATIAQTAAKNNTTLRTAALKSGLVTKEQYDKWMKPITMTNAMNTKPIDD

SEQ ID NO: 6352 - DNA, 1467 bp, Ashbya gossypii
  CDS (1)..(1467)
atgctcagactaagcagaggttgtgtaggaagcagcgcagcgcgtaggttgatgtcgacagcaggagcgccacagcagttcagggtcgagacggacgccttcggggagatccgggtgccagcagacaagtactggggcgcgcagacacagcggtcgctggagaacttccggatcggcggagcgcgcgagcgcatgccggagccggtggtgcgcgcgttcggcgtgctcaagaagtctgcggcggtggtcaacgagcagctgggcacgctggagccgggcattgcgaaggcgatccagcaggcggcggacgaggtggcccagggccagctgatggagcacttcccgctggtggtgttccagaccgggtcgggcacgcagagcaacatgaacgccaacgaggtgatctcgaaccgcgcgattgagctgctgggcggagagctgggcagcaagcaggtgcaccccaacaaccactgcaaccaggcgcagtcgtcgaacgacacgttcccgtcggtgatgcacatcgcggcggtgacggagatcacgcgctcgctgctgccggagctggaggcgctgcgcgtgtcgttccagcgcaagacggacgagtttgcgcacatcgtcaagatcgggcgcacgcacctgcaggacgcgacgccgctgacgctgggccaggagttcagcggctacacacagcagatcgccaacggcatcgcgcgcgtcgagcacgcgcaggagagcctgcgcttcctcgcgcagggcggcaccgccgtgggcacgggcctcaacacgcgccgcggcttcgcggagcagatcgcggcccaggtgtcccgcgagaccggcctcgagttccgcaccgcgcccaacaagttcgaggcgctggccgcgcacgacgccgtcgtcgaggcctccggcgcgctcaacacgcttgcctgctcgctgttcaagatcgccaacgacatccgctacctcggctccggcccccgctgcggctacggcgagctctcgctgcccgagaacgagcccggctcctccatcatgcccggcaaggtcaacccgacccagaacgaggccctcacgcaggcctgcgtccaggtcatgggcaacaacgccgccatcaccttcgcgggcgcgtccggccagttcgagctcaacgtcttcaagcccgtcatgatcgccaacctgctcagctccgtccgcctgctcgccgacgccgcgcgctccttccgcgtccactgcgtcgacggcatccaggacaacgaggaccgcatcgccaagctgctgcacgagtcgctgatgctggtcacagctctgaaccccaagatcggctacgacgccgcctccgcggtcgccaagaacgcccacaagaagggcatcaccctccgcgcgtccgcgctcgagcttggcgtcctgaccgacgcggagttcgacgagtgggtcgtccccgagaagatgattggtccccgcgactaa

SEQ ID NO: 6353 - protein, 488 aa, Ashbya gossypii
MLRLSRGCVGSSAARRLMSTAGAPQQFRVETDAFGEIRVPADKYWGAQTQRSLENFRIGGARERMPEPVVRAFGVLKKSAAVVNEQLGTLEPGIAKAIQQAADEVAQGQLMEHFPLVVFQTGSGTQSNMNANEVISNRAIELLGGELGSKQVHPNNHCNQAQSSNDTFPSVMHIAAVTEITRSLLPELEALRVSFQRKTDEFAHIVKIGRTHLQDATPLTLGQEFSGYTQQIANGIARVEHAQESLRFLAQGGTAVGTGLNTRRGFAEQIAAQVSRETGLEFRTAPNKFEALAAHDAVVEASGALNTLACSLFKIANDIRYLGSGPRCGYGELSLPENEPGSSIMPGKVNPTQNEALTQACVQVMGNNAAITFAGASGQFELNVFKPVMIANLLSSVRLLADAARSFRVHCVDGIQDNEDRIAKLLHESLMLVTALNPKIGYDAASAVAKNAHKKGITLRASALELGVLTDAEFDEWVVPEKMIGPRD

SEQ ID NO: 6354 - DNA, 1323 bp, Anopheles gambiae str
  CDS (1)..(1323)
atgaagagcaggactgaacacgacagcttcggcgcaatcgccgtgccggccgatcggctgtggggagcccagacccagcgctccctgcagcacttcgacatctccggcgagcgccagccgatggcgctgatccacgccctggcccgcatcaagtcggcctgtgcccgggtcaaccacgccaacgggctgctgcccgcccgcacggcgcaggccatcatgagtgccgccgacgagatcctgtgcggccagcatgatgaggagttcccgctgcgggtatggcagaccggctcaggcacccagaccaacatgaacctcaacgaggtgctggccaaccgggccagcgagctgcttggcggcctgcgcggcgaggggcggctggtgcaccccaacgacgaggtgaacaagagccagtcgagcaatgacgtcttcccgagtgccatgaacctggcagccgtcacggccatcaccgggcacctgctgcccgccttgacgactctgagtaccaccctggccggcaaggcggcggctttcgacaacatcgtcaagataggccgcacccatctgcaggatgccaccccgctcaccctggggcaggagttctccggctgggtcgcccagctcgagcagggggagcgccatatccgggccgccctgccccatctgtgcgagctggccctcggcggcacagccgtcggcaccggcctcaacaccccgcccggcttcgccgaggcggtggccgccaccctggccgagcagaccggcctgccgctgacgctggctgcctccctcatgaagatcgctaacgacgtgcgctggctggcgagcggcccccgcagtgggctgggggagcttatcatcccggaaaacgagccaggctcatccatcatgcctggcaaggtcaatccgacccagtgcgaggcgctcaccatgctgtgcgcccaggtgatgggcaacgacgtggccatcaacatcggcggcgccagcggcaacttcgagctcaacgtgtttaggccgatgatcgcccacaacttcctgcagagcgtgcggctgctggcggacggcatgcagagcttccaccatcattgcgccgtcggcatcaccccgaaccggccccgcatcgacgagctgctggcccgctccctgatgctggtgacggcgctcaacccccatatcggctatgacaaggcggcagagatcgccaagcgggcccaccatgaggggctcagcctgcgggaggcggccatcgcctccggccacctgacggcgcagcagttcgatgcctgggtggtgccggccgacatggtgggtcggcgcggcggctga

SEQ ID NO: 6355 - protein, 440 aa, Anopheles gambiae str
MKSRTEHDSFGAIAVPADRLWGAQTQRSLQHFDISGERQPMALIHALARIKSACARVNHANGLLPARTAQAIMSAADEILCGQHDEEFPLRVWQTGSGTQTNMNLNEVLANRASELLGGLRGEGRLVHPNDEVNKSQSSNDVFPSAMNLAAVTAITGHLLPALTTLSTTLAGKAAAFDNIVKIGRTHLQDATPLTLGQEFSGWVAQLEQGERHIRAALPHLCELALGGTAVGTGLNTPPGFAEAVAATLAEQTGLPLTLAASLMKIANDVRWLASGPRSGLGELIIPENEPGSSIMPGKVNPTQCEALTMLCAQVMGNDVAINIGGASGNFELNVFRPMIAHNFLQSVRLLADGMQSFHHHCAVGITPNRPRIDELLARSLMLVTALNPHIGYDKAAEIAKRAHHEGLSLREAAIASGHLTAQQFDAWVVPADMVGRRGG

SEQ ID NO: 6356 - DNA, 1602 bp, Neurospora crassa
  CDS (1)..(1602)
atgcttcgatcgatgcgcactgccggccgcctggccaagcctcgggctgctgctgccgctgctagcacatgcctctctggcaccgcccgcgttgcttcaaatgccgccagctcctcctccaaggccgccgtcagcttctccgttgctcccaagaccactgctcgttacttctccagctcctccgccatggccaagaacaccagaatcgagaccgacgcctttggcgagattgaggtcgaggatgacaagtactggggcgcccagacccagcgctctctgagcaacttcaagatcaaccagccccaggaccgcatgccccctcccatcatcaaggctttcggtatcctcaagggcgctgccgccaaggttaacacgcgctacggccttgaccccaagattgccgaggccatccagcaggccgccaaggaggtcgccgacctcaagctcctcgaccacttccccctcgtcgtctggcagaccggctccggcacccagtccaacatgaacgccaacgaggtcatctccaaccgtgccattgagatcctcggcggcgtcaagggctccaagaagcctgtgcaccccaacgaccacgtcaaccgctccgcctcgtccaacgacaccttccctaccgtcatgcacatcgccgccgtcctcgaggtcgagggtgagctcctgcccgcgctcaagtccctccgcgacgccctccaggccaaggtggacgagttcgaggccaagaagatcatcaagatcggccgcacccacttgcaggacgccacccccttgactctcgcccaggagttctctggctacgttgcccagctcgacttcggcatcaagcgcgtcgaggagtccctccccgacctccgcctgctcgcccagggcggcaccgccgtcggcaccggcatcaacacgtacattggcttcgccgaggccattgccgaggaagtcaccaagatgaccggcaccgagttcaagacggcccccaacaagtttgaggctctcgccgcgcacgacgccctcgtccacgctcacggcgccctcaacaccctggctgcctctttgaccaagatcgcccaggacatccgctacctcggctccggcccgcgctgcggcctcggcgagctcaacctgcccgagaacgagcccggctcgtccatcatgccgggcaaggtcaaccccacccagtgcgaggccttgaccatggtctgcgcgcaggtgatgggcaaccacgtggccaccaccattggcggcatgaacggccagttcgagctgaacgtgtacaagcctctgatcatccgcaacttcttgcactctgtccgcctgttggccgatggcatgcgctccttcgagaagaacttggtccacggcttgacggccaacgaggagaggattgccaagatcatgaaggagagtctgatgctggttacttgcttgaaccccaagattggctacgacatggcgtccaaggtggccaagaacgcgcacaagaagggcttgacgctcaagcagtcggcgctcgagctgggtgcgttgacggaggaggagtttgatgccttggtgaagcccgagttgatgattggtcctcagccttacaagggttag

SEQ ID NO: 6357 - protein, 533 aa, Neurospora crassa
MLRSMRTAGRLAKPRAAAAAASTCLSGTARVASNAASSSSKAAVSFSVAPKTTARYFSSSSAMAKNTRIETDAFGEIEVEDDKYWGAQTQRSLSNFKINQPQDRMPPPIIKAFGILKGAAAKVNTRYGLDPKIAEAIQQAAKEVADLKLLDHFPLVVWQTGSGTQSNMNANEVISNRAIEILGGVKGSKKPVHPNDHVNRSASSNDTFPTVMHIAAVLEVEGELLPALKSLRDALQAKVDEFEAKKIIKIGRTHLQDATPLTLAQEFSGYVAQLDFGIKRVEESLPDLRLLAQGGTAVGTGINTYIGFAEAIAEEVTKMTGTEFKTAPNKFEALAAHDALVHAHGALNTLAASLTKIAQDIRYLGSGPRCGLGELNLPENEPGSSIMPGKVNPTQCEALTMVCAQVMGNHVATTIGGMNGQFELNVYKPLIIRNFLHSVRLLADGMRSFEKNLVHGLTANEERIAKIMKESLMLVTCLNPKIGYDMASKVAKNAHKKGLTLKQSALELGALTEEEFDALVKPELMIGPQPYKG

SEQ ID NO: 6358 - DNA, 1632 bp, Rhodopirellula baltica
  CDS (1)..(1632)
atgcagtctgcccacccaactttcggccgccgtgtcttgcgattcgtttcctacgattcgaccgaacgccagatagtagcagaaaccatcgcagagtttgggtttcgggcgtcgttcgcgccgtttcagtggattgctaccatgaccggcatcacggtttttgcttttgacgacccgtttttcctccttgttgatccagctatcgctatgaccgattttcgaaccgaacgcgactcgatgggcgaagtccgcgtgccgcaaaacgcttactacggtgcccagactcaacgtgcggtcgagaactttcctgtcagcggctggcaactcccgccgtcgatgatcgcggcgatgggacgcgtcaaattggcatgcgggatcgccaaccgcgatctcggaaagttgacgggttcgggcaagaacccgcttagcgatggtcaagtcgaatcgatgttgtcggcggccaaggaagtcgccgagggacagttggcggatcagttccccgtggacgtgttccagacgggcagcggcaccagcagcaacatgaacatcaacgaagtgctgtccaatcgcgcgatcgaaatcgatggcggcgaccggatggcggaggaaaagtcgatccaccccaacgatcacatcaacatggggcaatcgaccaacgacaccttcccaaccgcgattcatgttgcggccgcttacgaaatcgaaaatcgattgttgccagcattgcgacgcatgcacgaatcgctgacggaaaaagcccaggcttgggacaagatcatcaagatcggacgcactcacctgatggacgcaacgccgttgcgattgggacaggagtttggcggatttgctcgtcaaattgaattgtcgatcgcccgcgccgaagcggcccgcgacgcggtgctggaattgcccgtcggtggcacggcggttggcagcggtatcaacactcaccctgaatttggtgctcgcgtcgcggccagcttgtcagagcaaaccggcatcgctttcatcgaagcggtcaaccatttcgaaggcaacgcgaaccgcgatggtttggtggattcacacggtggattgaagtgcgtcgctcaaacgttgctcggtctggcgaacaacatccgctggctgggcagcggacctcgttgcggtttttatgaagtcaaactgccgactcgccaaccgggaagctcgatcatgcccggaaaggtcaatccggtgatgtgcgagtcgctgatgcaggtcgccgcccgcgtgatcggcaacgacacttgcatgacggtcagcggaggctgcggcggcaacttccagctcaacatcatgatgcccgtgatggctcacaccatcttggagtccatcgagttgttggccggtggtgtcaccgcgttcatcgatttctgcttggatggcatggaacccaacgaagaagcttgcgaagcctcggtggagcagagcctctccatgtgcaccagtctgaacccgttgatcggatacgaacaagccgctgcgctggccaaggaagcgttcaagtccggtcaaacgattcgcgaactgtgcaaagaaaaagggatcttggccgacgacgttctgaccgaagcgttggatccttggaaaatgaccgagccgcaagcatag

SEQ ID NO: 6359 - protein, 543 aa, Rhodopirellula baltica
MQSAHPTFGRRVLRFVSYDSTERQIVAETIAEFGFRASFAPFQWIATMTGITVFAFDDPFFLLVDPAIAMTDFRTERDSMGEVRVPQNAYYGAQTQRAVENFPVSGWQLPPSMIAAMGRVKLACGIANRDLGKLTGSGKNPLSDGQVESMLSAAKEVAEGQLADQFPVDVFQTGSGTSSNMNINEVLSNRAIEIDGGDRMAEEKSIHPNDHINMGQSTNDTFPTAIHVAAAYEIENRLLPALRRMHESLTEKAQAWDKIIKIGRTHLMDATPLRLGQEFGGFARQIELSIARAEAARDAVLELPVGGTAVGSGINTHPEFGARVAASLSEQTGIAFIEAVNHFEGNANRDGLVDSHGGLKCVAQTLLGLANNIRWLGSGPRCGFYEVKLPTRQPGSSIMPGKVNPVMCESLMQVAARVIGNDTCMTVSGGCGGNFQLNIMMPVMAHTILESIELLAGGVTAFIDFCLDGMEPNEEACEASVEQSLSMCTSLNPLIGYEQAAALAKEAFKSGQTIRELCKEKGILADDVLTEALDPWKMTEPQA

SEQ ID NO: 6360 - DNA, 1395 bp, Eikenella corrodens
  CDS (1)..(1395): transl_table=11
atgacaacccgaaccgaacacgacttcttcggcgaacgcgaaatccccgcaaccgcttattggggtatccacaccctgcgcgcagtggaaaacttccaaatctccgggcagaagatttccgacgtaccccagtttgtgcgcagcatggtgatggtgaaaaaagccgctgcccaggccaacggcgagctgggcgcactcaagcccgaaatcgccgccgccattgcccaagcttgcgacgaggtgctgctcaaaggccgttgcctcgaccagttcccatccgacgtattccaaggcggcgccggcacttcggtgaacatgaacaccaacgaagtgatcgccaacctcgccttggaagccttaggccaagccaaaggccgctacgacatcgtcaatcccatggatcatgtgaacgccagccaatttaccaacgacgcttaccctaccggcttccggctggctgtatacaccagcatcggcgaactgctagacaaactggcatacctgaaaaacacctttgctgccaaagctgatgaattcaaagacatattaaaaatgggccgcacccagctgcaagatgccgtgcccatgactgccggccaagaattccaatccttccaagtgctgctggcagaagaggaaaccaacctcgaacgcacccgccaactgctgctggaagtgaacctcggcgccacagccatcggcacaggcatcaatacgccgcaaggctacgcgccgctggccgtacaaaaactctccgaaatcagcggcctgccctgcaagctcaccgaaaacctgattgaagccacttccgactgcggtgcctatgtgatggtgcacggcgccctcaagcgcaccgccgtgaagctctccaaaatctgcaacgacctgcgcctactctcctccggcccgcgtgccggcctgaaagaaatcaacctgccggaaatgcaggccggctcatcgattatgcccgccaaggtgaatcccgtgattcccgaagtggtgaaccaagtttgtttcaaagtaatcggcaacgacaccaccatcaccttcgccgccgaagccggccagctccatcaacgtgatggagccggttatccgcaatccatgtttgaaagcatctcgcttttaggcaacgccgccattacgttggccgacaaatgcgtgcgcggcatcacggtaaaccgcgaaatctgcgaacgctacgtcttcaactccatcggcctggtaacctatctcaacccctatatcggccacgaaaacggcgacctggtgggcaaaatctgcgctcaaaccggcaaaaccgtgcgcgaagtggtactggagcgccagctcttgagcgaagcggagctcgaccgtatcctgtcgccacaaaacttggccaatccgcatttgtaa

SEQ ID NO: 6361 - protein, 464 aa, Eikenella corrodens
MTTRTEHDFFGEREIPATAYWGIHTLRAVENFQISGQKISDVPQFVRSMVMVKKAAAQANGELGALKPEIAAAIAQACDEVLLKGRCLDQFPSDVFQGGAGTSVNMNTNEVIANLALEALGQAKGRYDIVNPMDHVNASQFTNDAYPTGFRLAVYTSIGELLDKLAYLKNTFAAKADEFKDILKMGRTQLQDAVPMTAGQEFQSFQVLLAEEETNLERTRQLLLEVNLGATAIGTGINTPQGYAPLAVQKLSEISGLPCKLTENLIEATSDCGAYVMVHGALKRTAVKLSKICNDLRLLSSGPRAGLKEINLPEMQAGSSIMPAKVNPVIPEVVNQVCFKVIGNDTTITFAAEAGQLHQRDGAGYPQSMFESISLLGNAAITLADKCVRGITVNREICERYVFNSIGLVTYLNPYIGHENGDLVGKICAQTGKTVREVVLERQLLSEAELDRILSPQNLANPHL

SEQ ID NO: 6362 - DNA, 1422 bp, Xylella fastidiosa
  CDS (1)..(1422)
atggagatgcagatgagcaacagtgatcgttacagaattgaacacgacagtatgggtgatctacgggtgccgattgatgcgttgtggggcgcgcagacgcaacgtgctatcgagaactttccgatttccgggcggtcaatgcctcagggatttatccacgcattggggtttatcaaggcggctgcggcgaaggttaacgctgagctggggctgttaccaaagtcaatggccaaggagattgaggccgctgcattggatgtcgctgcgggccgttatgatgcggaatttccagtcgatatttaccagactggctcaggaacctcgtcgaatatgaacgctaatgaggtgattgcgacgctggccatgcgtgccaccaaggggcctatccaccccaacgaccatgtcaaccttggccaaagttctaatgatgtggttccaacagcgattcggatttccgcaacgttggcggttcagggacgattattaccagcgctcaagcatttacgcaaaatgattaacaagcgtgcccgtggtttgggcagtgtggtgaagaccggccgtacccacctgatggatgcgatgccgctgacgttcgctcaagaattcggtgcctggtcggcacaaattgtctctgcagaggcgcgcttgaatgacaccctgaaacggttgcatcggctgccattgggagggacagcaattggtaccggcatcaatacggatccacatttcggccgtaatgcggtgaaggtactgtcagcattgacagggattcactttgagagtgcgaacaataagttcgaaggattggcagcgcaagatgatttggttgagttatccggccagttcaatacgttagcagtggcgttgatgaagattgctaatgatctacgctggatgaacgctggaccgcttgctggcttgggagagattgagttgcccgcgttgcagccgggaagttcgatcatgccaggtaaggtaaacccggtgattccggaagcagtggtgatggtcgcctcgcaagtgattggccatcacactgcagtgaccgtggctgggcagagtggcaattttcagttgaatgtgacgttaccgctgattgcttacaacctattggagtctgcgacgttgcttggaaatgtggtgatgctgttggctgataaagtcatcgttggcctgaaggtgcgtcaggatcgagtgcaggaggtgctggagcggaatccgattttggtgacagcgttgaatccgatcattggctatgagaaagctgcggtgattgctaagcgtgcttataaggagcaccggccagtgcttgaggtcgcctgcgaggagagcaacctaaaccctgtggagttggcgcgcttacttgatccggctgcgttgactgagggtgggattcatgtcgtcgggggaggtggtggataa

SEQ ID NO: 6363 - protein, 473 aa, Xylella fastidiosa
MEMQMSNSDRYRIEHDSMGDLRVPIDALWGAQTQRAIENFPISGRSMPQGFIHALGFIKAAAAKVNAELGLLPKSMAKEIEAAALDVAAGRYDAEFPVDIYQTGSGTSSNMNANEVIATLAMRATKGPIHPNDHVNLGQSSNDVVPTAIRISATLAVQGRLLPALKHLRKMINKRARGLGSVVKTGRTHLMDAMPLTFAQEFGAWSAQIVSAEARLNDTLKRLHRLPLGGTAIGTGINTDPHFGRNAVKVLSALTGIHFESANNKFEGLAAQDDLVELSGQFNTLAVALMKIANDLRWMNAGPLAGLGEIELPALQPGSSIMPGKVNPVIPEAVVMVASQVIGHHTAVTVAGQSGNFQLNVTLPLIAYNLLESATLLGNVVMLLADKVIVGLKVRQDRVQEVLERNPILVTALNPIIGYEKAAVIAKRAYKEHRPVLEVACEESNLNPVELARLLDPAALTEGGIHVVGGGGG

SEQ ID NO: 6364 - DNA, 1386 bp, Vibrio parahaemolyticus
  CDS (1)..(1386)
atgaccaccgaatttcgtatcgaaaccgacagcatgggcgaagtaaaagtcccggcgaatgccttgtatcaagcgcaaactcagcgtgctatcgataacttcgcattcagccagcacaccatgccaagcggtttcatccaagctttggcccacatcaagcaaacggcagcgctgaccaacgcacaactagggttactggaaggtgatattgccaatgcgattgcagacgccgcgcaagccattattgatggccagcatctcgatcagttccctatcgacctgttccaaaccggttctgggacaagctccaacatgaacgccaatgaagtgattgccacgctcgcgtctgaattgcttggcggcaacgtcaccccgaatgaccacgttaacatgggtcaaagcagtaacgatgtggtgccgacggcgattcaagtcagctcagcacttgctattgaacacaagttgttgcctgcactggctcatcttagccaaagcctagaaaccaagaagcaagctttgcaaggtgtggtaaaaacaggccgaactcatttgatggacgccatgccaatcactttcgcgcaagagctgggcggctggcaattccagattgaacacgctaaacaagccattgaacaaacactgccgatggtgaaagcccttgctcaaggcggcactgccgttggcacagggatcaacgccgatccgcgttttgcctctctgtttgcagacaacctcactcagtccactcgagtcacctttacttcaagcgacaatttcttcttcaacctcagcagccaggatgcgatcgtcgcactgtctggacagctcaaaacagcagcagttgcgatcatgaagatcgcaaacgatcttcgctggatgaactctggcccattggctggcttgggtgaaatcgaactgcaaggcttacagccgggttcatcaatcatgccgggcaaagtaaacccggttattcctgaagccgcagccatggcgtcagcgcaagtgattggcaacgatgcaaccatcaccatcgcgggtcagtctggcaacttccagttgaatgttatgctacctgtgattgcgcataatattttggagagcattgagctcgttgcgaacagtgcgaccgcccttgccgataaggcgattgcgacctttgacgttcgacaagataacctcgatattgctttggccaagaatccgattttagtcaccgcactaaacccggtgatcgggtatttgaaagcggcagaagtcgcgaaaaaagcctacaaacaaggacgagccatcattgatgtggccgaagaggaaacggatttaaaccgcgaaacgcttgaaaggctgcttaatccagccaaattgactcaaggtggcgtggctgagtaa

SEQ ID NO: 6365 - protein, 461 aa, Vibrio parahaemolyticus
MTTEFRIETDSMGEVKVPANALYQAQTQRAIDNFAFSQHTMPSGFIQALAHIKQTAALTNAQLGLLEGDIANAIADAAQAIIDGQHLDQFPIDLFQTGSGTSSNMNANEVIATLASELLGGNVTPNDHVNMGQSSNDVVPTAIQVSSALAIEHKLLPALAHLSQSLETKKQALQGVVKTGRTHLMDAMPITFAQELGGWQFQIEHAKQAIEQTLPMVKALAQGGTAVGTGINADPRFASLFADNLTQSTRVTFTSSDNFFFNLSSQDAIVALSGQLKTAAVAIMKIANDLRWMNSGPLAGLGEIELQGLQPGSSIMPGKVNPVIPEAAAMASAQVIGNDATITIAGQSGNFQLNVMLPVIAHNILESIELVANSATALADKAIATFDVRQDNLDIALAKNPILVTALNPVIGYLKAAEVAKKAYKQGRAIIDVAEEETDLNRETLERLLNPAKLTQGGVAE

SEQ ID NO: 6366 - DNA, 1377 bp, Pseudomonas syringae pv
  CDS (1)..(1377)
atgagtaatacccgtatcgaacgcgacagcatgggccaattacaggtcccggccgaggccctttacggcgcgcagactcagcgtgcggtggaaaattttccgatcagccatcagcgtatgcccaggctgttcattcgcgcgctactgctggccaaagcggccgctgcacaggcgaaccttgagctggagcagatcagcgaagggcagagccaggcgattgtcggtgccgtgaaagagctgttggccagcgactacatgactcatttcccggtcgatatcttccagaccggttccggcaccagcaccaacatgaacgccaacgaagtgctcgcaacgctggcaacgcggttactgggcgaagaggtcaaccccaacgatcacgtcaactgcgggcaaagcagcaacgacatcatcccgaccacgattcacgtcagcgccgcgctggcactccatgaacaactgctgccagcgcttgcgcatctggtgcaggtcaccgagcacaaggccgtgcaagtccacgccttcgtcaagaccggccgcacacacctgatggacgccatgcccgtgcgcatgagccaggtgctcaatggctgggcgcagcagattcgcgccaacatcgaacatctgcagggtttgcagcccagcctgcaagcactggctcagggcggcacggcggttggcaccggaatcaatgcgcatcccgagtttgcagcacgcttcagtcgccaattgagcacattgaccggcgtgcagttcgcaccgggcaaggacctttttgcgctgatcggctcgcaagacacagcggtagcagtgtctggtcagctaaaggccacggcggtgtcgctgatgaaaattgccaacgacctgcgctggatgaactccgggccgctggcagggctgggtgagatcgagcttgaggccctgcaaccgggctcgtcgatcatgcccggcaaggtcaacccggtgatccccgaggcgactgcgatggtggccgcgcaggtcatcggcaacgacgcgaccatcaccgtggcggggcagtccggcaactttgagctgaacgtgatgctgccgatcatcgcccagaacctgctcagcagcatcgagctgttggccaacgccagccggcttctggcggacaaggcagttgccagcttcaaggtcaatgaatccaggctccaggaagcgctgtcacgtaacccgattctggtcaccgcgctcaacccgatcatcggttatcagaaggccgccgaaatcgccaaggccgcttacaagcagggtcgcccggtgattgacgtcgctctggagcacaccgatttgcagcgcagcgagctggaagtgttgctcaatcccgaaaaactcaccgctggcggcatctga

SEQ ID NO: 6367 - protein, 458 aa, Pseudomonas syringae pv
MSNTRIERDSMGQLQVPAEALYGAQTQRAVENFPISHQRMPRLFIRALLLAKAAAAQANLELEQISEGQSQAIVGAVKELLASDYMTHFPVDIFQTGSGTSTNMNANEVLATLATRLLGEEVNPNDHVNCGQSSNDIIPTTIHVSAALALHEQLLPALAHLVQVTEHKAVQVHAFVKTGRTHLMDAMPVRMSQVLNGWAQQIRANIEHLQGLQPSLQALAQGGTAVGTGINAHPEFAARFSRQLSTLTGVQFAPGKDLFALIGSQDTAVAVSGQLKATAVSLMKIANDLRWMNSGPLAGLGEIELEALQPGSSIMPGKVNPVIPEATAMVAAQVIGNDATITVAGQSGNFELNVMLPIIAQNLLSSIELLANASRLLADKAVASFKVNESRLQEALSRNPILVTALNPIIGYQKAAEIAKAAYKQGRPVIDVALEHTDLQRSELEVLLNPEKLTAGGI

SEQ ID NO: 6368 - DNA, 1380 bp, Pseudomonas putida
  CDS (1)..(1380)
atgatgagtgatacccgtatcgagcgtgacagcatgggtgagctgcaggtgccggcccaggccctctacggcgcccagacccagcgcgcggtcgacaacttcccgatcagcggccagcgtatgccggcccagttcattcgtgccttgttgctggccaaggccgctgcggccaaggccaacgtcgaactggagcaactgtctgccgggcagggccaggctatcgtcaaggctgtcgagcaattgctggccgaggacttcatccagcacttcccggtggatgtgttccagacaggctctggcaccagttcgaacatgaacgccaatgaggtgatcgccaccttggctacccatgtactgggtgaggcggtcaatgccaatgaccacgtcaactgtggccagagcagcaatgacatcattccgaccaccatccatgtcagcgccgcgttggccctgcacgagcagttgctgccagccctggcgcacctggtacaggtgatcgaggtcaagtcggcacaagtacatcaatacgtgaagaccggtcgtactcacctgatggacgcgatgcccgtgcgcatgagccaggtgctggatggctgggctgcgcagatcaatgctgccaagtcgcacatcgaaggtgtgctgccgcacttgcaggcgctggcccagggcggaaccgccgtgggtaccggcatcaacgcccatccgcagttcgctgtcggtttcgctcgccagctcagtggcctgaccaaggtcgagttcacgcccggccagaacctgttcgcactgatcggctcgcaggacactgccgtggctttgtctggccagctcaagaccaccgctgtggcgttgatgaaaatcgccaacgatctgcgctggatgaactccggcccgctggccggtctgggcgaaatcgagctgcaagctctgcagccgggctcttcgatcatgccaggcaaggtcaacccggtgatcccggaggccactgccatggtcgccgcccaagtgattggcaacgacgcgaccatcgccgtcgcaggtcaagccggtaacttcgagctgaacgtgatgctgccggtgatcgcccgcaacctgctggaaagcatcgagctgatggccaatgtcagccgcttgctggccgacaaagccatcgccagcttcaaggtcaacgaagacaaactcaaggaagccctcgcgcgcaacccgattctggtcacggcgttgaatccgatcatcggctacctcaaggccgccgaaatcgccaagaccgcctacaagcagggtcgtccaatcatcgatgtggcgctggagcacaccgacctgtcccgcgaccagcttgaagcgctgctggacccggaaaaactcaccgccggcggtatctga

SEQ ID NO: 6369 - protein, 459 aa, Pseudomonas putida
MMSDTRIERDSMGELQVPAQALYGAQTQRAVDNFPISGQRMPAQFIRALLLAKAAAAKANVELEQLSAGQGQAIVKAVEQLLAEDFIQHFPVDVFQTGSGTSSNMNANEVIATLATHVLGEAVNANDHVNCGQSSNDIIPTTIHVSAALALHEQLLPALAHLVQVIEVKSAQVHQYVKTGRTHLMDAMPVRMSQVLDGWAAQINAAKSHIEGVLPHLQALAQGGTAVGTGINAHPQFAVGFARQLSGLTKVEFTPGQNLFALIGSQDTAVALSGQLKTTAVALMKIANDLRWMNSGPLAGLGEIELQALQPGSSIMPGKVNPVIPEATAMVAAQVIGNDATIAVAGQAGNFELNVMLPVIARNLLESIELMANVSRLLADKAIASFKVNEDKLKEALARNPILVTALNPIIGYLKAAEIAKTAYKQGRPIIDVALEHTDLSRDQLEALLDPEKLTAGGI

SEQ ID NO: 6370 - DNA, 1383 bp, Lactobacillus plantarum WCFS1
  CDS (1)..(1383)
atgacagaatatcgagttgaatcagatactttaggcgaagttaaaattcctgcgaacgccttatggggtgctcagacagaacggagtcgccataactttccgactggtacgaagatgccgttggaaatgattcgggcattacttcaaattaagcgggccgcagcgattgcgaataaagaagttgaagcaatgactgctgaaaaagctgatttaatcgtggctgccattgataagttattagcgctcgacgatgaagatttgcgtaaggactttccgctggttgtttaccaaactggttcggggacgcaaacgaatatgaacgttaatgaagtggtcgcacacatggctggtaagatcaatcctgatattgaaatcttgccgaacgacgatgttaaccatggtcaaagctctaacgatatcttcccaacggcgatgaacattacggccgcagttgccgtggataagctgattgccgcagcggaacacttattagcggaattgaagatcaaacaaaagaagtactggcgggtagtaaagattggccggacccatcttcaagatgcaacgccattaacttttggccaagaagtgagtggttgggccagtgcgattgaacatgatattgcctacttaaaacagttgaatccaacgttaggcgagcttgcaatgggtgggaccgccgttgggactggtctaaatgctgcccctcattttgctgaaaatattgcggcggcgatgagcaaattgtatgggattgaatttacggctgattccaataagttctatggtttggcccatcattctggtttaaacgtggttcacggggccatcaagaccctagcagccgatttgatgaagattgccaatgatgtgcggttcttggcaagcggtccacgggccggttatgacgaattaaacattccggctaacgaacccggctcatcaatcatgcctgggaaagttaacccaacccaagctgaagccatcactatggcagcggtacgagttatggggaatgacgtggtcgtcgatttagcttctagccaaggtaattttgaaatgaacgtttacaagaccgttttgattgatgctttccttgaatctgctgaattgttagctggaacgattaccggcttcactgaccgaatgattgctggtttgacggtcaaccaagaccggatggcagagttagtcgacagttccttgatgacggttacggcattgtcaccacatattggctatcatgatagtgcgatgattgctcaagcagctgaaaaagcggggacgacattgcgtgaagcagctatcaagtctggcaaagtaaccgcggaacaattcgatgaatggatggttccactggatatgacgaatattgatgattaa

SEQ ID NO: 6371 - protein, 460 aa, Lactobacillus plantarum WCFS1
MTEYRVESDTLGEVKIPANALWGAQTERSRHNFPTGTKMPLEMIRALLQIKRAAAIANKEVEAMTAEKADLIVAAIDKLLALDDEDLRKDFPLVVYQTGSGTQTNMNVNEVVAHMAGKINPDIEILPNDDVNHGQSSNDIFPTAMNITAAVAVDKLIAAAEHLLAELKIKQKKYWRVVKIGRTHLQDATPLTFGQEVSGWASAIEHDIAYLKQLNPTLGELAMGGTAVGTGLNAAPHFAENIAAAMSKLYGIEFTADSNKFYGLAHHSGLNVVHGAIKTLAADLMKIANDVRFLASGPRAGYDELNIPANEPGSSIMPGKVNPTQAEAITMAAVRVMGNDVVVDLASSQGNFEMNVYKTVLIDAFLESAELLAGTITGFTDRMIAGLTVNQDRMAELVDSSLMTVTALSPHIGYHDSAMIAQAAEKAGTTLREAAIKSGKVTAEQFDEWMVPLDMTNIDD

SEQ ID NO: 6372 - DNA, 1410 bp, Cytophaga sp
  CDS (1)..(1410): transl_table=11
atgggatcaacaagaaaagaacatgattttttaggggaattagatattcctaatcatttatattatggtatccaaactttcagagctgtagagaatttcaatattacaggaattccaatttcaaaagagcctttatttataaaagctttgggatatgtaaaaaaagcagcggctttagcgaacaaagattgcggacgacttgaccctaaaattgccgaagcaatctgttacggaagtgatcaggttattgccggtaaatttgatcaggaatttgtaagcgatttgattcagggaggagcaggaacatccgttaatatgaacgccaatgaagtgattgctaatattggtttagaatatctgggacataaaaaaggagattataacttcttgcacccgaataatcatgttaactgttctcaatctacaaacgatgcttatccatcagcttttagaattgcactttaccttaaaatggaaagttttattaaaacactggaaggtttagaagttgcatttgttgctaatggagaagaatttaaaagtgttttgaaaatgggaagaacgcaattgcaagatgcggttcctatgactttagggcaagaattcagatcttacgcaacaactataggcgaggatgtaagaaggttaaaagaagcgcaaagcctggtgttagaaatcaacatgggagcaacagcaattgggacaagagtaaacgcaccggaaggatatcctgaaatttgtgtgaactatttagcaaaagaagttgggattcctttaacgctttcgccggatttaattgaagctactgttgataccggagcttacgttcagattatggggacattgaaaagaactgctgtaaaaatttctaaaatctgtaatgatttaaggttattgagttcaggaccaagaactggtttcaacgaaatcaatttgccggcacgtcagccaggatcttctattatgccgggaaaagtaaatcctgtaattccggaagtcgtaaaccagacttgtttttatgttattggtcaggatttaacagttactatggctgctgaagcgggacaattgcaattgaatgtaatggagcctgtaattgcttttgccatgtttacctcattagattatctttctaatgcaattcagactttaattgataaatgtatcatcggaatcacagctaatgtagatcattgctataatatggtgatgaacagtattggtattgtaacgcaattaaaccctattttaggttacgaaataagtgccagtattgccggtgaagccttaaaaatgaataaaagcgttcacgaaattgttgtggtggaaagaaaattaatcactcaggaaaaatgggatgaaatttattctttagacaacttaataaatcctaagtttatcacgaaataa

SEQ ID NO: 6373 - protein, 469 aa, Cytophaga sp
MGSTRKEHDFLGELDIPNHLYYGIQTFRAVENFNITGIPISKEPLFIKALGYVKKAAALANKDCGRLDPKIAEAICYGSDQVIAGKFDQEFVSDLIQGGAGTSVNMNANEVIANIGLEYLGHKKGDYNFLHPNNHVNCSQSTNDAYPSAFRIALYLKMESFIKTLEGLEVAFVANGEEFKSVLKMGRTQLQDAVPMTLGQEFRSYATTIGEDVRRLKEAQSLVLEINMGATAIGTRVNAPEGYPEICVNYLAKEVGIPLTLSPDLIEATVDTGAYVQIMGTLKRTAVKISKICNDLRLLSSGPRTGFNEINLPARQPGSSIMPGKVNPVIPEVVNQTCFYVIGQDLTVTMAAEAGQLQLNVMEPVIAFAMFTSLDYLSNAIQTLIDKCIIGITANVDHCYNMVMNSIGIVTQLNPILGYEISASIAGEALKMNKSVHEIVVVERKLITQEKWDEIYSLDNLINPKFITK

SEQ ID NO: 6374 - DNA, 1642 bp, Drosophila melanogaster
  CDS (73)..(1527)
cttttcctggcctgtacttttcggcctaaatatttcatttcgtaacacatatacacattaaaattttccaaaatgtctttcgatcagaaggagattttcagtttgatgtacaaactggctcggctaatagtgccggatactcgagttgaatatgattcgatgggtgccgtgcacattcctctcgatcgaatgttcggtccgcaaaccatgagatccctgatgaaatttccaattggcggagttgaggaacgaatgccacgacccctaataaaagccctgggcatagtgaagaaatcagctgcggagacgaacaaaatccattgtctggaggagcatctatgcgatgccatttccaaggcctgcgatgatgttatatcgggcaaactctatgacgaggaacactttccgttggttatatggcaggatggaagcggcgagcacacaaacatgaacgtaaacgaggttatatgcaatcgagccatcgaaattctgggcggtcagatgggctccaaggagccggtggatcccaatgaacatgtcaacatggcgcaaagttcccatgacaccttctcgacagccgtgcgcatcgccgtggccatgcagttgcaggagacgctgtatcccagcttaaggacctttattgatttgctgggcaagaagtcgaacgattggatggatttgatcaagattggtagaacgcatctgatggacgcagttcctctgtccctcggccaggagttcagtggctatcagcagcaacttgtgaacggaaggacgcgattggactgtgccatgtgccgattgtatcagttgcccatgggcggcaccagtgtgggcaccaaagtggacaccaaggcggaatattctgcgcagtgcatcaagcgtatagccgagctaacattcctaccctttgtcgagtccccgaacttttttgaatccatctccgcctgcgattgcctggtggaactgcacggtgaactcaacacgattgcagcgagtgtgatgaagatagcgaatgatatacgattccttggatcgggaccacgttgcggatttggtgaactacatctgccggagaacgaaccaggtagttccataatgcccggcaaagtgaatcccacgcaatgcgaggccatgtccatgatctgtgcccaggtgatgggcaaccatgtggccgtctccatgggtggttcctctggccactttcagctgaacacctttatgcccatgattgcctccaatgttttgcgctcgattacacttttgggcgatggcatgaagtccttttgcaccaattgcctcgagggcatcgagcccaataggagcaagattggtagcatcgtcaaggagtccctgatgctggtcactgccctcagtccacacattggctacgaacgatccgctgcgatcgccaaggcagcgcatcacaatggaaccactttggaacaggaggccatacttgatggcattcaacgggaggacttcagggagtgggtgcagcccagcaagatgctgggtcccgaatagtcgaaatggccacaaaacagtatcataatttaaataaattgtttcaattattatgtcgagctttaaaatttaataaatgcggtcaattggctctgtaaaaaaaaaaaaaaaaaaa

SEQ ID NO: 6375 - protein, 484 aa, Drosophila melanogaster
MSFDQKEIFSLMYKLARLIVPDTRVEYDSMGAVHIPLDRMFGPQTMRSLMKFPIGGVEERMPRPLIKALGIVKKSAAETNKIHCLEEHLCDAISKACDDVISGKLYDEEHFPLVIWQDGSGEHTNMNVNEVICNRAIEILGGQMGSKEPVDPNEHVNMAQSSHDTFSTAVRIAVAMQLQETLYPSLRTFIDLLGKKSNDWMDLIKIGRTHLMDAVPLSLGQEFSGYQQQLVNGRTRLDCAMCRLYQLPMGGTSVGTKVDTKAEYSAQCIKRIAELTFLPFVESPNFFESISACDCLVELHGELNTIAASVMKIANDIRFLGSGPRCGFGELHLPENEPGSSIMPGKVNPTQCEAMSMICAQVMGNHVAVSMGGSSGHFQLNTFMPMIASNVLRSITLLGDGMKSFCTNCLEGIEPNRSKIGSIVKESLMLVTALSPHIGYERSAAIAKAAHHNGTTLEQEAILDGIQREDFREWVQPSKMLGPE

SEQ ID NO: 6376 - DNA, 1699 bp, Drosophila melanogaster
  CDS (141)..(1544)
gcctttcaatgcccgagcacgcctcagttaacatcgagcagcagccgtcgtcgagtggtcgtcctctgatttgttcactctgattgccatagtctcaatttggcttcacttacttactatctgtcatatctgcatctgaaatggcctcccaggagtttcgcgtggagagcgacacctttggcgaactgaaggtgcccgcggataagtactatggcgcccaaacgatgcgatcccagatcaatttccccatcggcggagccaccgaacggatgcccaaacccgtggtccaggccatgggcatcctgaagaaggccgccgccgaggtgaacaaggagttcggactggacagcaaggttagcgaggcgatctcgaaggcggccgacgatgtgatctctggcaagctatacgacgaccacttcccgctggtcatctggcagacgggctcgggcacgcagagcaacatgaatgtgaatgaggtgatcagcaatcgtgccattgagctgctgggcggcaaactgggctccaagacgcccgtgcatcccaacgatcatgtgaacaaatcgcagagctccaacgataccttccccaccgccattcacatctcggtggcgctggagctgaacaacaaccttaagccggcgattaagacgctgcacgatgcgctgcgtgccaagtcggaggagttcaaggacattatcaagatcggacgcacgcatacgatggatgcggtgccattgacgctgggccaagagttcagcggctatgcccagcaattggcctacgcccaggagcgcatcgatgcctgtctgccgcgcgtctatgagctggctctgggcggcactgctgtgggtacgggtctgaacacacgcaagggattcgccgagaagtgcgctgcaaagatcgccgagctgaccagcctgcccttcgttaccgcgcccaacaagttcgaggcactggctgcccgcgatgccatggtggaggtgcatggtgtgctcaacacgatcgccgttagcctgatgaagattgccaacgatattcgtttccttggctccggaccgcgttgcggtttgggtgagctctcgctaccggagaacgagccaggtagctccatcatgcccggcaaggtgaatcccacgcaatgcgagtcgctgacaatgctctccgcccaggtgatgggcaatcaggtggcggtgaccatcggtggatccaatgggcacttcgagctgaatgtattcaagcccctgatcgtgtccaatgtgctgcgctccattcggctattgtctgatggcagcaggaccttcactgccaactgtgtgaatggcatccaggcgaaccgcgagaatattgccaagatcatgaacgagtcgctcatgctggtgaccgctctgaatccgcacattggttacgacaaggctgcgaaaattgcaaagacggcgcacaagaatggcaccacactcaaggaggaggccatcaatttgggttacctgacggagcagcagttcaacgactgggtgcgacccgaacagatgctgggacccaagtgaagtggagccaagtaggccgacgacgaaatccatcattcaatcatcgctgtcatcggaatcgcagtgtgattttctagatcagatcgttttgttgtatatgaatcgctcggaaacacagaaccaataataattgaaaatgctgaagcaaaacaatg

SEQ ID NO: 6377 - protein, 467 aa, Drosophila melanogaster
MASQEFRVESDTFGELKVPADKYYGAQTMRSQINFPIGGATERMPKPVVQAMGILKKAAAEVNKEFGLDSKVSEAISKAADDVISGKLYDDHFPLVIWQTGSGTQSNMNVNEVISNRAIELLGGKLGSKTPVHPNDHVNKSQSSNDTFPTAIHISVALELNNNLKPAIKTLHDALRAKSEEFKDIIKIGRTHTMDAVPLTLGQEFSGYAQQLAYAQERIDACLPRVYELALGGTAVGTGLNTRKGFAEKCAAKIAELTSLPFVTAPNKFEALAARDAMVEVHGVLNTIAVSLMKIANDIRFLGSGPRCGLGELSLPENEPGSSIMPGKVNPTQCESLTMLSAQVMGNQVAVTIGGSNGHFELNVFKPLIVSNVLRSIRLLSDGSRTFTANCVNGIQANRENIAKIMNESLMLVTALNPHIGYDKAAKIAKTAHKNGTTLKEEAINLGYLTEQQFNDWVRPEQMLGPK

SEQ ID NO: 6378 - DNA, 1404 bp, Xanthomonas campestris
  CDS (1)..(1404)
atgagcgagagtttcaggatcgaacacgacagcatgggcgagttgcaggtgcctgccgatgcgttgtggggtgcgcagacccagcgcgctgtgcagaacttcccgatttccggccagccgatgccgcgcggtttcattcgcgcgctggggttgatcaaggccgcggccgcaggcgtcaacgccgatctcgggctgctgtccaaatcggtggccaaggtggtgcaggaagccgccttgcaggtggcgcagggcgcgcacgatgcacatttcccgatcgatgtgtatcagaccggctctggtacgtcgtcgaacatgaatgccaacgaggtgattgccacgctggccacccgcgccggcaaggacgcggtgcaccccaatgaccacgtcaatctcgggcagagttccaacgacgtggtgcccaccgccattcgcgtctcggcattgctggcggtgcaggagcagctgcagccggcgctcaagcacctgcgcaagaccatcgacaagcgcgccaagggtctggacaagatcgtcaagaccggccgcacgcatctgatggatgcgatgcccctgacctttggtcaggagttcggcgcgtggtctgcgcagctcagttcagcgcaggagcgcatcgacgacagcctgaagcggctgcgccggttgccgctgggcggcactgcgattggcaccggcatcaacgccgatccgcgcttcggcggcaaggtggccaaggccttgtccacgttgagcagcgtcaagttcgaaagtgccgagaacaagttcgaaggcctggcggcgcaggatgatgcggtggaattgtcgggccagctcaatgcgctggcggtggccttgatcaagatcgccaacgacctgcgctggatgaatgccgggccgctggcagggctgggcgagatcgaattgccggcgctgcagccaggcagttcgatcatgccgggcaaggtgaatccggtgattcccgaagcgaccgtgatggtgtgcgcgcaggtcatcgggcaccacgccgcgatcacggtggccgggcagaccggcaattttcagttgaacgtggcgttgccgctgatcgccgcgaacctgctggattcgatcaacctgctcagcaacgtctcgcgcctgctcgccgataccgccattgccggattgaaggtgcgccaggagcgcgtgcgcgaggccctggaccgcaacccgatcctggtgaccgcgctcaacccgatcatcggctacgaaaaggctgccgcgatcgccaagcgcgcctacaaggagcagcgcccggtgctggatgtggccaaggaagacagcggtctgagcgaggcagagctgcgccgtttgctggatccggcggcgttgacacgcggcggcatccaggcgggtggcggtggtggcggctga

SEQ ID NO: 6379 - protein, 467 aa, Xanthomonas campestris
MSESFRIEHDSMGELQVPADALWGAQTQRAVQNFPISGQPMPRGFIRALGLIKAAAAGVNADLGLLSKSVAKVVQEAALQVAQGAHDAHFPIDVYQTGSGTSSNMNANEVIATLATRAGKDAVHPNDHVNLGQSSNDVVPTAIRVSALLAVQEQLQPALKHLRKTIDKRAKGLDKIVKTGRTHLMDAMPLTFGQEFGAWSAQLSSAQERIDDSLKRLRRLPLGGTAIGTGINADPRFGGKVAKALSTLSSVKFESAENKFEGLAAQDDAVELSGQLNALAVALIKIANDLRWMNAGPLAGLGEIELPALQPGSSIMPGKVNPVIPEATVMVCAQVIGHHAAITVAGQTGNFQLNVALPLIAANLLDSINLLSNVSRLLADTAIAGLKVRQERVREALDRNPILVTALNPIIGYEKAAAIAKRAYKEQRPVLDVAKEDSGLSEAELRRLLDPAALTRGGIQAGGGGGG

SEQ ID NO: 6380 - DNA, 1404 bp, Xanthomonas axonopodis
  CDS (1)..(1404)
atgagcgaacgtttcaggaccgaacacgacagcatgggcgaattgcaggtgcccgccgacgcgttgtggggcgcgcagacccagcgcgcggtgcagaatttcccggtgtccgggcagccgatgccgcgcggtttcattcgcgcgctgggcttgatcaaggccgcggcagccggcgtcaacgccgagcttggattgctgccgaagtcgatcggcaagaccgtgcaggccgctgcattgcaagtggccgagggcagcttcgatgcgcagtttcccatcgatgtgtaccagaccggttcgggcacctcgtccaacatgaatgccaatgaggtgattgccaccctggccacgcgtgccggcaaggatgcggtgcatcccaacgaccacgtcaatctgggccagagttccaacgatgtggtccccaccgccattcgcgtgtcggcattgctggcggtgcaggaacatctgcaaccggcgctcaagcatctgcgcaagaccatcgacaagcgcgccaaatcgcttgataagatcgtcaagaccggtcgcacgcatttgatggacgcgatgccgctcacctttggtcaggagttcggcgcgtggtcggcgcagctgagttcggcgcaggagcgtatcgacgacgcgctcaagcgcttgcgacgcttgccgctgggcggcacggcgatcgggaccggcatcaatgccgacccgcgcttcggtggcaaggtcgccaaggccttgtccaccctgagcggagccaggttcgagagcgcggaaaacaagttcgaaggactcgccgcgcaggacgatgcggtggagttgtctggccaactcaacgcgctggcggtggcactgatcaagatcgcaaacgacttgcgctggatgaatgccggcccgttggcgggcctgggcgaaatcgaactgccggcgctgcagcctggcagctcgatcatgccaggcaaggtcaatccggtgattcccgaagccaccgtgatggcgtgcgcgcaggtgatcggccaccacactgccatcaccatcgccgggcaaaccggcaacttccagttgaacgtgacgttgccgctgatcgcctacaacctgctggattcgatcaccttgctgggcaacgtttcgcgcctgttggccgacaccgccattgccggtctgaaggtgcgtcaggagcgcgtccgcgaggcgttggaccgcaaccccatcttggtgacggcactgaaccccatcatcggttacgaaaaggccgcggcgatcgccaagcgtgcctacaaggagcagcggtcggtactggatgtggccaaggaagacagcgggctcggcgaagcggaactgcggcgattgctcgacccgacggcattgacacgcggcggtatccatgccggcggcggtagcgggggctga

SEQ ID NO: 6381 - protein, 467 aa, Xanthomonas axonopodis
MSERFRTEHDSMGELQVPADALWGAQTQRAVQNFPVSGQPMPRGFIRALGLIKAAAAGVNAELGLLPKSIGKTVQAAALQVAEGSFDAQFPIDVYQTGSGTSSNMNANEVIATLATRAGKDAVHPNDHVNLGQSSNDVVPTAIRVSALLAVQEHLQPALKHLRKTIDKRAKSLDKIVKTGRTHLMDAMPLTFGQEFGAWSAQLSSAQERIDDALKRLRRLPLGGTAIGTGINADPRFGGKVAKALSTLSGARFESAENKFEGLAAQDDAVELSGQLNALAVALIKIANDLRWMNAGPLAGLGEIELPALQPGSSIMPGKVNPVIPEATVMACAQVIGHHTAITIAGQTGNFQLNVTLPLIAYNLLDSITLLGNVSRLLADTAIAGLKVRQERVREALDRNPILVTALNPIIGYEKAAAIAKRAYKEQRSVLDVAKEDSGLGEAELRRLLDPTALTRGGIHAGGGSGG

SEQ ID NO: 6382 - DNA, 1329 bp, Pyrobaculum aerophilum
  CDS (1)..(1329)
atgtattacgtcgcaaaagccagccagctttttatagagagcgggacgaaattccaacgcgatataatatgggcaatgggcgtcatgaaattcgccgcggccagggcaaacgccgaattaggcttgttgagctgggagaaggcgtatgcaattatggatgtggcgagggagattatggaggggcttcacgacgggcgtattgtcgtagacgtcttccagacgggatctggcacggggcttaacataaatgtaaacgaggtaattgcgcagagggctttggagaaattcggcatctccctccaccccaatgacgacgtaaatctcggccagtcctcaaatgacgtagtgccaactgccataaggctcgcggtgattaaggcatggagcgataaactgaggccaaagctaattaagttaattgacgcgttaggcgccaaggcggaggagtttaagactgttgtgaaggcggggcggacgcatttaagagacgccttgcccgtcaccttcggccaagagctctcaggataccgcgacgctttcgccagaaatctcaaggcccttgagtctttgggggagtttgtaaaggaggtgccaataggcggcactgcggtgggaactggcgtgaacacgcacccctccttcggggagagggttgtggagattataaacgccgagacgggcttggcgataaagaggggaaacccctttactgaaatgaagcttttgacagatatcctcctcttctccggcggcttgagggcgctggctgtggatctgttacggctctgccaagacttaaggcttatgttctccgggccttacacaggcttgggggagatcgaactgccctcgcaagaggaggtgcccggctctagcgccatgccgggcaagactaatcccgtcacgcttgaggctacaatgcaagccgttgtttacgtgctggggcttgacgaaacagtgaaatgggccgcgtcgcttggggagttcgagctggccatggggatacctgtggccggctgggccacggtaagggaggtggaggtgctggccgaggctttggggaaaattactgatctcgtgattctgaatatgaagcctaaagtggacatcatgaagagttacgccgagagatccgcggcgctaatcactttactcgcgccgataatggggtacgacaaggccagggaggtggcggggagatcaattagagatgtgttgagagaaatgggattagacgagtcagaaattgaaaaattgcttgatcccgcgaatttgactactccaggttttaaggttaggcgacggcataaaaacggctctcagagctaa

SEQ ID NO: 6383 - protein, 442 aa, Pyrobaculum aerophilum
MYYVAKASQLFIESGTKFQRDIIWAMGVMKFAAARANAELGLLSWEKAYAIMDVAREIMEGLHDGRIVVDVFQTGSGTGLNINVNEVIAQRALEKFGISLHPNDDVNLGQSSNDVVPTAIRLAVIKAWSDKLRPKLIKLIDALGAKAEEFKTVVKAGRTHLRDALPVTFGQELSGYRDAFARNLKALESLGEFVKEVPIGGTAVGTGVNTHPSFGERVVEIINAETGLAIKRGNPFTEMKLLTDILLFSGGLRALAVDLLRLCQDLRLMFSGPYTGLGEIELPSQEEVPGSSAMPGKTNPVTLEATMQAVVYVLGLDETVKWAASLGEFELAMGIPVAGWATVREVEVLAEALGKITDLVILNMKPKVDIMKSYAERSAALITLLAPIMGYDKAREVAGRSIRDVLREMGLDESEIEKLLDPANLTTPGFKVRRRHKNGSQS

SEQ ID NO: 6384 - DNA, 1320 bp, Sulfolobus tokodaii
  CDS (1)..(1320)
atgatgaaatacactgagactgcaccaaaactttttatgaacacaggaactagatttcctagaaaaataatctgggctatgggacttataaaatacgcggcagcgaaagttaattctgatcttaaccagttagaaaaagaaatagctaaaggtattatgcaagcagcaaaagaagttatggaaggaaaacatgatgataaaatagttttagatgtatttcaaacaggctctggtactggactaaatatgaatattaatgaagtgatagcagaaagggcaactgaaatgattggaaaaaaagttcacccaaatgatcacgtaaatttagggcaatcatctaacgatactgttcctactgcaataagaatagcagcaacttcagcagttgaagaacaacttataccagcacttagtaaatttgtttctattcttaatagaaaaagtgaagaatttaaggatattgtgaaatctggaaggactcatttaagggacgcgttaccagttaccttaggtcaagagctttcagcatatgcagacgctttctaccacgatatgaccaatttacaacaagtactagaatatgttaaggagcttcctattggtggcactgcagtaggtactggattaaactcacatccagaatttcaactgagagttattcaagaggttaataatgaaactggattaggcttcaaaccagctaataagtttagaggattaaggcttttaacggacttacttagtctaagcggtattatgagaacaattgcggtagatctttacagacttggacaagatattagattaatgttttctggaccaatgactggtttcaatgaaatagatctacctactcaagaagaaatagctggaagtagtattatgccgggtaaaacaaacccagttactgtggaggcaacattattagtctcagctcaagtagtaggattagatcatgccaatcaatttgcatcaatgttaggcgagtttgagttagccatgggcgttcctttgattggatataatgtggttactcaaataaacttacttacagaggcattaaataaatttggagatttggtaattaatggtatggttcctaatatagaaagaatgaaaagatatgctgaaagcagtccttcattagttaccgtaatatcacctattattggttatgataaggctagcgaaatagggaagagattaagcaaaggaatgtctataagagaagcattaaaagagttaggctttaaggatgatgaaatagatagaatactagatttatcaaaattagttaagccaggttttcctgcaaaatga

SEQ ID NO: 6385 - protein, 439 aa, Sulfolobus tokodaii
MMKYTETAPKLFMNTGTRFPRKIIWAMGLIKYAAAKVNSDLNQLEKEIAKGIMQAAKEVMEGKHDDKIVLDVFQTGSGTGLNMNINEVIAERATEMIGKKVHPNDHVNLGQSSNDTVPTAIRIAATSAVEEQLIPALSKFVSILNRKSEEFKDIVKSGRTHLRDALPVTLGQELSAYADAFYHDMTNLQQVLEYVKELPIGGTAVGTGLNSHPEFQLRVIQEVNNETGLGFKPANKFRGLRLLTDLLSLSGIMRTIAVDLYRLGQDIRLMFSGPMTGFNEIDLPTQEEIAGSSIMPGKTNPVTVEATLLVSAQVVGLDHANQFASMLGEFELAMGVPLIGYNVVTQINLLTEALNKFGDLVINGMVPNIERMKRYAESSPSLVTVISPIIGYDKASEIGKRLSKGMSIREALKELGFKDDEIDRILDLSKLVKPGFPAK

SEQ ID NO: 6386 - DNA, 2112 bp, Helicobacter pylori
  CDS (658)..(2049)
tctaaatctttagccaaacccaaactaaaaagcagtaacaaggctgttaaaaggcgtattaaaacgccccccttataaaacacgcttataaaagatagcatgcacttataaatccaagcttgttttagcgcgataaactttgccttctttggatttaatatccaccctcacctgccatgtcccgttcatagaaagattggttttagcttcataaaggccgtttttttcactcacttgtgccatttctttcatcgctggcatgccgggcatttcaggcatcataaactgcaccctaacgatagctttttctaaagccttaccttttaaagtggggctgagtatgaaagtgttatcgcctttaatggggttacccacggatttgattttcacttccaagtcattggcttttagggtttgctcccatgcgtttaaactcataacccccaacacgctcattaaaaataaagcggctaactttttcatcgttttgacctttacattaagataacaagaaaattcttgttgcgaacggataataaccctcttttgtgtaaaaattgtggaaatggtttttaaaaaaatgggggttttaagtagaaggtataagagtttatgctatttttttaaggttttaaaatcaaatttcaaaggattagtatgcaatttagaatcgaacatgacacgatgggcgaaatcaaagtagatgatagccaatactggggggctcaaacgcaacgcagtcttgaaaactttaaaatcggcactgaaaaaatgcctaaagaactcattggcgcgtttgccaaactcaaaaggagtctggcggttgtcaatcaccagttagggaaattaagcttggaaaaatcgcaagccattatcaaggcgtgcgattgcattttaaaaggcgagctgtgcggcgagttccccttagcgatatggcaaacagggagcgggactcaaacgaacatgaatctcaatgaagtcattgccaataaggctaccgaaattttagggggtaattttagggagaaaaaactcatccaccctaacgatgatgtgaacatgtctcaaagctccaacgacactttccctaccgctatgcacattgtgagcgtgctagaaatcacgcataaactactgcccagtttagagaatttgttaaagacctttaaagacaaaagccaacaatttaaagagattgtcaaaatcgggcgcacgcatttacaagacgctacgcctttaactttggggcaagaatttagcgggtatgcgagcatgttagagcattctaaacaacaaattttagagagtttggagcatttaagggaattagccataggcgggacggccgtaggcacagggctaaacgctcacaaagaattgagccaaaaagtggctgaagaattgagcgagtttagcggcgtgaaattcatctctgcgcccaataaattccatgcgctcactagccatgacgctatcgcttatgcgcatggggcttttaaggctttagcggcgaatttaatgaaaatcgctaacgatattagatggcttgcgagcgggccgcgctgtggtttgggcgagcttaatatccctgaaaacgagccgggtagttctatcatgcccggtaaagtcaatcccacgcaatgcgaagcgatgaccatggtggccgtgcaagtgatggggaatgataccgctattggcattgcggccagtcagggtaattttgaattgaatgtgttcaagccggtgattatttataatttcttgcaaagtttgaggctactaagcgatagcatggaaagttttaatacccattgcgcgatcggcattgagcctaataaagaaaagattgattattacttgcaccattctttgatgctagtaaccgccctaaacccgcatgtaggctatgaaaacgccgctaaaatcgctaaaaacgcccacaaaaaaggcatttctttaaaagaaagcgcgctggaactgaagctcttgagcactgaagattttgacaaattcgtggtgcctgaaaagatgatcgggcctaaggcttgaaaaccttgggtgggcgtgcgagatgaatcctgaaaaagccactcatagcaaagagattcgtaa

SEQ ID NO: 6387 - protein, 463 aa, Helicobacter pylori
MQFRIEHDTMGEIKVDDSQYWGAQTQRSLENFKIGTEKMPKELIGAFAKLKRSLAVVNHQLGKLSLEKSQAIIKACDCILKGELCGEFPLAIWQTGSGTQTNMNLNEVIANKATEILGGNFREKKLIHPNDDVNMSQSSNDTFPTAMHIVSVLEITHKLLPSLENLLKTFKDKSQQFKEIVKIGRTHLQDATPLTLGQEFSGYASMLEHSKQQILESLEHLRELAIGGTAVGTGLNAHKELSQKVAEELSEFSGVKFISAPNKFHALTSHDAIAYAHGAFKALAANLMKIANDIRWLASGPRCGLGELNIPENEPGSSIMPGKVNPTQCEAMTMVAVQVMGNDTAIGIAASQGNFELNVFKPVIIYNFLQSLRLLSDSMESFNTHCAIGIEPNKEKIDYYLHHSLMLVTALNPHVGYENAAKIAKNAHKKGISLKESALELKLLSTEDFDKFVVPEKMIGPKA

SEQ ID NO: 6388 - DNA, 1616 bp, Drosophila melanogaster
  CDS (1)..(1413)
atgagctccaccaagaaggttgagacccgccaagagagcgacaccctgggacccatggaggtgcccatggatcgctattacggcgcccagacgatgcgctgcctcataaactttcgcattggcggcgaggaggagcgaatgccgcgccagataatccaggccatgggcatactgaagaaggcggcagccgaaacaaaccaagaattcggattggatcccaagttgagcacggccatctcgaatgcggccgacgatgtgatctccggaaagctttacgatgagggtcacttcccgctgcccatttggcagacgggttcgggcacccagagcaacatgaacagcaacgaggttatcgggaatcgtgccatcgagctgctgggcggacgtattggtaccaaggacccagtgcatcccaacgaccatgtgaacaagtcgcagagctccaacgacacctttccgtcggccattcacattgcggtggccactgcgctgaccaaggatctccgaccggcggtcaccgctctgcgggattcactgcaggccaagtcgaatgaatggaaggatatcattaagattggacgcactcacacccaggatgcagtgccgctaacgctgggccaggagttcagtggctatgcccaacagctgaccaacgggctgcagaggatcgatgcggtcctgccgcgagtttatcagctcgcactgggtggaaccgctgtgggaactggattgaatacccgccggggattcgccgagaagtgtgtcaagcggatcgcccagctcagtggattgcccttcgtggtggcgcccaattttttcgaggccctcgcctgtcgagatgccatggtggaggtgcatggagcgctcaatgtcctggctgttagcctgatgaaggtcaccaatgatatacgtttcctgggatcgggaccacgttgcggtctgggcgagctgtttctgccggagaatgagccgggcagttctattatgcccggcaaggtgaatcccacgcagtgcgaggccatgaccatgatctgcgcccaggtgatgggcaaccacgtggccgtctccgtcggcggtgccaatggacactttgagctcaacgttttcaagccactgatcgcatccaatgtgctccgctccatcaagctgctggctgatgggtgcatcagcttcaactgcaactgcgtcaagggcattaagcccaacaaggagaagctggcaaagatcgtgaatgagtcgctaatgctggtgacagccctcaatccgcacattggctatgacaagtccgcccagattgccaaggcggcccacaagaatggaactactctaaaggtggaggcattgaacgccggcatatcggagaaggatttcaacgagtgggtgcgtcccgagaagatgctgggtccttcttaggttttcctcccttgttccatgtgttacacattcataaattccatattgcaaaattttatcgttggaaatacaatcgagtgaagaaggatgtaaacagttttggtaacacaaggttgtgatgaaattcttgtggatatttttgttccaattaaatttcaaataaaaatagcaatcgccttaaaaatgtaagacgctactaaaaa

SEQ ID NO: 6389 - protein, 470 aa, Drosophila melanogaster
MSSTKKVETRQESDTLGPMEVPMDRYYGAQTMRCLINFRIGGEEERMPRQIIQAMGILKKAAAETNQEFGLDPKLSTAISNAADDVISGKLYDEGHFPLPIWQTGSGTQSNMNSNEVIGNRAIELLGGRIGTKDPVHPNDHVNKSQSSNDTFPSAIHIAVATALTKDLRPAVTALRDSLQAKSNEWKDIIKIGRTHTQDAVPLTLGQEFSGYAQQLTNGLQRIDAVLPRVYQLALGGTAVGTGLNTRRGFAEKCVKRIAQLSGLPFVVAPNFFEALACRDAMVEVHGALNVLAVSLMKVTNDIRFLGSGPRCGLGELFLPENEPGSSIMPGKVNPTQCEAMTMICAQVMGNHVAVSVGGANGHFELNVFKPLIASNVLRSIKLLADGCISFNCNCVKGIKPNKEKLAKIVNESLMLVTALNPHIGYDKSAQIAKAAHKNGTTLKVEALNAGISEKDFNEWVRPEKMLGPS

SEQ ID NO: 6390 - DNA, 1572 bp, Drosophila melanogaster
  CDS (1)..(1572)
atgctgaagcaaaacaatggtctgcatctggctaggcgcaatctctgggtggtttgcagtggcctccgtgccaaggattgcgacagtggcggtaagggcggcaagggcaaggagaatggcaagtttcgtacggagaaggacaccttcggggagctaaaggtgccggcggacaagctgtacggcgcacagacgatgcgctccaaattgaattttcccattggcgacataggcgaacgtatgccgatgccggtgatccaggccatgggcatactgaagaaggcatgtgccgaggtcaacaaggattacggactagatggcaaggtgtcggatgccgtatcctgcgcctgcgacgatgtcatttccggcaagctatacaaacagggtcacttcccattggtcatctggcaaaccggttcgggcacccagaccaatatgaacaccaacgaggtgatcagcaatgcggccattaagatgatgggcggcgaactgggcagcaagaagccggtgcatcccaacgatcatgtgaacaagtcgcagagctccaacgacaccttccccacggccattcacatttcggtgggcatggagctgaacgagcggcttgttccggcggttacacacttgagggatgccctcaagtccaagtcggatgagttcaaggacatcatcaagatcggacgcacccacttgatggacgcagttccgctgactttgggccaggaattcagcggttatacacagcagttgaccaacggtctggaaaggatcaagggctgtctgccgcgcgtctatgagctggctctgggcggcactgctgtgggtacgggtctgaacacacgcaagggattcgccgagaaggtggccaagcgcatttcggagctaacctgcttgcccttcgtgtcggcgcccaacaagttcgaggcactggctgcccgcgatgccatggtggaggtgcatggtgtgctcaacacgatcgccgtcagcctgatgaagatcgccaacgatatccgattgctgggatcgggtccgcgttgcggtctgggcgaactaatgctgccggagaacgagcccggtagctccatcatgcccggcaaggtgaatcccacgcaatgcgaatcaatgaccatgctgtgtgcccaggtgatgggcaatcaggtggcggtgaccatcggcggctccaacgggcacttcgagctaaatgtattcaaacccctggtcgtgtccaatgtgctgcgctccattcgcttgttgggtgagtcggaaatgtgttttccaagtggaaaaacatgcatacataaccttctcctcccagctgatggcagcatgaccttcagcaagaactgcgtggagggactgcaggccaacaaggagaggatcgacaagatcatgaacgagtccttgatgctggtgaccgcgctgaatccgcacattggctatgacaaggccgccctgatcgccaagacggcgcacaagaataagacgaccttgaaggaggaggcactgaagaccggaattaccgaagagcagttcaaggagtgggtcaatcccaaggagatgctgggaccgaagtga

SEQ ID NO: 6391 - protein, 523 aa, Drosophila melanogaster
MLKQNNGLHLARRNLWVVCSGLRAKDCDSGGKGGKGKENGKFRTEKDTFGELKVPADKLYGAQTMRSKLNFPIGDIGERMPMPVIQAMGILKKACAEVNKDYGLDGKVSDAVSCACDDVISGKLYKQGHFPLVIWQTGSGTQTNMNTNEVISNAAIKMMGGELGSKKPVHPNDHVNKSQSSNDTFPTAIHISVGMELNERLVPAVTHLRDALKSKSDEFKDIIKIGRTHLMDAVPLTLGQEFSGYTQQLTNGLERIKGCLPRVYELALGGTAVGTGLNTRKGFAEKVAKRISELTCLPFVSAPNKFEALAARDAMVEVHGVLNTIAVSLMKIANDIRLLGSGPRCGLGELMLPENEPGSSIMPGKVNPTQCESMTMLCAQVMGNQVAVTIGGSNGHFELNVFKPLVVSNVLRSIRLLGESEMCFPSGKTCIHNLLLPADGSMTFSKNCVEGLQANKERIDKIMNESLMLVTALNPHIGYDKAALIAKTAHKNKTTLKEEALKTGITEEQFKEWVNPKEMLGPK

SEQ ID NO: 6392 - DNA, 1581 bp, Corynebacterium glutamicum
  CDS (1)..(1581): transl_table=11
atgtctaagacgagcaacaagtcttcagcagactcaaagaatgacgcaaaagccgaagacattgtgaacggcgagaaccaaatcgccacgaatgagtcgcagtcttcagacagcgctgcagtttcggaacgtgtcgtcgaaccaaaaaccacggttcagaaaaagttccgaatcgaatcggatctgcttggtgaacttcagatcccatcccacgcatattacggggtgcacacccttcgtgcggtggacaacttccaaatctcacgaaccaccatcaaccacgtcccagatttcattcgcggcatggtccaggtgaaaaaggccgcagctttagcaaaccgccgactgcacacacttccagcacaaaaagcagaagcaattgtctgggcttgtgatcagatcctcattgaggaacgctgtatggatcagttccccatcgatgtgttccagggtggcgcaggtacctcactgaacatgaacaccaacgaggttgttgccaaccttgcacttgagttcttaggccatgaaaagggcgagtaccacatcctgcaccccatggatgatgtgaacatgtcccagtccaccaacgattcctacccaactggtttccgcctgggcatttacgctggactgcagaccctcatcgctgaaattgatgagcttcaggttgcgttccgccacaagggcaatgagtttgtcgacatcatcaagatgggccgcacccagttgcaggatgctgttcccatgagcttgggcgaagagttccgagcattcgcgcacaacctcgcagaagagcagaccgtgctgcgtgaagctgccaaccgtctcctcgaggtcaatcttggtgcaaccgcaatcggtactggtgtgaacactccagcaggctaccgccaccaggttgtcgctgctctgtctgaggtcaccggactggaactaaagtccgcacgtgatctcatcgaggctacctctgacaccggtgcatatgttcatgcgcactccgcaatcaagcgtgcagccatgaaactgtccaagatctgtaacgatctacgtctgctgtcttctggtcctcgtgctggcttgaacgaaatcaacctgccaccacgccaggctggttcctccatcatgccagccaaggtcaacccagtgatcccagaagtggtcaaccaggtctgcttcaaggtcttcggtaacgatctcaccgtcaccatggctgcggaagctggccagttgcagctcaacgtcatggagccagtcattggcgaatccctcttccagtcactgcgcatcctgggcaatgcagccaagactttgcgtgagaagtgcgtcgtaggaatcaccgccaacgctgatgtttgccgtgcttacgttgataactccatcgggattatcacttacctgaacccattcctgggccacgacattggagatcagatcggtaaggaagcagccgaaactggtcgaccagtgcgtgaactcatcctggaaaagaagctcatggatgaaaagacgctcgaggcagtcctgtccaaggagaacctcatgcacccaatgttccgcggaaggctctacttggagaactaa

SEQ ID NO: 6393 - protein, 526 aa, Corynebacterium glutamicum
MSKTSNKSSADSKNDAKAEDIVNGENQIATNESQSSDSAAVSERVVEPKTTVQKKFRIESDLLGELQIPSHAYYGVHTLRAVDNFQISRTTINHVPDFIRGMVQVKKAAALANRRLHTLPAQKAEAIVWACDQILIEERCMDQFPIDVFQGGAGTSLNMNTNEVVANLALEFLGHEKGEYHILHPMDDVNMSQSTNDSYPTGFRLGIYAGLQTLIAEIDELQVAFRHKGNEFVDIIKMGRTQLQDAVPMSLGEEFRAFAHNLAEEQTVLREAANRLLEVNLGATAIGTGVNTPAGYRHQVVAALSEVTGLELKSARDLIEATSDTGAYVHAHSAIKRAAMKLSKICNDLRLLSSGPRAGLNEINLPPRQAGSSIMPAKVNPVIPEVVNQVCFKVFGNDLTVTMAAEAGQLQLNVMEPVIGESLFQSLRILGNAAKTLREKCVVGITANADVCRAYVDNSIGIITYLNPFLGHDIGDQIGKEAAETGRPVRELILEKKLMDEKTLEAVLSKENLMHPMFRGRLYLEN

SEQ ID NO: 6394 - DNA, 1428 bp, Haemophilus influenzae
  CDS (1)..(1428): transl_table=11
gtgattacaatgactcaatttagaaaagaagtagatttacttggcgaacgtgatgtgcctgcagaagcatattgggggattcatacattaagagcggtagaaaatttcaatatttctaacgtaaccatttctgacgtgcctgagtttgtgcgtggtatggtaatggtaaaaaaagcaacagctttagccaatggcgaattaggtgcaattccaagtgatattgcaaaagcgattgtagcagcttgtgatgaaattcttaccactggaaaatgcttagatcaattcccatcagacgtatatcaaggtggtgcaggtacgtctgtcaatatgaatactaatgaagtggttgctaatcttgcccttgaaaaaattggtcataaaaaaggcgaatataacgtgattaatccgatggatcacgttaatgcaagccaatcgaccaacgatgcgtatcctaccggtttccgtattgcggtgtacaacagcatcttaaaattgatcgataaaattcaatatttacacgacagttttgataataaagcaaaagagtttgcaaatatcttaaaaatgggtcgtacccaattgcaagatgcggtgccaatgactgttggtcaagaattcaaagctttcgccgtattacttgaagaagaagtgcgtaacttaaaacgtacagcaggtttattacttgaagtaaaccttggtgcaacggcaatcggtactggtttaaatacgccacaaggctatacagaattagttgtaaaacatcttgctgaagtgactggattagcttgtgtaccagcagaaaacttaattgaagcaacatctgactgtggtgcttatgtcatggttcacggtgcattaaaacgtactgcagtgaaactttctaaagtatgtaatgacttacgtttactttcttctggcccacgtgcaggtttaaaagaaattaatcttcctgaattacaagcgggttcttctattatgccagcaaaagtaaacccagttgttccagaggtggtaaaccaagtgtgctttaaagtaattggtaacgataccactgtgaccttcgcatctgaagcaggtcaattacaattaaacgtaatggaaccagtgattggtcaagcaatgtttgaatctatcgatatcttaaccaatgcttgtgtgaacttacgcgataaatgtgtggatggcatcactgtaaacaaagaaatttgtgaaaactacgtgtttaattcaattggtattgtgacttacttgaatccatttatcggtcaccacaacggcgacttagtgggtaaaatctgtgcacaaacaggcaaaggcgtacgtgaagttgtgttagaaaaaggtttattaacagaagaacaattagatgacattctttctgtagaaaacttaatgaatccaacttacaaagcgaaattaaataaataa

SEQ ID NO: 6395 - protein, 475 aa, Haemophilus influenzae
MITMTQFRKEVDLLGERDVPAEAYWGIHTLRAVENFNISNVTISDVPEFVRGMVMVKKATALANGELGAIPSDIAKAIVAACDEILTTGKCLDQFPSDVYQGGAGTSVNMNTNEVVANLALEKIGHKKGEYNVINPMDHVNASQSTNDAYPTGFRIAVYNSILKLIDKIQYLHDSFDNKAKEFANILKMGRTQLQDAVPMTVGQEFKAFAVLLEEEVRNLKRTAGLLLEVNLGATAIGTGLNTPQGYTELVVKHLAEVTGLACVPAENLIEATSDCGAYVMVHGALKRTAVKLSKVCNDLRLLSSGPRAGLKEINLPELQAGSSIMPAKVNPVVPEVVNQVCFKVIGNDTTVTFASEAGQLQLNVMEPVIGQAMFESIDILTNACVNLRDKCVDGITVNKEICENYVFNSIGIVTYLNPFIGHHNGDLVGKICAQTGKGVREVVLEKGLLTEEQLDDILSVENLMNPTYKAKLNK

SEQ ID NO: 6396 - DNA, 1407 bp, Helicobacter pylori J99
  CDS (1)..(1407): transl_table=11
atgcgtattgagcatgatttcattgggcaaatggaaattagcgatgaagtttattacgggattcaaactttaagggcgagtgaaaattttttcatcaccaacgacaagctttgcagttatcctgtttttatcaaatcttttgctcaagtcaaaaaagcggccgctttagcgaacgcgcaattaggcttgattgatgaaaagcttaaaattgcgatttgccatgcgtgcgatttgttggttgatggcaaataccatgatcaattcattgtggatatgattcaagggggggctggcacaagcacgaacatgaacatgaatgaagtgattgctaatttggctttagaatacatggggcatcaaaagggcgagtatcaattttgccacccaaacgaccatgtcaaccgctctcaatccaccaatgacgcctatcctagcgcgttaaaaatcgcgatttatgagcgcttgagcaatctagttgcccccatgaaagccttaagggacgctttcgctcaaaaggctaaggaattcgctcatgtgattaaaatggggcgcacccagcttcaagacgctgtgcctatgactttagggcaagagtttgaaacttatgcgttgatggttgatagggatattgagcaggttttagacgctaggaattgggtaagagagcttaatttaggcggcacggttattggcacagggatcaattcgcacccggattatcgcagtttgattgaaaagaaaatccaagaagtaacgggccgcccctttgtcatggctaacaacttgatagaagccactcaaagcacgggggcgtatgtgcaagtgagcggggtgttaaagcgtattgcggtgaaactttctaaggtttgtaacgatttaaggctgctcagttcaggccctagagccgggttgaatgaaatcaatttgcctaaaatgcagccgggtagctctatcatgcccggtaaagtcaatccggtgatccctgaagtggtcaatcaagtgtgctttgcggtgattgggaacgatttgagcgtggcgttagccgcagaaggagggcaattgcaactcaatgtgtttgagccggttatcgcttacaagcttttccattcctttgtgattttagggcgcgcgattgaaactttaacgactaaatgcgtggaaggcatcacggctaatgaaaagatttgccacgattatgtttttaacagcattggcattgttaccgcgctcaaccctcatatcggctatgaaaaatccgctatgatcgccaaagaagccttaaaaagcgatcgctctatctatgatatcgctttagaaaagaaaatcttaaccaaagagcaactggacgatattttcaagccagaaaacatgctaagccctcacgctttcaaaaagcataaagactga

SEQ ID NO: 6397 - protein, 468 aa, Helicobacter pylori J99
MRIEHDFIGQMEISDEVYYGIQTLRASENFFITNDKLCSYPVFIKSFAQVKKAAALANAQLGLIDEKLKIAICHACDLLVDGKYHDQFIVDMIQGGAGTSTNMNMNEVIANLALEYMGHQKGEYQFCHPNDHVNRSQSTNDAYPSALKIAIYERLSNLVAPMKALRDAFAQKAKEFAHVIKMGRTQLQDAVPMTLGQEFETYALMVDRDIEQVLDARNWVRELNLGGTVIGTGINSHPDYRSLIEKKIQEVTGRPFVMANNLIEATQSTGAYVQVSGVLKRIAVKLSKVCNDLRLLSSGPRAGLNEINLPKMQPGSSIMPGKVNPVIPEVVNQVCFAVIGNDLSVALAAEGGQLQLNVFEPVIAYKLFHSFVILGRAIETLTTKCVEGITANEKICHDYVFNSIGIVTALNPHIGYEKSAMIAKEALKSDRSIYDIALEKKILTKEQLDDIFKPENMLSPHAFKKHKD

SEQ ID NO: 6398 - DNA, 1407 bp, Helicobacter pylori
  CDS (1)..(1407): transl_table=11
atgcgtattgagcatgatttcattgggcaaatggaaattagcgacgaggtttattacgggattcaaactttaagagcgagtgaaaattttttcatcaccaacgacaagctttgcagttatcctgtttttatcaaatctttcgctcaagtcaaaaaagcggctactttagcgaacgtgcaattaggcttgattgatgaaaagcttaaaattgcgatttgccatgcgtgcgatttgctcattgatggcaaataccatgatcaattcattgtggatatgattcaagggggggctggcacaagcacgaacatgaacatgaacgaagtgattgctaatttggctttagaatacatggggcatcaaaagggcgagtatcaattttgccacccaaacgaccatgtcaaccgctctcaatccactaatgacgcctatcctagtgcgttaaaaatcgctatttatgagcgcttgagcaatctagtcgcccccatgaaagccttaagggatgctttcgctcaaaaggctaaggaattcgctcatgtgattaaaatggggcgcacccagcttcaagacgctgtgcctatgactttaggccaagagtttgaaacttatgccttgatggttgatagggatattgagcaggttttagacgctaggaattgggtaagagagcttaatttaggcggcacggctattggcacagggatcaattcgcacccggattatcgcagtttgattgaaaagaaaatccaagaagtaacgggccgcccctttgtcatggctaataacttgattgaagccactcaaagcacgggggcgtatgtgcaagtgagcggggtgttaaagcgtattgcggtgaaactttctaaggtttgtaacgatctcaggctactcagttcaggccctagagccgggttgaatgaaatcaatttgcctaaaatgcagccgggtagttctatcatgcccggtaaagtcaatccggtgatccctgaagtggtcaatcaggtgtgctttgcggtgattgggaatgatttgagcgtggcgttagccgcagaaggcgggcagttgcaactcaatgtgtttgagccggtgatcgcttacaagctattccattcctttgtgattttagggcgtgcgattgaaactttaacgactaaatgtgtggaaggcatcacggctaatgaaaagatttgccacgattatgtctttaacagcattggcattgttaccgcgctaaaccctcatatcggctatgaaaaatccgctatgatcgctaaagaagccttaaaaagcgatcgctctatttatgacatcgctttagaaaagaaaatcttaactaaagagcaactggacgatattttcaagccagaaaacatgctaagccctcacgctttcaaaaagcataaagactga

SEQ ID NO: 6399 - protein, 468 aa, Helicobacter pylori
MRIEHDFIGQMEISDEVYYGIQTLRASENFFITNDKLCSYPVFIKSFAQVKKAATLANVQLGLIDEKLKIAICHACDLLIDGKYHDQFIVDMIQGGAGTSTNMNMNEVIANLALEYMGHQKGEYQFCHPNDHVNRSQSTNDAYPSALKIAIYERLSNLVAPMKALRDAFAQKAKEFAHVIKMGRTQLQDAVPMTLGQEFETYALMVDRDIEQVLDARNWVRELNLGGTAIGTGINSHPDYRSLIEKKIQEVTGRPFVMANNLIEATQSTGAYVQVSGVLKRIAVKLSKVCNDLRLLSSGPRAGLNEINLPKMQPGSSIMPGKVNPVIPEVVNQVCFAVIGNDLSVALAAEGGQLQLNVFEPVIAYKLFHSFVILGRAIETLTTKCVEGITANEKICHDYVFNSIGIVTALNPHIGYEKSAMIAKEALKSDRSIYDIALEKKILTKEQLDDIFKPENMLSPHAFKKHKD

SEQ ID NO: 6400 - DNA, 1437 bp, Pseudomonas fluorescens
  CDS (1)..(1437): transl_table=11
atgatctccgtcatgtcctctgctgcatctttccgtaccgaaaaagacctgcttggcgtactcgaagtaccggctcaagcgtattacggcatccagaccctgcgagcggtgaataacttccgcctctcgggcgttccgatttcgcattacccgaaattggtggtcggtctggcaatggtcaagcaagcagcggctgacgccaaccgcgagttgggccagctcagcgaacgcaagcacgctgccatcagcgaagcctgcgctcgtctgatccgcggcgatttccacgaagagttcgtggtggacatgattcaaggcggcgctggcacttcaaccaacatgaatgccaacgaagtcatcgccaacatcgcgctggaggccatgggtcaccagaagggcgaataccagtacctgcaccccaacaacgacgtgaacatggcgcagtcgaccaacgacgcctacccgaccgcgatccgcctgggtctgctgctgggccatgacgcgctgctggccagcctcgacagcctgatccaggcgttcgccgccaaaggcgccgagttcagccatgtgctgaaaatgggccgcacacaattgcaagacgccgtgccgatgaccctcggccaggaattccgcgcgttcgccaccaccctgggtgaagacctggcccgcctgaaaaccctggcgccagagctgctgaccgaagtgaacctgggcggaaccgcgatcggtaccggcatcaacgccgacccgcgctaccaggccctcgccgtacaacgcctggccaccatcagcggtcagccgctggtaccggcggccgacctgatcgaagccacctccgacatgggcgctttcgtactgttctccggcatgctcaagcgtactgccgtgaagctgtccaagatctgcaacgacctgcgcctgctgtccagcggcccacgcaccggcatcaacgagatcaacctgccggctcgccagccaggcagctcgatcatgcccggcaaggtcaacccggtcatcccggaagcggtcaaccaggtagcgttccaagtcatcggtaacgacctggccctgaccatggcagccgaaggcggccaactgcagttgaacgtgatggagccgctgatcgccttcaagatcttcgactcgatccgcctgctgcaacgcgccatggacatgctgcgcgagcactgcatcgtcggcatcaccgccaacgaagcccgctgccgcgaactggtggaacattccatcggcctggtcaccgcgctgaacccatacatcggctatgaaaacgccacccgcattgcgcgtatcgcgcttgaaagcgggcgcggcgtgctggaactggtgcgtgaagaaggcttgctcgacgacgccatgctcgacgacatcctgcgccccgaaaacatgattgccccacgcttggtcccgctgaaggcctaa

SEQ ID NO: 6401 - protein, 478 aa, Pseudomonas fluorescens
MISVMSSAASFRTEKDLLGVLEVPAQAYYGIQTLRAVNNFRLSGVPISHYPKLVVGLAMVKQAAADANRELGQLSERKHAAISEACARLIRGDFHEEFVVDMIQGGAGTSTNMNANEVIANIALEAMGHQKGEYQYLHPNNDVNMAQSTNDAYPTAIRLGLLLGHDALLASLDSLIQAFAAKGAEFSHVLKMGRTQLQDAVPMTLGQEFRAFATTLGEDLARLKTLAPELLTEVNLGGTAIGTGINADPRYQALAVQRLATISGQPLVPAADLIEATSDMGAFVLFSGMLKRTAVKLSKICNDLRLLSSGPRTGINEINLPARQPGSSIMPGKVNPVIPEAVNQVAFQVIGNDLALTMAAEGGQLQLNVMEPLIAFKIFDSIRLLQRAMDMLREHCIVGITANEARCRELVEHSIGLVTALNPYIGYENATRIARIALESGRGVLELVREEGLLDDAMLDDILRPENMIAPRLVPLKA

SEQ ID NO: 6402 - DNA, 1437 bp, Serratia marcescens
  CDS (1)..(1437): transl_table=11
atgtcaaacaacattcgtatcgaagaagacctgttaggaacacgtgaagtccccgcagacgcttactacggagttcacactctgcgtgcgattgaaaacttctacatcagcaacagcaaaatcagcgatgtccccgagttcgttcgcggcatggtgatggtgaaaaaggccgcggcgatggccaacaaagaactcaaaaccatcccgcgcaaaatcgccgacgtgatcatccaggcctgcgacgaggtgctggataaaggcaagtgcatggatcagttcccggtggacgtattccagggcggcgcgggcacctcgctgaacatgaacaccaacgaagtgctggcgaacatcggcctggagctgatgggccatcaaaaaggcgaataccagtacctgaacccgaacgatcacctcaataagtgtcagtccaccaacgacgcctacccgaccgggttccgcatcgcggtgtacgcctccaaccagaaactgatcgacgccatcaaccagctgcgcgaaggcttcgatcgcaaggcgaaagagttcgaaaccatcctgaaaatgggccgcacccagctgcaggacgcggtgccgatgaccctaggccaggaattccacgccttcagcgtgctgctgaacgaagagacccgcaatctgcaccgcaccgcgacgctgctgctggaagtgaacctcggcgccaccgccatcggcaccgcgctcaacaccccggaaggctaccagccgctggcggtgcaaaaactggcggaagtcagcggcctgccggtggtgccggcagaagacctgatcgaagccacctccgactgcggcgcctacgtgatggtgcacagcgcgctcaaacgcctggcggtgaaactgtccaaaatctgtaacgacctgcgcctgctctcctccggcccgcgcgccggcctgaacgaaatcaacttgccggagctgcaggcgggatcgtccatcatgccggccaaagtgaatccggtggtgccggaagtggtcaatcaggtgtgtttcaaggtgattggcaacgacacttgcgttaccatggcggccgaagcgggccagctgcagctgaacgtgatggagccggtgatcggccaggcgatgttcgagtcgatccacatcctgaccaacgcctgctacaacctgctggaaaaatgcattaacggcatcaccgcgaataaagaagtctgcgaacactacgtcttcaactcgatcggtatcgtcacctatctgaacccgttcatcggccaccataacggtgacatcgtcgggaagatctgcgccgaaaccggcaagagcgtgcgcgaagtggtgctggaacgcggcctgctgaccgaagccgagctggatgacatcttctccgtggagaacctgatgcacccggcctataaagccaaacgctatacggatgaaaatgaacaataa

SEQ ID NO: 6403 - protein, 478 aa, Serratia marcescens
MSNNIRIEEDLLGTREVPADAYYGVHTLRAIENFYISNSKISDVPEFVRGMVMVKKAAAMANKELKTIPRKIADVIIQACDEVLDKGKCMDQFPVDVFQGGAGTSLNMNTNEVLANIGLELMGHQKGEYQYLNPNDHLNKCQSTNDAYPTGFRIAVYASNQKLIDAINQLREGFDRKAKEFETILKMGRTQLQDAVPMTLGQEFHAFSVLLNEETRNLHRTATLLLEVNLGATAIGTALNTPEGYQPLAVQKLAEVSGLPVVPAEDLIEATSDCGAYVMVHSALKRLAVKLSKICNDLRLLSSGPRAGLNEINLPELQAGSSIMPAKVNPVVPEVVNQVCFKVIGNDTCVTMAAEAGQLQLNVMEPVIGQAMFESIHILTNACYNLLEKCINGITANKEVCEHYVFNSIGIVTYLNPFIGHHNGDIVGKICAETGKSVREVVLERGLLTEAELDDIFSVENLMHPAYKAKRYTDENEQ

SEQ ID NO: 6404 - DNA, 1392 bp, Agrobacterium tumefaciens
  CDS (1)..(1392)
atgacagccacacggacagaaaccgatacatttggccctattgaagttcaggccgatcgctactggggcgcgcaggcgcagcgctcgctcggcaacttcaagatcggctgggaaaagcagcccgcctctgtcgttcgtgcgctcggcatcgtcaagcaggccgctgcccgcgccaacatggcgcttgcaggtctcgaccccaaggtgggagatgccatcatcgccgccgcgcaggaagtcatcgacggcaagctgaccgagcatttcccgctcgtcgtctggcagaccggctccggcacccagtccaacatgaatgccaacgaggtgatttccaaccgcgcgatcgaaatgctcggcggcgaaatgggcaccaagaagcctgttcacccgaatgaccacgtcaatatgagccagtcctcgaacgacacctacccgacggcgatgcacatcgcctgcgtggaagagatcgttcaccacctgttgccggccctcaagcacctgcacacggcgctggaagccaaggtcaagcagttcgaaaagatcatcaagatcggccgtacccacacgcaggacgcgaccccgctgacgctcggccaggaattctccggttacgccgctcaggtcgcctcggcgatcgccaatatcgaactcacactgcccgcactgtcgaagctcgcccagggcggtacggcggttggcacgggcctcaatgcccctgttggttttgccgaaaaggtcgccgaggaaatctctgagattaccggcctttccttcgtcaccgcgccgaacaagttcgaagcgcttgcctcgcatgattccatggtcttctcgcacggcgcgatcaacgccgctgccgctgcactcttcaagatcgccaacgacatccgcttcctcggttccggcccgcgcgccggtctcggcgaattgtcgctgccggaaaacgagcccggctcgtcgatcatgccgggcaaggtcaacccgacgcagtcggaggcactgacgcaggtttgcgcccatatcttcggcaacaatgcagcgctttccttcgcaggctcgcagggccacttcgaactcaacgtctataatccgatgatggcctacaactttctgcagtcggtccagcttctgggcgatgcggccgtgtccttcaccgacaactgcgtcgtcggcatcgaggcgcgcgaagacaatatccggaagggcgtcgagaactcgctgatgctcgtcacggcgctcaacggcaagctcggctacgacatctgcgccaagatcgccaagaccgcccacaagaacggcacgacgctgcgcgaagaagccgttggtggtggatacctcaccaacgaggaattcgaccagtatgtgcgccccgaaaacatgatcggcccgaagtaa

SEQ ID NO: 6405 - protein, 463 aa, Agrobacterium tumefaciens
MTATRTETDTFGPIEVQADRYWGAQAQRSLGNFKIGWEKQPASVVRALGIVKQAAARANMALAGLDPKVGDAIIAAAQEVIDGKLTEHFPLVVWQTGSGTQSNMNANEVISNRAIEMLGGEMGTKKPVHPNDHVNMSQSSNDTYPTAMHIACVEEIVHHLLPALKHLHTALEAKVKQFEKIIKIGRTHTQDATPLTLGQEFSGYAAQVASAIANIELTLPALSKLAQGGTAVGTGLNAPVGFAEKVAEEISEITGLSFVTAPNKFEALASHDSMVFSHGAINAAAAALFKIANDIRFLGSGPRAGLGELSLPENEPGSSIMPGKVNPTQSEALTQVCAHIFGNNAALSFAGSQGHFELNVYNPMMAYNFLQSVQLLGDAAVSFTDNCVVGIEAREDNIRKGVENSLMLVTALNGKLGYDICAKIAKTAHKNGTTLREEAVGGGYLTNEEFDQYVRPENMIGPK

SEQ ID NO: 6406 - DNA, 1389 bp, Bacillus anthracis
  CDS (1)..(1389)
atggagtacagaattgaaagagatacattaggagaaataaaagttccagctgataaattatgggcagcacaaacacaacgtagtaaagaaaacttcccgattggaacagagcaaatgccgcttgaaattgtaaaagcatttgcaattttaaagaagagtgcagcgcttagcaatcaaaaattaggaaagctatcagaagaaaaagcagaagcaattgtggtagctgctgacgaaatcattgcagggaaatggaatgaacattttccgcttgtcgtgtggcaaacaggtagtggtacacaatcaaacatgaatgtgaatgaagtaattgcaaatcgtgggaatcaaattttgaaagaaaagggatctgacgtacatattcatccgaatgatgatgtgaacatgtcccaaagttcaaatgatacatttccaacagcgcttcatgtagcatgtgtactcgcagtagaaaatcacgtattaccagctattacgaaattaaaagaaacgttagcagaaaaagtaactgcatttgaacatattataaaaattggtcgtacacatttacaagatgcgacaccgttaacattaggacaagaaattagtggatggcaccgtatgcttgaaaaaacagagcgtatgattgcagagagcaatacatatatgaaagagcttgcgattggtggtacagcagttggaacaggtattaacgctcatcctaaatttggtgagatggtatcagaggaaattagccaatttacaggtaaacaatttatttctgcaccaaataagttccatgcattaacgagccatgatgaagttgtatatactcacggtgcattaaaagcattagctgcggatttaatgaaaatcgctaacgatgtacgttggctggcaagtggtccacgtagtggtttaggagaaattattattccggcgaatgagccaggaagctctattatgccaggtaaagtaaatccaacgcaaagtgaagcgttaacgatggttgtagcgcaagtgatgggaaatgacgcaacaatcggatttgctgcgagtcaaggtaattttgagttaaacgtatttaaacctgttattgcgtataacttcttacaatccgctcacttattagcagatgcaattgtttcatttaatgataattgtgcagttggtattgaagctgatgaagaaatcattaaagagaatgtgaatcgttcattaatgcttgttacagcattaaacccgcatatcggatatgaaaatgcagcaaaaattgcgaagcatgctcataaagaagggttaactttaaaagaagcagcattgcaatctggactactaacagaagagcaatttaatgaaattgtcgatccgaaaaaaatgattgctccgaaagagtaa

SEQ ID NO: 6407 - protein, 462 aa, Bacillus anthracis
MEYRIERDTLGEIKVPADKLWAAQTQRSKENFPIGTEQMPLEIVKAFAILKKSAALSNQKLGKLSEEKAEAIVVAADEIIAGKWNEHFPLVVWQTGSGTQSNMNVNEVIANRGNQILKEKGSDVHIHPNDDVNMSQSSNDTFPTALHVACVLAVENHVLPAITKLKETLAEKVTAFEHIIKIGRTHLQDATPLTLGQEISGWHRMLEKTERMIAESNTYMKELAIGGTAVGTGINAHPKFGEMVSEEISQFTGKQFISAPNKFHALTSHDEVVYTHGALKALAADLMKIANDVRWLASGPRSGLGEIIIPANEPGSSIMPGKVNPTQSEALTMVVAQVMGNDATIGFAASQGNFELNVFKPVIAYNFLQSAHLLADAIVSFNDNCAVGIEADEEIIKENVNRSLMLVTALNPHIGYENAAKIAKHAHKEGLTLKEAALQSGLLTEEQFNEIVDPKKMIAPKE

SEQ ID NO: 6408 - DNA, 1389 bp, Bacillus subtilis
  CDS (1)..(1389)
atggaatacagaattgaacgagacaccatgggagaagtaaaagttcctgctgataaattttggggcgcccaaacacagcgaagcaaggagaactttaagatcggttctgaaaaaatgccgatgcgtgttgtgaaggcgtttgcaattttaaaacgaagcactgctctagctaataaacgcctcggcaatctggacgctgaaaaagcagaagcgattgcagcggtttgtgatgatgtgctcaaaggcaagtacgatgacaacttcccgcttgtcgtatggcagaccggaagcggcacacaaagcaatatgaacatgaacgaagtggtagccaaccgtgcgactgctttattaaaagagaagaactctgatcaaacgattcatccaaatgatgacgtgaaccgaagccaaagctcaaacgacacattcccgactgcgatgcatgttgccgctgttttggctgtttacgagcagcttgtgccggcgcttgatcagcttcgcaatacactggatgaaaaagcaaaagcatacaatgatattgtcaaaatcggacgcacgcatcttcaggatgctacgccactgaccctcggacaggaaatcagcggatgggttcacatgctggaccgttcgaaggaaatgattttggaagcgacagataaaatgcgtgcgcttgcaattggtggaacggctgtcggaacgggtatcaacgcccacccagagtttggagagcttgtctcagaagagatcactaagctgaccggccaaacgttcagcagctcgccgaataaattccacgcgctgacaagccatgacgaaatcacttatgcgcatggcgcattaaaagcgcttgcggctgacttaatgaaaatcgcgaacgatgtcagatggctcgcaagcggaccccgctgcggcatcggggagatcgtcattcctgaaaatgagccgggaagctctattatgcctggtaaagtcaatccgacacaaagcgaagcgttaacaatgatcgcagcgcaaatcatggggaacgatgcgacaatcggctttgcggcgagtcaggggaactttgaactgaacgtgtttaagcctgttattatttacaacttcctgcaatctgtgcagctgctcagtgacggcatgaattcattccatgataaatgtgctgtcggtattgagcctaataaagaaaccattcaggaaaacctgtcaaattcattaatgcttgttacggcgctgaacccgcatatcggttatgaaaacgcggcgaaaatcgccaagcttgcccataaagagggattgacgctcaaagaagcagctttgaagcttgaattgctgacagaggagcaatttaacgaaatggttaagccggaagacatggtaaaaccaaaggcgtaa

SEQ ID NO: 6409 - protein, 462 aa, Bacillus subtilis
MEYRIERDTMGEVKVPADKFWGAQTQRSKENFKIGSEKMPMRVVKAFAILKRSTALANKRLGNLDAEKAEAIAAVCDDVLKGKYDDNFPLVVWQTGSGTQSNMNMNEVVANRATALLKEKNSDQTIHPNDDVNRSQSSNDTFPTAMHVAAVLAVYEQLVPALDQLRNTLDEKAKAYNDIVKIGRTHLQDATPLTLGQEISGWVHMLDRSKEMILEATDKMRALAIGGTAVGTGINAHPEFGELVSEEITKLTGQTFSSSPNKFHALTSHDEITYAHGALKALAADLMKIANDVRWLASGPRCGIGEIVIPENEPGSSIMPGKVNPTQSEALTMIAAQIMGNDATIGFAASQGNFELNVFKPVIIYNFLQSVQLLSDGMNSFHDKCAVGIEPNKETIQENLSNSLMLVTALNPHIGYENAAKIAKLAHKEGLTLKEAALKLELLTEEQFNEMVKPEDMVKPKA

SEQ ID NO: 6410 - DNA, 1392 bp, Bordetella pertussis
  CDS (1)..(1392)
atgaaaacccgcaccgaaaaagacactttcggcccgatcgaggtgcccgagcagcacctgtggggcgcgcagacccagcgctcgctgcatttcttcgcgatctcgaccgagaagatgccggtgccgctggtcgccgccatggcacgcctgaagcgcgccgccgccaaggtcaacgccgagctgggcgagctggatccgcaggtcgcagacgccatcatgcgggccgccgatgaggtgatcgccggcaagtggcccgacgagtttccgctgtcggtctggcagaccggctcgggcacgcagagcaacatgaacatgaacgaggtgctggccaaccgcgcctccgagctgctgggcggcgagcgcggcgaaggccgcaaggtgcaccccaacgaccacgtgaaccggggccagtcgtccaacgatacctttccgaccgccatgcacgtggccgccgcggtcgaggtcgagcaccgcgtgctgcccgccctgaaggcgttgcgcggcacgctggccgccaagagcgcggcgttctacgacatcgtcaagatcggtcgcacccatttgcaggacgccaccccgttgacgctgggccaggagatctccggctacgtggcgcagctggacctggccgagcagcagatccgcgcgacgctggccggcctgcaccagctggccatcggcggcacggcggtgggcaccggcctgaacgcgcatccgcagttcagcgccaaggtatcggccgaactggcccatgacacgggcagcgcgttcgtgtcggcgcccaacaagttccaggcgctggcttcgcacgaggcgctgctgttcgcgcacggcgccttgaagacgctggccgccggcctgatgaagatcgccaacgatgtgcgctggctggccagcggcccgcgctcggggctgggcgaaatcagcattcccgagaacgagccgggcagctccatcatgccgggcaaggtcaacccgacccagtgcgaagccgtcacgatgctggccgcgcaggtcatgggcaacgacgtggccatcaatgtcggcggggccagcggcaacttcgagctgaacgtcttcaagccgctggtgatccacaatttcctgcagtcggtgcgcctgctggccgacggcatggtcagcttcgacaagcactgcgcggccggcatcgagcccaaccgcgagcgcatcaccgagctggtcgagcgttcgctgatgctggtgactgcgctcaacccgcacatcggctacgacaaggccgcgcagatcgccaagaaggcgcacaaggaaaacctgtcgctgaaagaggcggcgctggcgctggggcacctgaccgaggcgcagttcgccgagtgggtggtgccgggcgacatgaccaacgcgcgccgctag

SEQ ID NO: 6411 - protein, 463 aa, Bordetella pertussis
MKTRTEKDTFGPIEVPEQHLWGAQTQRSLHFFAISTEKMPVPLVAAMARLKRAAAKVNAELGELDPQVADAIMRAADEVIAGKWPDEFPLSVWQTGSGTQSNMNMNEVLANRASELLGGERGEGRKVHPNDHVNRGQSSNDTFPTAMHVAAAVEVEHRVLPALKALRGTLAAKSAAFYDIVKIGRTHLQDATPLTLGQEISGYVAQLDLAEQQIRATLAGLHQLAIGGTAVGTGLNAHPQFSAKVSAELAHDTGSAFVSAPNKFQALASHEALLFAHGALKTLAAGLMKIANDVRWLASGPRSGLGEISIPENEPGSSIMPGKVNPTQCEAVTMLAAQVMGNDVAINVGGASGNFELNVFKPLVIHNFLQSVRLLADGMVSFDKHCAAGIEPNRERITELVERSLMLVTALNPHIGYDKAAQIAKKAHKENLSLKEAALALGHLTEAQFAEWVVPGDMTNARR

SEQ ID NO: 6412 - DNA, 1392 bp, Brucella melitensis
  CDS (1)..(1392)
atggccgccacgcgtaccgaaacagacactttcggaccgatcgatgttcccgcagaccgttattggggcgcacagacacagcgttccctgcaaaatttcaggatcggcggcgagcgcatgcccctgcccctggttcacgcgctgggcgtggtaaagcgcgcggcggcggaaaccaatatcgcgctcggcaagcttgatcccgtcctgggtcaggtgattgcggttgccgcttccgaagtcattgagggcaagctcgacgaccatttcccgctcgtagtctggcagacaggctccggcacgcaatcgaacatgaatgccaatgaagtgatctcgaaccgggctatcgagttgctcggcggggaaatgggctccaaaaagccgatccacccgaacgaccatgtcaatatgagccagtcttccaatgacagtttcccgacggcgatccacatcgccacggcggtcgaaaccgtcaaccggctctatcccgcgctcgaacacctcaccaaagccctgaaggtcaaggaagaagcattcaaggacatcatcaagattggccgcacccacacgcaggacgcaacacctgtgacgctggggcaggaattttcgggctaccgcgcggcacttgaatatgcccgccatcggctcgaacaatcgcttgccgacgtcttcctgctggcgcagggcggcacggctgtcggcaccggtctcaacgcacctgtcggtttcgacaagggctttgccgaagcggtgagcgagattaccgggctttccttcaagaccgcgccaaacaagttcgaggcgctggcaagccacggcgccgttctcaacttccacggcagcctgaatgcgcttgcagccgatctcttcaagatcgccaacgatatccggtttctcggttccggcccgcgttccggccttggcgagctttctctgccggaaaacgaacccggctcctccatcatgccgggcaaggtcaaccccacacaggccgaagccatgaccatggtggcaacccaggttttcggcaaccagaccgccgtaaccgtcgccgccagccaggggcatttcgagctgaacgtcttcaaaccggtcattgcctataatgtgctgcaatcgatccggcttttgagcgacaccatggtttcctttgccgatcattgcgtcgaggggattgaacccaatacggcccgcatcaaggaattgctggaacgctcgctcatgctcgtcacggcgcttgcgcctgccatcggctatgacaatgcggccaggatcgccaaaaccgcccataagaacggcaccacgcttcgcgaggaagcattggcaagcggcctcgtatcggaagaagattatgaccggctggtgcgcgccgagcggatgatcgccccacaatga

SEQ ID NO: 6413 - protein, 463 aa, Brucella melitensis
MAATRTETDTFGPIDVPADRYWGAQTQRSLQNFRIGGERMPLPLVHALGVVKRAAAETNIALGKLDPVLGQVIAVAASEVIEGKLDDHFPLVVWQTGSGTQSNMNANEVISNRAIELLGGEMGSKKPIHPNDHVNMSQSSNDSFPTAIHIATAVETVNRLYPALEHLTKALKVKEEAFKDIIKIGRTHTQDATPVTLGQEFSGYRAALEYARHRLEQSLADVFLLAQGGTAVGTGLNAPVGFDKGFAEAVSEITGLSFKTAPNKFEALASHGAVLNFHGSLNALAADLFKIANDIRFLGSGPRSGLGELSLPENEPGSSIMPGKVNPTQAEAMTMVATQVFGNQTAVTVAASQGHFELNVFKPVIAYNVLQSIRLLSDTMVSFADHCVEGIEPNTARIKELLERSLMLVTALAPAIGYDNAARIAKTAHKNGTTLREEALASGLVSEEDYDRLVRAERMIAPQ

SEQ ID NO: 6414 - DNA, 1347 bp, Candidatus Blochmannia floridanus
  CDS (1)..(1347)
atgatatgtaatagattatggggagatcaaacagaatcttctttaaaattttttaatatttctacagaaaaaatgccttgggaattaattaaagcattagctcaaataaaacgagtatcagctcaagtaaattatgatttaaaattacttgattatgaacgttctcaagctattattgcagcagtagatgaaatattatctggcaatcataaaaatgaatttccattatcagtgtggcaaactggatctggtactcaaagcaatatgaatatgaatgaagttttggcaaatagggcaaatgaattattaagaaaaaatcagataaatatagtcgtacatccaaacgatcatgtcaataaaagtcaaagttcaaatgatgtttttcctagtgcaatgcacattgcagcagtagttaatttaaaaacaaaactaatacctgtaattaaattattacaaaaaacttttttaaaaaaatctattgaatttcgtaatattataaaaattggacgtactcatttgcaggatgctattccattgactttagggcaagaaatttccggatgggattttatgttaaaaaataatacaaatcatattcaatcaactattcttgatttaagtgcattggcattaggaggaacggcagtagggacaggatttagcgctcatgtagaatatgcagaacgtgttgtattaggcttgtctaaactaattcatcactctttttttagcgctcctaataaatttgaatctttatctacgtgtgatgctatagtttatagtcatgggactttgaagggattagctatatccatgatgaagattgcaaacgatatacgtttgttatcatctggtcctcagtgtggtctgggagagttgattattcctgctaatgaacctggaagttctattatgcctggtaaagttaatcctacgcaatgtgagtctatgactatgtcatgttgccaagttatgggtaatgatttaagcattagtttgggaggttcatctggacagttacaattaaatacatataggcctttaattatttacaattttttacaatcaatacgattacttacagatagtataaaaaattttcatgattattgtattgtgggtatcagaccaaaattcaaaagaattgaaaaattgttaaacaaatctttaatgttagtaacagcattaagttctcatataggatatgataaatcagcacaaattgctcaaacagcttatttaaatggaattactttaaaagctgcatcgatacaatcgggttacgtaactgaaaaacagtttgatgattgggtttgtccagaaaatatgatttatcctgatatgtag

SEQ ID NO: 6415 - protein, 448 aa, Candidatus Blochmannia floridanus
MICNRLWGDQTESSLKFFNISTEKMPWELIKALAQIKRVSAQVNYDLKLLDYERSQAIIAAVDEILSGNHKNEFPLSVWQTGSGTQSNMNMNEVLANRANELLRKNQINIVVHPNDHVNKSQSSNDVFPSAMHIAAVVNLKTKLIPVIKLLQKTFLKKSIEFRNIIKIGRTHLQDAIPLTLGQEISGWDFMLKNNTNHIQSTILDLSALALGGTAVGTGFSAHVEYAERVVLGLSKLIHHSFFSAPNKFESLSTCDAIVYSHGTLKGLAISMMKIANDIRLLSSGPQCGLGELIIPANEPGSSIMPGKVNPTQCESMTMSCCQVMGNDLSISLGGSSGQLQLNTYRPLIIYNFLQSIRLLTDSIKNFHDYCIVGIRPKFKRIEKLLNKSLMLVTALSSHIGYDKSAQIAQTAYLNGITLKAASIQSGYVTEKQFDDWVCPENMIYPDM

SEQ ID NO: 6416 - DNA, 1386 bp, Chromobacterium violaceum
  CDS (1)..(1386)
atgacgaaaaccgtacgcagcgaaaccgacaccttcggtccgatcgacgtccccgccgctgcgctgtggggggcgcagacccagcgctcgctggcgcatttccgcatttccagcgagaagatgccgccggagctgatcctggcgctggctcgggtcaagcgcgcctgcgccgaggccaaccgcgggctgggcaagctggacgacgccaaggccgccgccatcgccggcgcggccgacgaggtgctggcgggccgacacgacggcgagtttccgctgtcggtgtggcagaccggctccggcacccagagcaatatgaatatgaacgaggtgctggccaaccgcgcgtcggagctgctgggcggccggcgcgggccgggccggctggtccatcccaacgacgacgtcaatctcggccagtcgtccaacgacatcttccccaccgcgatgcacgtcgccgccgccacgcaggtcaaggaacggctgctgccgtcgctggatctgctgcgccacgcgctcgaatccaaagccgaagccttcgccgacgtcgtcaagataggccgcacccatctgcaggacgccacgccgctgacgctgggccaggagatctccggctgggcggcgcaactggcgctgtccgaacaggcggtgcgcgcggcgctgcccatgctgtgccagctggcggtcggcggcaccgcggtgggcaccggcctcaacaccgatccaagcttcggcgccgcggtggcggcgcgcctggccgagcaaagcggcctgccattcgaaagcgccggcaacaaattcgccgcgctggccggccacgagccgctcgtgttcgcccacggcgcgctgaaaacgctggccgccgcgctgatgaagatcgccaacgacatccgctggctggcttccggcccgcgcagcggcctgggcgagctgtcgctgccggagaacgagccgggcagctccatcatgccgggcaaggtcaaccccacccagtgcgaagcgatgaccatgctgtgctgccaggtgctgggcaacgacgcggcgctggccatcggcgccgcgtccggcaatttcgaactgaacgtgttcaagccgctgatcgcgcacaacttcctgcaaagcgcgcggctgctggcagacggcatggacagcctgcgcgagcactgcgtggacggcatggaagccaaccgcgcgcgcatcgccgaactgatggcgcgctcgctgatgctggtcaccgcgctgaacccgcacatcggctacgacaaggcggccgccatcgccaaacacgcccatcgccacggcaccacgctgcgcgaggcggcgctggcgctgggccacctgagcgccgagcagttcgacgcctgggtgcggccggaagacatggtgtga

SEQ ID NO: 6417 - protein, 461 aa, Chromobacterium violaceum
MTKTVRSETDTFGPIDVPAAALWGAQTQRSLAHFRISSEKMPPELILALARVKRACAEANRGLGKLDDAKAAAIAGAADEVLAGRHDGEFPLSVWQTGSGTQSNMNMNEVLANRASELLGGRRGPGRLVHPNDDVNLGQSSNDIFPTAMHVAAATQVKERLLPSLDLLRHALESKAEAFADVVKIGRTHLQDATPLTLGQEISGWAAQLALSEQAVRAALPMLCQLAVGGTAVGTGLNTDPSFGAAVAARLAEQSGLPFESAGNKFAALAGHEPLVFAHGALKTLAAALMKIANDIRWLASGPRSGLGELSLPENEPGSSIMPGKVNPTQCEAMTMLCCQVLGNDAALAIGAASGNFELNVFKPLIAHNFLQSARLLADGMDSLREHCVDGMEANRARIAELMARSLMLVTALNPHIGYDKAAAIAKHAHRHGTTLREAALALGHLSAEQFDAWVRPEDMV

SEQ ID NO: 6418 - DNA, 1422 bp, Corynebacterium efficiens
  CDS (1)..(1422)
atgagtgatttcatgaccgagcaggaattccgtattgaacacgacaccatgggtgaagtgaaggtccccgcacaggctctgtggcgtgcacagacccagcgtgccgtggagaacttccccatctctggccgtggtctggaatccgcacagatccgcgcgatgggcctgctgaaggcagcctgcgcgcaggtgaacaaggactccggtgccctggatgccgccaaggccgacgccatcatcgccgccggcaaggagatcgccaccggcaagcatgatgccgagttcccgatcgacgtcttccagaccggttccggcacctcctccaacatgaacaccaacgaggtcatcgcctccatcgcgaaggccaacggcaccgaggtccaccctaacgacgatgtcaacatgggccagtcctccaatgacaccttccccaccgcgacccacgtcgccgccaccgaggcagccgtcaatgacctgatcccgggcctgaaggtgctgcacgagtccctggccaagaaggccaacgagtgggattccgtggtcaagtccggccgcacccacctcatggacgccgtcccggtcaccctgggccaggagttcggcggctacgcacgccagatccagctcggcatcgagcgcatcgaggccaccctgccacgtctgggtgagctggccatcggtggtaccgccgtcggcaccggcatcaacacctccgccgacttcggtggcaaggttgtcgccgagctcgtcgagctcaccggcgtcacccagctgcaggaggcagccaaccacttcgaggcacaggccaaccgcgacgccctcgtcgagttctccggcgcgatgcgcgttgtcgccgtctccctctacaagatcgccaacgacatccgcctcatgggctccggcccgctgaccggcctcggcgagatccagctgcccgacctgcagccgggttcctccatcatgccgggcaaggtcaaccccgtcctgtgcgagaccgccacccaggtctccgcccaggtcatcggcaacgacgccgctgtcgccttcgccggcagccagggccagttcgagctcaacgtgttcatccccgtgatggcccgcaacgtccttgagtccgcccgcctgctggccaacaccgcgcgcgtgttcgccacccgcctggttgacggcattgttcccaacgaggagcacatgaagcagctggccgagtcctccccgtccattgtcactccgctgaactccgcaatcggctacgaagccgccgcgaaggtcgccaaggctgcgctggcagagggcaagaccatccgccagaccgtcatcgacatgggctttgtcgacggtgagaagctgaccgaggaggagctggacaagcgtctggacgttctcgcgatggccaacaccgaccgcaagcagaagttctaa

SEQ ID NO: 6419 - protein, 473 aa, Corynebacterium efficiens
MSDFMTEQEFRIEHDTMGEVKVPAQALWRAQTQRAVENFPISGRGLESAQIRAMGLLKAACAQVNKDSGALDAAKADAIIAAGKEIATGKHDAEFPIDVFQTGSGTSSNMNTNEVIASIAKANGTEVHPNDDVNMGQSSNDTFPTATHVAATEAAVNDLIPGLKVLHESLAKKANEWDSVVKSGRTHLMDAVPVTLGQEFGGYARQIQLGIERIEATLPRLGELAIGGTAVGTGINTSADFGGKVVAELVELTGVTQLQEAANHFEAQANRDALVEFSGAMRVVAVSLYKIANDIRLMGSGPLTGLGEIQLPDLQPGSSIMPGKVNPVLCETATQVSAQVIGNDAAVAFAGSQGQFELNVFIPVMARNVLESARLLANTARVFATRLVDGIVPNEEHMKQLAESSPSIVTPLNSAIGYEAAAKVAKAALAEGKTIRQTVIDMGFVDGEKLTEEELDKRLDVLAMANTDRKQKF

SEQ ID NO: 6420 - DNA, 1529 bp, Corynebacterium glutamicum
  CDS (37)..(1458)
aagcttgtgacagccgtatttaattctcagtaagaaatgagtgatttcatgaccgagcaggaattccgtattgagcacgacaccatgggtgaagtgaaggttccagcaaaggctctgtggcaggcacagacccagcgcgctgttgagaacttccctatctctggtcgtggtctggaatccgcacagatccgcgcaatgggtctgctgaaggcagcttgtgcgcaggtaaacaaggactccggtgcgctggatgcagagaaggcagatgccatcattgcagctggtaaggagatcgcgtccggtaagcatgacgctgagttcccaattgatgtgttccagactggttccggtacttcctccaacatgaacaccaatgaggttatcgcttccatcgcgaaggctaacggcgttgaggttcacccaaatgaccacgtcaacatgggtcagtcctccaatgacaccttccctactgcaactcacgttgctgcaaccgaagctgctgtcaatgacctcatcccaggcctgaaggttctgcacgagtctttggcgaagaaggctaacgagtggtctgaggttgttaagtccggccgcacccacctgatggacgctgttccagtaaccctgggccaggagttcggtggctacgctcgccagatccagctcggcatcgagcgcgttgaggctactcttcctcgccttggtgagctggctattggtggcaccgctgctggtaccggtatcaacacctccgctgatttcggtggcaaggttgttgctgaactgatcaacctgaccgacgtcaaggagctcaaggaagctgagaaccacttcgaggctcaggctgcacgcgacgctcttgttgagttctccggcgcaatgcgcgttatcgctgtctccttgtacaagatcgctaacgatatccgcctcatgggctccggcccactgaccggtcttggcgagatccgtctcccagacctgcagccaggttcctccatcatgccaggcaaggtcaacccagttctctgtgagaccgctacccaggtttccgctcaggttatcggcaatgacgcagctgttgcgttctccggcacccagggccagttcgagctcaatgtgttcatcccagtgatggctcgcaacgtgcttgagtccgctcgcctgctggctaacacttcccgcgtgttcgcgacccgtctcgttgatggcattgagccaaacgaggcacacatgaaggagctcgctgagtcttcaccttccatcgttaccccactgaactctgcaatcggctacgaagctgctgcaaaggtggctaagactgctttggctgagggcaagaccatccgccagactgtcatcgatttgggcttggttgatggcgagaagctcaccgaggaagagctggacaagcgcctcgacgttcttgctatggctcacaccgagcgcgagaacaagttctaaaactagaacccgataaataaggaccttcacttcttaagaagtgaaggtccctttttcgctacatatctaga

SEQ ID NO: 6421 - protein, 473 aa, Corynebacterium glutamicum
MSDFMTEQEFRIEHDTMGEVKVPAKALWQAQTQRAVENFPISGRGLESAQIRAMGLLKAACAQVNKDSGALDAEKADAIIAAGKEIASGKHDAEFPIDVFQTGSGTSSNMNTNEVIASIAKANGVEVHPNDHVNMGQSSNDTFPTATHVAATEAAVNDLIPGLKVLHESLAKKANEWSEVVKSGRTHLMDAVPVTLGQEFGGYARQIQLGIERVEATLPRLGELAIGGTAAGTGINTSADFGGKVVAELINLTDVKELKEAENHFEAQAARDALVEFSGAMRVIAVSLYKIANDIRLMGSGPLTGLGEIRLPDLQPGSSIMPGKVNPVLCETATQVSAQVIGNDAAVAFSGTQGQFELNVFIPVMARNVLESARLLANTSRVFATRLVDGIEPNEAHMKELAESSPSIVTPLNSAIGYEAAAKVAKTALAEGKTIRQTVIDLGLVDGEKLTEEELDKRLDVLAMAHTERENKF

SEQ ID NO: 6422 - DNA, 1380 bp, Coxiella burnetii
  CDS (1)..(1380)
atgcgaaaagagtccgacagcatgggtacgattgaagtgcccagtgaaaagtattatggcgcgcaatcacagcgctcattaattaattttgccattgggcgtgaaacgatgccgcctgagctcattcgcgcttttggcgttttgaaaaaagcggctgtgctcaccaatgttgaattgggcaaggtgtctcaagaaaaagctaactttattcttaaagcctgcgaagagctgatcgctggaaaactaaacgatcattttcccttgaaaatttggcaaaccggcagcggcacgcagaccaacatgaatgtgaacgaggttatcagtaatcgcgcgattgagttagctggtggaaagttaggaagcaaagaaccggttcatccgaacgatcacgttaatatgtcgcaatcttcaaatgatacttttccaacggccatgcacattactgctgccgaaatgataacgcatcagcttattcctaatctcactgtcttacgcgataccttggaaaaaaaatccaaggaattttccgaaatcattaaaatcggtcgaacgcatttgcaagacgctgtgccattaacgttgggtcaagaattttcaggttatgtcgctcaactcaaccataacttggaagccattaatgatgtacttccaacgctctatcgtcttgcgctcggcgggacggcggtaggcacggggctaaatacccacccgcaatttgccaaaaaagcggctgaccacattgccgaactgacgggaatacccttttactcggcgtctaataaatttgccgctctggctgccaacgacgaaattgttttagtcagcggcgttctcaaaacccttgcctgttcgttgatgaaaattgcaaacgatattcgttggttggcttccggcccgcgttgcggcatcggggaaattgttatcccagaaaacgagccaggttcttcgattatgccgggtaaagtaaatccaacgcaatccgaagcgatgacgatggtgtgtgttcaggtgataggaaacgatacgaccattaccatcgcgggatcgcaagggaattttgaattgaatgtttacaagcccgtgatggcttataatttaattcaatctatttatttattgtccgatgcttgtcgctcctttaatgatcattgcgccgttggcatcaaacccaatcaagaaaaaattaatgactatctgaataattctctaatgctggtcactgcattaaaccaaatcatcggttacgacaaagcctcagaaattgctaaaaaagcttacaaagaaggcacgacgcttaaagaagcggctcttcaattaggttatttaaccgcaagcgaattcgataaagccgtagaccccaaaaaaatggtcgctatttga

SEQ ID NO: 6423 - protein, 459 aa, Coxiella burnetii
MRKESDSMGTIEVPSEKYYGAQSQRSLINFAIGRETMPPELIRAFGVLKKAAVLTNVELGKVSQEKANFILKACEELIAGKLNDHFPLKIWQTGSGTQTNMNVNEVISNRAIELAGGKLGSKEPVHPNDHVNMSQSSNDTFPTAMHITAAEMITHQLIPNLTVLRDTLEKKSKEFSEIIKIGRTHLQDAVPLTLGQEFSGYVAQLNHNLEAINDVLPTLYRLALGGTAVGTGLNTHPQFAKKAADHIAELTGIPFYSASNKFAALAANDEIVLVSGVLKTLACSLMKIANDIRWLASGPRCGIGEIVIPENEPGSSIMPGKVNPTQSEAMTMVCVQVIGNDTTITIAGSQGNFELNVYKPVMAYNLIQSIYLLSDACRSFNDHCAVGIKPNQEKINDYLNNSLMLVTALNQIIGYDKASEIAKKAYKEGTTLKEAALQLGYLTASEFDKAVDPKKMVAI

SEQ ID NO: 6424 - DNA, 1395 bp, Haemophilus ducreyi
  CDS (1)..(1395)
atggaataccgtatcgaaaaagatactatgggcgaagtgaaagtaccggctgatcgttattgggcagcacaaacagaacgttcgcgtaataatttcaggattgggcctgaagcttctatgccggtcgaaattattgaagcatttgcttatttaaaaaaagccgctgcatttgctaatgctgaactaggtgcactcaccactgaaaaacgtgacttaatcgcgatggtttgtgatgaaatcttagcaaataaattagcggacgaatttccgttagtgatttggcaaacaggttctggtacacaatcaaatatgaatcttaatgaagtgattgccaaccgtgcccacgtattacaagggggggcattaggtgaaaaatcgattattcatccaaatgatgatgtcaataaatcgcaatcttcaaacgatacctatccaacggctatgcatattgctgcctataaaaaagtcgttgaagtaaccattccagcaatagaacgcttacaaaaaacatttgccataaaatctgaagcatttaaagatgtggttaaaattggtcgaactcatttaatggatgccaccccgcttacattaggccaagaattctctgcctatgcggcacaattacaatttggtttgttagcccttaaaaataccttgccccatttggcgcagttagcattaggtggcacagctgttggcacaggcttaaatacgcctaaaggttatgatgttaaagtagcagaatatatcgcacaatttactcaacttccttttattactgcggaaaataaatttgaagcattagccactcacgatgcaattattgaaacacacggtgcgctcaaacaaattgctatgtcattattcaaaattgccaatgatattcgtttattagcatcaggtcctcgctctggtattggcgaaattctaattcctgaaaatgaacccggctcctcaattatgcccggtaaagtcaatcctactcaatgtgaggcaatgactatggttgcagcgcaagtgttgggaaatgatactacgatttcatttgcgggtagccaaggccattttcagttaaatgttttcaaacctgttatggcagcaaatttcttacaatcggcacaattacttgctgatgtatgtatttcatttgatgagcattgtgcaagcggtattgaacctaattatccaagaattcaacaacaattagaaaactctttaatgttagtgaccgctttaaatacccatattggttatgaaaatgcggctaaaattgctaaaactgcgcacaaaaatggaacaacactcaaagaagaagcaattaacttaggtctagtcactgctgaacagtttgatcaatgggtacgccctcaaaatatggtcggtagtttaaaataa

SEQ ID NO: 6425 - protein, 464 aa, Haemophilus ducreyi
MEYRIEKDTMGEVKVPADRYWAAQTERSRNNFRIGPEASMPVEIIEAFAYLKKAAAFANAELGALTTEKRDLIAMVCDEILANKLADEFPLVIWQTGSGTQSNMNLNEVIANRAHVLQGGALGEKSIIHPNDDVNKSQSSNDTYPTAMHIAAYKKVVEVTIPAIERLQKTFAIKSEAFKDVVKIGRTHLMDATPLTLGQEFSAYAAQLQFGLLALKNTLPHLAQLALGGTAVGTGLNTPKGYDVKVAEYIAQFTQLPFITAENKFEALATHDAIIETHGALKQIAMSLFKIANDIRLLASGPRSGIGEILIPENEPGSSIMPGKVNPTQCEAMTMVAAQVLGNDTTISFAGSQGHFQLNVFKPVMAANFLQSAQLLADVCISFDEHCASGIEPNYPRIQQQLENSLMLVTALNTHIGYENAAKIAKTAHKNGTTLKEEAINLGLVTAEQFDQWVRPQNMVGSLK

SEQ ID NO: 6426 - DNA, 1395 bp, Haemophilus influenzae
  CDS (1)..(1395)
  misc_feature (994)..(994): s is g or c
  misc_feature (995)..(995): s is g or c
atggcatttcgtattgaaaaagacacaatgggtgaagttcaagttctagcagataaatactgggctgcacaaactgaacgttcacgcaataactttaaaattggcccagccgcatcaatgccacatgaaattatcgaagcttttggctatttgaaaaaagcagccgcatttgctaatcatgatttgggtgtattacctcttgaaaaacgtgatttaattgctctggcttgtgacgaaattttagcaaataaattagatgatcaattcccacttgttatttggcaaactggttctggtacacaatctaatatgaatgtgaacgaagtagttgccaatcgtgctcatgtgttaaacggtggaaaattaggtgaaaaatctattattcacccaaatgatgatgtgaacaaatcacaatcttcaaatgatactttcccaacggcaatgcacattgcggcatataaaaaagtagttgagcacaccattccttgtgttgaacgtttacaaaaaacttttgcggcaaaatctgaagccttcaaaaacgtggtaaaaattggccgcactcacttaatggatgcaacgccactcacattaggtcaagaattttcggcttatgcagctcaattagatttcggcttaaaagcattaaaaaataccctcccacatttaagccaattagcattgggtggaactgcggttggcacaggtttgaacacgccgaaaggctatgatttgaaagtggtagattacattgcaaaattcaccgcacttccgtttgtcacagcagataataaatttgaagcattagccgctcatgatgcgattgttgaaactcacggtgcattacgtcaattagcaatgagtttatttaaaattgcgaacgatattcgtctattagcatctggccctcgttcgggaattggcgaaattttaattcctgaaaatgaaccaggttcttcaattatgccaggtaaagtaaacccaactcaatgcgaassgatgacaatggtctgtgcacaagtatttggtaacgacaccaccatcgcatttgtgggttcacaaggtcacttccaattaaatgtgttcaaccctgtgatgattgcaaacttcttacaatctgctcaattattgggcgatgcttgcgtatctttcgatgaacactgtgcagtgggtattgagccaaactatccacgcattaaacaacaacttgaaaattcattgatgttggtgaccgcacttaatacgcatatcggttatgaaaatgcagctaaaattgcaaaaaccgcacataaaaatggcaccacattacgtgaagaagcgattaatttaggtttagtgtctgccgaagattttgataaatgggttcgcccagaagatatggtgggtagcttaaaataa

SEQ ID NO: 6427 - protein, 464 aa, Haemophilus influenzae
  misc_feature (332)..(332): The Xaa at location 332 stands for Ala, Arg, Gly, or Pro.
MAFRIEKDTMGEVQVLADKYWAAQTERSRNNFKIGPAASMPHEIIEAFGYLKKAAAFANHDLGVLPLEKRDLIALACDEILANKLDDQFPLVIWQTGSGTQSNMNVNEVVANRAHVLNGGKLGEKSIIHPNDDVNKSQSSNDTFPTAMHIAAYKKVVEHTIPCVERLQKTFAAKSEAFKNVVKIGRTHLMDATPLTLGQEFSAYAAQLDFGLKALKNTLPHLSQLALGGTAVGTGLNTPKGYDLKVVDYIAKFTALPFVTADNKFEALAAHDAIVETHGALRQLAMSLFKIANDIRLLASGPRSGIGEILIPENEPGSSIMPGKVNPTQCEXMTMVCAQVFGNDTTIAFVGSQGHFQLNVFNPVMIANFLQSAQLLGDACVSFDEHCAVGIEPNYPRIKQQLENSLMLVTALNTHIGYENAAKIAKTAHKNGTTLREEAINLGLVSAEDFDKWVRPEDMVGSLK

SEQ ID NO: 6428 - DNA, 1395 bp, Leptospira interrogans
  CDS (1)..(1395)
atgaaaaccagaatcgaaacggattcgatgggcgaaattgcagtagacgattccaaatattggggcgcacaaacagaacgttccttacatcattttcatatcggaaacgatcgatttccaagagaaatgattcgtgctttaggaattttaaagaaatctgcagcggttgttaatgcggaacttggtcttttaagcgaagataaaaagaaactgattgttcaagccgccgacgaagtgatttccggaaaattggatgagcattttccgctttcggtttggcagaccggctccggaactcagactaacatgaattctaatgaagtgatttcgaaccgtgcgatcgaaattgcaggtggggtgaagggctctaaaaaaccgattcatccaaatgacgatgttaacaaggctcaatcctcaaacgatacgtttcctacagccatgcatatcgctgcggcggaacagttaaaccaaaagttgattcctgctctgatacaactcaaagaaacgttcaagaaaaaaacagatgaatttcagaatattataaaaatcggtagaactcatcttcaagacgcgactcctctgactttaggccaagaattttctggctatgttcaacaattggaatacaatattgcaagggtaaaggcagttttaccttccgtttatagacttgcgttaggcggaacagctgtcggaaccggattaaatactcaccctcagtttgcggtaaaagcagcggctcaaatcgctaaagaaactggacttccttttgtaagcgcggaaaataagttcgaggcactcgcggctcacgattctcttgtagaaacgagcggtgtgttgaaaacgatcgctgcttctttaatgaaaattgcaaacgatatacgttggctttcttctggtcctcgttgtggaattggtgaaattagtattccggaaaatgaaccaggttcttctatcatgccgggtaaagtgaatccaacacaatcagagcagatgacgatggtcgcggctcaagtaattgcaaatgacgttgcagtaaatataggcggtgcttctggaaatttcgagttgaacgtttttaaacctttgattatccacaacgttttgaattcgattcgattactttctgattcttgtgtttcttttgaagaacattgtgctcgtggaattattccgaataaggaaaagttaaacgaacacttaaataattctttgatgcttgtgaccgctttgaatcctcatataggttatgataacgctgctaaaattgccaagaacgcgcataaaaaaggaacaactctgaaagagtccggaattgaattgggacttttaacaagtgaacaatttgatcagtgggttcttcccgaaaagatgatccatccttcggtggattaa

SEQ ID NO: 6429 - protein, 464 aa, Leptospira interrogans
MKTRIETDSMGEIAVDDSKYWGAQTERSLHHFHIGNDRFPREMIRALGILKKSAAVVNAELGLLSEDKKKLIVQAADEVISGKLDEHFPLSVWQTGSGTQTNMNSNEVISNRAIEIAGGVKGSKKPIHPNDDVNKAQSSNDTFPTAMHIAAAEQLNQKLIPALIQLKETFKKKTDEFQNIIKIGRTHLQDATPLTLGQEFSGYVQQLEYNIARVKAVLPSVYRLALGGTAVGTGLNTHPQFAVKAAAQIAKETGLPFVSAENKFEALAAHDSLVETSGVLKTIAASLMKIANDIRWLSSGPRCGIGEISIPENEPGSSIMPGKVNPTQSEQMTMVAAQVIANDVAVNIGGASGNFELNVFKPLIIHNVLNSIRLLSDSCVSFEEHCARGIIPNKEKLNEHLNNSLMLVTALNPHIGYDNAAKIAKNAHKKGTTLKESGIELGLLTSEQFDQWVLPEKMIHPSVD

SEQ ID NO: 6430 - DNA, 1455 bp, Methanosarcina acetivorans
  CDS (1)..(1455)
atgccttcaatcctcgacctgcctatcggtactggagcgactggcaaacgaaaagaaagcgattctttgggggaggttgaggttccagccgaccattactggggggctcagacccagaggtctctgattcacttttccatcggcgacgactacatgccaaaggaggtctatcatgcttatgggtacgtgaaaaaggcagctgctctggtcaacgaagccgccggaataataccgccgtggaaagctgaattgatagcaagggttgcagatgaagttatcgccggtaaactcgacagcgaattcccgctctatgtctggcagactggctcaggcactcagtcgaacatgaacgtgaatgaagtcatcagcaatcgcgccatccagctcgtgggcggaagcctcggcagtaagcaccctgtccatcctaatgacgatgttaatatgagtcagtcgtccaacgacacctttccaacggccatgcacattgcaactgtgctcgaattcagcaaccgcctcattcccgcagttaccgttcttgaagagtccatatgggccaaagcacgggaatgggtggatatcgtcaagataggccgaacacatcttcaggacgcaaccccacttacagtgggccaggagtggtctggctacgccacacagctcgatgacgcgttggcgtttgtcaagcattctctccggggattatatcggttggccatcggaggcactgcggtcgggaccggcatcaataccccaccagacttcggtgaaaaggttgcagatgagattgccaggctcacaggtcatccatttgtcacagctccaaataaattcgcagctcagggctcccttgatgcaatggtaacctcaagcgcggcactgcgtacattagcagtcgcactgatgaagattgcaaatgacctgcaatggcttggttcgggaccgaggtcgggtctccacgagcttatcctcccaagtgacgagccgggaagctcaatcatgcctgggaaagtcaatccgactcaggaggaagccatgttaatggtttgcatccaggtgattggggaagataatgccgtcgcatttgccgggtcacagggaaacttcgagcttaacgcaatgtgcccgataatcataaataatgtcttacattctgcgcgcactctcggcgatgcttgcgtaaagttccgtgagtacggaatcaatggaatcatgctcgacaggagtcgtatcgacaaatttgtgggcacctccctcatgttagtgacagcgcttagccctgtcataggctacgacaaggcttccgcaattgtccagcgagcactggacgagaatacgacactgagggaagctgcagtgaaaggaggtttcatcagcgcggaggattttgacaggattgtggatccgaagaagatggttggggatccgcgacacgacctgaagctggcttcagagtag

SEQ ID NO: 6431 - protein, 484 aa, Methanosarcina acetivorans
MPSILDLPIGTGATGKRKESDSLGEVEVPADHYWGAQTQRSLIHFSIGDDYMPKEVYHAYGYVKKAAALVNEAAGIIPPWKAELIARVADEVIAGKLDSEFPLYVWQTGSGTQSNMNVNEVISNRAIQLVGGSLGSKHPVHPNDDVNMSQSSNDTFPTAMHIATVLEFSNRLIPAVTVLEESIWAKAREWVDIVKIGRTHLQDATPLTVGQEWSGYATQLDDALAFVKHSLRGLYRLAIGGTAVGTGINTPPDFGEKVADEIARLTGHPFVTAPNKFAAQGSLDAMVTSSAALRTLAVALMKIANDLQWLGSGPRSGLHELILPSDEPGSSIMPGKVNPTQEEAMLMVCIQVIGEDNAVAFAGSQGNFELNAMCPIIINNVLHSARTLGDACVKFREYGINGIMLDRSRIDKFVGTSLMLVTALSPVIGYDKASAIVQRALDENTTLREAAVKGGFISAEDFDRIVDPKKMVGDPRHDLKLASE

SEQ ID NO: 6432 - DNA, 1419 bp, Methylobacterium extorquens
  CDS (1)..(1419)
atgtcgccgcacgagaacccttccgtcgagacgcgtaccgagtccgacaccttcggcccgatcgaagtgcccgcccaccgctactggggcgcccagacgcagcgctcgatccagaacttcaagatcggcaccgagcgccagccggcgccgctcgtccatgcgctcggcatcgtcaagcaggccgccgcgctggtgaacaaggatctcggcggcctcgatccgaagatcgccgacgcgatcgccgaatccgctgccgaagtggtcgccggaaagcacgacgacgagttcccgctggtggtgtggcagacgggctcgggcacgcagtccaacatgaacgccaacgaggtgatcgcgagcctcgcaaacgagcggctcgggggcaagcgcggcggcaagtcgccggtccaccccaacgatcattgcaaccgcggccagtcctcgaacgacaccttccccaccgccatgcacatcgcggtcgcccgcgaggttcaggagcggctgctgccggcgctctcccacctgcacaccgcgctcgatgccaaggcgaaggagttcgagagcatcgtcaagatcggccgcacgcacttgcaggatgcgacgccggtctcgctcggccaggaattctccggttacgccgcgcaggtcgcgctcggtggcgcgcgcatcgccgccacgctccccggcgtgctggcgctggcgcagggcggcaccgccgtcggcaccggcctcaatgcgcatccggaattcgcggagcggtttgcggccaaggtcgcggagctgaccgggctgccctttacctcggccgagaacaagttcgaggcgctggccacccacgacgccctcgtcttccttcagggcgcgctgacggctttggcatcgggcctcttcaagatcgccaacgacatccgcctgctcggctccggcccgcgctcgggcctcggcgaattgtcgctgccggagaacgagcccggctcgtcgatcatgccgggcaaggtcaacccgacccagtgcgaggcgctgacgatggtctgcgcgcaggtggtcggcaacggcaccacggtgagctttgccggctcacagggtcatttcgagctcaacgtgttcaagccggtgatcgccaacgcggtgctgcaatcggtgcggattctggccgacgcctcagtcagcttcaccgacaattgcgtcgtcggcatcaaggccaacaccgaccggatcagcgacctgatgagccgctcgctcatgctggtgaccgcgctcgcgccctcgatcggctacgacaaggccgccgagatcgccaagaccgcgcacaagaacggcaccaccctgaaggaagaggcgctgcggctcggctacgtcacggacgaggagttcgagcgggtcgtacgccccgaaaccatgctggcgccgagcgcggaataa

SEQ ID NO: 6433 - protein, 472 aa, Methylobacterium extorquens
MSPHENPSVETRTESDTFGPIEVPAHRYWGAQTQRSIQNFKIGTERQPAPLVHALGIVKQAAALVNKDLGGLDPKIADAIAESAAEVVAGKHDDEFPLVVWQTGSGTQSNMNANEVIASLANERLGGKRGGKSPVHPNDHCNRGQSSNDTFPTAMHIAVAREVQERLLPALSHLHTALDAKAKEFESIVKIGRTHLQDATPVSLGQEFSGYAAQVALGGARIAATLPGVLALAQGGTAVGTGLNAHPEFAERFAAKVAELTGLPFTSAENKFEALATHDALVFLQGALTALASGLFKIANDIRLLGSGPRSGLGELSLPENEPGSSIMPGKVNPTQCEALTMVCAQVVGNGTTVSFAGSQGHFELNVFKPVIANAVLQSVRILADASVSFTDNCVVGIKANTDRISDLMSRSLMLVTALAPSIGYDKAAEIAKTAHKNGTTLKEEALRLGYVTDEEFERVVRPETMLAPSAE

SEQ ID NO: 6434 - DNA, 1389 bp, Nitrosomonas europaea
  CDS (1)..(1389)
atggaccagtatcgcgaagaacatgatgcaataggcacagtacaggtgcctgccagcgccctctggggtgcgcagacacaacgatcgctcaacaacttcaatatctcgggcgaacgcatgccgtcagccctgatccacgcactggcgctggtcaaacgcgccgctgccagtgtcaatcatgatctgggattactggacgagaacatcgcccgggcaatcatcaccgctgccgatgaagtgctggcaggagaacacgccggcgaatttccgttggtagtttggcaaaccggttccggcacacaaaccaatatgaacatgaacgaggtgctggccaaccgcgcttcggaaattctgggcggtacacggggcaaaggtcgcaaggtgcaccctaacgaccatgtcaacaaaggacaatcttccaatgacgtttttcccactgccatgcacattgctgccgtggaagccatccgcaaccggttgattccggcactggaagcactacgtaaaacattatcttccaaatcggcagcattttcggatatcgtcaagatcggccgcacacatttgcaggatgccaccccgcttacactggggcaggaattttcaggctatgtttcacagctcgatcatggcctggctcatctcgaatctgcgctgccgcatctgctcgaactggcgctgggggggacagccgtaggtaccggtctcaacacccatccggaatttgcacgccgtgtcgcggcagaaattgcacgcctcagcggctatccttttataacagctgccaataaatttgaggcactggccgcgcatgatgcactggtccatgcgcatggggtgctgaaaacactagcagctatactgatcaaaattgccaatgacgtccgctggctggcatccggcccgcgttgcggtattggtgaaatccttatcccggagaacgaacccggcagttcgatcatgcccggaaaagtcaatcctacccaatcggaagcagttgtcatgcttgcctgtcaggtcatgggcaatgatgttgcaatcaatctgggaggcgccatgggaaatttcgaactcaataccatgaaaccactgatcattcacaattttttacaaagtacacgtttgctcgcagatggtgcagaaagcttcaacacccattgcgcagccggtattacggccaatacagtacgaatcaagcagcatttacaggagtctctgatgctggtaaccgcgctcaatcctcacattggttacgacaaagcagcagaaatagccaaaaaagcccatcatgaaatgctgacattaaaagaagccgcaatcaggctgggttatgtcaccgcagaacaattcgatgtatgggttgacccacaaaaaatgacagaggtgtga

SEQ ID NO: 6435 - protein, 462 aa, Nitrosomonas europaea
MDQYREEHDAIGTVQVPASALWGAQTQRSLNNFNISGERMPSALIHALALVKRAAASVNHDLGLLDENIARAIITAADEVLAGEHAGEFPLVVWQTGSGTQTNMNMNEVLANRASEILGGTRGKGRKVHPNDHVNKGQSSNDVFPTAMHIAAVEAIRNRLIPALEALRKTLSSKSAAFSDIVKIGRTHLQDATPLTLGQEFSGYVSQLDHGLAHLESALPHLLELALGGTAVGTGLNTHPEFARRVAAEIARLSGYPFITAANKFEALAAHDALVHAHGVLKTLAAILIKIANDVRWLASGPRCGIGEILIPENEPGSSIMPGKVNPTQSEAVVMLACQVMGNDVAINLGGAMGNFELNTMKPLIIHNFLQSTRLLADGAESFNTHCAAGITANTVRIKQHLQESLMLVTALNPHIGYDKAAEIAKKAHHEMLTLKEAAIRLGYVTAEQFDVWVDPQKMTEV

SEQ ID NO: 6436 - DNA, 1386 bp, Oceanobacillus iheyensis
  CDS (1)..(1386)
atggattatcgtgttgaaaaagatacaattggggaaattcaagttcctgctgataaatactggggggcgcaaacacagcgtagtaagcaaaattttccaattggaaatgaaaaaatgccagtcgaaattattaaagcgtttgcaattctaaaacgaagtactgctgaagctaattttgaattaggcttaatggaacgagataaaatggaagcaattcaatatgctgctgatcaggtattaaacgattctctaacagatcatttcccactagtcgtttggcaaactggtagtggtacgcaaagtaatatgaatgtaaacgaagtattagcttttgtaggtaataaatggttacaagaacagggaagcgatttaaaattacatcccaatgatgatgtaaataaatctcaaagttcgaacgatacatatccaacggcaatgcatattgcagccgtattgaaattagaagatacggtattaccagctttgagtcagttgaaaaatacttttgcagaaaagcaaagtgcttttgaaaatatcgtgaaaattggtcgtacacatttacaggatgcgactcctctaacactaggccaggaaatcagtgggtggcatcgtatgttagagaaatctgaaacgatgatttcagagagtttagagcatcttcgtgaattagcaataggtggaacagctgtaggcacaggcttaaatgcacatccagatttttcagagaaagtttgtaaggcaattagtacattcacaaacaaaaaattcatatctgcaaaaaataaatttcattcattaacaagtcatgacgaaactgtatatgcacatggtgcactaaagggactagcagcagatttaatgaaaattgcaaatgatgttcgttggttagcaagcggtccacgctgtggcattggagaaattacgattccggcgaatgaaccaggaagttcaattatgccagggaaggtaaatccgactcaaagtgaagctgtaacaatggtagtaactcaagtaatggggaatgatgctgctattggttttgccgctagtcaggggaatttcgaattgaatgtatttaagccagtaattgcatataatttcttacaatcaagtcaattattagcagatagtataatttccttcgatgagcgctgtgcggttggaatcgaaccaaaccacgagcaaatcgaaaagaatcttaatgattctttaatgttggttaccgcattaaatccgcatataggatacgaaaatgcagcaaaaattgctaaaaaagcatttgcagataattcaactttaaaagaaacagctgtagaattaggactattaacagaagaacagtttgatgagtatgttaatccagaggaaatgacatatcctaaataa

SEQ ID NO: 6437 - protein, 461 aa, Oceanobacillus iheyensis
MDYRVEKDTIGEIQVPADKYWGAQTQRSKQNFPIGNEKMPVEIIKAFAILKRSTAEANFELGLMERDKMEAIQYAADQVLNDSLTDHFPLVVWQTGSGTQSNMNVNEVLAFVGNKWLQEQGSDLKLHPNDDVNKSQSSNDTYPTAMHIAAVLKLEDTVLPALSQLKNTFAEKQSAFENIVKIGRTHLQDATPLTLGQEISGWHRMLEKSETMISESLEHLRELAIGGTAVGTGLNAHPDFSEKVCKAISTFTNKKFISAKNKFHSLTSHDETVYAHGALKGLAADLMKIANDVRWLASGPRCGIGEITIPANEPGSSIMPGKVNPTQSEAVTMVVTQVMGNDAAIGFAASQGNFELNVFKPVIAYNFLQSSQLLADSIISFDERCAVGIEPNHEQIEKNLNDSLMLVTALNPHIGYENAAKIAKKAFADNSTLKETAVELGLLTEEQFDEYVNPEEMTYPK

SEQ ID NO: 6438 - DNA, 1395 bp, Pasteurella multocida
  CDS (1)..(1395)
atgacatttcgtatcgaaaaagacactatgggtgaagtacaagttcctgccgataaatattgggcagcacagactgaacgctcacgcaataatttcaaaattggacctgaagcctctatgccaaaagagattattgaagcctttggttatttaaaaaaagcagccgcttatgctaaccatgatttaggtgtattaccagtggaaaaacgggatttaattgcacaggcttgtgatgagatcctcgctaataaattagatgatcaatttcctctcgtcatttggcaaaccggttccggtacacaatccaatatgaaccttaacgaagtcatttcaaaccgtgcccatgttttaaatggtggtaaattaggtgaaaaatccattatccatccaaatgacgatgtgaacaaatctcaatcttcaaacgatacttacccaacagcaatgcacatcgcggcgtataaaaaagtcgttgaagtcactattccttgtgtagaacgtttacaaaaaaccttagcgcaaaaagcagacgcctttaaagatgtggtgaaaattgggcgtactcacttaatggatgcgacaccattaaccttaggtcaagaattctctgcttatgctgcccaattagattttggcttacgcgcattgaaaaacacgctgccacatttagcacaattagcgctaggcggtactgcagtgggtacaggtttaaatacaccgaaaggttatgatgtgaaagtggcagactacattgcaaaatttacaggcttgccatttatcaccgctgaaaataaatttgaagcgttagccacccatgatgccgttgtggaaacgcacggcgcattaaaacaattagcggtatccttatacaaaatcgcaaatgatatccgtttattagcctctggaccacgttctggtattggtgaaattttaattcctgaaaatgagccgggctcttctatcatgccaggtaaagttaacccaacccaatgtgaagccatgacgatggtatgcgcgcaagtactcggtaatgacaccaccatttcctttgcaggtacacaaggtcatttccaattgaacgtatttaaaccagtgatggcggctaacttcttacaatctgctcaattattggcggatgcttgtgtgtccttcgatgaacattgtgcagtcggtattgaaccaaacttccctcgcatcaaaaaacaacttgatgactcattaatgttagtgaccgccttaaatacacatatcggttacgaaaatgcggcgaaaatcgcgaaaaccgcacacaaaaatgggacaacattaaaagaagaagcaatcaacttaggcttagttacagctgaacaatttgatgaatgggtacgtccagaagatatggtcggtagcttaaagtaa

SEQ ID NO: 6439 - protein, 464 aa, Pasteurella multocida
MTFRIEKDTMGEVQVPADKYWAAQTERSRNNFKIGPEASMPKEIIEAFGYLKKAAAYANHDLGVLPVEKRDLIAQACDEILANKLDDQFPLVIWQTGSGTQSNMNLNEVISNRAHVLNGGKLGEKSIIHPNDDVNKSQSSNDTYPTAMHIAAYKKVVEVTIPCVERLQKTLAQKADAFKDVVKIGRTHLMDATPLTLGQEFSAYAAQLDFGLRALKNTLPHLAQLALGGTAVGTGLNTPKGYDVKVADYIAKFTGLPFITAENKFEALATHDAVVETHGALKQLAVSLYKIANDIRLLASGPRSGIGEILIPENEPGSSIMPGKVNPTQCEAMTMVCAQVLGNDTTISFAGTQGHFQLNVFKPVMAANFLQSAQLLADACVSFDEHCAVGIEPNFPRIKKQLDDSLMLVTALNTHIGYENAAKIAKTAHKNGTTLKEEAINLGLVTAEQFDEWVRPEDMVGSLK

SEQ ID NO: 6440 - DNA, 1395 bp, Photorhabdus luminescens
  CDS (1)..(1395)
atggcagccactcgcattgaaaaagactcaatggggcccatcgaagtacctgctgaccaattgtggggagcgcaaactcaacgttcacttgagcattttcgcatttcgcaggagaaaatgccggttgcattaattcatgctctggcattgactaaacaggctgcggccagtgtcaatatggatttgggtcttctgccgcaagaacgtggtgaagcaattattgctgctgcgaaagaggtgctggaaggtaaacatccgacagaatttcctcttgctatctggcagaccggttcaggaacacaaagtaacatgaacatgaacgaagtgttggcgaaccgtggtagcgagatccttggcggggtgagggggagtgaacgccttatccatcctaacgatgatgtcaataaaagtcagagttctaacgatgttttcccaacagcaatgcatgttgctgcggttattgcgctgagtgagcatcttattcctgagctgaaaatattacaaaaaacattggctgataaagctgaagcttataaggatatcgttaaaattggccgtacacacttgcaagatgcgacgccattgacccttggtcaggaaatttctggctgggcggcaatgttaacgcataacctgaaacacattgaagacagtattccccatgtttgtgaattggcactagggggaactgcggttggcaccggtttaaatactcatcctgaatatgctgttcgtgttgctaagaaattggctgaactgaccaaccattcgtttgttactgccccaaataaatttgaagccctggcgacttgtgatgctctggttcattctcatggggcattaaaaggtctggctgcatccataatgaaaattgcaaacgatgttcgttggttggcttccggccctcgctgtggtatcggtgaaatttcaattcctgaaaatgaaccgggtagctcaatcatgccaggtaaagttaacccaactcagtgtgaagcagtgacgatgctttgtgcacaggtgatgggcaatgatgttgctattaatattggtggggcatcaggcaactttgagctaaatgtgtttcgcccaatggtgattaataacttcctgcaatctgttcgcttgttggctgatggtatgcgtagcttcaatgaacattgtgcagtcggtatcgaacccaaccgtgatcgcattactcagttgctgaatgaatctctgatgttagtaacggcgctgaatacacatattggttatgacaaagctgcagaaattgctaagaaagcccataaagaagggctgacattaaaacaatcggcgatgaaactgggttatctgacagaagctgagtttgatgagtgggttcgtccagaagatatggttggcagcttgaagtag

SEQ ID NO: 6441 - protein, 464 aa, Photorhabdus luminescens
MAATRIEKDSMGPIEVPADQLWGAQTQRSLEHFRISQEKMPVALIHALALTKQAAASVNMDLGLLPQERGEAIIAAAKEVLEGKHPTEFPLAIWQTGSGTQSNMNMNEVLANRGSEILGGVRGSERLIHPNDDVNKSQSSNDVFPTAMHVAAVIALSEHLIPELKILQKTLADKAEAYKDIVKIGRTHLQDATPLTLGQEISGWAAMLTHNLKHIEDSIPHVCELALGGTAVGTGLNTHPEYAVRVAKKLAELTNHSFVTAPNKFEALATCDALVHSHGALKGLAASIMKIANDVRWLASGPRCGIGEISIPENEPGSSIMPGKVNPTQCEAVTMLCAQVMGNDVAINIGGASGNFELNVFRPMVINNFLQSVRLLADGMRSFNEHCAVGIEPNRDRITQLLNESLMLVTALNTHIGYDKAAEIAKKAHKEGLTLKQSAMKLGYLTEAEFDEWVRPEDMVGSLK

SEQ ID NO: 6442 - DNA, 1401 bp, Prochlorococcus marinus
  CDS (1)..(1401)
atgatggctgacctgatgcgtatcgaacacgacagcatgggcactattgaggtgcccgctggggttctctggggtgcacaaacccagcgatcgctccttaacttcgccatcagcacagaccgcatgccagtcgaactgatccatgccttggcattgatcaaacaggctgccgccagcgtgaactgtcgcctgggtgtgctcgatgaagtccagcgggatcaaattatcaaggctgcctctgctgttgcatccggtcttcacgacgatcagtttccactgagggtgtggcaaaccggtagcggtacccacacaaacatgaatgtcaacgaggtgattagcaacctggcgtctcaggcaaacgacgaacccctaggtagccataggccggtgcatccaaacgatcatgtcaatcgatcccagtccaccaatgacgccttccctacagctatacatatcgccgcagtccaggggatcaccaacaacttgctgcctgaactggagcaattgatcgcagcctttgcccgaaaaagcgatgcctggagtgacatcatcaaaatcggtcgcactcatctacaggatgccgtacctctcacccttggtcaggaggcctctgcgtggcgggatcaaattgcctcagcccatagtcgtattcagtcaagcctgatagagctctaccccctgccgcttggaggcaccgccgtgggaacaggcctcaacgccccagctcgcttcggtcaagaaacagctgcgcaacttgccagcatcacaggcctgccattcagctcagcgaaaaacaagttcgccgtgatggcgagccatgacgggttagtgaatgcaatggctcagttgcgcatgttggcggttgcccttttcaagatctccaatgatctgcgcctactggcctgtggcccaagggccggcctggcagagctgcatctacctgagaatgagccgggaagctcgatcatgcctgggaaagtcaacccctctcaatgcgaggccatggccatggtctgtttacaggtcatcgggcttgattcagccgtgaccatggcaggtgggagtggtcatctccaaatgaacgtctacaaacccctgattggcttcaacctgcttcacagcattgaattgctacatgacgcctgccgcaagtaccggctggcaatggtgcaagggattgaaccaaaccgaatcaagatccagcatgatctagagcaatcgctgatgctagtgactgctttagccccagaaatcggttacgacaaagccagtgagattgcccacctcgcccatgagaagggattcagcctgcgtgaagcagcactaaaactcggctatgtgagcaaagaagacttcgatcgcattgttaatccggcattgatgacatctgctcggctgtga

SEQ ID NO: 6443 - protein, 466 aa, Prochlorococcus marinus
MMADLMRIEHDSMGTIEVPAGVLWGAQTQRSLLNFAISTDRMPVELIHALALIKQAAASVNCRLGVLDEVQRDQIIKAASAVASGLHDDQFPLRVWQTGSGTHTNMNVNEVISNLASQANDEPLGSHRPVHPNDHVNRSQSTNDAFPTAIHIAAVQGITNNLLPELEQLIAAFARKSDAWSDIIKIGRTHLQDAVPLTLGQEASAWRDQIASAHSRIQSSLIELYPLPLGGTAVGTGLNAPARFGQETAAQLASITGLPFSSAKNKFAVMASHDGLVNAMAQLRMLAVALFKISNDLRLLACGPRAGLAELHLPENEPGSSIMPGKVNPSQCEAMAMVCLQVIGLDSAVTMAGGSGHLQMNVYKPLIGFNLLHSIELLHDACRKYRLAMVQGIEPNRIKIQHDLEQSLMLVTALAPEIGYDKASEIAHLAHEKGFSLREAALKLGYVSKEDFDRIVNPALMTSARL

SEQ ID NO: 6444 - DNA, 1386 bp, Prochlorococcus marinus subsp
  CDS (1)..(1386)
atgaccaagaactttagatttgaaaaagatagtatgggacagataaaagttccttcagaggctttgtggggagcccaaacgcagagatcaattataaatttttctattggtgaggagttaattccaattgaattaatttattcacttacggttataaaaagagcagccgcaatttctaatttcaaattgggtttaataaataatgtaaaaaaagatctcattattgaagcctgtacagaaatccttgatgggaaacatgattctcaattccccttaaaaatatggcaaacaggtagtggtacacaaacaaatatgaatatcaatgaagtcatatctaatattgctgcgttaaaaacaaattcaggacttggaagtcatcatcctattcatccaaatgatgatgttaataaatcgcagtctacaaatgatacttttcctgcggctattcagatatctgttgttactcaaataattaaaaaattagttccatcaataaaggaacttactaaggttcttgatagtaagagtaataaatggaaagatcttataaaaataggtagaactcattttcaagatgcagtgccaatttcccttggtcaagaagtttctgcatggtcaaaacaactaaaggacgctgaagatgctctgataattagtcttaatgaattatgtttcttaccactaggtggtacggcagttggtacaggtattaattgtccaaaagatttttcaaaagaatctataaaatcaatttcagaatatactggtttatttttttataagtcaaagaatcatttctctttaatggcatctcatgatcgattagcccaagtaatgggtcaaataaaaatcctagcaagtgcattatttaagatttctaatgatattaaaatattgtcctcaggacctagatctggcatttatgaattaataattcccaaaaatgaaccagggagctcaatcatgcctgggaaagttaatccaacccaatgtgaagcattatcaatggtatgcactcaagtaatgggttttgaatacgcagtatcaatagctaatgccagcggcactttacaaatgaatgaatataagccactaattggatttaatattctcacgagtataaaattactgaatcatgcgataagtaacttcagactaaaattagttgaagggatacaaccaaacccaaaaactataaaagctaatcttgaaaattcactaatgcttgtaactgcattggttcccaaaataggttatgaaaaagcagcagaaattgcgaatcttgcttttaatgaatcaatcaacttaaaagaagcaacaataaaattaggttacttaactgctaatgaatttgaggatgctataaatactaataaaatgatttaa

SEQ ID NO: 6445 - protein, 461 aa, Prochlorococcus marinus subsp
MTKNFRFEKDSMGQIKVPSEALWGAQTQRSIINFSIGEELIPIELIYSLTVIKRAAAISNFKLGLINNVKKDLIIEACTEILDGKHDSQFPLKIWQTGSGTQTNMNINEVISNIAALKTNSGLGSHHPIHPNDDVNKSQSTNDTFPAAIQISVVTQIIKKLVPSIKELTKVLDSKSNKWKDLIKIGRTHFQDAVPISLGQEVSAWSKQLKDAEDALIISLNELCFLPLGGTAVGTGINCPKDFSKESIKSISEYTGLFFYKSKNHFSLMASHDRLAQVMGQIKILASALFKISNDIKILSSGPRSGIYELIIPKNEPGSSIMPGKVNPTQCEALSMVCTQVMGFEYAVSIANASGTLQMNEYKPLIGFNILTSIKLLNHAISNFRLKLVEGIQPNPKTIKANLENSLMLVTALVPKIGYEKAAEIANLAFNESINLKEATIKLGYLTANEFEDAINTNKMI

SEQ ID NO: 6446 - DNA, 1395 bp, Pseudomonas putida
  CDS (1)..(1395)
atgagccgtatcgagacagacagcctgggcccggtcgaagttccggaggacgcctactggggtgcgcagacccagcgttcgctgatcaacttcgccattggcaaggaacgcatgcccctcgcggtattgcacgccctggcactgatcaagaaggccgcggcgcgcgtcaacgaccgcaatggcgacctgccggccgacatcgcccggttgatcgaacaggccgccgatgaagtgctggatggccagcacgacgatcagttcccgctcgtcgtctggcagacgggcagtggcacccaaagcaacatgaacgtcaacgaggtgatcgccggacgcgccaacgaactggccggcaaaggccgtggcggcaaggcgccagtacaccccaatgaccacgtcaaccgctcgcagagctccaacgactgcttccccaccgccatgcacattgccgcagcccaggcggtgcatgaaaagctgctgccggccgtcactgaactgtcttcggggctggccgagctgtcgatgcgccaccacaagctggtaaaaaccggccgcacgcacatgatggacgccacgccgattaccttcggccaggaagtgtcggctttcgtcgcccagctcgattacgcccagcgcgctatccgcgccaccctgccggcggtgtgcgaactggcccagggcggcactgccgtgggtaccgggctgaacgctccgcagggttttgccgaggccatcgcggccgagctggcggcgctgtccggcctgccgttcatcactgcacccaacaagttcgccgccctcgccggccacgaaccgctgaccagcctggcgggagccctgaagaccctggccgtggccctgatgaaaatcgccaacgacctgcgcctgctggggtccggccctcgcgccgggcttgccgaggtgcgcctgccagccaacgagccgggcagctcgatcatgccgggcaaggtcaaccccacccagtgcgaggcgctgtcgatgctggcctgccaggtactgggcaacgacgcggccatcggctttgccgccagccaggggcatttgcagttgaatgtgttcaagccggtgatcattcataacctgctgcaatccatcgagttgctggccgatggttgccgcaacttccagcagcattgcgtggcgggtatcgagccggatgccgagcagatggccgcgcacctggagcgtgggttgatgctggtgacggcgctgaacccgcatattggctatgacaaggcggcagaaattgccaagaaggcttacagcgagggcacgaccttgcgcgaggcggcattggcgttgaagtacctgaccaatgaacagttcgaccagtgggtgcggccggagaacatgctggcgcctgggggcaaaggctag

SEQ ID NO: 6447 - protein, 464 aa, Pseudomonas putida
MSRIETDSLGPVEVPEDAYWGAQTQRSLINFAIGKERMPLAVLHALALIKKAAARVNDRNGDLPADIARLIEQAADEVLDGQHDDQFPLVVWQTGSGTQSNMNVNEVIAGRANELAGKGRGGKAPVHPNDHVNRSQSSNDCFPTAMHIAAAQAVHEKLLPAVTELSSGLAELSMRHHKLVKTGRTHMMDATPITFGQEVSAFVAQLDYAQRAIRATLPAVCELAQGGTAVGTGLNAPQGFAEAIAAELAALSGLPFITAPNKFAALAGHEPLTSLAGALKTLAVALMKIANDLRLLGSGPRAGLAEVRLPANEPGSSIMPGKVNPTQCEALSMLACQVLGNDAAIGFAASQGHLQLNVFKPVIIHNLLQSIELLADGCRNFQQHCVAGIEPDAEQMAAHLERGLMLVTALNPHIGYDKAAEIAKKAYSEGTTLREAALALKYLTNEQFDQWVRPENMLAPGGKG

SEQ ID NO: 6448 - DNA, 1395 bp, Pseudomonas syringae
  CDS (1)..(1395)
atgagccgcaccgaaaccgacagcatcggcccgatcgaagtccctgaagatgcctattggggcgcgcagacccaacgctcactgatcaactttgcgattggcgaccagcgtatgccgttggccgttctgcatgcgttgaccttgatcaagaaagccgccgcacgcgtcaacgaccgcaacggcgacctgccggccgatatcgcccggctgatcgaacaggctgccgacgaggtgctcgacggtcagcacgacgcgcagtttccgctggtggtctggcagaccggcagtggcacgcagagcaacatgaacgtcaacgaagtgatcgccggccgcgccaacgaactggccggccagggccgtggcggcaaatcgccggtccaccccaacgatcacgtcaatcgctcgcaaagctccaacgactgctttccgacagccatgcacattgccactgcgcaagcggtcaaggaacagctgctgccggcgattgccgagctgtccagcgggctggccgaacaggccgcgcgtcacatgaagctggtcaagaccgggcgcacgcacatgatggacgccacgccgatcacctttggccaggagctttcggggttcgtcgcgcaactggattacgcagaaaaagccattcgcgccgccctgcccgccgtctatgaactggcgcaaggtggcaccgcagtcggcaccgggctcaacgcgccgaaaggcttcgctgaagccatcgcggcagaactggctgcactgtcgggcttgccgttcgtcaccgcgccgaacaaattcgccgcactggcgggccacgagccgctggctgcgctttccggcgcattgaaaacgctggccggcaccctgatgaagatcgccaacgacctgcgcttgctgggttccggcccgcgtgccgggttggcggaagtcaggttgccagccaacgagcccggcagctcgatcatgcccggcaaggttaacccgactcagtgcgaggccctgtcgatgctggcctgccaggttatgggcaacgatgtgaccatcggttttgccgccagccagggccatttgcaactgaacgtctataagccggtgatcattcacaacgtattgcagtcgatccgactgctggccgacggttgcagcaatttcaatgaacactgcgtcgccggcatggagccagacgccgaaaaaatggctgagcaccttgaacgcggcctgatgctggtcaccgcgctcaacccgcacatcggctatgacaagtcggcgcacattgccaaaaaagcctacaccgaaggcctgaccctgcgtgaagcagcgctggcgctgggttacctgaccgacgaggagttcgacgcctgggtgcgcccggacaagatgctggaggcgggcagcaatggttga

SEQ ID NO: 6449 - protein, 464 aa, Pseudomonas syringae
MSRTETDSIGPIEVPEDAYWGAQTQRSLINFAIGDQRMPLAVLHALTLIKKAAARVNDRNGDLPADIARLIEQAADEVLDGQHDAQFPLVVWQTGSGTQSNMNVNEVIAGRANELAGQGRGGKSPVHPNDHVNRSQSSNDCFPTAMHIATAQAVKEQLLPAIAELSSGLAEQAARHMKLVKTGRTHMMDATPITFGQELSGFVAQLDYAEKAIRAALPAVYELAQGGTAVGTGLNAPKGFAEAIAAELAALSGLPFVTAPNKFAALAGHEPLAALSGALKTLAGTLMKIANDLRLLGSGPRAGLAEVRLPANEPGSSIMPGKVNPTQCEALSMLACQVMGNDVTIGFAASQGHLQLNVYKPVIIHNVLQSIRLLADGCSNFNEHCVAGMEPDAEKMAEHLERGLMLVTALNPHIGYDKSAHIAKKAYTEGLTLREAALALGYLTDEEFDAWVRPDKMLEAGSNG

SEQ ID NO: 6450 - DNA, 1386 bp, Ralstonia solanacearum
  CDS (1)..(1386)
atgacgacccgtaccgaacgcgatacctttggcccgatcgaagtccccgccgaccgcctgtggggcgcgcagacgcagcgctcgctgcagaacttcgacatcgccggcgaccgcatgccgcgcgagctgatcgacgcgctggcccgcatcaagcgcgccagcgccgccgtcaaccagcgcctgggcctgctgccggccgacaaggcgaacgcggtcatcgccgcggccgacgaggtcatcgccggcaagcatccgggcgagttcccgctggtggtctggcagaccggctccggcacgcagagcaacatgaacatgaacgaggtgctcgccaaccgcgccagcgaactgctgggcggcgagcgcggcgaagcccgcctggtgcaccccaacgacgacgtgaaccgcagccagtcgtccaacgacgtgttcccgacggcgatgcacgtggcggccgtcaccgccatcacgcggcacctgctgccgtcgctgcgcgcgctgcgcgagacgctggcgcgcaaggccatcgacttcgacgacatcatcaagatcggccgcacccacctgcaggacgccacgccgctcacgctcggccaggagttctccggctacgcggcccagctgcagcacagcgagacgcacctgaacgccgcgctgccgcacctgtgcgagctggcgctgggcggcacggcggtcggcaccggcctgaatgcgccggccggctatgccgaacaggtggccgccgaactcgccgcgctgaccggcctgcccttcgtcacctcgcccaacaagttcgagaccatggcctcggccgacggcctggtgcacgcgcacggcgccctgaagacgctggccgccagcctgaccaagatcgccaacgacatccgctggctggccagcggcccgcgcagcggcctgggcgagctgtccattcccgagaacgagccgggctcgtccatcatgccgggcaaggtcaacccgacccagagcgaggcgatgacgatgctgtgcgcgcaggtgttcggcaacgatgtcgccgtcaacatcggcggggcctcgggcaacttcgagctgaacgtgttccggccgatgatcgcctacaacttcctgcacagcgcgcgcctgctggccgacggcatgcgcagcttcaacgaccactgcgcggtcggcatcgagcccaaccgcgagcgcatcgccgagctggtgcagcgctcgctgatgctggtgaccgcgctcaacccgcacatcggctacgacaaatcggcgcagatcgccaagaaggcgcacaaggaaggcaccagcctgcgcgaggcggcgctggcgctggggtatgtgacggccgagcagttcgatgcgtgggtgcggccggagcagatggtgggacgctga

SEQ ID NO: 6451 - protein, 461 aa, Ralstonia solanacearum
MTTRTERDTFGPIEVPADRLWGAQTQRSLQNFDIAGDRMPRELIDALARIKRASAAVNQRLGLLPADKANAVIAAADEVIAGKHPGEFPLVVWQTGSGTQSNMNMNEVLANRASELLGGERGEARLVHPNDDVNRSQSSNDVFPTAMHVAAVTAITRHLLPSLRALRETLARKAIDFDDIIKIGRTHLQDATPLTLGQEFSGYAAQLQHSETHLNAALPHLCELALGGTAVGTGLNAPAGYAEQVAAELAALTGLPFVTSPNKFETMASADGLVHAHGALKTLAASLTKIANDIRWLASGPRSGLGELSIPENEPGSSIMPGKVNPTQSEAMTMLCAQVFGNDVAVNIGGASGNFELNVFRPMIAYNFLHSARLLADGMRSFNDHCAVGIEPNRERIAELVQRSLMLVTALNPHIGYDKSAQIAKKAHKEGTSLREAALALGYVTAEQFDAWVRPEQMVGR

SEQ ID NO: 6452 - DNA, 1392 bp, Rhizobium meliloti
  CDS (1)..(1392)
atgacatcgacccgcacggaaacagatacgttcggccccatcgaagtggcgagcgaccgctattggggcgcccaggcgcagcgatcgctgggcaatttcaaaatcggctgggaaaagcagcctctggcaatcgtgcgcgcactcggcatcgtcaaacaggcggctgcccgcgccaacatggcgctcggccgcctcgacccggcgatcggcgacgccatcgtcaaggccgcacaggaggtgatcgacggcaagcttgacgagcacttccctctcgtcgtgtggcagacgggctccggaacccagtcgaacatgaatgcgaacgaggtcgtttccaaccgtgcgatcgagctgctcggcggcgtcatgggttcgaagaagccggttcacccgaacgatcacgtcaatatgagccagtcgtcgaacgacacctatcccacggccatgcacatcgcctgtgcggagcgcgtgatccacgatctgctgccggcgctcaagcacctgcacaaggcgctcgaagagaaggtgaaggctttcgatcacatcatcaagatcggccgcacccacacgcaggacgcaacgcccctgacgctggggcaggagttttccggctatgcggcgcaggtcgcctcctcgatcaaacggatcgagatgacgctccccggcctttgcgagctcgcccagggggggaccgcggtcggcaccgggctcaatgcgccggtcggatttgccgagaaggtcgccgaggaaatcgctgccatcaccggcatcggcttcacttccgcgccgaacaagttcgaagcgctggccgcccacgactcgatggtcttcagccacggggcaatcaacgccaccgccgccgcgctcttcaagatcgccaacgacatccgcttcctcggctccggcccccgctccggcctcggcgagctttcactgccggaaaacgagccgggctcgtccatcatgccgggcaaggtcaacccgactcagtgcgaggcgctcacccaggtctgcgtccaggtcttcggcaatcatgcggcgctgacctttgccggcagccagggccacttcgagctcaacgtctacaatccgctgatggcgtacaacttcctgcagtcggtgcaactgctcgccgatgcggctatctccttcaccgacaattgcgtcgtcgggatcgaggcgcgggaggacaacatcaaggcggcgctcgaccgttcgctcatgctggtgactgcgcttgcgccgaagatcggctacgacaacgcggccaagatcgccaagaccgcccacaagaacggtaccacgcttcgcgaggaggccgtcggcggcggttacgtcacggacgaggagttcgacgccgtcgtccgccccgaaaccatgatcggcccggcctga

SEQ ID NO: 6453 - protein, 463 aa, Rhizobium meliloti
MTSTRTETDTFGPIEVASDRYWGAQAQRSLGNFKIGWEKQPLAIVRALGIVKQAAARANMALGRLDPAIGDAIVKAAQEVIDGKLDEHFPLVVWQTGSGTQSNMNANEVVSNRAIELLGGVMGSKKPVHPNDHVNMSQSSNDTYPTAMHIACAERVIHDLLPALKHLHKALEEKVKAFDHIIKIGRTHTQDATPLTLGQEFSGYAAQVASSIKRIEMTLPGLCELAQGGTAVGTGLNAPVGFAEKVAEEIAAITGIGFTSAPNKFEALAAHDSMVFSHGAINATAAALFKIANDIRFLGSGPRSGLGELSLPENEPGSSIMPGKVNPTQCEALTQVCVQVFGNHAALTFAGSQGHFELNVYNPLMAYNFLQSVQLLADAAISFTDNCVVGIEAREDNIKAALDRSLMLVTALAPKIGYDNAAKIAKTAHKNGTTLREEAVGGGYVTDEEFDAVVRPETMIGPA

SEQ ID NO: 6454 - DNA, 1404 bp, Salmonella typhimurium
  CDS (1)..(1404)
atggtaacggtacgccgcgagaaagattcaatgggcgcgattgaagtcccggcagataaactgtggggggcgcagactcaacgttcgctggagcattttcggatttccacggagaaaatgcccgtctcgctcattcacgctctggcgttgaccaagcgcgccgctgcgaaggtcaaccaggacttagggttgttggcggcggaaaaagccagcgcgattatccaggcggctgatgaagtgctggcgggaaaacatgctgatgagtttccgctggcgatttggcagaccgggtccggtacgcaaagcaacatgaatatgaatgaagtgttagcgaaccgcgccagtgaaattttgggcggcgttcgcggtatggaacgcaaggtgcatcccaatgatgacgtcaataagagtcaaagctcaaacgatgttttcccaaccgccatgcacgtggcggcgttactggcgttacgcgaacaccttatcccgcaattatccgcattaacggatacgcttcgcgataaatcccacgctttcgccgatattgtcaaaattggccgtactcacctgcaggacgcgacgccgctcaccttaggccaggagatttccggttgggtagccatgctggaacataacctcagacacattgagcacagtttaccgcacgtcgcggaactggcgctcggcggaaccgcagtagggacagggcttaatacccatccggaatatgcccggcgcgtggccgaggaactggcgacgattaccgcggcgccgtttgttaccgcccccaataaattcgaagcgctggcgacctgtgacgcgttggtacaggcgcatggcgcattaaaaggactggcggcctcgctgatgaaaatcgccaacgatgttcgctggctggcgtccggcccgcgttgcggcattggcgagattgctatcccggagaatgagccaggcagttccattatgcctggtaaagtgaacccgacccagtgtgaagcggtaacgatgctatgttgccaggtgatgggtaacgatgtggccatcaatatggggggcgcatcgggcaactttgagctcaacgtctatcgtccgatggttattcataattttctgcaaacggtgcgcctgctggccgatggcatggagagttttaataaacactgtgcgtcaggaatcgagccaaaccgcgagcgtattacgcagttgctgaatgagtcgctgatgctggtcactgcgctgaatacgcacatcggttacgataaagcggcggagattgcgaagaaggcgcataaagaagggctgacgctcaaagcctcagccgtggcattaggataccttagcgacgaggagttcgacgcctgggtacgtccggagttgatggttggcagtatgacgccgggacgttaa

SEQ ID NO: 6455 - protein, 467 aa, Salmonella typhimurium
MVTVRREKDSMGAIEVPADKLWGAQTQRSLEHFRISTEKMPVSLIHALALTKRAAAKVNQDLGLLAAEKASAIIQAADEVLAGKHADEFPLAIWQTGSGTQSNMNMNEVLANRASEILGGVRGMERKVHPNDDVNKSQSSNDVFPTAMHVAALLALREHLIPQLSALTDTLRDKSHAFADIVKIGRTHLQDATPLTLGQEISGWVAMLEHNLRHIEHSLPHVAELALGGTAVGTGLNTHPEYARRVAEELATITAAPFVTAPNKFEALATCDALVQAHGALKGLAASLMKIANDVRWLASGPRCGIGEIAIPENEPGSSIMPGKVNPTQCEAVTMLCCQVMGNDVAINMGGASGNFELNVYRPMVIHNFLQTVRLLADGMESFNKHCASGIEPNRERITQLLNESLMLVTALNTHIGYDKAAEIAKKAHKEGLTLKASAVALGYLSDEEFDAWVRPELMVGSMTPGR

SEQ ID NO: 6456 - DNA, 1386 bp, Staphylococcus aureus
  CDS (1)..(1386)
atgtcagtaagaattgaacatgatacttttggagaaatagaagtacctgcagataaatattggggtgctcaaacagaaagaagtaaacgcaatttcccagttggtaaagagcgtatgccaatcgaagtagtttatggttttgcacaactaaagcgtgcagcagcattagctaattttgatttaggaaaattaagcgaggcaaagaaagatgccattgtatacgcatgtgatcaaattttatcaggtgaattagatgaacacttcccactagttgtatggcaaacaggaagcggtacacaaagtaatatgaatgtgaacgaagtagtaagttatgttgctaatatgtatttaaaagatcatcaaattgatgaaagtatccacccaaatgatgatgtaaataaatcacaaagttcgaatgatacattcccaactgctatgcacgttgcattatatcaagaggttgaaacaaaattagaacctgcattaaaacttttaagaaatactttgaaagaaaaagaagacaaatttgattcaattattaaaattggtcgtacacatttacaagatgcaacgccgatcaaactaggacaagagattagtggctggcgttatatgcttgaccgttgcgaaataatgttatctgaatctaagaagcacattttaaatcttgccatcggtggtacggctgttggtactggtattaatgcgcatcctgaatttggtgataaagtggcacattatatttcagaaaatacgggttatccatttgtatcttctgaaaataaattccatgcattaacagcacatgatgaagtagtacaactacatggaacattgaaggcgctagcaggagacttaatgaaaattgctaatgatgtgagatggttggcttcagggccacgagctggtttggcagaaatttctatccctgaaaatgaaccaggttcatcaattatgcctggtaaagttaatcctacacaatgtgaaatgttaacaatggttgcagtccaagtaatgggtaatgatacagttgttggcttcgcaagttcacaaggtaactttgaattgaatgtttataaaccagttattatgcataatacactacaatcaatttaccttttagctgatggtatggaaacatttaataacaattgcgcagtgggcattgaaccaatcgaagagaatattgataattatttaaatcaatcattaatgttagttactgcattaaatccacatattggttatgaaaaagcagctcaaattgctaagaaagcccataaagaaggtttaactttaaaagaatctgcaattcaaactggatatgttacagaagaacaatttgaagcatggattaaaccagaagatatggtagatcctcattaa

SEQ ID NO: 6457 - protein, 461 aa, Staphylococcus aureus
MSVRIEHDTFGEIEVPADKYWGAQTERSKRNFPVGKERMPIEVVYGFAQLKRAAALANFDLGKLSEAKKDAIVYACDQILSGELDEHFPLVVWQTGSGTQSNMNVNEVVSYVANMYLKDHQIDESIHPNDDVNKSQSSNDTFPTAMHVALYQEVETKLEPALKLLRNTLKEKEDKFDSIIKIGRTHLQDATPIKLGQEISGWRYMLDRCEIMLSESKKHILNLAIGGTAVGTGINAHPEFGDKVAHYISENTGYPFVSSENKFHALTAHDEVVQLHGTLKALAGDLMKIANDVRWLASGPRAGLAEISIPENEPGSSIMPGKVNPTQCEMLTMVAVQVMGNDTVVGFASSQGNFELNVYKPVIMHNTLQSIYLLADGMETFNNNCAVGIEPIEENIDNYLNQSLMLVTALNPHIGYEKAAQIAKKAHKEGLTLKESAIQTGYVTEEQFEAWIKPEDMVDPH

SEQ ID NO: 6458 - DNA, 1386 bp, Staphylococcus epidermidis
  CDS (1)..(1386)
atgtcagtcagaattgaacatgatacatttggagaaattgaagtaccagaagacaaatattggggtgcacagactgaaagaagtaaacgaaattttccagtcggcaaagagcatatgcctatacaagtcatttacggatttgctcaactaaaaagaggtgcagccttagcaaatcatgaattaggaaaattgagtgatgaaaaaaagaacgccatcgtttatgcttgtgatcgtattttaaatggagaactagataatcattttccacttgtgatttggcaaacaggtagtggtactcaaagcaatatgaatgtaaatgaagtcgtaagctatgtagctaatgaataccttaagaaacatggaagtaaggaaactatccatccaaatgatgatgtaaataaatctcaaagttcaaatgatacatttcctacagctatgcatgtcgcattgttccatgaagttgaaactaagttagagccagcacttaaccatttacgtcaaacttttaaagaaaaagaagaccaatatcaatcaatcattaaaattggacgcacacatttgcaagatgcaacgcctattaaactaggtcaagagataagtggttggcgctatatgttagaaaaatgtgagcaattactatcagaatcaaaaaagcatattttaaatttagcaattggtggaactgcagtaggaacgggaattaatgctcatccagaatttggtcataaagtagccaaatatatttcccaaaacacagggtatgctttcgtatcatctgaaaacaaatttcatgctttaacttctcatgatgaaattgtacaattacatggaacattaaaagcgctagcgacagatttaatgaaaattgcaaatgatattagatggctagcctctggaccgcgtgcaggtcttgctgagatttcaattccagaaaatgaacctggatcttctattatgccaggaaaagtaaatccaacacaatgtgaaatgttaactatggtagcagtacaagtcatggggaatgatacgacggtaggtatcgcaagttctcaaggtaattttgaactaaatgtatttaaaccggtaattatgcataacactttacaatctatttacttattagcagatggaatgaatacctttaataaaaactgtgcaattggtattcaaccgatagaagaaaatattaataattatttaaatcaatcattaatgctagttacggcactgaaccctcatattggatatgagaaagcagctcaaatagctaaaaaggcacacaaagaaggacttactttaaaagaatctgcaatagaaagtggatatgtaactgaatcacaatttgaagagtggataaaaccagaagatatggtagacccacattga

SEQ ID NO: 6459 - protein, 461 aa, Staphylococcus epidermidis
MSVRIEHDTFGEIEVPEDKYWGAQTERSKRNFPVGKEHMPIQVIYGFAQLKRGAALANHELGKLSDEKKNAIVYACDRILNGELDNHFPLVIWQTGSGTQSNMNVNEVVSYVANEYLKKHGSKETIHPNDDVNKSQSSNDTFPTAMHVALFHEVETKLEPALNHLRQTFKEKEDQYQSIIKIGRTHLQDATPIKLGQEISGWRYMLEKCEQLLSESKKHILNLAIGGTAVGTGINAHPEFGHKVAKYISQNTGYAFVSSENKFHALTSHDEIVQLHGTLKALATDLMKIANDIRWLASGPRAGLAEISIPENEPGSSIMPGKVNPTQCEMLTMVAVQVMGNDTTVGIASSQGNFELNVFKPVIMHNTLQSIYLLADGMNTFNKNCAIGIQPIEENINNYLNQSLMLVTALNPHIGYEKAAQIAKKAHKEGLTLKESAIESGYVTESQFEEWIKPEDMVDPH

SEQ ID NO: 6460 - DNA, 1404 bp, Synechococcus elongatus
  CDS (1)..(1404)
atgacaactgacactcgcctagaatacgattccctcggtgccgttgaggtgcctgcggactgctattggggtgctcagacggcgcgttccctcaagcactttgccattggcagtcagcgaatgcccctagcggtgatccatgccatggcacggctcaaaaaggcggcggcgatcgccaaccgtgatttaggagttttagaccctgagaaagccaaatggatcattcaagccgccgatgaagttattgccggacagtgggatgatcagtttcccctcgccatctggcagacgggtagcggcacccaaacgaatatgaatgtcaatgaggtcattgctaaccgtgccattgagctggcgggaggcgttaaggggagcaaaagccccatccatcccaacgatcatgtgaattgtagccagtcctccaatgacacctttcccacggccatgcatgttgccacagtccttgccctacaggagcgcctgctgccaacgctacgccatctcttgacggtcttgcaggaaaaagcggctgcctttgcagagattatcaaaattggccgtacccatttaatggatgccgttcccttgaccctaggccaggaattcagcggttacgccagtcaaattgcggccgctcaagcccatattgaatatgccctgcagcatctgtatccccttgccattggcgctacagcggtggggacggggttgaatgcacccgctggttttggcgatcgcgtggcagcagaattagcgcaaatgacggggtatccctttcgtaaagctgaaaacccctttgccgccttggcagcccacgatcccctagtgatgctcagtggtgctctaaaaaccctggctgccgccctgatgaaaatcgccaacgatattcgttggttgggatcgggaccgcgttgtggtctgggggaattgaggttacccgccaatgaaccggggtcatcaattatgcccggcaaggtgaaccccacccaatgcgaagccttaacgatggtgtgtgtgcaggtgatgggcaacgatgcagccgtgggaatagcgggcagtcaaggaaattttgagttaaatgtctataagcccttgatcatttacaatgtgctgcaatctattgcccttctgagtgatgcagctcaatcgtttaccgaccattgcttagtgggagttgagcccaatcggcagcaaattcaagcctatgtggagcgatcgctcatgttggtgacggctctcaatccccacataggctacgacaaggcggcggcagtcgcgaaaaaggcctacagtgagggtaaaaccctcaaggaagcagctgtggaattgggctatctcactgctgaggagtttgaccgctgggtacgactagagctgatgcttggcgaaaagggcaccagttga

SEQ ID NO: 6461 - protein, 467 aa, Synechococcus elongatus
MTTDTRLEYDSLGAVEVPADCYWGAQTARSLKHFAIGSQRMPLAVIHAMARLKKAAAIANRDLGVLDPEKAKWIIQAADEVIAGQWDDQFPLAIWQTGSGTQTNMNVNEVIANRAIELAGGVKGSKSPIHPNDHVNCSQSSNDTFPTAMHVATVLALQERLLPTLRHLLTVLQEKAAAFAEIIKIGRTHLMDAVPLTLGQEFSGYASQIAAAQAHIEYALQHLYPLAIGATAVGTGLNAPAGFGDRVAAELAQMTGYPFRKAENPFAALAAHDPLVMLSGALKTLAAALMKIANDIRWLGSGPRCGLGELRLPANEPGSSIMPGKVNPTQCEALTMVCVQVMGNDAAVGIAGSQGNFELNVYKPLIIYNVLQSIALLSDAAQSFTDHCLVGVEPNRQQIQAYVERSLMLVTALNPHIGYDKAAAVAKKAYSEGKTLKEAAVELGYLTAEEFDRWVRLELMLGEKGTS

SEQ ID NO: 6462 - DNA, 1398 bp, Synechococcus sp
  CDS (1)..(1398)
atgggccaaccgatgaggcaggagcacgacagcattggaggtgtcgacgtccccgctgcagcgctctggggagcccaaacccagcgatctctcaacaacttcgccattggtcatcaaaagattccagcggagctgattcatgccctggcacggatcaaacagtgctgcgccgcggtgaacggtcgccatggtctgttgaacgaccaacaggtggccttgatcgaacgggcgggccaggcaatccaaacaggccagcaagatgatcactttcctctgagtgtctggcaaaccggcagcggcacgcagacgaacatgaacgtgaatgaggtgatcagcaacctcgctgctcaggaatccggagagaacctcggctcgcaccgtcccctccaccccaacgaccacatcaaccggtctcagtccacaaatgacgttttcccggcagcgatccatgtagctgcggctctgcagctgcagcaggagctgctgccagagctgaagcggctgatcgcgagtctcgatgccaaggccgttgcctggcaggacatcatcaagatcgggcggacccatctgcaggacgcagtgccgcttcgccttggagatgaagtcagcgcctggcgcgaccgactcagcgacggcgcccattggctgaccacagcccatcaagacctactggctctgccgctcggaggcacagccgtcggcagtggattgaacacgccggaccgatttgcccacgaggtttgtgctgaactcgccagccgaacgggatccgactttcagccggcggacaacctgtttgctgtcatggcgggccatgactccctggtgcagaccatggctcagctgcggcgcctggccgtgacgctgctcaccatcgctaatgacatccgcctgctggcttgcggacccagggctgggctgggggaactgctgttgccggccaatgaaccgggcagctcgatcatgccaggaaaggtgaatcccacccagtgcgaggccatggcgatggtctgcacccaggtgatcggcatggatgcagccgtcgcggcagctggtgctggggggcatctccagatgaacgtgtataaacccctgatcggctacaacctgatcgagggcatccgtctgctgcaagacgcctgccgctgtttccggctgaatctgttgaccgggatggaagcagaccgtgaccggatcgcattttacgtggagcgatccctgatgctggtgacggctttgacgccggagatcggctacgaaaaagcctgtgcgatcgcccagcacgcccaccgagacggactgacgcttcgagaggccgccatgcaatccggagcgatcacagacgaacgctttgaccagttgatcgatccagccgcgatggcctcaccccaccgctga

SEQ ID NO: 6463 - protein, 465 aa, Synechococcus sp
MGQPMRQEHDSIGGVDVPAAALWGAQTQRSLNNFAIGHQKIPAELIHALARIKQCCAAVNGRHGLLNDQQVALIERAGQAIQTGQQDDHFPLSVWQTGSGTQTNMNVNEVISNLAAQESGENLGSHRPLHPNDHINRSQSTNDVFPAAIHVAAALQLQQELLPELKRLIASLDAKAVAWQDIIKIGRTHLQDAVPLRLGDEVSAWRDRLSDGAHWLTTAHQDLLALPLGGTAVGSGLNTPDRFAHEVCAELASRTGSDFQPADNLFAVMAGHDSLVQTMAQLRRLAVTLLTIANDIRLLACGPRAGLGELLLPANEPGSSIMPGKVNPTQCEAMAMVCTQVIGMDAAVAAAGAGGHLQMNVYKPLIGYNLIEGIRLLQDACRCFRLNLLTGMEADRDRIAFYVERSLMLVTALTPEIGYEKACAIAQHAHRDGLTLREAAMQSGAITDERFDQLIDPAAMASPHR

SEQ ID NO: 6464 - DNA, 1401 bp, Thermus thermophilus
  CDS (1)..(1401)
atggaataccggattgagcgggacaccatgggcgaggtgcgggtgccggcggacaagtactggggcgcgcagacccagcgctccctggagaacttcaggatcgggaccgaccgcttccgcatgcccctggagatcatccgggcctacgggatgctgaagaaggcggccgcgagagccaacctggagctcggggagctccccgaggagatcgccaaggccatcatccaggcggcggaggaggtggtccaggggaagtgggacgaccacttcccccttgtggtcttccagacgggcagcggcacccagaccaacatgaacgtcaacgaggtcatcgccaaccgggcctcggagatcctggggaagcctctggggagcaagtacgtccaccccaacgaccacgtgaaccgggggcagagctccaacgacaccttccccaccgccatgtacgtggccgtggccctggcgctccaccagaggctctatcccgcggtggaaggcctgatccggacctttacggccaaggcccaggcctttgaccagatcgtcaaggtggggcggacccacctgatggacgccgtgcccatcaccctgggacaggagatcggcagctgggccgcccagctcaagaccaccctcgccgccgtcaaggaaatggaaaagggcctctacaacctcgccatcggcgggacggcggtgggcacgggcctcaacgcccacccccgctttggggagctcgtggccaagtacctcgcggaggagacggggctccccttccgggtggcggagaaccgcttcgccgccctggccgcccacgacgagctggtcaacgtcatgggggccatccgcaccctggccggggccctgatgaagatcggcaacgacgtccgctggctcgcctccggcccctacgcgggcattggggagatcaccatccccgccaacgagcccgggtcctccatcatgccggggaaggtcaaccccacccaggtggaggccctcaccatggtggtggtccgggtctacggcaacgaccacaccgtggccttcgcgggaagccaggggaacttccagctcaacgtctacaagccggtgatggcctacagcaccctggagagcatcaacctcctcgcggacgccgtggcctcctttgacgcccacctggcccaggggattgagcccaatctggagcgcattgaggagcacctgcagaagaaccccatgctggccaccgccctcaacaaggccatcggctacgacaaggcggcggagatcgtcaagaaggccctcaaggagaagaagaccctgaagcaggcggccctcgagctcggctacctcacggaggaggagtttgaccgcatcgtggtccccatgaggctcgccaagccccacgagggggcgtag

SEQ ID NO: 6465 - protein, 466 aa, Thermus thermophilus
MEYRIERDTMGEVRVPADKYWGAQTQRSLENFRIGTDRFRMPLEIIRAYGMLKKAAARANLELGELPEEIAKAIIQAAEEVVQGKWDDHFPLVVFQTGSGTQTNMNVNEVIANRASEILGKPLGSKYVHPNDHVNRGQSSNDTFPTAMYVAVALALHQRLYPAVEGLIRTFTAKAQAFDQIVKVGRTHLMDAVPITLGQEIGSWAAQLKTTLAAVKEMEKGLYNLAIGGTAVGTGLNAHPRFGELVAKYLAEETGLPFRVAENRFAALAAHDELVNVMGAIRTLAGALMKIGNDVRWLASGPYAGIGEITIPANEPGSSIMPGKVNPTQVEALTMVVVRVYGNDHTVAFAGSQGNFQLNVYKPVMAYSTLESINLLADAVASFDAHLAQGIEPNLERIEEHLQKNPMLATALNKAIGYDKAAEIVKKALKEKKTLKQAALELGYLTEEEFDRIVVPMRLAKPHEGA

SEQ ID NO: 6466 - DNA, 1395 bp, Wigglesworthia glossinidia brevipalpis
  CDS (1)..(1395)
atgttaattaatagaatagaaaaagatactattggcgaagttgaattgccaaaaaaatgtttgtggggatcccaaactcaaagatctatttataattttaatatctctacagagaaaatgccttatgagcttattcacgctttagttcaaataaaacttgtagcagcaaaagttaataaagatctaaaattattagaagaaaaaaaagctgatgctataattaaagcttctgaagagatattatctggaaaatacaaagatagttttcctttggtaatttggcaaactggatctggaactcaaacaaacatgaacgtaaatgaagtaatagctaatattgcaataaaattattaggaggaaagtatggagactattcaataatacatcctaacgatcatgtaaataaaagtcaaagttctaatgatgtatttcctacagcaatgcatatatctgcagttttgtctttaaagaaaaatttattaccgaatttaattaaattaaaaaaatcattttatgataaatctatattatttaaagatattattaaaattggaagaactcacctgcaagatgcaactccattgactttaggccaagaagtttcttcttggtattgtatgttgaaaaaaaacattaaatatataaaaaatagcatactttgtatttctgaaatagctttaggtggtacagccgtaggaactgggttaaatgctcacgaaaaatattcattaaaagcatctaaattattgtcagaaataaataaacataattttattagttctacaaataaatttgaatctttaagtacatgtgatgcaatagtaaaagttcatagcactttaaaaaatttatctatttcaattatgaaaatatcaaatgatatacgttggttatcttctggcccaagatgtggaataggagaattaattattccagaaaatgaaccaggaagttctataatgcccggtaaagttaatccaactcaatgcgaatctatatctatgatatgctgtcaagtaataggaaacgactccgccataggaataggaggattgtctggaaattttcaattgaatgtatttcgacctatgattatttataattttttacaatccgtaagaatattatctgatggaataaaaagctttaacaaaaaatgtgttattggtattaaaccaaatattaaaagaataaaaaaatttcttaaagaatctttgatgctagttacatcattaactcctcatataggatatgataaatctgcaaaaatagcaaaattagctcacaatgaaaatattactttaaaagaagcttgtttgaaattgaattatatttcagagagtcaatttgatattttagttcgtccagaaaacatgattggaaataaaaattaa

SEQ ID NO: 6467 - protein, 464 aa, Wigglesworthia glossinidia brevipalpis
MLINRIEKDTIGEVELPKKCLWGSQTQRSIYNFNISTEKMPYELIHALVQIKLVAAKVNKDLKLLEEKKADAIIKASEEILSGKYKDSFPLVIWQTGSGTQTNMNVNEVIANIAIKLLGGKYGDYSIIHPNDHVNKSQSSNDVFPTAMHISAVLSLKKNLLPNLIKLKKSFYDKSILFKDIIKIGRTHLQDATPLTLGQEVSSWYCMLKKNIKYIKNSILCISEIALGGTAVGTGLNAHEKYSLKASKLLSEINKHNFISSTNKFESLSTCDAIVKVHSTLKNLSISIMKISNDIRWLSSGPRCGIGELIIPENEPGSSIMPGKVNPTQCESISMICCQVIGNDSAIGIGGLSGNFQLNVFRPMIIYNFLQSVRILSDGIKSFNKKCVIGIKPNIKRIKKFLKESLMLVTSLTPHIGYDKSAKIAKLAHNENITLKEACLKLNYISESQFDILVRPENMIGNKN

SEQ ID NO: 6468 - DNA, 1760 bp, Brachydanio rerio
  CDS (19)..(1548)
gttccgcccccggtcgccatgtaccgctccgctcgctccctgcatcgcttcagcgcgagtttgtcagatctgcgggccgctcagagatccatcaaagctcgcaacgtctgtccagcacccgggctccggcaccagaccgtcagaatggccagttcagaggcatttcggattgagagggacacatttggagagcttaaagtcccctctgataaatactatggagctcagactgtcagatccaccatgaacttcaggatcggaggagtcacggagaggatgccgattcaggtgatcagagctttcggtatcctgaagaaagctgctgcagaagtcaataaagattacggtttggacccaaagatcgcagacgccatcatgaaagctgctgatgaggtggagtctgggaagctggatgatcatttcccgctggttgtttggcaaacaggatccggaactcagactaacatgaacgtcaatgaggtgatcagtaacagagccatcgagatgctgggaggaaaactgggcagcaaagaccccgttcatcccaatgaccacgtcaacaagagccagagctccaatgacacgttccccacagccatgcacatcgctgctgctaaagaggttcacgaggttctcctgccgggccttcagacgcttcatgatgctctcgctgccaaagctgaacagttcaaagacatcataaagatcggccgcacacacacacaggacgccgtgccgctctcgctcggacaggagtttggcgggtacgtgcagcaggtgaagtacagtattgcgcgcgtgaaagcgtctctgccgcgtgtgtatgagctggcagcaggaggaaccgcagtcggcactggactcaacacacgcatcggctttgcagagaaggtggcagataaagtgtctgcacttacaggtcttccgttcgtgaccgcagccaataagttcgaggctctggcggctcatgatgctctggtggagctgagtggcgctctgaacactgtggccgtgagcatgatgaagatcgccaatgatatccgcttcctcggctctgggcctcgttcgggtctcggagaactcatcctgccagagaacgaacccggatccagcatcatgcccggtaaggtgaacccgacgcagtgtgaggccatgactatggtggccgctcaggtgatggggaatcatgtggccgttactgtcggaggaagcaatggacacttcgagctcaatgtgttcaagcccatgatcattaagaacgtgctgaactcggccaggctgctgggcgatgcttcggtctccttcactaataactgcgtggtcggcatcgaggcgaacaccgagaggatcaacaagctgatgagcgagtctctgatgctggtcaccgccctcaatccacatataggttatgataaagccgcaaaaattgcgaaaaccgctcataaagacggttcgactctgaaagaggcggcgctgaagctgggattcctgaacgagcagcagtttgaggagtgggttcgacctcatgacatgctgggcccaaagtaaaggagaacagagctgaaacacacgcacaccagtaaaacacttgtggatcaccgttcacagacggggtttgtgctggaggtattattcttcagagtctgtgtgttccctgtgaatgcatgactgtgtttctttttcatcccaaaatctgaggaataaaataaccgggggagaaaaaaaaaaaaaaaaaaaaaaaaaaaaaaaaaaaaaaaaaa

SEQ ID NO: 6469 - protein, 509 aa, Brachydanio rerio
MYRSARSLHRFSASLSDLRAAQRSIKARNVCPAPGLRHQTVRMASSEAFRIERDTFGELKVPSDKYYGAQTVRSTMNFRIGGVTERMPIQVIRAFGILKKAAAEVNKDYGLDPKIADAIMKAADEVESGKLDDHFPLVVWQTGSGTQTNMNVNEVISNRAIEMLGGKLGSKDPVHPNDHVNKSQSSNDTFPTAMHIAAAKEVHEVLLPGLQTLHDALAAKAEQFKDIIKIGRTHTQDAVPLSLGQEFGGYVQQVKYSIARVKASLPRVYELAAGGTAVGTGLNTRIGFAEKVADKVSALTGLPFVTAANKFEALAAHDALVELSGALNTVAVSMMKIANDIRFLGSGPRSGLGELILPENEPGSSIMPGKVNPTQCEAMTMVAAQVMGNHVAVTVGGSNGHFELNVFKPMIIKNVLNSARLLGDASVSFTNNCVVGIEANTERINKLMSESLMLVTALNPHIGYDKAAKIAKTAHKDGSTLKEAALKLGFLNEQQFEEWVRPHDMLGPK

SEQ ID NO: 6470 - DNA, 1588 bp, Mus musculus
  CDS (6)..(1529)
gcaccatgtaccgcgcactccgtctcctcgcgcgctcgcgtcgcctcctgcgggttccgtccgccggtgctgcagtgtctggggaagcgaccaccctcccgcggtgtgctccgaacgtcgcgcgaatggcaagccaaaattccttccgtgtagagttcgacacctttggtgaattgaaggttccaaccgataagtattatggtgctcagaccgtaagatctacgatgaactttaagattggaggtgctacagaacgtatgccaatcccagtcattcaagctttcggcatcttgaagcgagctgctgctgaagtaaaccaggagtatggtctcgatccaaagattgctagtgcaataatgaaggccgcagatgaggtagctgaaggtaaattaaatgatcactttcctctggtggtttggcagactggatcaggaacccagacaaacatgaatgtaaatgaagtcattagcaacagagcaattgaaatgttaggaggtgaacttggcagcaagaagcctgtgcaccccaatgatcatgttaacaaaagccagagctcgaatgacacctttcccacagcaatgcatattgctgctgcagtggaagttcacaaggtcctgttgccagggttacagaagctccatgatgctctcagtgcaaaatccaaagagtttgcgcaggtcatcaaaattgggcgaactcacacgcaggacgctgtccctcttactcttggacaggaattcagtggttacgttcagcaagtccagtatgcgatggtgagaataaaagccgccatgccaagaatctacgagctcgctgctggaggcactgctgtggggacggggttaaacaccaggatcggcttcgcagaaaaggtggccgcaaaagtagcagcactcacaggtttgccttttgtcactgccccgaataaatttgaagctctagctgctcatgatgctctggttgagcttagtggagccatgaacactgccgcctgcagtctaatgaagatagcgaatgatattcgcttcctgggttctggtcctcggtcaggtttgggagagctgatcttgcctgaaaacgagccagggagcagcatcatgccaggaaaggtgaaccctactcagtgtgaagcgatgaccatggttgcagcccaagtcatggggaatcacgttgctgttactgttggaggcagcaatggacattttgaactgaatgtgtttaaaccaatgatgattaagaatgtgttgcactcagcgaggctactgggagatgcttcagtgtccttcacagaaaactgtgtggtcgggatccaggccaacacagagcggatcaacaagctaatgaatgagtctttaatgttggtcacagctcttaatccacatatagggtatgacaaagcagcaaagattgccaagactgcgcacaagaacggatcaaccttaaaggaaacggctattgaacttggctatctcacagcagagcagtttgatgagtgggtgaaacccaaggacatgctgggtccaaagtgacttcaataaatttatattaaaataaacttaagaaatttacaaacaaaaaaaaaaaaaaa

SEQ ID NO: 6471 - protein, 507 aa, Mus musculus
MYRALRLLARSRRLLRVPSAGAAVSGEATTLPRCAPNVARMASQNSFRVEFDTFGELKVPTDKYYGAQTVRSTMNFKIGGATERMPIPVIQAFGILKRAAAEVNQEYGLDPKIASAIMKAADEVAEGKLNDHFPLVVWQTGSGTQTNMNVNEVISNRAIEMLGGELGSKKPVHPNDHVNKSQSSNDTFPTAMHIAAAVEVHKVLLPGLQKLHDALSAKSKEFAQVIKIGRTHTQDAVPLTLGQEFSGYVQQVQYAMVRIKAAMPRIYELAAGGTAVGTGLNTRIGFAEKVAAKVAALTGLPFVTAPNKFEALAAHDALVELSGAMNTAACSLMKIANDIRFLGSGPRSGLGELILPENEPGSSIMPGKVNPTQCEAMTMVAAQVMGNHVAVTVGGSNGHFELNVFKPMMIKNVLHSARLLGDASVSFTENCVVGIQANTERINKLMNESLMLVTALNPHIGYDKAAKIAKTAHKNGSTLKETAIELGYLTAEQFDEWVKPKDMLGPK

SEQ ID NO: 6472 - DNA, 1485 bp, Rhizopus oryzae
  CDS (1)..(1485)
atgttgcgagcttctgctaccagattcttaagtcaagctaaaaacatgaacaactctcctcgtcttttcagtagtgcctctgctgctttgcaaaaattccgtgctgagcgcgatacttttggtgatctccaagttcctgctgatagatattggggtgctcaaacccaaaggtctcttcaaaattttgacattggtggccctactgaacgtatgcccgaacctttgatccgtgcctttggtgtcctcaaaaaggctgctgctactgtcaacatgacttatggcttggatcctaaagttggtgaagctattcaaaaggctgctgacgaggtcattgatggaagcttgattgatcatttccctcttgttgtctggcaaactggttccggtactcaaaccaagatgaacgttaacgaagttatctccaaccgtgctattgaacttttgggtggtgagcttggtagtaaggctcctgttcatcccaacgatcatgtcaacatgagtcaatcatccaatgacacgttccctactgccatgcacgttgctgctgttgttgaaattcacggtcgacttattcctgctttgaccactttgcgtgatgcccttcaagccaaatccgctgagtttgaacacatcatcaagatcggtcgtactcacttgcaagatgcaactcctttgactctcggtcaagaattctctggttatactcaacaattgacttacggtattgctcgtgtacaaggtaccttggagcgcctctataaccttgctcaaggtggtactgctgttggtactggtcttaacaccagaaaaggtttcgatgccaaggtagctgaagctattgcttctattaccggtcttcctttcaagaccgcccctaataagtttgaagcccttgctgctcacgatgctctcgttgaagctcacggagctctcaataccgttgcttgttctcttatgaagatcgccaacgatatccgttatcttggttctggacctcgctgtggtcttggtgaactttccttgcctgaaaacgaacccggatcttctatcatgcccggtaaggttaatcctactcaatgtgaagctatgaccatggtctgtgctcaagtcatgggtaacaacactgctatttctgttgctggttccaatggtcaattcgagcttaatgtcttcaaacccgtcatgatcaagaacttgatccaatccattcgtcttatttctgatgcctctatttcattcaccaaaaactgtgttgttggtattgaagccaatgaaaagaagattagcagcattatgaatgagtcattgatgttggtcactgctcttaaccctcatattggttacgataaagctgctaaatgtgccaagaaggcccacaaggaaggcaccaccttgaaggaagctgccctttctcttggttacttgacttctgaagaattcgaccagtgggttagacccgaagatatgatctctgccaaggattaa

SEQ ID NO: 6473 - protein, 494 aa, Rhizopus oryzae [sequence omitted]

SEQ ID NO: 6474 - DNA, 1488 bp, Glycine max
  CDS (1)..(1488)
atggcgttgtacgtgctctcgcgtcgtttatcagctggatccaactcaaccacgctcctcgccttgcgttttgtttcctctaccagatcctactcctcttccttcagggaagaaagagatacctttggagccattcaagttccctccgagaaattatggggagcacaaactcaaagatcgttgcagaacttcgatatcggtgggccccgcgaacgcatgcccgaacccatcattcgcgcctttggcgtcttgaagaaatgcgctgctaaggtgaacatggagtatggtcttgatcccgccgttggaaaagcgattatgcaagcggcacaagaagtggccgagggaaaactaaacgaccattttcctctcgttgtatggcaaactggcagtggcactcaaagtaacatgaatgctaacgaggttattgcaaaccgagcagcagagattcttggccataagcggggtgagaagtttgtgcacccaaatgaccatgtcaatagatcacagtcttctaatgatacattcccaactgtaatgcacattgcagccgcaacggaaataaactcaagactgatccccagccttaaaacgttacacgatactctaaactcaaagtcagttgaatttaaagatattgtcaagattggacgcactcatactcaagatgcaacacctttgactcttggacaagagtttagtggatatactacacaagtgaagtacggtattgatagagtaattgacactttgccacacatgtatcagcttgcccagggtggtacagctgtagggactggattgaatacaaagaaggggtttgatgccaagatagcagcagcagtagctgaggaaacaaatctgccttttgtcacggcagaaaataagtttgaggccttggctgcccatgatgcttttgttgaaactagtggagcccttaacactgttgtggcttcattgatgaagattgctaatgatatacggttattgggaagtggtccacgctgcggtcttggggagctcattcttcctgaaaacgaaccaggaagcagtattatgcctgggaaggttaacccgacccagtgtgaggctttgacgatggtgtgtgcacaggtcatgggaaaccatgttgcaatcacagtgggtggatcaaatggtcattttgagctcaatgtgttcaagccaatgattgccaattgtctcctgcattcgctgagactgcttggagattcgtctgcttcctttgaaaagaattgtttgagaggtattcaagctaatagggaaagaatttcaaaattactgcatgagtcacttatgcttgtcacatccttaaacccaaaaatcggttatgacaaggcagcaacagttgccaagacagctcacaaagaggggactactcttaaggaagctgcattgaaactcggagtgctctgctctgaagattttgacaagcttgtggtacctgagaaaatgcttggaccatctgattga

SEQ ID NO: 6475 - protein, 495 aa, Glycine max
MALYVLSRRLSAGSNSTTLLALRFVSSTRSYSSSFREERDTFGAIQVPSEKLWGAQTQRSLQNFDIGGPRERMPEPIIRAFGVLKKCAAKVNMEYGLDPAVGKAIMQAAQEVAEGKLNDHFPLVVWQTGSGTQSNMNANEVIANRAAEILGHKRGEKFVHPNDHVNRSQSSNDTFPTVMHIAAATEINSRLIPSLKTLHDTLNSKSVEFKDIVKIGRTHTQDATPLTLGQEFSGYTTQVKYGIDRVIDTLPHMYQLAQGGTAVGTGLNTKKGFDAKIAAAVAEETNLPFVTAENKFEALAAHDAFVETSGALNTVVASLMKIANDIRLLGSGPRCGLGELILPENEPGSSIMPGKVNPTQCEALTMVCAQVMGNHVAITVGGSNGHFELNVFKPMIANCLLHSLRLLGDSSASFEKNCLRGIQANRERISKLLHESLMLVTSLNPKIGYDKAATVAKTAHKEGTTLKEAALKLGVLCSEDFDKLVVPEKMLGPSD

SEQ ID NO: 6476 - DNA, 1488 bp, Glycine max
  CDS (1)..(1488)
atggcgttgtacgtgctctcgcgtcgtttatcagctggatccaactcaaccacgctcctcgccttgcgttttgtttcctctaccagatcctactcctcttccttcagggaagaaagagatacctttggagccattcaagttccctccgagaaattatggggagcacaaactcaaagatcgttgcagaacttcgatatcggtgggccccgcgaacgcatgcccgaacccatcattcgcgcctttggcgtcttgaagaaatgcgctgctaaggtgaacatggagtatggtcttgatcccgccgttggaaaagcgattatgcaagcggcacaagaagtggccgagggaaaactaaacgaccattttcctctcgttgtatggcaaactggcagtggcactcaaagtaacatgaatgctaacgaggttattgcaaaccgagcagcagagattctttggcataagcggggtgggaagttagtgcacccaaatgaccatgtcaatagatcacagtcttctaatgatacattcccaactgtaatgcacattgcagccgcaatggaaataaactcaagactaattcccagcctgaaaaccttacatggtacactaaactcaaagtcaattgaattcaaagatattgtcaagattggacgcactcatactcaagatgcaacacctttgactcttggacaagagtttagtgggtatactacacaagtgaagtatggtattgatagagtaattggcactttgccgcacatgtatcagcttgcccagggtgggacagctgtagggactggattgaatacaaagaaggggtttgatgccaaaatagcagcagcagtagctgaggaaaccaatctgccttttgttacggcagaaaataagtttgaggccttggctgcccatgatgcttttgttgaaactagtggagcccttaacactattgcggcttctttgatgaagattgctaatgacatacggttgttaggaagtggtccacgctgcggtcttggtgaactcattcttcctgaaaacgaaccagggagcagtatcatgcctgggaaggttaaccctacccagtgtgaggctttgacaatggtgtgtgcccaggtcataggaaaccatgttgcagttacagtgggtggatcaaatggtcattttgagcttaatgtgttcaagccaatgattgccagttgtctcctgcattcactgagactgcttggagattcatctgcttcctttgaaaagaattgcgtgagaggcattcaagctaacagggaaagaatttcaaaattactgcatgagtcactaatgcttgtcacatccttaaacccgaaaattggttatgacaaggcagcagcagttgccaagacagcccacaaagaggggtgtactcttaaggaagctgcattgaaactcggagtgctcagctctgaagattttgacaagcttgtggtacctgagaaaatgcttggaccatctgattga

SEQ ID NO: 6477 - protein, 495 aa, Glycine max; identical to SEQ ID NO: 6063

SEQ ID NO: 6478 - DNA, 1488 bp, Glycine max
  CDS (1)..(1488)
atggcgttctacgtgctctcgcgtcgtttatcagctggatccaactcaacgacgctcctcgccctgcgttttgcttcctcttccagatccttctcctcttccttcagggaagaaagagatacctttggacccattcaagttccctccgacaaattatggggagcacaaactcaaagatcgttgcagaacttcgacatcggtgggccccgcgaacgcatgcccgaacccatcattcgcgcttttggcgtcttgaagaaatgcgctgctaaggtgaacatggagtatggtcttgatcccatcgtgggagaagcaataatgcaagcggcacaagaagtagccgagggaaaactaaacgaacattttcctctcgttgtatggcaaactggcagtggcactcaaagtaacatgaatgctaacgaggttattgcaaaccgagcagcagagattcttggccataagcgcggtgggaagttcgtgcacccaaatgaccatgtcaatagatcgcagtcttctaatgatacattcccaaccgtaatgcacattgcagccacaatggaaataaactcaagactaattcccagcttgaaaaccttacacggtacactaaactcaaagtcaattgaattcaaagatattgtcaagattggacgcactcatactcaagatgcaacacctttgactcttgggcaagagtttagtgggtatactacacaagtgaagtacggtattgatcgagtaattggcactttgccgcacctgtatcagcttgcccagggtggtacagctgtagggactggattgaatacaaagaaggggtttgatgccaagatagcagcagcagtagctgaggaaacaaatctgccttttgttacggcagaaaataagtttgaggccttggctgcccatgatgcttttgttgaaactagtggagcacttaacactattgcggcttctttgatgaagattgctaatgatatacggttgttaggaagtggtccacgctgcggtcttggtgaactcattcttcctgaaaacgaaccaggaagtagtatcatgcctgggaaggttaaccctacccagtgtgaggctttgacaatggtgtgtgcccaggtcattggaaaccatgttgcagttacagtgggtggatcaaatggtcattttgagcttaatgtgttcaagccaatgactgccagttgtctcctgcattcgctgagactgcttggagattcatctgcttcctttgaaaagaattgtgtgagaggcattcaagctaatagggaaagaatttcaaaattactgcatgagtcactgatgctcgtcacatccttaaacccaaaaattggttatgacaaggcagcagcagttgccaagacagcccacaaagaggggtgtactcttaaggaagctgcattgaaactcggagtgctcagctctgaagattttgacaagcttgtggtacctgagaaaatgcttggaccgtctgattga

SEQ ID NO: 6479 - protein, 495 aa, Glycine max; identical to SEQ ID NO: 6061

SEQ ID NO: 6480 - DNA, 1485 bp, Hordeum vulgare
  CDS (1)..(1485)
atggcgatggttctgcgacgcctcgcgggcgcatcaggctcgccgtcggcggctgcactgctgctccgtccggcgctgacccgcccgatctccaccgacttccgcgaggagcgcgacacattcggccccatccgcgtacccaacgacaagttgtggggcgcgcagacacagagatcgctgcaaaattttgacattggcggcgagcgcgagcggatgcccgtgcctatcatccgcgcctttggcgtgctaaaaaagtgcgctgctaaggtgaatatggagtatggacttgatccaacaattgggaaggcaataatgcaggcggctgaggaggttgcagagggaaagttggatgatcactttccgcttgttatctggcaaactggcagtggcacacaaagcaacatgaatgccaatgaggtaattgcaaacagggcagctgagatacttggacataagcgtggtgacaagtttgtacaccctaatgatcatgtgaacaggtcacagtcctcaaatgatacatttccaactgttatgcacatagcagcagctgtagagatcaattcaaggtttatcccaagtctggagcagttgcataagtcacttcattcaaagtctgatgaatttaaagacattattaaaattgggcgtacacatacccaagatgccaccccactgactcttggtcaagagttcagtggttatgctacacaggtgaaatatggaattgaccgaattgcatgcaccttaccaaggatgtatcagcttgctcaaggtgggactgcagtcggcactggcttgaacacgaagaaaggatttgatggcaaaattgcagctgctgtggctgaggaaacagaactacctttcgtgacagcagagaacaagtttgaagctttggcagctcatgacgcttttgttgagagcagtggtgctgtgaacacaatttctgcatctcttatgaagatagcaaatgacatacgcttgctgggaagtggccctcgttgtggacttggtgaacttatcctaccagaaaatgagcctgggagcagcattatgcctggaaaggtcaatcctacccagtgtgaagctctgaccatggtttgtgctcaggttatgggtaatcatgtcggtgttacaataggtggttcaaatgggcattttgaactgaacgtttataagccaatgattgctgctggattgcttcgatcattgagattattaggggatgcatctgtatcctttgagaaaaactgtgtcaggggaatagaagcaaaccataagagaatttcacaattgttgcacgagtctttgatgttggtaacatcgttgaaccccaaaattggctatgacaatgctgcagctgttgctaagaaagctcacaaagaaggaacaacactgaaggaagctgctttaagcctcagagttttgacggaaaaggaattccatgaactcgttgttccagagaaaatgattggcccttctgattaa

SEQ ID NO: 6481 - protein, 494 aa, Hordeum vulgare
MAMVLRRLAGASGSPSAAALLLRPALTRPISTDFREERDTFGPIRVPNDKLWGAQTQRSLQNFDIGGERERMPVPIIRAFGVLKKCAAKVNMEYGLDPTIGKAIMQAAEEVAEGKLDDHFPLVIWQTGSGTQSNMNANEVIANRAAEILGHKRGDKFVHPNDHVNRSQSSNDTFPTVMHIAAAVEINSRFIPSLEQLHKSLHSKSDEFKDIIKIGRTHTQDATPLTLGQEFSGYATQVKYGIDRIACTLPRMYQLAQGGTAVGTGLNTKKGFDGKIAAAVAEETELPFVTAENKFEALAAHDAFVESSGAVNTISASLMKIANDIRLLGSGPRCGLGELILPENEPGSSIMPGKVNPTQCEALTMVCAQVMGNHVGVTIGGSNGHFELNVYKPMIAAGLLRSLRLLGDASVSFEKNCVRGIEANHKRISQLLHESLMLVTSLNPKIGYDNAAAVAKKAHKEGTTLKEAALSLRVLTEKEFHELVVPEKMIGPSD

SEQ ID NO: 6482 - DNA, 1485 bp, Triticum aestivum
  CDS (1)..(1485)
atggcgatggttctgcggcgcctcgccggcgcatcaggctcgccttcggcggctgcactgctgctccggccggcgctgacccgcccgatctccaccggcttccgcgaggagcgcgacacgttcggccccatccgcgtgcccaacgacaagttgtggggcgcgcagacacagagatcgctgcaaaatttcgacattggcggcgagcgcgagcggatgcctgtgcctatcatccgcgcctttggcgtgctaaaaaagtgcgccgctaaggtgaatatggagtatggccttgatccaacaattgggaaggcaataatgcaggcggccgaggaggttgcagagggaaagttggatgatcactttccgcttgttatctggcaaactggcagtggcacacaaagcaacatgaatgccaatgaggtaattgcaaatagggcggctgagatacttggacataagcgtggtgacaagtttgtacaccctaatgaccatgtgaacaggtcacagtcctcgaatgatacatttcccactgttatgcacatagcagcagctgtagagatcaattcaaggtttatcccaagtctggagcagttgcataagtcacttcattcaaagtctgatgagtttaaagacatcattaaaattgggcgtacacatacccaagatgccaccccactgactcttggtcaagagttcagtggttatgctacacaggtgaaatatggaattgaccgaattgcatgtaccttaccaaggatgtatcagcttgctcaaggtgggactgcagttggtactggcttgaacacgaagaaaggatttgatggcaaaattgcagctgctgtggctgaggaaacagaactacctttcgtgacagcagagaacaagtttgaagctttggcagcacatgatgcttttgttgagagcagtggtgctgtgaacacaatttctgcatctcttatgaagatagcaaatgacatacgcttgctgggaagtggccctcgttgtggacttggtgaacttatcctaccagaaaatgagcctgggagcagcattatgcctggaaaggttaatcctacccagtgtgaggctctgaccatggtttgtgctcaggttatgggcaatcatgtcggtgttacaataggtggttcaaatgggcattttgaactgaacgtttataagccaatgattgctgctggattgcttcgatcattgagattattaggggatgcatctgtatcctttgagaaaaactgtgtcaggggaatagaagcaaaccataagagaatttcacaattgttgcacgagtctttgatgttggtgacatcgttgaaccccaaaattggctatgacaatgctgcagccgttgctaagaaagctcacaaagaaggaacaacactgaaggaagctgctttaagccttggagttttgacggaaaaggaattccatgaactcgttgttccagagaaaatgattggcccttctgattaa

SEQ ID NO: 6483 - protein, 494 aa, Triticum aestivum
MAMVLRRLAGASGSPSAAALLLRPALTRPISTGFREERDTFGPIRVPNDKLWGAQTQRSLQNFDIGGERERMPVPIIRAFGVLKKCAAKVNMEYGLDPTIGKAIMQAAEEVAEGKLDDHFPLVIWQTGSGTQSNMNANEVIANRAAEILGHKRGDKFVHPNDHVNRSQSSNDTFPTVMHIAAAVEINSRFIPSLEQLHKSLHSKSDEFKDIIKIGRTHTQDATPLTLGQEFSGYATQVKYGIDRIACTLPRMYQLAQGGTAVGTGLNTKKGFDGKIAAAVAEETELPFVTAENKFEALAAHDAFVESSGAVNTISASLMKIANDIRLLGSGPRCGLGELILPENEPGSSIMPGKVNPTQCEALTMVCAQVMGNHVGVTIGGSNGHFELNVYKPMIAAGLLRSLRLLGDASVSFEKNCVRGIEANHKRISQLLHESLMLVTSLNPKIGYDNAAAVAKKAHKEGTTLKEAALSLGVLTEKEFHELVVPEKMIGPSD

SEQ ID NO: 6484 - DNA, 1497 bp, Zea mays
  CDS (1)..(1497)
atggcgatggctctgcgccgccttgcgggcgtgtccggatcgccgtcggcctcctctgccgcggccacggtgctactccggtcggcgctgacccgcccgatctccaccggcttccgcgaggagcgcgacaccttcggtcccatccaagtccccaacgacaagctgtggggcgcgcagacgcagagatcgctgcagaactttgacattggcggggagcgtgagaggatgcccgttcccatcatccgtgcctttggcgtgctaaaaaagtgcgccgctaaggtgaatatggactatggccttgatccaacaatagggaaggccataatacaggcagctgaggaggtcgcagagggaaagttggatgatcacttcccacttgttatctggcaaactggcagtggcacacaaagcaacatgaatgccaatgaggtaattgcaaatagggcatctgagatccttggacacaagcgcggtgagaagtttgtgcacccaaatgaccatgtaaataggtcacaatcttcaaatgatacatttcccactgtaatgcatatagcgacggccgttgagatacattcgaggtttatcccaagtttgcaacagttgcatgattcacttcattcgaaaactattgagtttaaagacataattaaaattggacgtacacatacccaagatgccaccccattgactcttggccaagaattcagtggctacactacacaggtcaaatatggaattgaccgcattaattgtacattacctcggatgtaccagcttgctcaaggtggaactgcagttggaactggcttgaacaccaagaaaggatttgatgccaaaatagctgctgcagtggctgaggaaacaaacctaccctttgtgacagcagagaacaagtttgaagctttggcagcacatgacgcttttgttgagagcagtggtgccgtaaatacaatttctgcatctcttatgaagatagcaaacgacatacgtttgctaggaagtggtcctcggtgtggtcttggtgaactaatcctaccagaaaatgagcctgggagcagcattatgcctgggaaagttaatccaacccagtgtgaggctctgacaatggtttgtgcacaggttatgggtaatcatgttggtgttacaattggtggtgccaatgggcattttgaactgaatgtttttaagccaatgatcgcagccggattacttcgatcattgaggttgttaggggatgcatccgtgtcctttgagaaaaattgtgtcaggggaattcaagcaaaccacaagagaatttcacaacttttgcatgagtctctgatgttagtgacatctttgaaccctaaaattggctatgacaatgctgcagctgttgctaagaaagcccacaaagaaggaaccacgttgaaggaagctgcattagaccttggagtattaacggagcaagaattccatgagcttgtcgtcccggagaaaatgattggtccttctgattga

SEQ ID NO: 6485 - protein, 498 aa, Zea mays; identical to SEQ ID NO: 6069

SEQ ID NO: 6486 - DNA, 1497 bp, Zea mays
  CDS (1)..(1497)
atggcgatggctctgcgccgccttgcgggcgtgtccggatcgccgtcggcctcctctgccgcggccacggtgctactccggtcggcgctgacccgcccgatctccaccggcttccgcgaggagcgcgacaccttcggtcccatccaagtccccaacgacaagctgtggggcgcgcagacgcagagatcgctgcagaactttgacattggcggggagcgtgagaggatgcccgttcccatcatccgtgcctttggcgtgctaaaaaagtgcgccgctaaggtgaatatggactatggccttgatccaacaatagggaaggccataatacaggcagctgaggaggtcgcagagggaaagttggatgatcacttcccacttgttatctggcaaactggcagtggcacacaaagcaacatgaatgccaatgaggtaattgcaaatagggcatctgagatccttggacacaagcgcggtgagaagtttgtgcacccaaatgaccatgtgaataggtcacaatcttcaaatgatacatttcccactgtaatgcatatagcgacggccgttgagatacattcgaggtttatcccaagtttgcaacagttgcatgattcacttcattcgaaaactattgagtttaaagacataattaaaattggacgtacacatacccaagatgccaccccattgactcttggccaagaattcagtggctacactacacaggtcaaatatggaattgaccgcattaattgtacattacctcggatgtaccagcttgctcaaggtggaactgcagttggaactggcttgaacaccaagaaaggatttgatgccaaaatagctgctgcagtggctgaggaaacaaacctaccctttgtgacagcagagaacaagtttgaagctttggcagcacatgacgcttttgttgagagcagtggtgccgtaaatacaatttctgcatctcttatgaagatagcaaacgacatacgtttgctaggaagtggtcctcggtgtggtcttggtgaactaatcctaccagaaaatgagcctgggagcagcattatgcctgggaaagttaatccaacccagtgtgaggctctgacaatggtttgtgcacaggtcatgggtaatcatgttggtgttacagttggtggtgccaatgggcattttgaactgaatgtttttaagccaatgatcgcagccggattacttcgatcgttgaggttgttaggggatgcatccgtgtccttcgagaaaaattgtgtcaggggaattcaagcaaaccacaagagaatttcacaacttttgcatgagtctctgatgttagtgacatctttgaaccctaaaattggctatgacaatgctgcagctgttgctaagaaagcccacaaagaaggaaccacgttgaaggaggctgcattagaccttggagtattaacggagcaagaattccatgagcttgtcgttccagagaaaatgattggtccttctgattga

SEQ ID NO: 6487 - protein, 498 aa, Zea mays
MAMALRRLAGVSGSPSASSAAATVLLRSALTRPISTGFREERDTFGPIQVPNDKLWGAQTQRSLQNFDIGGERERMPVPIIRAFGVLKKCAAKVNMDYGLDPTIGKAIIQAAEEVAEGKLDDHFPLVIWQTGSGTQSNMNANEVIANRASEILGHKRGEKFVHPNDHVNRSQSSNDTFPTVMHIATAVEIHSRFIPSLQQLHDSLHSKTIEFKDIIKIGRTHTQDATPLTLGQEFSGYTTQVKYGIDRINCTLPRMYQLAQGGTAVGTGLNTKKGFDAKIAAAVAEETNLPFVTAENKFEALAAHDAFVESSGAVNTISASLMKIANDIRLLGSGPRCGLGELILPENEPGSSIMPGKVNPTQCEALTMVCAQVMGNHVGVTVGGANGHFELNVFKPMIAAGLLRSLRLLGDASVSFEKNCVRGIQANHKRISQLLHESLMLVTSLNPKIGYDNAAAVAKKAHKEGTTLKEAALDLGVLTEQEFHELVVPEKMIGPSD

SEQ ID NO: 6488 - DNA, 26 bp, Artificial sequence
  primer
atgtgtttaaagcaaatcattggcag

SEQ ID NO: 6489 - DNA, 25 bp, Artificial sequence
  primer
ttactgttcgctttcatcagtatag

SEQ ID NO: 6490 - protein, 469 aa, Artificial sequence
  consensus sequence
  Variant (2)..(2): Xaa in position 2 is any amino acid
  Variant (4)..(4): Xaa in position 4 is any amino acid
  Variant (6)..(6): Xaa in position 6 is any amino acid
  Variant (7)..(7): Xaa in position 7 is any or no amino acid
  Variant (9)..(12): Xaa in position 9 to 12 is any amino acid
  Variant (14)..(15): Xaa in position 14 to 15 is any amino acid
  Variant (16)..(18): Xaa in position 16 to 18 is any or no amino acid
  Variant (20)..(21): Xaa in position 20 to 21 is any amino acid
  Variant (23)..(23): Xaa in position 23 is any amino acid
  Variant (25)..(27): Xaa in position 25 to 27 is any amino acid
  Variant (30)..(30): Xaa in position 30 is any amino acid
  Variant (32)..(44): Xaa in position 32 to 44 is any amino acid
  Variant (45)..(49): Xaa in position 45 to 49 is any or no amino acid
  Variant (51)..(53): Xaa in position 51 to 53 is any amino acid
  Variant (55)..(56): Xaa in position 55 to 56 is any amino acid
  Variant (58)..(60): Xaa in position 58 to 60 is any amino acid
  Variant (62)..(69): Xaa in position 62 to 69 is any amino acid
  Variant (70)..(78): Xaa in position 70 to 78 is any or no amino acid
  Variant (80)..(81): Xaa in position 80 to 81 is any amino acid
  Variant (83)..(92): Xaa in position 83 to 92 is any amino acid
  Variant (93)..(97): Xaa in position 93 to 97 is any or no amino acid
  Variant (99)..(103): Xaa in position 99 to 103 is any amino acid
  Variant (105)..(105): Xaa in position 105 is any amino acid
  Variant (107)..(107): Xaa in position 107 is any amino acid
  Variant (110)..(111): Xaa in position 110 to 111 is any amino acid
  Variant (115)..(115): Xaa in position 115 is any amino acid
  Variant (119)..(119): Xaa in position 119 is any amino acid
  Variant (122)..(122): Xaa in position 122 is any amino acid
  Variant (124)..(124): Xaa in position 124 is any amino acid
  Variant (125)..(127): Xaa in position 125 to 127 is any or no amino acid
  Variant (129)..(130): Xaa in position 129 to 130 is any amino acid
  Variant (131)..(131): Xaa in position 131 is any or no amino acid
  Variant (133)..(134): Xaa in position 133 to 134 is any amino acid
  Variant (135)..(139): Xaa in position 135 to 139 is any or no amino acid
  Variant (142)..(143): Xaa in position 142 to 143 is any amino acid
  Variant (146)..(147): Xaa in position 146 to 147 is any amino acid
  Variant (150)..(150): Xaa in position 150 is any amino acid
  Variant (153)..(154): Xaa in position 153 to 154 is any amino acid
  Variant (157)..(168): Xaa in position 157 to 168 is any amino acid
  Variant (169)..(169): Xaa in position 169 is any or no amino acid
  Variant (171)..(176): Xaa in position 171 to 176 is any amino acid
  Variant (178)..(183): Xaa in position 178 to 183 is any amino acid
  Variant (185)..(187): Xaa in position 185 to 187 is any amino acid
  Variant (189)..(192): Xaa in position 189 to 192 is any amino acid
  Variant (193)..(194): Xaa in position 193 to 194 is any or no amino acid
  Variant (196)..(196): Xaa in position 196 is any amino acid
  Variant (200)..(200): Xaa in position 200 is any amino acid
  Variant (202)..(202): Xaa in position 202 is any amino acid
  Variant (205)..(205): Xaa in position 205 is any amino acid
  Variant (207)..(207): Xaa in position 207 is any amino acid
  Variant (209)..(209): Xaa in position 209 is any amino acid
  Variant (213)..(239): Xaa in position 213 to 239 is any amino acid
  Variant (240)..(240): Xaa in position 240 is any or no amino acid
  Variant (242)..(242): Xaa in position 242 is any amino acid
  Variant (245)..(245): Xaa in position 245 is any amino acid
  Variant (249)..(249): Xaa in position 249 is any amino acid
  Variant (251)..(272): Xaa in position 251 to 272 is any amino acid
  Variant (273)..(280): Xaa in position 273 to 280 is any or no amino acid
  Variant (282)..(294): Xaa in position 282 to 294 is any amino acid
  Variant (296)..(296): Xaa in position 296 is any amino acid
  Variant (297)..(298): Xaa in position 297 to 298 is any or no amino acid
  Variant (300)..(301): Xaa in position 300 to 301 is any amino acid
  Variant (303)..(303): Xaa in position 303 is any amino acid
  Variant (306)..(306): Xaa in position 306 is any amino acid
  Variant (309)..(309): Xaa in position 309 is any amino acid
  Variant (311)..(311): Xaa in position 311 is any amino acid
  Variant (313)..(313): Xaa in position 313 is any amino acid
  Variant (318)..(318): Xaa in position 318 is any amino acid
  Variant (320)..(321): Xaa in position 320 to 321 is any amino acid
  Variant (323)..(324): Xaa in position 323 to 324 is any amino acid
  Variant (327)..(330): Xaa in position 327 to 330 is any amino acid
  Variant (331)..(332): Xaa in position 331 to 332 is any or no amino acid
  Variant (344)..(346): Xaa in position 344 to 346 is any amino acid
  Variant (348)..(355): Xaa in position 348 to 355 is any amino acid
  Variant (357)..(357): Xaa in position 357 is any amino acid
  Variant (360)..(368): Xaa in position 360 to 368 is any amino acid
  Variant (369)..(369): Xaa in position 369 is any or no amino acid
  Variant (371)..(373): Xaa in position 371 to 373 is any amino acid
  Variant (374)..(374): Xaa in position 374 is any or no amino acid
  Variant (377)..(379): Xaa in position 377 to 379 is any amino acid
  Variant (381)..(388): Xaa in position 381 to 388 is any amino acid
  Variant (390)..(392): Xaa in position 390 to 392 is any amino acid
  Variant (394)..(402): Xaa in position 394 to 402 is any amino acid
  Variant (403)..(423): Xaa in position 403 to 423 is any or no amino acid
  Variant (425)..(426): Xaa in position 425 to 426 is any amino acid
  Variant (429)..(430): Xaa in position 429 to 430 is any amino acid
  Variant (432)..(441): Xaa in position 432 to 441 is any amino acid
  Variant (443)..(445): Xaa in position 443 to 445 is any amino acid
  Variant (448)..(448): Xaa in position 448 is any amino acid
  Variant (452)..(452): Xaa in position 452 is any amino acid
  Variant (456)..(462): Xaa in position 456 to 462 is any amino acid
  Variant (463)..(464): Xaa in position 463 to 464 is any or no amino acid
  Variant (466)..(467): Xaa in position 466 to 467 is any amino acid
  Variant (468)..(468): Xaa in position 468 is any or no amino acid
RXEXDXXGXXXXPXXXXXGXXTXRXXXNFXIXXXXXXXXXXXXXXXXXXKXXXAXXNXXXGXXXXXXXXXXXXXXXXXIXXAXXXXXXXXXXXXXXXFXXXXXQXGXGTXXNMNXNEVXANXAXXXXGXXXGXXXXXXXPNXXVNXXQSXNDXXPTXXXXXXXXXXXXXLXXXXXXLXXXXXXKXXXFXXXXXXKXGRTXLXDAXPXTXGQEXXXXXXXXXXXXXXXXXXXXXXXXXXXXGXTAXGTGXNXXXXXXXXXXXXXXXXXXXXXXXXXXXXXXAXXXXXXXXXXXXXLXXXAXXLXKIXNDXRXLXSGPRXGXXEXXLPXXXXXXGSSIMPGKVNPXXXEXXXXXXXXVXGNXXXXXXXXXXGXXXXLNXXXPXXXXXXXXSXXXLXXXXXXXXXXXXXXXXXXXXXXXXXXXXXXCXXGIXXNXXXXXXXXXXSXXXVTXLNPXIGYXXXXXXXXXAXXXG

SEQ ID NO: 6491 - protein, 25 aa, Artificial sequence
  protein pattern
  Variant (5)..(6): Xaa in position 5 to 6 is any amino acid
  Variant (7)..(7): Xaa in position 7 is any or no amino acid
  Variant (11)..(11): Xaa in position 11 is Thr or Val
  Variant (12)..(12): Xaa in position 12 is any amino acid
  Variant (13)..(13): Xaa in position 13 is Ala, Cys or Pro
  Variant (15)..(19): Xaa in position 15 to 19 is any amino acid
  Variant (20)..(20): Xaa in position 20 is Ala, Cys or Ser
  Variant (21)..(22): Xaa in position 21 to 22 is any amino acid
  Variant (23)..(23): Xaa in position 23 is Ile or Val
  Variant (24)..(24): Xaa in position 24 is any amino acid
  Variant (25)..(25): Xaa in position 25 is Ala, Gly or Ser
SSIMXXXVNPXXXEXXXXXXXXXXX

SEQ ID NO: 6492 - protein, 17 aa, Artificial sequence
  protein pattern
  Variant (3)..(3): Xaa in position 3 is Asp, Glu, Asn, Ser or Thr
  Variant (4)..(4): Xaa in position 4 is any amino acid
  Variant (7)..(7): Xaa in position 7 is any amino acid
  Variant (8)..(8): Xaa in position 8 is Ala, Cys, Gly or Ser
  Variant (11)..(11): Xaa in position 11 is Gln, Ser or Thr
  Variant (13)..(13): Xaa in position 13 is Cys or Asp
  Variant (14)..(15): Xaa in position 14 to 15 is any amino acid
  Variant (16)..(16): Xaa in position 16 is Pro or Ser
  Variant (17)..(17): Xaa in position 17 is Ala, Ser or Thr
PNXXVNXXQSXNXXXXX

SEQ ID NO: 6493 - protein, 26 aa, Artificial sequence
  protein pattern
  Variant (2)..(2): Xaa in position 2 is any amino acid
  Variant (3)..(6): Xaa in position 3 to 6 is any or no amino acid
  Variant (10)..(12): Xaa in position 10 to 12 is any amino acid
  Variant (15)..(15): Xaa in position 15 is any amino acid
  Variant (17)..(17): Xaa in position 17 is Ile, Leu, Met or Val
  Variant (18)..(18): Xaa in position 18 is any amino acid
  Variant (19)..(19): Xaa in position 19 is Phe, Leu or Val
  Variant (23)..(24): Xaa in position 23 to 24 is any amino acid
  Variant (25)..(25): Xaa in position 25 is Ala, Gly, Ser or Thr
  Variant (26)..(26): Xaa in position 26 is Phe, Trp or Tyr
KXXXXXGRTXXXDAXPXXXGQEXXXX

SEQ ID NO: 6494 - protein, 21 aa, Artificial sequence
  protein pattern
  Variant (2)..(2): Xaa in position 2 is Ala, Gly or Thr
  Variant (4)..(4): Xaa in position 4 is Ala or Ser
  Variant (7)..(7): Xaa in position 7 is any or no amino acid
  Variant (9)..(9): Xaa in position 9 is any or no amino acid
  Variant (13)..(13): Xaa in position 13 is any amino acid
  Variant (17)..(17): Xaa in position 17 is Ile, Leu or Val
  Variant (18)..(18): Xaa in position 18 is Ala, Cys, Ser or Thr
  Variant (19)..(20): Xaa in position 19 to 20 is any amino acid
  Variant (21)..(21): Xaa in position 21 is Ala, Gly or Leu
QXGXGTXSXNMNXNEVXXXXX

SEQ ID NO: 6495 - protein, 34 aa, Artificial sequence
  protein pattern
  Variant (2)..(3): Xaa in position 2 to 3 is any amino acid
  Variant (4)..(11): Xaa in position 4 to 11 is any or no amino acid
  Variant (14)..(14): Xaa in position 14 is Ile, Leu or Val
  Variant (16)..(16): Xaa in position 16 is any amino acid
  Variant (17)..(17): Xaa in position 17 is Leu or Met
  Variant (18)..(18): Xaa in position 18 is Ala, Gly or Ser
  Variant (22)..(22): Xaa in position 22 is any amino acid
  Variant (23)..(23): Xaa in position 23 is Ala, Cys, Gly, Ser, Thr or Val
  Variant (25)..(26): Xaa in position 25 to 26 is any amino acid
  Variant (28)..(28): Xaa in position 28 is Ile, Leu or Val
  Variant (29)..(29): Xaa in position 29 is any amino acid
  Variant (30)..(30): Xaa in position 30 is Ile or Leu
  Variant (32)..(33): Xaa in position 32 to 33 is any amino acid
  Variant (34)..(34): Xaa in position 34 is Ala, Glu or Gln
KXXXXXXXXXXNDXRXXXSGPXXGXXEXXXPXXX

SEQ ID NO: 6496 - protein, 35 aa, Artificial sequence
  protein pattern
  Variant (2)..(7): Xaa in position 2 to 7 is any amino acid
  Variant (8)..(14): Xaa in position 8 to 14 is any or no amino acid
  Variant (16)..(16): Xaa in position 16 is Ile, Leu, Pro or Val
  Variant (17)..(17): Xaa in position 17 is any amino acid
  Variant (18)..(18): Xaa in position 18 is Ile, Leu or Val
  Variant (19)..(19): Xaa in position 19 is Ala, Ile or Val
  Variant (21)..(21): Xaa in position 21 is any amino acid
  Variant (22)..(22): Xaa in position 22 is Ile, Leu or Val
  Variant (23)..(23): Xaa in position 23 is Ala, Cys, Asn, Ser, Thr or Val
  Variant (24)..(25): Xaa in position 24 to 25 is any amino acid
  Variant (26)..(26): Xaa in position 26 is Ile, Leu or Val
  Variant (28)..(30): Xaa in position 28 to 30 is any amino acid
  Variant (31)..(31): Xaa in position 31 is Ala, Cys, Gly, Ser or Thr
  Variant (32)..(32): Xaa in position 32 is Ala, Cys, Asp, Ser or Thr
  Variant (33)..(34): Xaa in position 33 to 34 is any amino acid
  Variant (35)..(35): Xaa in position 35 is Ala, Gly or Val
IXXXXXXXXXXXXXSXXXXTXXXXXXGXXXXXXXX

SEQ ID NO: 6497 - protein, 14 aa, Artificial sequence
  protein pattern
  Variant (2)..(2): Xaa in position 2 is Ala, Ile or Val
  Variant (3)..(3): Xaa in position 3 is any amino acid
  Variant (5)..(5): Xaa in position 5 is any amino acid
  Variant (7)..(7): Xaa in position 7 is Ala or Ser
  Variant (8)..(10): Xaa in position 8 to 10 is any amino acid
  Variant (12)..(12): Xaa in position 12 is any amino acid
  Variant (13)..(13): Xaa in position 13 is Ile, Leu or Val
  Variant (14)..(14): Xaa in position 14 is Ala, Gly, Ser or Thr
GXXTXRXXXXFXXX

SEQ ID NO: 6498 - protein, 11 aa, Artificial sequence
  protein pattern
  Variant (2)..(2): Xaa in position 2 is Ala or Gly
  Variant (5)..(5): Xaa in position 5 is Ile or Val
  Variant (9)..(9): Xaa in position 9 is Ile, Leu or Val
  Variant (11)..(11): Xaa in position 11 is Ala, Cys, Ser, Thr or Val
GXTAXGTGXNX

SEQ ID NO: 6499 - protein, 27 aa, Artificial sequence
  protein pattern
  Variant (2)..(2): Xaa in position 2 is any amino acid
  Variant (3)..(4): Xaa in position 3 to 4 is any or no amino acid
  Variant (6)..(6): Xaa in position 6 is any amino acid
  Variant (7)..(7): Xaa in position 7 is Phe, Ile, Leu or Met
  Variant (8)..(8): Xaa in position 8 is Asp, Glu or Gln
  Variant (11)..(13): Xaa in position 11 to 13 is any amino acid
  Variant (15)..(15): Xaa in position 15 is any amino acid
  Variant (16)..(16): Xaa in position 16 is Ile, Leu, Met or Val
  Variant (17)..(22): Xaa in position 17 to 22 is any amino acid
  Variant (23)..(23): Xaa in position 23 is Gly, Ser or Thr
  Variant (24)..(26): Xaa in position 24 to 26 is any amino acid
  Variant (27)..(27): Xaa in position 27 is Ile, Leu, Met or Val
AXXXGXXXLNXXXPXXXXXXXXXXXXX

SEQ ID NO: 6500 - DNA, 1233 bp, Escherichia coli K12
  CDS (1)..(1233): transl_table=11
atgtcgtcatttgattacctgaaaactgccatcaagcaacagggctgcacgctacagcaggtagctgatgccagcggtatgaccaaagggtatttaagccagttactgaatgccaaaatcaaaagccccagcgcgcaaaagctggaggcgttgcaccgttttttggggcttgagtttccccggcagaagaaaacgatcggtgtcgtattcggtaagttctacccactgcataccggacatatctaccttatccagcgcgcctgtagccaggttgacgagctgcatatcattatgggttttgacgatacccgtgaccgcgcgttgttcgaagacagtgccatgtcgcagcagccgaccgtgccggatcgtctgcgttggttattgcaaacttttaaatatcagaaaaatattcgcattcatgctttcaacgaagagggcatggagccgtatccgcacggctgggatgtgtggagcaacggcatcaaaaagtttatggctgaaaaagggatccagccggatctgatctacacctcggaagaagccgatgcgccacagtatatggaacatctggggatcgagacggtgctggtcgatccgaaacgtacctttatgagtatcagcggtgcgcagatccgcgaaaacccgttccgctactgggaatatattcctaccgaagtgaagccgttttttgtgcgtaccgtggcgatccttggcggcgagtcgagcggtaaatccaccctggtaaacaaacttgccaatatcttcaacaccaccagtgcgtgggaatatggccgcgattatgtcttttcacacctcggcggtgatgagatcgcattgcagtattctgactacgataaaatcgcgctgggccacgctcaatacattgattttgcggtgaaatatgccaataaagtggcatttatcgataccgattttgtcaccactcaggcgttctgcaaaaagtacgaagggcgggaacatccgttcgtgcaggcgctgattgatgaataccgtttcgatctggtgatcctgctggagaacaacacgccgtgggtggcggatggtttacgcagcctcggcagttcggtggatcgcaaagagttccagaacttgctggtggagatgctcgaagagaacaatatcgaatttgtgcgggttgaagaggaagattacgacagtcgtttcctgcgctgcgtggaactggtgcgggagatgatgggggagcagagataa

SEQ ID NO: 6501 - protein, 410 aa, Escherichia coli K12
MSSFDYLKTAIKQQGCTLQQVADASGMTKGYLSQLLNAKIKSPSAQKLEALHRFLGLEFPRQKKTIGVVFGKFYPLHTGHIYLIQRACSQVDELHIIMGFDDTRDRALFEDSAMSQQPTVPDRLRWLLQTFKYQKNIRIHAFNEEGMEPYPHGWDVWSNGIKKFMAEKGIQPDLIYTSEEADAPQYMEHLGIETVLVDPKRTFMSISGAQIRENPFRYWEYIPTEVKPFFVRTVAILGGESSGKSTLVNKLANIFNTTSAWEYGRDYVFSHLGGDEIALQYSDYDKIALGHAQYIDFAVKYANKVAFIDTDFVTTQAFCKKYEGREHPFVQALIDEYRFDLVILLENNTPWVADGLRSLGSSVDRKEFQNLLVEMLEENNIEFVRVEEEDYDSRFLRCVELVREMMGEQR

SEQ ID NO: 6502 - DNA, 1272 bp, Actinobacillus actinomycetemcomitans
  CDS (1)..(1272)
atgtcagcattccaatatttacaagaaaaacgtaaaaaattgaatctcaaagtaaatgatgtttgccaaagagcgaatattacccgtgcttatttcaatcaattagtcagcggaaaaattaaaagcccgagtgcgacaaaactgactgcgctacatcgtgtgctacaaattgatgcgccgaataataaaaaagtcggtgtgattttcggtaaattttatccggttcacaccgggcatattaatatgatctatgaagccttcagtaaagtggatgaagtgcatgtgattgtttgtagcgatacggaacgggatttaaaactgttttacgacagtaaaatgaagcgtatgcccaccgtacaagatcgtttgcgttggatgcaacagatctttaaatatcagaaaaatcaaatttttatccaccacttaatcgaggacggcttaccaaattacccgaacggctggcaagcgtgggctgaacgggttaaagacttatttaaagaaaaaggatttacgccaagtatcgtcttcagtagcgaaattcaagacaaagctccttatgaaaaatatctcaatttggacgtatctttagtcgatcccgaacgcgtattttttaatgtgtccgctacaaaaattcgtaacgaaccattccattattggaagtttatcccaaaagaagtacgtccgtttttcgcaaaaaccattgccatcttaggtggtgagagcagcggtaaaaccgtattggtgaacaaattggcaacggtcttcaacaccacttccgcttgggaatacgggcgcgaattcgtatttgaaaaactgggcggtgacgaacaggccatgcaatattccgattatcctcaaatggcgttaggacatcaacgttacatcgattatgctgtgcgacacgcccacaaagtcgccattattgatacggatttcatcaccacacaggcattttgtattcaatacgaaggcaaagcacacccgtttttggattccatgattaaagaatatccttttgatgtcaccattttgttaaacaataacacgcaatgggttgatgacggtttgcgtagcctgggcaatcaaaaacagcgacaacgtttccaacagttactcaaaaaattgttagataaatacaatgtcccatacattgaaattgaatcgccaagttatttggagcgctataatcgggtaaaagaaattgtggaaaaaatcctcaatgaagaagaactgcctgaattaagcagcgatcacggcaattctattttttaa

SEQ ID NO: 6503 - protein, 423 aa, Actinobacillus actinomycetemcomitans
MSAFQYLQEKRKKLNLKVNDVCQRANITRAYFNQLVSGKIKSPSATKLTALHRVLQIDAPNNKKVGVIFGKFYPVHTGHINMIYEAFSKVDEVHVIVCSDTERDLKLFYDSKMKRMPTVQDRLRWMQQIFKYQKNQIFIHHLIEDGLPNYPNGWQAWAERVKDLFKEKGFTPSIVFSSEIQDKAPYEKYLNLDVSLVDPERVFFNVSATKIRNEPFHYWKFIPKEVRPFFAKTIAILGGESSGKTVLVNKLATVFNTTSAWEYGREFVFEKLGGDEQAMQYSDYPQMALGHQRYIDYAVRHAHKVAIIDTDFITTQAFCIQYEGKAHPFLDSMIKEYPFDVTILLNNNTQWVDDGLRSLGNQKQRQRFQQLLKKLLDKYNVPYIEIESPSYLERYNRVKEIVEKILNEEELPELSSDHGNSIF

SEQ ID NO: 6504 - DNA, 1224 bp, Haemophilus influenzae
  CDS (1)..(1224)
atgcgagctaagtataacgcaaaatacctaggcactaaatcagaacgtgaaaaatattttcatttagcctacaataaacacactcaattcttacgctatcaagagcagattatgtcaaaaacaaaagagaaaaaagtcggtgtcattttcgggaaattttatcctgtacacacaggtcatataaatatgatttatgaagcgttcagtaaagtcgatgaactacacgttatcgtgtgtagtgacactgtgcgcgatttgaaattattttacgatagtaaaatgaaacgcatgccaaccgtgcaagatcgtttgcgttggatgcagcaaattttcaaatatcaaaaaaatcagatttttattcatcatttggttgaagacggtattccgagttatccaaacggctggcaatcttggagtgaagcagttaaaaccctatttcatgaaaaacattttgagccttcaatcgtatttagtagcgaacctcaagataaagcgccttacgagaaatacttaggtttagaagtttcgttagtcgatcctgaccgcactttctttaatgtgtccgccaccaaaattcgcaccactccattccaatattggaagtttattccgaaagaagctcgtcctttctttgccaaaacggtggcgattttagggggagaaagcagtggtaaaagcgtgctagttaataagttagccgccgtatttaataccacttctgcgtgggaatacgggcgtgaatttgtatttgaaaagctcggtggcgacgagcaagcgatgcaatattctgactatccgcaaatggcgcttggtcatcaacgatacattgattatgccgtgcgccattctcataaaattgcatttattgatacggatttcatcaccacgcaagcattctgcattcaatatgaaggaaaagcccatccatttttagactcaatgattaaagaatatcccttcgatgtcactattttacttaaaaacaatactgaatgggtggatgatggcttgcgtagcttaggctcacaaaaacaacgccaacaatttcaacaactactcaaaaaactgttagataaatataaagttccttatatagagattgaatcaccaagttatcttgatcgctataaccaagttaaagcagtcattgagaaagtgttaaatgaagaggaaatcagtgaattacaaaacacaacctttcctataaaagggacatctcaatga

SEQ ID NO: 6505 - protein, 407 aa, Haemophilus influenzae
MRAKYNAKYLGTKSEREKYFHLAYNKHTQFLRYQEQIMSKTKEKKVGVIFGKFYPVHTGHINMIYEAFSKVDELHVIVCSDTVRDLKLFYDSKMKRMPTVQDRLRWMQQIFKYQKNQIFIHHLVEDGIPSYPNGWQSWSEAVKTLFHEKHFEPSIVFSSEPQDKAPYEKYLGLEVSLVDPDRTFFNVSATKIRTTPFQYWKFIPKEARPFFAKTVAILGGESSGKSVLVNKLAAVFNTTSAWEYGREFVFEKLGGDEQAMQYSDYPQMALGHQRYIDYAVRHSHKIAFIDTDFITTQAFCIQYEGKAHPFLDSMIKEYPFDVTILLKNNTEWVDDGLRSLGSQKQRQQFQQLLKKLLDKYKVPYIEIESPSYLDRYNQVKAVIEKVLNEEEISELQNTTFPIKGTSQ

SEQ ID NO: 6506 - DNA, 1380 bp, Escherichia coli
  CDS (27)..(1340)
  misc_feature (882)..(882): n is a, g, c or t
  misc_feature (892)..(892): n is a, g, c or t
taacaatttcacacaggaaacagaccatgtcgtactaccatcaccatcaccatcacgattacgatatcccaacgaccgaaaacctgtattttcagggcgccatgacatcgttcgactatctcaaaaccgcgattaagcagcaaggttgcactctgcaacaggtggctgacgccagcggtatgaccaagggatatctgagtcagttacttaacgccaaaatcaaaagccccagcgcgcaaaaactggaggcgctacaccgttttctcgggctggagtttccccgccgacagaaaaacattggcgtggtgttcggtaaattttatccattgcataccggacacatctacttgatccagcgcgcctgtagccaggtggatgagttgcacatcattatgggatatgacgatacgcgcgaccgcgggctgtttgaggatagcgccatgtcgcagcagcccaccgtgtcggatcgcctgcgctggttattgcaaaccttcaaataccaaaaaaatattcgcatccacgcctttaatgaagaggggatggagccttatccgcatggctgggacgtctggagcaacggcattaaagcgtttatggcagagaagggaatacagccgagctggatctacacttccgaagaggctgatgcgccgcagtatcttgagcatttagggattgagacggtgctggtcgatcctgaacgcacgtttatgaatatcagtggggcgcaaatccgcgaaaatccgtttcgttactgggaatatattcctaccgaagtgaaaccgtttttcgtgcgtaccgtcgcgattctgggcggggaatcaagcggcaagtctacgctggtcaataagctcgccaatatttttaataccaccagcgccntggaatatgngcgcgactatgtcttttcgcatctgggcggcgatgagatggcgttacagtattccgactacgataaaattgcgctggaccatgcgcgatatattgatttcgcagtgaaatatgcgaataaagtggcgtttatcgataccgatttcgtcaccacccaggcattttgcaaaaaatacgaaggacgcgagcatccctttgtccaggcgctgatcgacgagtatcgcttcgacctggtgattttgctggagaataatacgccgtgggtagctgacggactgcgaagcctgggcagttcagtggatcgcaaagcgttccagaacctgctggtcgagatgctgaaagagaacaacattgagttcgttcacgttaaagaggctgattacgatggtcgctttttgcgctgtgtggaactggtgaaagagatgatgggcgagcagggctcgagttaagtcgacgagctcaactagtgcggccgctttcgaatctaga

SEQ ID NO: 6507 - protein, 437 aa, Escherichia coli
  misc_feature (286)..(286): The Xaa at location 286 stands for Leu, Met, or Val.
  misc_feature (289)..(289): The Xaa at location 289 stands for Ala, Glu, Gly, or Val.
MSYYHHHHHHDYDIPTTENLYFQGAMTSFDYLKTAIKQQGCTLQQVADASGMTKGYLSQLLNAKIKSPSAQKLEALHRFLGLEFPRRQKNIGVVFGKFYPLHTGHIYLIQRACSQVDELHIIMGYDDTRDRGLFEDSAMSQQPTVSDRLRWLLQTFKYQKNIRIHAFNEEGMEPYPHGWDVWSNGIKAFMAEKGIQPSWIYTSEEADAPQYLEHLGIETVLVDPERTFMNISGAQIRENPFRYWEYIPTEVKPFFVRTVAILGGESSGKSTLVNKLANIFNTTSAXEYXRDYVFSHLGGDEMALQYSDYDKIALDHARYIDFAVKYANKVAFIDTDFVTTQAFCKKYEGREHPFVQALIDEYRFDLVILLENNTPWVADGLRSLGSSVDRKAFQNLLVEMLKENNIEFVHVKEADYDGRFLRCVELVKEMMGEQGSS

SEQ ID NO: 6508 - DNA, 1287 bp, Pasteurella multocida subsp. multocida str. Pm70
  CDS (1)..(1287): transl_table=11
atgtccacgtttgcctacttacaacaaaagcgtaaacaactgaatttaaaagttaatgagatctgtgcacaagccaatattacacgtgcgtattttaatcaactcgtgagtggaaaaatcaaaaatccaagcgcaacaaagctcagtgcattacataaagtgttgcagatcaccgaaccgaataataagaaagtcggtgtgatttttggcaaattttatcctgtccataccggtcatattaatatgatctatgaagcctttagtaaagtggatgaaatacacgtcattgtctgtagtgatacagaacgtgacttaaaactcttttatgacagcaaaatgaaacgtatgccgacagtgcaagatcgcttacgttggatgcaacagatttttaaataccaaaaaaaccagatttttattcatcatcttgttgaagacggaattccaagctacccaaatggttgggaagcgtgggcgttgcaagtcaagaacctctttaaagaaaaacatttcaatccaaccgtagttttcagtagcgaagtgcaagataaagcaccttatgaaaaataccttggtttagaagtttccttagtcgatcctgagcgacaattttttaatgtctctgcgacaaaaatccgcaataacccatttcactattggaaatttatcccaaaagaagtacgcccgttctttgccaaaactatcgctattttaggaggggaaagcagtggtaaaactgtactggtcaataaattagccacagtattcaataccacgtctgcctgggaatatggacgcgagtttgttttcgagaaattagggggagatgaacaagcgatgcaatattctgattacccacaaatggcactggggcaccaacgctatattgattatgcggtacgtcatgcacataaagtggcgattattgatacagatttcatcaccacacaagctttttgtattcaatacgaaggaaaagcgcatcctttcttagattccatgatcaaagaatatccattcgatgtcacaattttattaaataacaacactaaatgggtggatgatggcttacgtagtttaggtaatcataaacaacgccaacgttttcaactcttactaaaaaaattactcgataaatacaatgtaccttatattgaaattgaatcgccaagttatttagaacgttataatcaggtcaaacagattgtcgagaaaatcctaaatgaagaagaaattcctaatttaatgcatgatcatgggacaacatccatttttgaggaagaagaatga

SEQ ID NO: 6509 - protein, 428 aa, Pasteurella multocida subsp. multocida str. Pm70
MSTFAYLQQKRKQLNLKVNEICAQANITRAYFNQLVSGKIKNPSATKLSALHKVLQITEPNNKKVGVIFGKFYPVHTGHINMIYEAFSKVDEIHVIVCSDTERDLKLFYDSKMKRMPTVQDRLRWMQQIFKYQKNQIFIHHLVEDGIPSYPNGWEAWALQVKNLFKEKHFNPTVVFSSEVQDKAPYEKYLGLEVSLVDPERQFFNVSATKIRNNPFHYWKFIPKEVRPFFAKTIAILGGESSGKTVLVNKLATVFNTTSAWEYGREFVFEKLGGDEQAMQYSDYPQMALGHQRYIDYAVRHAHKVAIIDTDFITTQAFCIQYEGKAHPFLDSMIKEYPFDVTILLNNNTKWVDDGLRSLGNHKQRQRFQLLLKKLLDKYNVPYIEIESPSYLERYNQVKQIVEKILNEEEIPNLMHDHGTTSIFEEEE

SEQ ID NO: 6510 - DNA, 1272 bp, Yersinia pestis CO92
  CDS (1)..(1272): transl_table=11
atgctgcagttcgactatctcaaaacggcaattaagcaaaaaggctgcaccttacagcaggtggctgaggccagcggcatgaccaaaggctatttaagccagctacttaacgataaaatcaaaagccccagtgcgcaaaaattagaggccttacaccgttttctcgggttggaattcccgcgccgtgagaaaaaagtcggtgtagtgtttggtaaattttaccctctgcataccggtcatatttatcttatccagcgcgcctgtagccaggtcgatgaactgcacgtcattctttgccacgatgagccgcgtgatagggagttgtttgagaacagttcgatgtcgcaacaacccacggtcagtgaccgcctacgttggttgttacaaacctttaaatatcagaaaaatatccacattcactcttttgatgagcacgggattgagccttatcctcacggttgggatgtgtggagccgtggcgtaaaagctttcatgaatgaaaagggtattgtccccagctttatctattccagcgagagtcaggatgcgccgcgttaccgagagcaactgggtatcgaaaccattttgattgacccgcagcgctcatttatgaacatcagtggccgccagatccgccgcgatcctttccgctattgggattatatcccgactgaagtcaaacccttctttgtgcgcacggtagccatcctcggtggcgaatccagtggtaaatcgacgctggttaacaagttagccaatatcttcaataccaccagtgcgtgggaatatggccgtgagtatgtcttctcccatctggggggcgatgagatggcactgcaatattcggactatgacaaaattgcgctggggcaggcgcagtatgtggattttgctgtgaaatacgccaataaagtggcgtttattgatactgatttcgtcaccacacaggcattttgtaagaaatatgaagggcgggaacaccccttcgttcaggctctgattgatgaataccgttttgatctggtgatcttattggaaaataataccccgtgggtggcagatgggttgcgtagcctcggtagtgaccgcgatcgaaaatccttccaaaatttactcgagcagatgttgcgcgacaataatattgaatacgttcatgtcgagtcagccgattatgacgcccgcttcctacgctgcgttgaactggttcagcaactgctggccgccgatccgcaacggcttgcccgcccttcagtattaacggatgcgcgataa

SEQ ID NO: 6511 - protein, 423 aa, Yersinia pestis CO92
MLQFDYLKTAIKQKGCTLQQVAEASGMTKGYLSQLLNDKIKSPSAQKLEALHRFLGLEFPRREKKVGVVFGKFYPLHTGHIYLIQRACSQVDELHVILCHDEPRDRELFENSSMSQQPTVSDRLRWLLQTFKYQKNIHIHSFDEHGIEPYPHGWDVWSRGVKAFMNEKGIVPSFIYSSESQDAPRYREQLGIETILIDPQRSFMNISGRQIRRDPFRYWDYIPTEVKPFFVRTVAILGGESSGKSTLVNKLANIFNTTSAWEYGREYVFSHLGGDEMALQYSDYDKIALGQAQYVDFAVKYANKVAFIDTDFVTTQAFCKKYEGREHPFVQALIDEYRFDLVILLENNTPWVADGLRSLGSDRDRKSFQNLLEQMLRDNNIEYVHVESADYDARFLRCVELVQQLLAADPQRLARPSVLTDAR

SEQ ID NO: 6512 - DNA, 1233 bp, Salmonella enterica subsp. enterica serovar Typhi str. CT18
  CDS (1)..(1233): transl_table=11
gtgtcatcgttcgactatctcaaaaccgcgattaagcagcaaggttgcactctgcaacaggtggctgacgccagcggtatgaccaaggggtatctgagtcagttacttaacgccaaaatcaaaagccccagcgcgcaaaaactggaggcgctacaccgttttctcgggctggagtttccccgccgacagaaaaacattggcgtggtgttcggtaaattttatccattgcataccgggcacatctacttgatccagcgtgcctgtagccaggtggatgagttgcacatcattatgggatatgacgatacgcgcgaccgcgggctgtttgaagatagcgccatgtcgcagcagcccaccgtgtcggatcgcctgcgctggttgctgcaaaccttcaaataccaaaaaaatattcgcatccacgcctttaatgaagaggggatggaaccttatccgcatggctgggacgtctggagcaacggcattaaagcgtttatggcagagaagggaatacagccgagctggatctacacttccgaagaggctgatgcgccgcagtacctggagcatttagggattgagacggtgctggtcgatcctgaacgcacgtttatgaatatcagcggggcgcaaatccgcgaaaatccgtttcgttactgggaatatattcctaccgaagtgaagccgtttttcgtgcgtaccgtcgcgattctgggcggggaatcaagcggcaagtctacgctggtcaataagctcgccaatatttttaataccaccagcgcctgggaatatggccgcgactatgtcttttcgcatctgggcggcgatgagatggcgttacagtattccgactacgataaaattgcgctgggtcatgcgcaatatattgattttgcagtgaaatatgcgaataaagtagcgtttatcgataccgatttcgtcaccacccaggcattttgcaaaaaatacgaagggcgcgagcatccgtttgtccaggcgctgatcgacgagtatcgcttcgacctggtgattttgctggagaataatacgccgtggatagctgacggactgcgaagcctgggcagttcagtggatcgcaaagcgttccagaacctgctggtcgagatgctgaaagaaaacaacattgagttcgttcacgttaaagaggctgattacgatggccgctttttgcgctgtgtggaactggtgaaagagatgatgggcgagcagggataa

SEQ ID NO: 6513 - protein, 410 aa, Salmonella enterica subsp. enterica serovar Typhi str. CT18
MSSFDYLKTAIKQQGCTLQQVADASGMTKGYLSQLLNAKIKSPSAQKLEALHRFLGLEFPRRQKNIGVVFGKFYPLHTGHIYLIQRACSQVDELHIIMGYDDTRDRGLFEDSAMSQQPTVSDRLRWLLQTFKYQKNIRIHAFNEEGMEPYPHGWDVWSNGIKAFMAEKGIQPSWIYTSEEADAPQYLEHLGIETVLVDPERTFMNISGAQIRENPFRYWEYIPTEVKPFFVRTVAILGGESSGKSTLVNKLANIFNTTSAWEYGRDYVFSHLGGDEMALQYSDYDKIALGHAQYIDFAVKYANKVAFIDTDFVTTQAFCKKYEGREHPFVQALIDEYRFDLVILLENNTPWIADGLRSLGSSVDRKAFQNLLVEMLKENNIEFVHVKEADYDGRFLRCVELVKEMMGEQG

SEQ ID NO: 6514 - DNA, 1260 bp, Salmonella typhimurium LT2
  CDS (1)..(1260): transl_table=11
atgcgatttttccagcaggaggctcttgtgtcatcgttcgactatctcaaaaccgcgattaagcagcaaggttgcactctgcaacaggtggctgacgccagcggtatgaccaagggatatctgagtcagttacttaacgccaaaatcaaaagccccagcgcgcaaaaactggaggcgctacaccgttttctcgggctggagtttccccgccgacagaaaaacattggcgtggtgttcggtaaattttatccattgcataccggacacatctacttgatccagcgcgcctgtagccaggtggatgagttgcacatcattatgggatatgacgatacgcgcgaccgcgggctgtttgaggatagcgccatgtcgcagcagcccaccgtgtcggatcgcctgcgctggttattgcaaaccttcaaataccaaaaaaatattcgcatccacgcctttaatgaagaggggatggagccttatccgcatggctgggacgtctggagcaacggcattaaagcgtttatggcagagaagggaatacagccgagctggatctacacttccgaagaggctgatgcgccgcagtatcttgagcatttagggattgagacggtgctggtcgatcctgaacgcacgtttatgaatatcagtggggcgcaaatccgcgaaaatccgtttcgttactgggaatatattcctaccgaagtgaagccgtttttcgtgcgtaccgtcgcgattctgggcggggaatcaagcggcaagtctacgctggtcaataagctcgccaatatttttaataccaccagcgcctgggaatatggccgcgactatgtcttttcgcatctgggcggcgatgagatggcgttacagtattccgactacgataaaattgcgctgggccatgcgcaatatattgatttcgcagtgaaatatgcgaataaagtggcgtttatcgataccgatttcgtcaccacccaggcattttgcaaaaaatacgaaggacgcgagcatccctttgtccaggcgctgatcgacgagtatcgcttcgacctggtgattttgctggagaataatacgccgtgggtagctgacggactgcgaagcctgggcagttcagtggatcgcaaagcgttccagaacctgctggtcgagatgctgaaagagaacaacattgagttcgttcacgttaaagaggctgattacgatggtcgctttttgcgctgtgtggaactggtgaaagagatgatgggcgagcagggataa

SEQ ID NO: 6515 - protein, 419 aa, Salmonella typhimurium LT2
MRFFQQEALVSSFDYLKTAIKQQGCTLQQVADASGMTKGYLSQLLNAKIKSPSAQKLEALHRFLGLEFPRRQKNIGVVFGKFYPLHTGHIYLIQRACSQVDELHIIMGYDDTRDRGLFEDSAMSQQPTVSDRLRWLLQTFKYQKNIRIHAFNEEGMEPYPHGWDVWSNGIKAFMAEKGIQPSWIYTSEEADAPQYLEHLGIETVLVDPERTFMNISGAQIRENPFRYWEYIPTEVKPFFVRTVAILGGESSGKSTLVNKLANIFNTTSAWEYGRDYVFSHLGGDEMALQYSDYDKIALGHAQYIDFAVKYANKVAFIDTDFVTTQAFCKKYEGREHPFVQALIDEYRFDLVILLENNTPWVADGLRSLGSSVDRKAFQNLLVEMLKENNIEFVHVKEADYDGRFLRCVELVKEMMGEQG

SEQ ID NO: 6516 - DNA, 1257 bp, Photorhabdus luminescens subsp. laumondii TTO1
  CDS (1)..(1257): transl_table=11
ttgattaaacagggaggagatatggggcaatttgactaccttaaagaagcgattaaacagacaggttatacgttgcaacaggttgccgatgcaagtggtatgaccaaaggttatcttagccaattaattaatgacaaaattaaaagtcctagtgcccaaaaactggcggcgctccatcactatctgaggttgcaatatcctgtgcaaaataaaactgttggagtggtattcggcaaattctatccattgcatactgggcatatctatctgattcaacgggcctgtagtcaggtggatgagttgcatattatcctttgccatgatgagcctagagatcgggagctatttatgagtagttccatgtctcagcaacccacggtgagtgatcgcttgcgctggttgcttcaaacatttaagtatcagaaaaatattcatattcactcttttgatgaacagggaattgaaccctatccacatggttgggatgtgtggagtgatggcatgaaagcctttatgtcaaagaaaggcattcatcccacttatatatattccagcgaaactcaggattctccccgatataaagagcatttaggaattgagacaattcttatcgatccacaacgttcgtttatgaaaatcagtggtcggcatattcgccaagatccattccgtcattgggaatatattcctaccgaagtgaaacctttctttgttcgtaccgtagcgattcttggtggagaatctagtggtaaatctacattagttaacaaattggcaaatatttttaatacgacaagtgcttgggaatatggtcgtgattatgttttttctcatctggggggagatgagatggcgctacaatattcggactatgacaagattgcattgggacaagcccaatatattgattttgccgtaaaatatgcgaataaggttacatttatcgataccgattttgtcactacccaagcattctgtaagcgatatgaaggacgtgaacacccgtttgttcaggcattaattgatgaataccgatttgatttggtcattctactggaaaacaacactccttgggttgctgacggtttgcgtagccttggcagcgagcaggatcgtaaagcgtttcagcaactgctggaggatatgctgaaaagtaataatattgaatatgtcaatgtggattcacccgattatgatcagcgtttcctacgttgtattgagctcattcagcaacttttagcggctaatcctaaatga

SEQ ID NO: 6517 - protein, 418 aa, Photorhabdus luminescens subsp. laumondii TTO1
MIKQGGDMGQFDYLKEAIKQTGYTLQQVADASGMTKGYLSQLINDKIKSPSAQKLAALHHYLRLQYPVQNKTVGVVFGKFYPLHTGHIYLIQRACSQVDELHIILCHDEPRDRELFMSSSMSQQPTVSDRLRWLLQTFKYQKNIHIHSFDEQGIEPYPHGWDVWSDGMKAFMSKKGIHPTYIYSSETQDSPRYKEHLGIETILIDPQRSFMKISGRHIRQDPFRHWEYIPTEVKPFFVRTVAILGGESSGKSTLVNKLANIFNTTSAWEYGRDYVFSHLGGDEMALQYSDYDKIALGQAQYIDFAVKYANKVTFIDTDFVTTQAFCKRYEGREHPFVQALIDEYRFDLVILLENNTPWVADGLRSLGSEQDRKAFQQLLEDMLKSNNIEYVNVDSPDYDQRFLRCIELIQQLLAANPK

SEQ ID NO: 6518 - DNA, 1254 bp, Erwinia carotovora subsp. atroseptica SCRI1043
  CDS (1)..(1254): transl_table=11
atgtcatcatttgattacctgaaatccgctatccgccagaagggttgcaccctacagcaggttgccgacgcaaccgatatgaccaaaggctatctcagtcaattacttaatgccaaaatcaaaagccctagcgcacagaaacttgaagcgctgcatcggtttcttgagctggaattcccacgttacgaaaagaatattggcgtcgtcttcggtaagttctatccgctacacaccggccacatttatctgattcaacgcgcatgcagccaagtcgatgaactgcatgtgattttaggttacgacgagccgcgtgaccgtctgctgtttgagaacagctcgatgtcacagcaacccaccgtcagcgaccgtctgcgctggctgttgcagacctttaaatatcagaaaaatattcatattcacgcctttaatgagcaagggatggaaccctacccgcacggctgggatgtgtggagtaaagggattcaggcgttcatgcaggaaaaaagcatcacgcccaatttcgtctacaccagcgaagaacaggatgctctgcaatatcgtgagcatctgggcattgaggccatcttgatcgacccgcaacgatcctttatgaacatcagcggctcccagatccgccacgatcccttccgttattgggactatatcccaaccgaagtgaagccgttctttgtgcgtaccgttgctattcttggcggggaatccagtggtaaatccacgctggtaaacaagctggctaatatcttcaacaccaccagcgcctgggaatatggtcgcgattatgtattctctcatctgggtggcgacgagatggcgttgcagtattccgactatgacaagattgcactgggtcaggcacagtacattgattttgcggtaaaatatgccaataaagtggcctttatcgacaccgattttgtcaccactcaggcgttctgcaaaaaatatgaaggccgtgaacacccgttcgttcaggcactagtcgacgaataccgcttcgatctggtgattttgctggaaaacaacacgccgtgggtagccgacgggctgcgcagtttaggcagtaccaccgctcgttcggaattccaggacctgctgaaaacgatgctggctaaaaataatatcccgtacgtgtacatcaaagaaccggattacgattcgcgtttcctgcactgtgtggaattggtacagcagatgttgggccacgatcggtcgcccgaacagataaaaaactag

SEQ ID NO: 6519 - protein, 417 aa, Erwinia carotovora subsp. atroseptica SCRI1043
MSSFDYLKSAIRQKGCTLQQVADATDMTKGYLSQLLNAKIKSPSAQKLEALHRFLELEFPRYEKNIGVVFGKFYPLHTGHIYLIQRACSQVDELHVILGYDEPRDRLLFENSSMSQQPTVSDRLRWLLQTFKYQKNIHIHAFNEQGMEPYPHGWDVWSKGIQAFMQEKSITPNFVYTSEEQDALQYREHLGIEAILIDPQRSFMNISGSQIRHDPFRYWDYIPTEVKPFFVRTVAILGGESSGKSTLVNKLANIFNTTSAWEYGRDYVFSHLGGDEMALQYSDYDKIALGQAQYIDFAVKYANKVAFIDTDFVTTQAFCKKYEGREHPFVQALVDEYRFDLVILLENNTPWVADGLRSLGSTTARSEFQDLLKTMLAKNNIPYVYIKEPDYDSRFLHCVELVQQMLGHDRSPEQIKN

SEQ ID NO: 6520 - DNA, 1260 bp, Mannheimia succiniciproducens MBEL55E
  CDS (1)..(1260): transl_table=11
atgtctaatttttcttatttacaacaaaaacgtaaacaactaaatctcaaggtaaacgatatctgtgagcaagctaatgttacgcgggcttactttaatcaacttgtaagtggaaaaattaaaaaccccagtgcggcaaaattaacggcattacataaagcattacaaattacggaacaagacaacaaaaaagtcggcgtgatttttggcaaattttatcccgtgcataccggccatatcaatatgatctatgaggccttcagtaaagtggatgagctacatgtaattgtgtgcagcgataccgaacgtgatttgcagcttttctatgacagcaaaatgaagcgtatgccaacagtgcaagatcgtttgcgctggatgcaacaaattttcaaatatcaaaagaatcagatttttattcacaatctggtggaagacggtattccgagttatccgaacggctggcgagcctggtccaatgcggcaaaagcattatttaaagaaaaagaaattaatccgacggtagtattcagcagcgaaccgcaggataaagcgccttatgaaaaataccttaatttagaagtacatttggttgatccggcgcgcgaatcttttaatgtatccgccacaaaaatccgcactcagccgtttaaatattggaaatatattccaaaagaagtgcgcccgttctttgccaaaaccatagctattttaggaggagaaagtagcggtaaatccgtgcttgtcaacaaattggcgacggtttttaatacgacttccgcttgggaatacggacgtgatttcgtatttgataaacttggcggcgacgaacaagccatgcaatattctgattatccgcaaatggcgctcggccatcagcattatattgattatgccgtgcgtcatgctcataaagtagcatttattgatacggatttcattaccacgcaagcattttgtattcaatatgaaggaaaaccgcacccgtttttggattctatgattaaagaatatccttttgatgtgactatattgctaaataataatacaaaatgggtagatgacggactacgtagcctgggcgattataaacaacgccaacgttttcaacagttactgaaaaaattgttagataaatataaagttccttatattgaaattgagtcaccaagttatttagaacgctatgatcaagcaaaagcgattgttgaaaaagtactgaatgatgaagaagtctcggaactgactcatgaaaacgattaa

SEQ ID NO: 6521 - protein, 419 aa, Mannheimia succiniciproducens MBEL55E
MSNFSYLQQKRKQLNLKVNDICEQANVTRAYFNQLVSGKIKNPSAAKLTALHKALQITEQDNKKVGVIFGKFYPVHTGHINMIYEAFSKVDELHVIVCSDTERDLQLFYDSKMKRMPTVQDRLRWMQQIFKYQKNQIFIHNLVEDGIPSYPNGWRAWSNAAKALFKEKEINPTVVFSSEPQDKAPYEKYLNLEVHLVDPARESFNVSATKIRTQPFKYWKYIPKEVRPFFAKTIAILGGESSGKSVLVNKLATVFNTTSAWEYGRDFVFDKLGGDEQAMQYSDYPQMALGHQHYIDYAVRHAHKVAFIDTDFITTQAFCIQYEGKPHPFLDSMIKEYPFDVTILLNNNTKWVDDGLRSLGDYKQRQRFQQLLKKLLDKYKVPYIEIESPSYLERYDQAKAIVEKVLNDEEVSELTHEND

SEQ ID NO: 6522 - DNA, 1278 bp, Haemophilus somnus 129PT
  CDS (1)..(1278)
atgtcgaatttcagctatctgcaacaaaaacgtaagcaattaaatttgaaagttaatgatctttgtacgcaagccaatattactcgtgcttattttaatcaattagtaagtggaaaaattaaaaatccaagtgcgacaaaactttcagcattgcataaagtgttacagatcactgaacaagataacaaaaaagtaggcgttatttttggtaaattttatcccgttcataccggccacattaatatgatttacgaagcatttagcaaagtagatgaacttcatgtcgttgtatgtagtgatactgagcgagatttaaaactattctatgacagtaaaatgaaacgaatgccaactgtgcaagatcgcttacgttggatgcaacaaatttttaaatatcagaaaaatcaaattgttattcatcatcttattgaagatggtctaccaagttatcccaatggctgggcggcatgggctgaacaggtaaaatatctatttaaggaaaaaaacgttaatcctagcgtggtttttagcagtgaaatccaagataaagtaccttatgaaaaatatttaaatttacaagtcgaattagttgatccaaaacgccgattccttaatatttctgcaacaaaaattcgtaacaatccatttcactattggaaattcattcctaaagaagttcgcccattttttgcaaaaacaattgctattttaggtggagaaagtagcggtaaaacaactcttgtcaataagctagctacagtatttaatactacatcagcttgggaatatggacgtgagtttgtttttgaaaaactggggggtaatgaacaagctatgcaatattctgattatccacaaatagcattaggtcatcagcgttatattgattatgccgtcaggcatgcacacaaagttgcaattgtagatacagactttattacaactcaggcattttgtattcagtatgaaggaaaagcacaccctttcttagactccatgatcaaagaatatccctttgatgtgaccattttattaaataataatacccaatgggtagatgatggcttgcgtagcttaggaaatgctaaacaacgtcaacgcttccaacaactcttaaaaaaattattagataagcatagtgtaccttatattgaaattgactcacccagttacttggaacgttataatcaagtgaaaaatattgttgagaaagtactcaacgaagaacttttggacttagccgtggaaacaatcacaccttcaatttttaaggaataa

SEQ ID NO: 6523 - protein, 425 aa, Haemophilus somnus 129PT
MSNFSYLQQKRKQLNLKVNDLCTQANITRAYFNQLVSGKIKNPSATKLSALHKVLQITEQDNKKVGVIFGKFYPVHTGHINMIYEAFSKVDELHVVVCSDTERDLKLFYDSKMKRMPTVQDRLRWMQQIFKYQKNQIVIHHLIEDGLPSYPNGWAAWAEQVKYLFKEKNVNPSVVFSSEIQDKVPYEKYLNLQVELVDPKRRFLNISATKIRNNPFHYWKFIPKEVRPFFAKTIAILGGESSGKTTLVNKLATVFNTTSAWEYGREFVFEKLGGNEQAMQYSDYPQIALGHQRYIDYAVRHAHKVAIVDTDFITTQAFCIQYEGKAHPFLDSMIKEYPFDVTILLNNNTQWVDDGLRSLGNAKQRQRFQQLLKKLLDKHSVPYIEIDSPSYLERYNQVKNIVEKVLNEELLDLAVETITPSIFKE

SEQ ID NO: 6524 - DNA, 1278 bp, Haemophilus somnus 2336
  CDS (1)..(1278)
atgtcgagtttcagctatctgcaacaaaaacgtaagcaattaaatctgaaggttaatgagctttgtacacaagccaatatcactcgtgcttattttaaccaattagtgagtggaaaaattaaaaatccaagtgccacaaaactttcagcattgcataaagcactacagattactgaacaagataacaaaaaaataggcgttattttcggcaaattttatcccgttcataccggtcatattaatatgatttatgaagcatttagcaaagtagatgagcttcatgtggttgtatgtagcgatacagaacgagatttaaaactattttatgacagtaaaatgaaacgaatgccaactgtacaggatcgcttacgttggatgcaacaaatttttaaatatcagaaaaataaaattgttattcatcatcttattgaagatggtctaccaagttatcccaatggctggtctgcatgggctgaacaagtaaaacgtctattcaaggaaaaaaacgttaatcctagcgtggtttttagcagtgaaatccaagataaagtaccttatgaaaaatatttaaatttacaagtcgaattagttgatccaaaacgccgattccttaatatttctgcaacaaaaattcgtaacaatccatttcactattggaaattcattcctaaagaagttcgcccattttttgcaaaaacaattgctattttaggtggagaaagtagcggtaaaacaactcttgttaataagctagctacagtatttaatactacatcagcttgggaatatggacgtgaatttgtttttgaaaaactgggaggtaatgaacaagctatgcaatattctgattatccacaaatagcattaggtcatcagcgttatattgattatgccgtcaggcatgcacacaaagttgcaattgtagatacagactttattacaactcaggcattttgtattcagtatgaaggaaaagcacaccctttcttagactccatgatcaaagaatatccttttgatgtgaccattttattaaataataatacccaatgggtagatgatggcttgcgtagcttaggaaatgctaaacaacgtcaacgcttccaacaactcttaaaaaaattattagataagcatagtgtaccttatattgaaattgactcacccagttacttggaacgttataatcaagtgaaaaatattgttgagaaagtactcaacgaagaaattttggacttagccgtggaaacaatcacaccttcaatttttaaggaataa

SEQ ID NO: 6525 - protein, 425 aa, Haemophilus somnus 2336
MSSFSYLQQKRKQLNLKVNELCTQANITRAYFNQLVSGKIKNPSATKLSALHKALQITEQDNKKIGVIFGKFYPVHTGHINMIYEAFSKVDELHVVVCSDTERDLKLFYDSKMKRMPTVQDRLRWMQQIFKYQKNKIVIHHLIEDGLPSYPNGWSAWAEQVKRLFKEKNVNPSVVFSSEIQDKVPYEKYLNLQVELVDPKRRFLNISATKIRNNPFHYWKFIPKEVRPFFAKTIAILGGESSGKTTLVNKLATVFNTTSAWEYGREFVFEKLGGNEQAMQYSDYPQIALGHQRYIDYAVRHAHKVAIVDTDFITTQAFCIQYEGKAHPFLDSMIKEYPFDVTILLNNNTQWVDDGLRSLGNAKQRQRFQQLLKKLLDKHSVPYIEIDSPSYLERYNQVKNIVEKVLNEEILDLAVETITPSIFKE

SEQ ID NO: 6526 - DNA, 1281 bp, Actinobacillus pleuropneumoniae serovar 1 str. 4074
  CDS (1)..(1281)
atgacaaattttgcttaccttcaacaaaaacgcaaacaattaaaaatgaaagtaaatgatgtttgtgagcaagccggcgtaactcgcgcttattttaatcaattggtaagcgggaaaattaaaaatccgagcgcaaataaattaaaagcgttacatcaagtattaaatatcgtggaagatatgaatcagcgtgtcggggtcattttcggtaaattttatccggttcataccggtcatattcatatgatctacgaagccttcagtaaagtggacattttacatgtggtggtttgtaccgatgcggagcgtgatctgcaacttttcaaagacagtaagatgaagcgtatgccgaccaatgaagacagacttcgttggatgcaacaaatctttaaataccagcaaaagcaaatttttattcatcacctcaaagaagacggcattccgagctatccgaacggatggcaaggttgggcggatcgcgtaaaagaattattcaatgagaagaatattcgtccgtcgcttgtgtttagcagtgaggttcaagataaagaaccgtatgaaaaatatttggatttggaagttcatctggttgatcctaaacgagagtctttcaatgtgtccgccactaaaattcgtaataatccgttccaatattggcgatttatcccgaaagaagtacgtcctttctttgtaaaaaccattgcgattttaggcggggaaagtagcggtaaatcggtcttggtcagcaaacttgccaacgtatttaatactacttccgcttgggaatacggacgagaattcgtgtttgagcgtttaggcggtaatgagcaggcaatgcaatattccgattatccgctcatggcgttaggtcatcagcggtatatcgactatgcgatgaaacacgcgcataaagtggcattgattgataccgactatattactacgcaggcgttttgtattcagtacgaaggtaaatcacatcctttcttagattcgatgatcaaggaatatccttttgacgtcacgattttattgtccaataacaccaagtgggtggacgacggaatgcgtagccttggctcggtcaagcaacgtcagcgttttcaacagttgttgaagaaactgctcgaaaaatacaatgtgccttatatcgaaattgagtcgccgagctacttggatcgatataatcaagcgaaagaagtggttgaagccattttgaaagaagaagaaattccattgcaatttaaacagtataatcatacgacggaagataaagaatga

SEQ ID NO: 6527 - protein, 426 aa, Actinobacillus pleuropneumoniae serovar 1 str. 4074
MTNFAYLQQKRKQLKMKVNDVCEQAGVTRAYFNQLVSGKIKNPSANKLKALHQVLNIVEDMNQRVGVIFGKFYPVHTGHIHMIYEAFSKVDILHVVVCTDAERDLQLFKDSKMKRMPTNEDRLRWMQQIFKYQQKQIFIHHLKEDGIPSYPNGWQGWADRVKELFNEKNIRPSLVFSSEVQDKEPYEKYLDLEVHLVDPKRESFNVSATKIRNNPFQYWRFIPKEVRPFFVKTIAILGGESSGKSVLVSKLANVFNTTSAWEYGREFVFERLGGNEQAMQYSDYPLMALGHQRYIDYAMKHAHKVALIDTDYITTQAFCIQYEGKSHPFLDSMIKEYPFDVTILLSNNTKWVDDGMRSLGSVKQRQRFQQLLKKLLEKYNVPYIEIESPSYLDRYNQAKEVVEAILKEEEIPLQFKQYNHTTEDKE

SEQ ID NO: 6528 - DNA, 1266 bp, Haemophilus influenzae
  CDS (1)..(1266): transl_table=11
gtgggctttaccaccggtagggaatttcaccctgccctgagaatgcgagctaagtataacgcaaaatacctaggcactaaatcagaacgtgaaaaatattttcatttagcctacaataaacacactcaattcttacgctatcaagagcagattatgtcaaaaacaaaagagaaaaaagtcggtgtcattttcgggaaattttatcctgtacacacaggtcatataaatatgatttatgaagcgttcagtaaagtcgatgaactacacgttatcgtgtgtagtgacactgtgcgcgatttgaaattattttacgatagtaaaatgaaacgcatgccaaccgtgcaagatcgtttgcgttggatgcagcaaattttcaaatatcaaaaaaatcagatttttattcatcatttggttgaagacggtattccgagttatccaaacggctggcaatcttggagtgaagcagttaaaaccctatttcatgaaaaacattttgagccttcaatcgtatttagtagcgaacctcaagataaagcgccttacgagaaatacttaggtttagaagtttcgttagtcgatcctgaccgcactttctttaatgtgtccgccaccaaaattcgcaccactccattccaatattggaagtttattccgaaagaagctcgtcctttctttgccaaaacggtggcgattttagggggagaaagcagtggtaaaagcgtgctagttaataagttagccgccgtatttaataccacttctgcgtgggaatacgggcgtgaatttgtatttgaaaagctcggtggcgacgagcaagcgatgcaatattctgactatccgcaaatggcgcttggtcatcaacgatacattgattatgccgtgcgccattctcataaaattgcatttattgatacggatttcatcaccacgcaagcattctgcattcaatatgaaggaaaagcccatccatttttagactcaatgattaaagaatatcccttcgatgtcactattttacttaaaaacaatactgaatgggtggatgatggcttgcgtagcttaggctcacaaaaacaacgccaacaatttcaacaactactcaaaaaactgttagataaatataaagttccttatatagagattgaatcaccaagttatcttgatcgctataaccaagttaaagcagtcattgagaaagtgttaaatgaagaggaaatcagtgaattacaaaacacaacctttcctataaaagggacatctcaatga

SEQ ID NO: 6529 - protein, 421 aa, Haemophilus influenzae
MGFTTGREFHPALRMRAKYNAKYLGTKSEREKYFHLAYNKHTQFLRYQEQIMSKTKEKKVGVIFGKFYPVHTGHINMIYEAFSKVDELHVIVCSDTVRDLKLFYDSKMKRMPTVQDRLRWMQQIFKYQKNQIFIHHLVEDGIPSYPNGWQSWSEAVKTLFHEKHFEPSIVFSSEPQDKAPYEKYLGLEVSLVDPDRTFFNVSATKIRTTPFQYWKFIPKEARPFFAKTVAILGGESSGKSVLVNKLAAVFNTTSAWEYGREFVFEKLGGDEQAMQYSDYPQMALGHQRYIDYAVRHSHKIAFIDTDFITTQAFCIQYEGKAHPFLDSMIKEYPFDVTILLKNNTEWVDDGLRSLGSQKQRQQFQQLLKKLLDKYKVPYIEIESPSYLDRYNQVKAVIEKVLNEEEISELQNTTFPIKGTSQ

SEQ ID NO: 6530 - DNA, 24 bp, Artificial sequence
  primer
atgagatatacggagggagatatg

SEQ ID NO: 6531 - DNA, 22 bp, Artificial sequence
  primer
ttatctctgctcccccatcatc

SEQ ID NO: 6532 - protein, 403 aa, Artificial sequence
  consensus sequence
  Variant (2)..(3): Xaa in position 2 to 3 is any amino acid
  Variant (5)..(5): Xaa in position 5 is any amino acid
  Variant (8)..(11): Xaa in position 8 to 11 is any amino acid
  Variant (14)..(27): Xaa in position 14 to 27 is any amino acid
  Variant (29)..(30): Xaa in position 29 to 30 is any amino acid
  Variant (32)..(33): Xaa in position 32 to 33 is any amino acid
  Variant (36)..(37): Xaa in position 36 to 37 is any amino acid
  Variant (38)..(38): Xaa in position 38 is any or no amino acid
  Variant (42)..(42): Xaa in position 42 is any amino acid
  Variant (46)..(46): Xaa in position 46 is any amino acid
  Variant (49)..(49): Xaa in position 49 is any amino acid
  Variant (53)..(54): Xaa in position 53 to 54 is any amino acid
  Variant (56)..(60): Xaa in position 56 to 60 is any amino acid
  Variant (61)..(63): Xaa in position 61 to 63 is any or no amino acid
  Variant (65)..(66): Xaa in position 65 to 66 is any amino acid
  Variant (69)..(69): Xaa in position 69 is any amino acid
  Variant (76)..(76): Xaa in position 76 is any amino acid
  Variant (82)..(83): Xaa in position 82 to 83 is any amino acid
  Variant (85)..(86): Xaa in position 85 to 86 is any amino acid
  Variant (88)..(88): Xaa in position 88 is any amino acid
  Variant (90)..(90): Xaa in position 90 is any amino acid
  Variant (96)..(96): Xaa in position 96 is any amino acid
  Variant (98)..(100): Xaa in position 98 to 100 is any amino acid
  Variant (102)..(103): Xaa in position 102 to 103 is any amino acid
  Variant (106)..(107): Xaa in position 106 to 107 is any amino acid
  Variant (110)..(110): Xaa in position 110 is any amino acid
  Variant (113)..(113): Xaa in position 113 is any amino acid
  Variant (115)..(117): Xaa in position 115 to 117 is any amino acid
  Variant (121)..(121): Xaa in position 121 is any amino acid
  Variant (127)..(128): Xaa in position 127 to 128 is any amino acid
  Variant (130)..(130): Xaa in position 130 is any amino acid
  Variant (137)..(137): Xaa in position 137 is any amino acid
  Variant (139)..(139): Xaa in position 139 is any amino acid
  Variant (142)..(144): Xaa in position 142 to 144 is any amino acid
  Variant (146)..(146): Xaa in position 146 is any amino acid
  Variant (148)..(150): Xaa in position 148 to 150 is any amino acid
  Variant (153)..(153): Xaa in position 153 is any amino acid
  Variant (156)..(157): Xaa in position 156 to 157 is any amino acid
  Variant (159)..(162): Xaa in position 159 to 162 is any amino acid
  Variant (164)..(167): Xaa in position 164 to 167 is any amino acid
  Variant (170)..(172): Xaa in position 170 to 172 is any amino acid
  Variant (174)..(178): Xaa in position 174 to 178 is any amino acid
  Variant (181)..(182): Xaa in position 181 to 182 is any amino acid
  Variant (184)..(186): Xaa in position 184 to 186 is any amino acid
  Variant (188)..(190): Xaa in position 188 to 190 is any amino acid
  Variant (192)..(193): Xaa in position 192 to 193 is any amino acid
  Variant (195)..(196): Xaa in position 195 to 196 is any amino acid
  Variant (201)..(201): Xaa in position 201 is any amino acid
  Variant (203)..(203): Xaa in position 203 is any amino acid
  Variant (205)..(205): Xaa in position 205 is any amino acid
  Variant (207)..(207): Xaa in position 207 is any amino acid
  Variant (209)..(211): Xaa in position 209 to 211 is any amino acid
  Variant (214)..(215): Xaa in position 214 to 215 is any amino acid
  Variant (218)..(218): Xaa in position 218 is any amino acid
  Variant (221)..(222): Xaa in position 221 to 222 is any amino acid
  Variant (225)..(225): Xaa in position 225 is any amino acid
  Variant (228)..(228): Xaa in position 228 is any amino acid
  Variant (232)..(233): Xaa in position 232 to 233 is any amino acid
  Variant (235)..(235): Xaa in position 235 is any amino acid
  Variant (246)..(247): Xaa in position 246 to 247 is any amino acid
  Variant (254)..(255): Xaa in position 254 to 255 is any amino acid
  Variant (267)..(268): Xaa in position 267 to 268 is any amino acid
  Variant (271)..(272): Xaa in position 271 to 272 is any amino acid
  Variant (278)..(278): Xaa in position 278 is any amino acid
  Variant (280)..(280): Xaa in position 280 is any amino acid
  Variant (286)..(288): Xaa in position 286 to 288 is any amino acid
  Variant (293)..(294): Xaa in position 293 to 294 is any amino acid
  Variant (298)..(298): Xaa in position 298 is any amino acid
  Variant (301)..(302): Xaa in position 301 to 302 is any amino acid
  Variant (304)..(304): Xaa in position 304 is any amino acid
  Variant (308)..(308): Xaa in position 308 is any amino acid
  Variant (314)..(314): Xaa in position 314 is any amino acid
  Variant (321)..(322): Xaa in position 321 to 322 is any amino acid
  Variant (326)..(327): Xaa in position 326 to 327 is any amino acid
  Variant (331)..(334): Xaa in position 331 to 334 is any amino acid
  Variant (336)..(336): Xaa in position 336 is any amino acid
  Variant (339)..(339): Xaa in position 339 is any amino acid
  Variant (342)..(343): Xaa in position 342 to 343 is any amino acid
  Variant (347)..(347): Xaa in position 347 is any amino acid
  Variant (351)..(351): Xaa in position 351 is any amino acid
  Variant (354)..(354): Xaa in position 354 is any amino acid
  Variant (362)..(365): Xaa in position 362 to 365 is any amino acid
  Variant (367)..(368): Xaa in position 367 to 368 is any amino acid
  Variant (371)..(371): Xaa in position 371 is any amino acid
  Variant (374)..(376): Xaa in position 374 to 376 is any amino acid
  Variant (378)..(391): Xaa in position 378 to 391 is any amino acid
  Variant (393)..(394): Xaa in position 393 to 394 is any amino acid
  Variant (396)..(402): Xaa in position 396 to 402 is any amino acid
MXXFXYLXXXXKQXXXXXXXXXXXXXXTXXYXXQLXXXKIKXPSAXKLXALHXXLXXXXXXXXKXXGVXFGKFYPXHTGHIXXIXXAXSXVDELHXIXXXDXXRDXXLFXDSXMXXXPTVXDRLRWXXQXFKYQKNXIXIHXXXEXGXXXYPXGWXXWXXXXKXXXXEKXXXPXXXXXSEXXDXXXYXXXLXXEXXLVDPXRXFXNXSXXXIRXXPFXYWXXIPXEVXPFFXXTXAILGGESSGKXXLVNKLAXXFNTTSAWEYGRXXVFXXLGGDEXAXQYSDYXXXALGHXXYIDXAVXXAXKVAXIDTDFXTTQAFCXXYEGXXHPFXXXXIXEYXFDXXILLXNNTXWVXDGLRSLGXXXXRXXFQXLLXXXLXXXXXXXXXXXXXXYXXRXXXXXXXV

SEQ ID NO: 6533 - protein, 60 aa, Artificial sequence
  protein pattern
  Variant (2)..(3): Xaa in position 2 to 3 is any amino acid
  Variant (7)..(7): Xaa in position 7 is Ala or Val
  Variant (8)..(8): Xaa in position 8 is Lys or Arg
  Variant (10)..(10): Xaa in position 10 is Ile or Val
  Variant (21)..(21): Xaa in position 21 is Ser or Thr
  Variant (22)..(22): Xaa in position 22 is Thr or Val
  Variant (29)..(29): Xaa in position 29 is Ala, Asn or Thr
  Variant (30)..(30): Xaa in position 30 is Ile or Val
  Variant (42)..(42): Xaa in position 42 is Asp or Glu
  Variant (43)..(43): Xaa in position 43 is Phe or Tyr
  Variant (46)..(46): Xaa in position 46 is Glu or Ser
  Variant (47)..(47): Xaa in position 47 is His or Lys
  Variant (51)..(51): Xaa in position 51 is Asp or Asn
  Variant (53)..(53): Xaa in position 53 is any amino acid
  Variant (55)..(55): Xaa in position 55 is Leu or Met
EXXPFFXXTXAILGGESSGKXXLVNKLAXXFNTTSAWEYGRXXVFXXLGGXEXAXQYSDY

SEQ ID NO: 6534 - protein, 60 aa, Artificial sequence
  protein pattern
  Variant (2)..(2): Xaa in position 2 is any amino acid
  Variant (6)..(6): Xaa in position 6 is any or no amino acid
  Variant (8)..(8): Xaa in position 8 is any or no amino acid
  Variant (12)..(12): Xaa in position 12 is Phe or Tyr
  Variant (13)..(13): Xaa in position 13 is Ile or Val
  Variant (20)..(21): Xaa in position 20 to 21 is any amino acid
  Variant (25)..(25): Xaa in position 25 is Lys or Arg
  Variant (26)..(26): Xaa in position 26 is any amino acid
  Variant (30)..(30): Xaa in position 30 is Leu or Val
  Variant (31)..(31): Xaa in position 31 is Asp or Gln
  Variant (32)..(32): Xaa in position 32 is Ala or Ser
  Variant (33)..(33): Xaa in position 33 is Leu or Met
  Variant (34)..(34): Xaa in position 34 is Ile or Val
  Variant (35)..(35): Xaa in position 35 is Asp or Lys
  Variant (38)..(38): Xaa in position 38 is any amino acid
  Variant (41)..(41): Xaa in position 41 is Leu or Val
  Variant (42)..(42): Xaa in position 42 is Thr or Val
  Variant (46)..(46): Xaa in position 46 is Glu, Asn or Ser
  Variant (50)..(50): Xaa in position 50 is any amino acid
  Variant (52)..(52): Xaa in position 52 is Ile or Val
  Variant (53)..(53): Xaa in position 53 is Ala or Asp
  Variant (56)..(56): Xaa in position 56 is Leu or Met
AXKVAXIXDTDXXTTQAFCXXYEGXXHPFXXXXXXEYXFDXXILLXNNTXWXXDGXRSLG

SEQ ID NO: 6535 - protein, 60 aa, Artificial sequence
  protein pattern
  Variant (3)..(3): Xaa in position 3 is Ile or Val
  Variant (10)..(10): Xaa in position 10 is Leu or Val
  Variant (16)..(16): Xaa in position 16 is any amino acid
  Variant (17)..(17): Xaa in position 17 is Leu or Met
  Variant (19)..(19): Xaa in position 19 is any amino acid
  Variant (20)..(20): Xaa in position 20 is Glu or Arg
  Variant (22)..(22): Xaa in position 22 is any amino acid
  Variant (24)..(24): Xaa in position 24 is any amino acid
  Variant (30)..(31): Xaa in position 30 to 31 is Ile or Val
  Variant (32)..(32): Xaa in position 32 is Leu, Met or Val
  Variant (33)..(33): Xaa in position 33 is Cys or Gly
  Variant (34)..(34): Xaa in position 34 is any amino acid
  Variant (36)..(36): Xaa in position 36 is Asp, Glu or Thr
  Variant (37)..(37): Xaa in position 37 is any amino acid
  Variant (40)..(41): Xaa in position 40 to 41 is any amino acid
  Variant (44)..(44): Xaa in position 44 is any amino acid
  Variant (45)..(45): Xaa in position 45 is Asp, Asn or Ser
  Variant (47)..(47): Xaa in position 47 is any amino acid
  Variant (49)..(49): Xaa in position 49 is any amino acid
  Variant (50)..(50): Xaa in position 50 is Gln or Arg
  Variant (51)..(51): Xaa in position 51 is any amino acid
  Variant (55)..(55): Xaa in position 55 is Pro, Gln or Ser
GVXFGKFYPXHTGHIXXIXXAXSXVDELHXXXXXDXXRDXXLFXXSXMXXXPTVXDRLRW

SEQ ID NO: 6536 - protein, 58 aa, Artificial sequence
  protein pattern
  Variant (3)..(3): Xaa in position 3 is any amino acid
  Variant (4)..(4): Xaa in position 4 is Phe, Ile or Val
  Variant (5)..(5): Xaa in position 5 is any amino acid
  Variant (7)..(10): Xaa in position 7 to 10 is any amino acid
  Variant (11)..(11): Xaa in position 11 is any or no amino acid
  Variant (13)..(13): Xaa in position 13 is Glu or Ser
  Variant (15)..(15): Xaa in position 15 is any amino acid
  Variant (16)..(16): Xaa in position 16 is any or no amino acid
  Variant (18)..(19): Xaa in position 18 to 19 is any amino acid
  Variant (20)..(20): Xaa in position 20 is Pro or Gln
  Variant (22)..(22): Xaa in position 22 is any amino acid
  Variant (23)..(23): Xaa in position 23 is Glu or Lys
  Variant (24)..(24): Xaa in position 24 is His or Tyr
  Variant (26)..(26): Xaa in position 26 is Asp, Gly or Asn
  Variant (27)..(27): Xaa in position 27 is Ile or Leu
  Variant (28)..(28): Xaa in position 28 is Asp, Glu or Gln
  Variant (29)..(29): Xaa in position 29 is Thr or Val
  Variant (30)..(30): Xaa in position 30 is any amino acid
  Variant (35)..(35): Xaa in position 35 is any amino acid
  Variant (37)..(38): Xaa in position 37 to 38 is any amino acid
  Variant (39)..(39): Xaa in position 39 is Phe, Leu or Met
  Variant (40)..(40): Xaa in position 40 is Asn or Ser
  Variant (41)..(41): Xaa in position 41 is Ile or Val
  Variant (43)..(43): Xaa in position 43 is Ala or Gly
  Variant (44)..(44): Xaa in position 44 is Ala or Thr
  Variant (45)..(45): Xaa in position 45 is any amino acid
  Variant (48)..(48): Xaa in position 48 is Glu, Asn or Thr
  Variant (49)..(49): Xaa in position 49 is Glu, Asn, Gln or Thr
  Variant (52)..(52): Xaa in position 52 is any amino acid
  Variant (55)..(55): Xaa in position 55 is Glu, Lys or Arg
  Variant (56)..(56): Xaa in position 56 is Phe or Tyr
EKXXXPXXXXXSXEXXDXXXYXXXLXXXXXLVDPXRXXXXXSXXXIRXXPFXYWXXIP

SEQ ID NO: 6537 - protein, 39 aa, Artificial sequence
  protein pattern
  Variant (2)..(3): Xaa in position 2 to 3 is any or no amino acid
  Variant (6)..(6): Xaa in position 6 is any or no amino acid
  Variant (9)..(9): Xaa in position 9 is any amino acid
  Variant (10)..(10): Xaa in position 10 is Glu or Lys
  Variant (11)..(11): Xaa in position 11 is Leu or Met
  Variant (13)..(13): Xaa in position 13 is Asp, Glu or Lys
  Variant (14)..(14): Xaa in position 14 is Glu or Lys
  Variant (15)..(16): Xaa in position 15 to 16 is any amino acid
  Variant (17)..(17): Xaa in position 17 is Ile or Val
  Variant (18)..(18): Xaa in position 18 is Glu or Pro
  Variant (19)..(19): Xaa in position 19 is Phe or Tyr
  Variant (20)..(20): Xaa in position 20 is Ile or Val
  Variant (21)..(21): Xaa in position 21 is Glu, His or Arg
  Variant (22)..(22): Xaa in position 22 is Ile or Val
  Variant (23)..(23): Xaa in position 23 is Asp, Glu or Lys
  Variant (24)..(24): Xaa in position 24 is Glu or Ser
  Variant (25)..(25): Xaa in position 25 is any amino acid
  Variant (26)..(26): Xaa in position 26 is Asp or Ser
  Variant (28)..(28): Xaa in position 28 is any amino acid
  Variant (29)..(29): Xaa in position 29 is Asp, Glu, Gly or Ser
  Variant (31)..(31): Xaa in position 31 is Phe or Tyr
  Variant (32)..(32): Xaa in position 32 is any amino acid
  Variant (33)..(33): Xaa in position 33 is Gln or Arg
  Variant (34)..(34): Xaa in position 34 is Ala, Cys or Val
  Variant (35)..(35): Xaa in position 35 is any amino acid
  Variant (36)..(36): Xaa in position 36 is Ala, Glu, Asn or Gln
  Variant (37)..(37): Xaa in position 37 is Ile, Leu or Val
  Variant (38)..(38): Xaa in position 38 is Ile or Val
  Variant (39)..(39): Xaa in position 39 is Glu, Lys or Arg
RXXFQXLLXXXLXXXXXXXXXXXXXXYXXRXXXXXXXXX

SEQ ID NO: 6538 - protein, 22 aa, Artificial sequence
  protein pattern
  Variant (2)..(2): Xaa in position 2 is any amino acid
  Variant (5)..(5): Xaa in position 5 is any amino acid
  Variant (6)..(6): Xaa in position 6 is Phe or Leu
  Variant (7)..(7): Xaa in position 7 is any amino acid
  Variant (9)..(9): Xaa in position 9 is Asp or Glu
  Variant (11)..(11): Xaa in position 11 is any amino acid
  Variant (12)..(12): Xaa in position 12 is any or no amino acid
  Variant (14)..(14): Xaa in position 14 is any or no amino acid
  Variant (17)..(17): Xaa in position 17 is any amino acid
  Variant (20)..(20): Xaa in position 20 is any amino acid
  Variant (21)..(21): Xaa in position 21 is Ala, Gly, Ser or Val
IXIHXXXEXGXXPXYPXGWXXW

SEQ ID NO: 6539 - protein, 19 aa, Artificial sequence
  protein pattern
  Variant (3)..(3): Xaa in position 3 is Leu or Val
  Variant (4)..(4): Xaa in position 4 is Asn or Ser
  Variant (5)..(5): Xaa in position 5 is Ala, Asp or Gly
  Variant (9)..(9): Xaa in position 9 is Asn or Ser
  Variant (13)..(13): Xaa in position 13 is Ala, Asn, Gln or Thr
  Variant (16)..(16): Xaa in position 16 is any amino acid
QLXXXKIKXPSAXKLXALH

SEQ ID NO: 6540 - protein, 13 aa, Artificial sequence
  protein pattern
  Variant (4)..(4): Xaa in position 4 is any amino acid
  Variant (5)..(5): Xaa in position 5 is any or no amino acid
  Variant (7)..(7): Xaa in position 7 is any or no amino acid
  Variant (11)..(11): Xaa in position 11 is Phe or Tyr
ALGXXQXYIDXAV

SEQ ID NO: 6541 - protein, 8 aa, Artificial sequence
  protein pattern
  Variant (2)..(2): Xaa in position 2 is any amino acid
QXFKYQKN

SEQ ID NO: 6542 - DNA, 2187 bp, Synechocystis sp. PCC 6803
  CDS (1)..(2187): transl_table=11
atgatccaagctatgccctctgctcccaccgttgactttaaagatcctgcttactatttcaatcgagaattgagttggttagcctttaatcagcgggtgctccatgaaggtttagacgaccgtacccccttgttggaacggttaaagtttttggcgattttttgctccaacctagatgaattttttatggtcagggtggcggggctcaagcaacaggtagaagcgaatgtcaccaagttgactgcggatggtcgtactccatcccaacagcttaaagaaattagcaaaagtctgcggcctttggtatatcaacaaaaccaggtgtttgagtatgtgctcaaggaaaaattagcggatgagggcattttcctcaacgattatgtagatctaagccaagaagaaagacagtatttgcatcaattctatgatgaccatattttcccggttttaactcccctggcggtggaccccagccatccttttccctacatttccaaccttagtcttaatttgggggtggtggtgcgagacccggatacggatgaagaattatttgccagggtaaaagtgccccccactctgccccgctttgtggctttgccggaggacgtgtgtcagccagaccccaacaaaccatggctctggaccggtgtgcccctggagcaggtcatcgcccacaatttagcttccctttttcccggcatgatcatccaggaatgtcatttatttcgggtgacccgtaacgcagacattgcagtggaagaagacgaggctgatgatctactcctggcgatcgaagaggaattgcgtaaacgtagggtggggaaatccgctgtgcgcttggagatcaatgcttcaactccgaaaaatattcgcgatcgcctgatgacggatctagggctagaagaaattgacgtttatgacattgacggcctgttggggctgaaggatctgttctttttcctttctttacctgctccccacctcaaggacgaaccctgggcttcggttattcctccccgcctgaagcatgtctatgaatttgtcgatggggacgaagacggccgggtccagcaggaggggatagatatttttactctgattcgccagggagatattttagttcaccatccctaccaatccttcaccgcttcggtgcaacaatttattacccaggcggcctacgatccccatgtattgaccattaaaatgaccctgtaccgcacttcgggggattcccccattgttaacgctctgattgcggcggcggaaaatggcaaacaggtggcggtgttggtggaactcaaggcccgttttgatgaagaaaataacattaactgggctagaaagctagaacagtacggcgtccatgtggtctatggactggtggggctaaaaacccacactaaaaccgtcctcgtggtgcgccaggaaggccctgatatccgtcgttacgttcacattggtactggtaattacaatcccaaaaccgctaagctctacaccgatttggggttgattacctgtcgtccggaattgggcaatgacctgaccaatttatttaactttctcaccggctattcccgccaaaaggattaccaaaaattgctggtggctccggttaatatgcgggaaagaatggtggccatgattgagcgggaagcggaccattgtttaaatgggggcaccggccgcattgtggccaagatgaattccctggtagatacccagatcattcgtgccctctacgcagcttcccaggcgggggtgcagattgatctgattgtgcggggtatttgttgcctccgaccgggggtggaaaatgtcagtgaaaacattcgggtaatcagtgtaattggtcgtctgttggagcactcccgcattttctatttccacaatggcggtgaagaggaaatttacattggcagtgccgattggatgagtcgtaatctaacccgacgggtggaggcggtggtgccggtggaacagccggatctcaaacaggaattacagtccatcttgggcattcttttggccgataatcgtcaagcttgggagctacagcccgatggcacctatgtgcaacgccgtcccgcttccccggaacaaagccagagttcccaggcaattttcactgcccaggcgatcgccgaaactacggaagacccggaactacgttcagtttga

SEQ ID NO: 6543 - protein, 728 aa, Synechocystis sp. PCC 6803
MIQAMPSAPTVDFKDPAYYFNRELSWLAFNQRVLHEGLDDRTPLLERLKFLAIFCSNLDEFFMVRVAGLKQQVEANVTKLTADGRTPSQQLKEISKSLRPLVYQQNQVFEYVLKEKLADEGIFLNDYVDLSQEERQYLHQFYDDHIFPVLTPLAVDPSHPFPYISNLSLNLGVVVRDPDTDEELFARVKVPPTLPRFVALPEDVCQPDPNKPWLWTGVPLEQVIAHNLASLFPGMIIQECHLFRVTRNADIAVEEDEADDLLLAIEEELRKRRVGKSAVRLEINASTPKNIRDRLMTDLGLEEIDVYDIDGLLGLKDLFFFLSLPAPHLKDEPWASVIPPRLKHVYEFVDGDEDGRVQQEGIDIFTLIRQGDILVHHPYQSFTASVQQFITQAAYDPHVLTIKMTLYRTSGDSPIVNALIAAAENGKQVAVLVELKARFDEENNINWARKLEQYGVHVVYGLVGLKTHTKTVLVVRQEGPDIRRYVHIGTGNYNPKTAKLYTDLGLITCRPELGNDLTNLFNFLTGYSRQKDYQKLLVAPVNMRERMVAMIEREADHCLNGGTGRIVAKMNSLVDTQIIRALYAASQAGVQIDLIVRGICCLRPGVENVSENIRVISVIGRLLEHSRIFYFHNGGEEEIYIGSADWMSRNLTRRVEAVVPVEQPDLKQELQSILGILLADNRQAWELQPDGTYVQRRPASPEQSQSSQAIFTAQAIAETTEDPELRSV

SEQ ID NO: 6544 - DNA, 2184 bp, Staphylococcus epidermidis
  CDS (1)..(2184)
atgaggtgtatgtatagtatgcaaactcgattgggagaaaaagatattaatttaccgcagtattacaacaatagggagttaagttggctagattttaactacagagtattacaagaatcatatgataaaaataatccgttgcttgaaaaacttaactttatttctatcttcagttcaaatttagatgaattctttatggttcgagtggctgggttaaaagaccaagtcaaaatgggatatgacaaacctgaaaataaagcacagatgacgcctcaagaacaacttgatgctattaaaattaaaaatactgactatgtgaacactcaatatcaacgttataacgaattaattaaagaattagccaattacgatattgagatggtaaaacctgaagacttatcagatgcattgatagaaaaattagaaaaagagttcaagttaagtgtcttgccgacactcactccgttaggtattgatgcgtatcatccatttccaaagttaaataataaaagtttaaatatttttgttgatatcgatacggaagatgccattaattcagctatcgttcaaattccttcattaattccacgctttttaactttaaatgagggtacaaaacaatacgttgtcatggtagaagatgtaattacgtatttcatcaattatctatttacaggatacgaagtactaaatacttttactttccgaataacacgtaatgcagatttaaccattcatgaagatggcgctgaggacttgcttatagaaattgaacgtttcttgaaagaacgtaagagtggttcggctgtacgtttagaattagattgtcgcacttctgaaaaagagaatgtagaatggttaatcgatcaattagaaattgaagataatgatatttattatttagatggtccacttgatttaacattcttatttggattggttgatcatctatctcataagctcaaatatttaacgtatgagaaatatacccctcaaccacctagatcattaggcaacaagaatatctatcaattatcattagaaagagatatattcttccaccatccgtatgaatcatttgaaccaatagttgactttattcgacaagcagcagatgacccaaatacaatcgctatcaaacaaaccttgtatcgagtgagtaaggattcgccgattattaacagcttaaaagaagccgctgaaaacggcaagcaagtaacggtgctcgtagaattaaaagcacgctttgatgaagaaaataacgtacattgggcacgtatgttagaagatgctggctgtcacgttatttatggtatgacacatctaaaaacgcatagtaaaattgcgctagtcgttaaacgcatcaacaataaacttacgtcatttgttcatttaggcacaggtaactataacgataaaactgctaaattatacacagatatgggtatcatcacgacaaataaagatatcgctgaggatgcaattaacttctttaattacttgagtggttactcaacaaaaccagaatacaataaattgattgtagcaccatacgatattcgagacgtcttcattgatcgtatcgataaagaaatacgtagtcatttacaacatggtaacggtaaaattatgatgaaaatgaactctttaaccgataaaacgattatcgaaaagctcttcgaagcatcccaagcaggcgttaaaatacaactcatcattcgtggtatatgttgtcttaaaccaggcattccaggtattagcgaaaatatagaggttgttagtattgtgggtcgtttgcttgaacattcacgtatttactacttccataataatggtgaggcgcatatttatttatcttcagctgacgttatgacacgtaatatgattaaacgtgtcgaaatattattccctgttgaagataaatcaataggacaacgattagttaactatatgaatttacaattatctgacaaccaaaaaggtcgttaccaagatgcacaaggcgtttatcattatgtcgaaaacaattcatctcctttaaactctcaatcttacttgatgcaagaagcaattaagtatggagaagaactaaaaaaacaatcggtacaaccttctggacaacccgttcattctagacgtggtggtagttggatacgaaaattaaaaagtacatttaaaagataa

SEQ ID NO: 6545 - protein, 727 aa, Staphylococcus epidermidis
MRCMYSMQTRLGEKDINLPQYYNNRELSWLDFNYRVLQESYDKNNPLLEKLNFISIFSSNLDEFFMVRVAGLKDQVKMGYDKPENKAQMTPQEQLDAIKIKNTDYVNTQYQRYNELIKELANYDIEMVKPEDLSDALIEKLEKEFKLSVLPTLTPLGIDAYHPFPKLNNKSLNIFVDIDTEDAINSAIVQIPSLIPRFLTLNEGTKQYVVMVEDVITYFINYLFTGYEVLNTFTFRITRNADLTIHEDGAEDLLIEIERFLKERKSGSAVRLELDCRTSEKENVEWLIDQLEIEDNDIYYLDGPLDLTFLFGLVDHLSHKLKYLTYEKYTPQPPRSLGNKNIYQLSLERDIFFHHPYESFEPIVDFIRQAADDPNTIAIKQTLYRVSKDSPIINSLKEAAENGKQVTVLVELKARFDEENNVHWARMLEDAGCHVIYGMTHLKTHSKIALVVKRINNKLTSFVHLGTGNYNDKTAKLYTDMGIITTNKDIAEDAINFFNYLSGYSTKPEYNKLIVAPYDIRDVFIDRIDKEIRSHLQHGNGKIMMKMNSLTDKTIIEKLFEASQAGVKIQLIIRGICCLKPGIPGISENIEVVSIVGRLLEHSRIYYFHNNGEAHIYLSSADVMTRNMIKRVEILFPVEDKSIGQRLVNYMNLQLSDNQKGRYQDAQGVYHYVENNSSPLNSQSYLMQEAIKYGEELKKQSVQPSGQPVHSRRGGSWIRKLKSTFKR

SEQ ID NO: 6546 - DNA, 1987 bp, Helicobacter pylori
  CDS (51)..(1937)
agcgcttgaaatttttagccatttatgacacgaatttagacgaattttacatgataagagtggcagggcttaaacaactctatgagcataaaatcgcctctaaaggcattgatggcgcaagccctgaagaacaattagaaaaaatcaagcattatttagcgcatgaaattgaagaaagggagttagaattccaaaaaatccaagccctactctttaaaaaagggctttgtatcaccccctataatgaattgaatttagagcaaaaagcgaaggctaaaacctattttaaagagcagctttacgcgttagttttgccttttaaattggattcttcacacactttcccgcctttagcgaatttgactttcgcgctttttgcccgcatcaaagacaaagaaacccaaattatctcctatgcgctcatcaaactcccctcttttatcttccgttttgtagagctagaaaaaggcttgtttgtgttagctgaagaaatcgtggaagcgcatttagaagaattgtttttagagcatgagattttagattgcatggcgtttagggtaacttgcgatgcggatattgctatcactgaagatgaagcgcatgattatgcagatttgatgagtaagagtttgaggaaacgcaatcaaggcgaaatcgtgcgcttgcaaacccaaaaagggagtcaagagcttttaaaaaccctcttagcgtctttaaggagttttcaaacccactcttacaaaaagcacaaactcaccggcatgcatatctataaaagcgcgatcatgctcaatttaggggatttgtgggaattagtcaatcatagcgattttaaagcgctcaaatcgcccaatttcacacccaaaatccaccctcatttcaatgaaaacgatcttttcaaatctatagaaaaacaggatctgttgctgtttcatccttatgaaagttttgagcctgtgattgatttaatagagcaagccgctagcgatccagccaccctttctatcaaaatgacgctttatcgtgtgggcaagcattcccccattgtcaaagctttgattgaagcggcgagcaagattcaagtgagcgttttagtggaattaaaagcgcgctttgatgaagagagcaatctgcactgggcaaaagctttagaaagggcgggcgcgttagtcgtttatggcgttttcaaactcaaagtgcatgctaaaatgctattgatcactaaaaaaacagacaaccaattacgccatttcacccatttaagcacgggcaattacaaccctttgagcgctaaagtctataccgatgtgagtttttttagcgctaaaaatgaaatcgctaacgacattatcaagcttttccattccttgctcactagcagcgcgactaatagcgcattagaaacgctttttatggcacccaaacaaatcaagcctaaaatcattgaactcattcaaaatgaaatgaatcaccaacaagaaggctatatcattttaaaagccaacgccctagtggatagcgaaatcattgaatggctctatcaagcctctcaaaaaggggttaaaattgatctcattattagagggatttgctgtttaaagccccaagtcaagggcttgagcgaaaatatcagggtgtattctatcgtggggaaatatttagaacatgcacgcatttattattttaaacatgaaaatatttatttttctagcgcggatttaatgcccaggaatttagaaaggcgcgtggaattgctcattccagccacaaacccaaagatcgctcataaattgttgcatattttagaaatccaactcaaagacaccttaaaacgctacgagttaaattctaaaggccgttacattaaagtttcaaaccctaacgatcctttaaattcgcaggattattttgaaaaacaagcccttaaaaccttttaagggttatcgttcaaatcataaaagataaggatttaaatgctttattcatt

SEQ ID NO: 6547 - protein, 628 aa, Helicobacter pylori
MIRVAGLKQLYEHKIASKGIDGASPEEQLEKIKHYLAHEIEERELEFQKIQALLFKKGLCITPYNELNLEQKAKAKTYFKEQLYALVLPFKLDSSHTFPPLANLTFALFARIKDKETQIISYALIKLPSFIFRFVELEKGLFVLAEEIVEAHLEELFLEHEILDCMAFRVTCDADIAITEDEAHDYADLMSKSLRKRNQGEIVRLQTQKGSQELLKTLLASLRSFQTHSYKKHKLTGMHIYKSAIMLNLGDLWELVNHSDFKALKSPNFTPKIHPHFNENDLFKSIEKQDLLLFHPYESFEPVIDLIEQAASDPATLSIKMTLYRVGKHSPIVKALIEAASKIQVSVLVELKARFDEESNLHWAKALERAGALVVYGVFKLKVHAKMLLITKKTDNQLRHFTHLSTGNYNPLSAKVYTDVSFFSAKNEIANDIIKLFHSLLTSSATNSALETLFMAPKQIKPKIIELIQNEMNHQQEGYIILKANALVDSEIIEWLYQASQKGVKIDLIIRGICCLKPQVKGLSENIRVYSIVGKYLEHARIYYFKHENIYFSSADLMPRNLERRVELLIPATNPKIAHKLLHILEIQLKDTLKRYELNSKGRYIKVSNPNDPLNSQDYFEKQALKTF

SEQ ID NO: 6548 - DNA, 2139 bp, Alloiococcus otitis
  CDS (1)..(2139)
atggtttcccaaagggttgattttagtgatccaaagtattttgagaaccgtgagttatcatggttagatttcaatgaacgggttatcgcccaagccgaagatgaccgcaaccccttgcttgaacaattgaaatttatttccatcgggtcttccaacctggatgaatttgtccgagttagggtggctggtctccaagaccaatccaaattaggggttacagatccggataccaaaaagcaatggtctcccaatagacaattagacgaaattgctagtcgcaatgaaaaaaatgtcaaataccaatatggcctctataagaaaaaaatggccgagctcaaagaagttggcgtcaaggcaccagaaacccagctacttgaaggcttagacagccaggccttgcgggattatttcgctgaaaatatccaaccaggcatcaccccctacggcattgatgcttaccgccccttcccccatctgaatgacggcctgatccatattttcgtcaaacttgagcgagacggcaatccctatattgctattgtgccagttccgtctctcttagaccgaatccagcagatcaagttgaatggtgaagaaaaatatgtcttgattgaagatattatccggcaaaacatcgatgccctcttcaagggcttccaagtccagtattctttctttttccgtatcacccggaatgctgacttagaactacaagagcaaggagcggaagacctcttatctgttattgaagactacattgaacggcggaagaacggtatggctgtccgcttagaagttgatacccgggacgccgacccccgctatgccgacgatgttgcctttttaatggaagagttggatctcctagaacgtgacgtttatgccctagatggtcctctagacttgacctttctaatggacctctacgacctcttggaagacgttcacccagacctgaccttcgagcctttcagtccaacctacccgcccgttttaattagacggtcggtttttgatggggctgacaagcaggatatcttcctccaccacccttacgattccttcaaacccatcatcgagatgattgaaaaatcagccgacgaccccaacaccattgccattaagatgaccctctaccgggtctccaaggattccccgctggtagctgccatgaaaaaagcagccaaaagagggattcaagtaaccgctctggtagaactcaaggcccgttttgatgaagctaacaatgtccactgggctaaggagctcgaggaagctggagtccacatcatctacggtatggaggagttaaaaacccacagtaaggcaaccctagtggttaagaaaacccctaatggcttccgccgttatgcccatctagggaccggtaactacaacgaaaaaaccgccaacctctataccgacatggggatcattaccagccaaccagacttaaccgaagatgtggctaagttctttaactacctgagtggttattctgaacagcccgactacaaccacctccatgtttccccctttgaaatccgagatacctttatcgaaaaaattaacaatgaaattgcctcccacaaaaaacatggcaacggccacattattgctaagatgaactccttaacagacaaggtcatcatcttgaaactttttgaagccagccaggaaggggtcaaaattgacctgatcgttcggggcatttgctgcctgattcctggagtcaagggtgtgagtgaaaatatcacagttcgatccatagtcggccgcttcttagaacatagccggatctactacttctaccaaaatggccaagaaaaactctatctttcttctgccgatatgatgacccggaatatgatccgccgggtagaactagctttcccagtcatggacaagaactgggcccagcacattatcgacctcttagacctgtacctgagtgacaataccaaggcttgggtcttggacagtgacggtaattacagccaagagcaacccaaagaagacgaagaggcaatcagtgttcaatactctctcttgaaaaaatcccaaaatctcaaagaagagcgaaaggaaaaagaacggaaaaattggttcgcccgcctctctgagaaattactccggtaa

SEQ ID NO: 6549 - protein, 712 aa, Alloiococcus otitis
MVSQRVDFSDPKYFENRELSWLDFNERVIAQAEDDRNPLLEQLKFISIGSSNLDEFVRVRVAGLQDQSKLGVTDPDTKKQWSPNRQLDEIASRNEKNVKYQYGLYKKKMAELKEVGVKAPETQLLEGLDSQALRDYFAENIQPGITPYGIDAYRPFPHLNDGLIHIFVKLERDGNPYIAIVPVPSLLDRIQQIKLNGEEKYVLIEDIIRQNIDALFKGFQVQYSFFFRITRNADLELQEQGAEDLLSVIEDYIERRKNGMAVRLEVDTRDADPRYADDVAFLMEELDLLERDVYALDGPLDLTFLMDLYDLLEDVHPDLTFEPFSPTYPPVLIRRSVFDGADKQDIFLHHPYDSFKPIIEMIEKSADDPNTIAIKMTLYRVSKDSPLVAAMKKAAKRGIQVTALVELKARFDEANNVHWAKELEEAGVHIIYGMEELKTHSKATLVVKKTPNGFRRYAHLGTGNYNEKTANLYTDMGIITSQPDLTEDVAKFFNYLSGYSEQPDYNHLHVSPFEIRDTFIEKINNEIASHKKHGNGHIIAKMNSLTDKVIILKLFEASQEGVKIDLIVRGICCLIPGVKGVSENITVRSIVGRFLEHSRIYYFYQNGQEKLYLSSADMMTRNMIRRVELAFPVMDKNWAQHIIDLLDLYLSDNTKAWVLDSDGNYSQEQPKEDEEAISVQYSLLKKSQNLKEERKEKERKNWFARLSEKLLR

SEQ ID NO: 6550 - DNA, 2376 bp, Klebsiella aerogenes
  CDS (281)..(2338)
ctcgagatgcgcgacggcgcagctggctggacggcgtgaagttacccccgcaggttatgcggcggaagagtagtttgttacgtcgggtggcgctgctgcgcttacccgacttgttcattgcattacccgatattcccttctccaaccttctaaaatccccaacaaaaaaaataactgtcatacttttctggcactgttggacatatcgtggaaatgctcgccataataaggacgagacggatttaccacgtcctgtgattgaactggagtgtgagctgtaatgggtcaggaaaagttatatatcgagaaagagctaagctggttagcatttaacgaacgtgtactccaggaagcggcagacaaaagtaacccgctgatcgagcgcatgcgttttttgggcatttattccaacaacctggatgagttctacaaggttcgctttgccgagctgaaaagacgcatcatcatcagcgaagaacagggcttaaactcgcactcgcggcatctgctgggcaaaatccagtcccgcgtactgaaagccgatcaggaatttgacggcctgtataacgaactgctgctggagatggcgcgcaatcaaatcttcctgattaacgaacgccagctttccgttaaccaacaaaactggctgcgccactacttcaaacactatctgcgccagcacattaccccgattctgatcaaccgcgaaaccgatctggttcagttcctgaaggatgattacacctacctggcggtggaaattattcgcggtgagtctatccgttacccgctgctggagatcccgtccgacaaggtgccgcgctttgtgaacctgccgccggaaaccccgcgcagacgcaagccgatgatcctgctggataacatcctgcgctactgtctggacgacatcttcaaaggcttcttcgattacgatgcgttaaacgcctactcgatgaaaatgacccgtgacgccgaatatgacctggtgcacgagatggaagccagcctgatggagctgatgtcctccagcctgaaacagcctgacgccgagccggtgcgctttgtctatcagcgcgatatgccggacgccatggtggagatgctgcgcgataaactgaccatttcgcgctatgactccatcgtgccgggcggtcgttaccacaactttaaagactttattggcttcccgaacgtcggcaaagccaatctggtgaacaagccgctgccgcgcctgcgccatctgtggttcgataaattccgcaacggattcgacgccattcgcgaacgcgacgtcctgctctactatccgtatcacacgtttgagcacgtgctcgaactgctgcgtcaggcctcgttcgatccgagcgtgctggcgatcaaaatcaacatctaccgcgtggcaaaagattcccgcatcatcgacgcaatgatccacgcggcgcacaacgccaaaaaggtcaccgtggtggttgagctgcaggcgcgcttcgacgaagaggccaatattcactgggcgcgccgtctgacggaagccggtgtgcacgtcatcttctccgcgccggggctgaaaattcacgccaagctgttcctcatctcccgtaaagagggtgacgatgtagtgcgctatgcccacatcggtaccgggaactttaacgagaaaacttctctaatttataccgactactcgctcttaaccgccgacgcccgcatcactaacgaagtgcgccgggtctttaactttatcgaaaacccgtaccgtccggtgagctttgactatctgctggtctcgccgcagaactcgcgtcgcctgctgtacgatatgatcgataaagagatcgccaatgcccagaaagggctgtcgtccggcatcacgctgaagctcaacaacctggtcgacaaagggctggtggacagactgtatgcagcgtccagctcaggcgtgccggttaacctgctgatccgcggcatgtgctcgctgatcccggaactggaaggcatcagcgacaatattcgcgtgatcagcatcgttgaccgttacctggaacacgatcggatctatatttttgataatgcgggtgataaacaggtctatctctcttcggcagactggatgacgcgcaatattgactaccgtattgaagtcgcggcaccgctgctggatccgcgtctgaagcagcagatcctcgacatcatcgagattctgttcagcgataccgtgaaagcacgctatatcgacaaagaactcagtaaccgctatgtaccgcgcggcaaccgccgcaaagtgcggtcgcaactggcgatttacgactatatcaaatcactcgagcaacccgattaacctatgccgataaatgataagaccccacgcccgcagaa

SEQ ID NO: 6551 - protein, 685 aa, Klebsiella aerogenes
MGQEKLYIEKELSWLAFNERVLQEAADKSNPLIERMRFLGIYSNNLDEFYKVRFAELKRRIIISEEQGLNSHSRHLLGKIQSRVLKADQEFDGLYNELLLEMARNQIFLINERQLSVNQQNWLRHYFKHYLRQHITPILINRETDLVQFLKDDYTYLAVEIIRGESIRYPLLEIPSDKVPRFVNLPPETPRRRKPMILLDNILRYCLDDIFKGFFDYDALNAYSMKMTRDAEYDLVHEMEASLMELMSSSLKQPDAEPVRFVYQRDMPDAMVEMLRDKLTISRYDSIVPGGRYHNFKDFIGFPNVGKANLVNKPLPRLRHLWFDKFRNGFDAIRERDVLLYYPYHTFEHVLELLRQASFDPSVLAIKINIYRVAKDSRIIDAMIHAAHNAKKVTVVVELQARFDEEANIHWARRLTEAGVHVIFSAPGLKIHAKLFLISRKEGDDVVRYAHIGTGNFNEKTSLIYTDYSLLTADARITNEVRRVFNFIENPYRPVSFDYLLVSPQNSRRLLYDMIDKEIANAQKGLSSGITLKLNNLVDKGLVDRLYAASSSGVPVNLLIRGMCSLIPELEGISDNIRVISIVDRYLEHDRIYIFDNAGDKQVYLSSADWMTRNIDYRIEVAAPLLDPRLKQQILDIIEILFSDTVKARYIDKELSNRYVPRGNRRKVRSQLAIYDYIKSLEQPD

SEQ ID NO: 6552 - DNA, 2073 bp, Legionella pneumophila
  CDS (1)..(2073)
atggatactactctggataacccagattattatattaatagagaattttctgctgttgcgtttaatcagagagtactcatgcttgctaatgatgaacgcgtacccttattggaaagaatgagatttctcagtatctgcagcagtaatcttgatgaattttttgaaattcgggtggccgggttgaaagaaaaaattgccatgtcgtcaggcaagctaaccatagatggattacgggctgatgaagcattcagccaaataagccataaagctcatgctttaatcgatcagctttacaatatttttaacaaacaattacttccggcattgcgcaaagaaaatatccattttcttgagacagatcaatggactgatgacattcatttatgggcaaagcattactttaaacacgaaattctacctgttataagccctattgctctggatttggcccatcctcttccaaggcttatcaataaaagtttaaattttatcatttcattgagtgggaaagacgcttttgatcgaaatatcaattacgccgtagtacatgctccccgctctattccacgcatgatacatttgccttctgagctttgtggagatgcccattactttgtttatttatcttccattattaaaacgcatattaatagcttatttccaggtatggaaataagcggatgttattcatttcggttgacacgaaatagtgatttatttttaagagaagaagaaattgacgatttggctaaagcggtgcaaagagagatattttcccgtcattatggccatgtcgtgagattggaaattgaaaacaaatgccctgaaaaaattgttgacttcctcctgcagaaatatcatttgcgacatgaagacacctattattgtgatgggcccgttaatttacaacgatatatgagtgctattaacagcatcgatagacctgatctgaattatcccgcttttaccccacagtatcccaagttctccaaatcacaacgtaatttatttaatgttctcgacgaacaagacattttattacatcatccctatcaagcatttgatttagtcattgattttgtcaggcaagctgcttcagacccgaatgtactggcaattaatcaaacgctttacagaacccactctgaatcagtgatggtcgatgcgctggttaacgccgcccattcagggaaagaagtaaccgctgtcattgagctaagagcccgttttgacgaggaatccaacttaaaattggctaacaaactccatgctgcggggatcctggtactctacggagtagtaggctataaaactcatgcgaaaatgacgctggtagttcgaagaacgcatggtaaattaaaacgatatgtgcacttaagcacaggaaactatcatgaacaaacagccaagagatacactgatttgggattattaaccagtgaacccactattacttctgacgcccagctcatttttcaacaattaaccggtcttggaaaggttgttaagttaaaagccttgagccattcgccatttaccttacaaaaaactcttttacaattcatcgaacaatgcagtactgctgctacgggaggcattgatactgaaatcatcctgaaagtgaatggattaactgataaagtgatgattcaagcattatataaggcatcacaggcaggcgttaaaattaatcttcttgtacgtggggtgtgttgtttaaaaccaggattgcctggcgtgtctgagaacatcagagtcttgtcttttattggcagattcctcgaacatcacagagtgttttattttcgcattagcgaagaagaacactatttttgctccagtgccgatctgatggaaagaaatttatacaatcgtattgaaatcatgttccccatttatgatgagggatgtaaaaaaagaataaaaaacgaaatcattaaaaactatcttaaagataataataatgtttgggaaatgcaaagtgacgggacttacaagcacctcatgcaaaacggcggctgtgctcaggaaaagctgattgcactttatgaggaagaggacaaatcgatttag

SEQ ID NO: 6553 - protein, 690 aa, Legionella pneumophila
MDTTLDNPDYYINREFSAVAFNQRVLMLANDERVPLLERMRFLSICSSNLDEFFEIRVAGLKEKIAMSSGKLTIDGLRADEAFSQISHKAHALIDQLYNIFNKQLLPALRKENIHFLETDQWTDDIHLWAKHYFKHEILPVISPIALDLAHPLPRLINKSLNFIISLSGKDAFDRNINYAVVHAPRSIPRMIHLPSELCGDAHYFVYLSSIIKTHINSLFPGMEISGCYSFRLTRNSDLFLREEEIDDLAKAVQREIFSRHYGHVVRLEIENKCPEKIVDFLLQKYHLRHEDTYYCDGPVNLQRYMSAINSIDRPDLNYPAFTPQYPKFSKSQRNLFNVLDEQDILLHHPYQAFDLVIDFVRQAASDPNVLAINQTLYRTHSESVMVDALVNAAHSGKEVTAVIELRARFDEESNLKLANKLHAAGILVLYGVVGYKTHAKMTLVVRRTHGKLKRYVHLSTGNYHEQTAKRYTDLGLLTSEPTITSDAQLIFQQLTGLGKVVKLKALSHSPFTLQKTLLQFIEQCSTAATGGIDTEIILKVNGLTDKVMIQALYKASQAGVKINLLVRGVCCLKPGLPGVSENIRVLSFIGRFLEHHRVFYFRISEEEHYFCSSADLMERNLYNRIEIMFPIYDEGCKKRIKNEIIKNYLKDNNNVWEMQSDGTYKHLMQNGGCAQEKLIALYEEEDKSI

SEQ ID NO: 6554 - DNA, 2259 bp, Mesorhizobium loti MAFF303099
  CDS (1)..(2259): transl_table=11
atgttagagcaccgccatctggcggcgctgcaaaaggaacggttacgggcagggacaatgaatgaactgaagccggtgcagagcgaattcgtcaatgtcgaggtggccagttcagagggcggcaacccggatcgcttcgtcaaccgcgagttttcctggctacagttcaatcgccgcgtgctcgaggaatcgctgaacacccatcatccgctgctggagcgcgttcgcttcctgtcgatttcggcggccaatctcgacgagttcttcatggtgcgcgtcgccggtctcgccggccaggtgcgcgaaggcatcacgctgaaaagtcccgacggccgcacccccgaacagcagctcgagcagttgctgcgtgaggtcgagcggctgcaggaagaccagcagaagagcctttcggcgcttaccgtgctgctcaacaaggaaggcatcgagagcattacgcgcgatgcgctgaccaaggacgagaaagtctggctggaggagcatttccaggaccaggtgtttccggtgctgaccccgctgtcgatcgacccggcgcatccgttcccgttcatccccaatctcggcttctcgatggcgctgcaactgcgccaccgcaagaatggcgaggagatgagcgcgctcctgcgcctcccggtggcgctgaagcgcttcattcgtctgccggaccgcaagaaccatgtccgcttcatcccgctggaggaggcggtcggtctctatatcggcaagctgtttccgggctatgaggtcaagggttccggcacattccgcatcatccgtgacagcgatatcgaggtcgaggaagagtccgaggaccttgtgcgcctgttcgagacggcgctgaagcgccgccgccgcggctcggtgatccgcatcgaattcgacaggctgatgccggcggagttgcgcgacttcgtcgccggcgagctcggcgtctcgtcgagccgcatcagcgtcttgaccggtccgctggcgctcagccagatctccgagatcgtctccatcccgcgcgacgatctgaagttcacgccctacaatccgcgctttcccgaacgtatccgcgagcatggcggcgactgctttgccgccatccgcgagaaggacatcatcgtccaccacccctacgaatccttcgacgtcgtggtgcagttcctgcgccaggccatggctgatccggaagtggtggcgatcaaacagacgctttaccgcacctccaacgacagcccaatcgtgcgcgccctggtcgacgcggccgaggccggcaagtcggtgaccgccctggtcgaactcaaggcgcgtttcgacgaggaggccaacatccgctgggcgcgcgatctcgagcgcgccggtgtgcaggtcgtgttcggtttcctcgagttgaagactcacgcgaaaatgtcgctggtggtgcggcgcgaggacggcaagctgcgcaactacgtgcatctgggcaccggcaactatcatccggtcaccgcgcgcatctacaccgacctgtccttcttcaccaccgatccgacgatcgcccgcgacgtcgcccaactgttcaatttcatcaccggctatgccgagccgaccgccgaaatgcggctggcaatctcgccattcacgctgcgcaaccgcatcctgcagcacatttccgacgaagtcgcccatgcgctggaagggaagccggcgcgcatctggatgaagatgaacgcgctcgtcgacccgatcatcatcgacgcgctctatgatgccagccgcgccggggtcgagatcgatctcgtcgtgcgcggcatatgctgcctgcggccccaggtgccgggcctgtcagaaaacatcagggtcaagtcgatcgtcggccgcttcctcgaacacagccgcatctattgtttcggcaatggccatggcctgccgtcggacgaagcgatcgtctacatctcctcggccgacctgatgccgcgcaatctcgaccgtcgcgtcgagactatggtgccgatcaccaacccaactgtgcatgaacaggttttgggccagatcatgctgggcaacatcatggacaatcagcaaagtttcgacgtattggctgatggaacctcccggcgcgttgtgcttgaggagggcgaggaaccgttcaacgcgcaggaatatttcatgaccaatccgagcctgtccggacggggtgacgcgctgaagtcgcacgcgcccaggcgcattgcgcagttcaagcgccgcaagaagaacgctgcagcgtccacctga

SEQ ID NO: 6555 - protein, 752 aa, Mesorhizobium loti MAFF303099
MLEHRHLAALQKERLRAGTMNELKPVQSEFVNVEVASSEGGNPDRFVNREFSWLQFNRRVLEESLNTHHPLLERVRFLSISAANLDEFFMVRVAGLAGQVREGITLKSPDGRTPEQQLEQLLREVERLQEDQQKSLSALTVLLNKEGIESITRDALTKDEKVWLEEHFQDQVFPVLTPLSIDPAHPFPFIPNLGFSMALQLRHRKNGEEMSALLRLPVALKRFIRLPDRKNHVRFIPLEEAVGLYIGKLFPGYEVKGSGTFRIIRDSDIEVEEESEDLVRLFETALKRRRRGSVIRIEFDRLMPAELRDFVAGELGVSSSRISVLTGPLALSQISEIVSIPRDDLKFTPYNPRFPERIREHGGDCFAAIREKDIIVHHPYESFDVVVQFLRQAMADPEVVAIKQTLYRTSNDSPIVRALVDAAEAGKSVTALVELKARFDEEANIRWARDLERAGVQVVFGFLELKTHAKMSLVVRREDGKLRNYVHLGTGNYHPVTARIYTDLSFFTTDPTIARDVAQLFNFITGYAEPTAEMRLAISPFTLRNRILQHISDEVAHALEGKPARIWMKMNALVDPIIIDALYDASRAGVEIDLVVRGICCLRPQVPGLSENIRVKSIVGRFLEHSRIYCFGNGHGLPSDEAIVYISSADLMPRNLDRRVETMVPITNPTVHEQVLGQIMLGNIMDNQQSFDVLADGTSRRVVLEEGEEPFNAQEYFMTNPSLSGRGDALKSHAPRRIAQFKRRKKNAAAST

SEQ ID NO: 6556 - DNA, 2211 bp, Pseudomonas aeruginosa PAO1
  CDS (1)..(2211): transl_table=11
atgaatacgcagcaaggacttgatgagatcgaacgtatcgccgccgacgaaaccgtagtggcgaacgtggaaagcgaagcagaagtgaagatggccgaaacgatcccggtggaaacgccacctgcggtggttcccagcgtggatgacagcagcctgtacattcatcgcgagctctcccagttgcagttcaacatccgcgtgctcgaacaggcgctggacgagtcctacccgctcctggagcggctgaagttcctcctcatcttctcgagcaacctcgacgaattcttcgagatccgcatcgccggcctgaagaagcagatcaccttcgcccgcgagcaggccggcgccgacggcctgctgccgcaccaggccctggcgcggatcagcgagctggtccacgagcaggtatcgcggcagtaccggatcctcaacgagaccctgttgccggagctggccaagcaccagatccgcttcatccgccggcgtcactggacgctgaagatcaagacctgggtgcggcgcttcttccgcgacgagatcgcgccgatcatcaccccgatcggcctcgacccgacccatccgttcccgctgctggtgaacaagagcctcaacttcatcgtcgagctggaggggatggatgccttcggccgcgactccggcctggcgatcatcccggcgccgcgcctgctgccacggatcatcaggctgccggaagacgttggcggcgagggtgacaactacgtgttcctgtcgtcgatgatccacgcccacgccgacgacctgttccccggcatgaaggtgaagggctgctaccagttccgcctgacccgcaacgccgacctgtcggtggacaccgaggatgtcgaggacctggcccgcgcgctgcgcggcgagctgttctcgcgtcgctacggggatgcggtacgcctggaggtggtggatacctgcccgcagaacctgaccaactacctgctcaagcagttcggcctgtccgaaagcgagttgtacaaggtcagcggcccggtcaacctgacccgcctgttcagcgtcaccggcctggaaagccatccggagctgcagtacccgcccttcaccccggcgatcccgcgtcttttgcagaagaaggaaaacctcttcaacgtcctcagcaagctcgacgtgttgctgatgcacccgttcgaatccttcaccccggtgatcgacctgctgcgccaggccgccaaggatccgaacgtgctggcgatcaagcagaccctgtaccgcagcggcgccaactctgagatcgtcgacgccctggtcgaggcggcacgcaacggcaaggaggtcaccgcggtgatcgagctgcgcgcccgcttcgacgaagagtccaacctgcaactggccagccgcctgcaacaggccggcgcggtggtgatctacggcgtggtcggcttcaagacccacgccaagatgatgctgatcctccgtcgcgaggacggcgaactgcgccgctacgcgcacctgggcaccggcaactaccatgccggcaacgctcgcctgtacaccgactacagcctgctgaccgccgacgtggcgctctgcgaggacctgcacaagctgttcaaccaactgatcgggatgggcaagacgctgcgcatgaagaagctgttgcatgcgccgttcaccctgaagaagaacctgctggaaatgatcaaccgcgaggcggcccaggcggcgctcggccagcctgcgcacatcatggccaaggtcaactcgctgaccgatccgaaggtcatccgcgccctgtacaaggccagccaggccggggtcaggatcgacctggtggtgcgtggcatgtgctgcctgcggccgggcatcccgggggtctcgcacaatatccacgtgcgctcgatcatcgggcgcttcctcgagcacagccgcatctactacttcctcaacggcggcgacgagaagctctatctctccagcgccgactggatggagcgcaacctcgacatgcgcgtcgagacctgcttcccggtggaaggcaagaagctggtgcagcgggtcaagaaggaactggaaacgtacctgaccgacaacacccaggcctgggtgttgcaggccgacggtagctaccagcggctcagtcccaccggtaaccagaacccccgcaatacccaggcgaccctgctggagaagctggccgcgccggtgcttaccgcacgttga

SEQ ID NO: 6557 - protein, 736 aa, Pseudomonas aeruginosa PAO1
MNTQQGLDEIERIAADETVVANVESEAEVKMAETIPVETPPAVVPSVDDSSLYIHRELSQLQFNIRVLEQALDESYPLLERLKFLLIFSSNLDEFFEIRIAGLKKQITFAREQAGADGLLPHQALARISELVHEQVSRQYRILNETLLPELAKHQIRFIRRRHWTLKIKTWVRRFFRDEIAPIITPIGLDPTHPFPLLVNKSLNFIVELEGMDAFGRDSGLAIIPAPRLLPRIIRLPEDVGGEGDNYVFLSSMIHAHADDLFPGMKVKGCYQFRLTRNADLSVDTEDVEDLARALRGELFSRRYGDAVRLEVVDTCPQNLTNYLLKQFGLSESELYKVSGPVNLTRLFSVTGLESHPELQYPPFTPAIPRLLQKKENLFNVLSKLDVLLMHPFESFTPVIDLLRQAAKDPNVLAIKQTLYRSGANSEIVDALVEAARNGKEVTAVIELRARFDEESNLQLASRLQQAGAVVIYGVVGFKTHAKMMLILRREDGELRRYAHLGTGNYHAGNARLYTDYSLLTADVALCEDLHKLFNQLIGMGKTLRMKKLLHAPFTLKKNLLEMINREAAQAALGQPAHIMAKVNSLTDPKVIRALYKASQAGVRIDLVVRGMCCLRPGIPGVSHNIHVRSIIGRFLEHSRIYYFLNGGDEKLYLSSADWMERNLDMRVETCFPVEGKKLVQRVKKELETYLTDNTQAWVLQADGSYQRLSPTGNQNPRNTQATLLEKLAAPVLTAR

SEQ ID NO: 6558 - DNA, 2151 bp, Neisseria meningitidis MC58
  CDS (1)..(2151): transl_table=11
atgccgtctgaaaccggcgcagatgccgccaagccttcagacggcattgcctgcccgctccgaccgaacaacaaccatctttgggagaaccttatgcccgaacaaaaccgcatcctctgccgcgaactgagcttgctggcattcaaccgccgcgtgttggcgcaggcggaagaccaaaacgtcccccttttggaacgcctgcgcttcctgtgcatcgtttcatccaacctcgacgagtttttcgaagtccgtatggcgtggctgaagcgcgaacacaaacgctgcccgcagcgcaggctggacaacggcaaaatgccgtctgaaaccatcgccgacgttaccgaagcggcgcgctccctgatacggcaccagtacgacctgttcaacaacgtccttcagcccgagctggcacaagaaggcatccatttttaccgccgccgaaattggacagacacacagaaaaaatggattgaagactatttcgaccgcgaattgctgccgatcctgacccccatcggactcgacccttcccaccccttcccgcgcccgctgaacaaatcgctcaacttcgccgtcgaactcgacggcacagacgcgttcggcaggccttcggggatggcgattgtgcaggcaccacgcatcctgccgcgcgttgttcccctgccgtccgaactgtgtggcggcggacacggcttcgtcttcctctcctccatcctgcacgcccacgtcggaaaactcttcccgggcatgaacgtcaaaggctgccaccagttccgcctgacgcgcgacagcgacttgaccgttgacgaagaagacctgcaaaacctccgcgccgccattcaaaacgagttgcacgaccgcgaatacggcgacggcgtgcggctcgaagtcgccgacacctgtcccgcctacatccgcgactttctgctcgcgcaattcaaactgaccgccgccgaactctatcaggtcaaaggcccggtcaacctcgtgcgcctcaacgccgtccccgacctagtcaaccgccccgatttgaaatttcccacacacacgccgggcagactgaaagccttgggcaaaaccgcgtccatattcgatttggtgcgccaatcgcccatcctgctgcaccacccctaccaatcgttcgaccccgttgtcgaaatgatgcgcgaagccgccgccgaccccgccgtgcttgccgtcaaaatgacgatttaccgcaccggcacgcgttccgaactcgtccgcgccctgatgaaggcggcactcgccggcaaacaagtaaccgtcgtcgtcgaactgatggcgcgttttgacgaagccaacaacgtcaactgggcgaagcagctcgaagaggcgggcgcgcacgtcgtgtacggcgtgttcggctacaaagtccacgccaaaatggcactggtcatccgccgcgaagacggcgtgctcaaacgttacgcccatctcggcacgggcaactaccaccaaggcacatcgcgcatctacaccgacttcggcctcattaccgccgacgaacaaatcaccgccgatgtgaacatattgtttatggaaatcacaggtttgggcaaacccgggcggctgaacaaactctaccaaagtccgtttaccctgcacaaaatggttatcgaccgcatcgcacgcgaaaccgaacacgcaaaagccggcaaaccggcgcggattaccgccaagatgaattcgctcatcgaaccgaccgtcatcgaagccctgtatcgggcaagcgcggcaggcgtacaaatcgatttgattgtgcgcggtatgtgcaccttgcgcccgggtgtaaaaggcttgtccgaaaacatccgcgtccgctccatcgtcggcaggcagctcgaacacgcgcgcgtgtattacttccataacaacggcacggacgatacctttatctccagcgcggattggatggggcgcaacttcttccgccgcatcgaaaccgccacgccgattaccgcgcccgaactcaaaaagcgcgttatacatgaaggactgaccatggcactggacgacaacacccacgcgtggctgatgcagcccgacggcggctatatccgcgccgcacctgccgagggcgaatccgaagccgacctgcaaaacgatttgtggacactgctcggaggctga

SEQ ID NO: 6559 - protein, 716 aa, Neisseria meningitidis MC58
MPSETGADAAKPSDGIACPLRPNNNHLWENLMPEQNRILCRELSLLAFNRRVLAQAEDQNVPLLERLRFLCIVSSNLDEFFEVRMAWLKREHKRCPQRRLDNGKMPSETIADVTEAARSLIRHQYDLFNNVLQPELAQEGIHFYRRRNWTDTQKKWIEDYFDRELLPILTPIGLDPSHPFPRPLNKSLNFAVELDGTDAFGRPSGMAIVQAPRILPRVVPLPSELCGGGHGFVFLSSILHAHVGKLFPGMNVKGCHQFRLTRDSDLTVDEEDLQNLRAAIQNELHDREYGDGVRLEVADTCPAYIRDFLLAQFKLTAAELYQVKGPVNLVRLNAVPDLVNRPDLKFPTHTPGRLKALGKTASIFDLVRQSPILLHHPYQSFDPVVEMMREAAADPAVLAVKMTIYRTGTRSELVRALMKAALAGKQVTVVVELMARFDEANNVNWAKQLEEAGAHVVYGVFGYKVHAKMALVIRREDGVLKRYAHLGTGNYHQGTSRIYTDFGLITADEQITADVNILFMEITGLGKPGRLNKLYQSPFTLHKMVIDRIARETEHAKAGKPARITAKMNSLIEPTVIEALYRASAAGVQIDLIVRGMCTLRPGVKGLSENIRVRSIVGRQLEHARVYYFHNNGTDDTFISSADWMGRNFFRRIETATPITAPELKKRVIHEGLTMALDDNTHAWLMQPDGGYIRAAPAEGESEADLQNDLWTLLGG

SEQ ID NO: 6560 - DNA, 2226 bp, Mycobacterium tuberculosis CDC1551
  CDS (1)..(2226): transl_table=11
atgagcaatgatcgcaaggtgaccgaaatcgaaaacagtcccgtcacagaggtgcggccagaggagcatgcgtggtatccagacgactcggcgctggcggcaccgcccgctgccacccccgccgcgattagcgaccagctaccctcggatcgctacctgaaccgggagctgagttggctggacttcaacgcgcgcgtgcttgccctggccgccgataagtcgatgccattgctcgagcgcgccaagtttctggcaatcttcgcgtccaatctcgacgagttctacatggtccgggtggccggcctcaaacgccgcgacgagatggggttgtcggtgcgctccgccgacggtctaacaccgcgcgaacaactaggccggatcggcgagcagactcaacagctcgccagccggcatgcccgggtgttcctcgattcggtgctacccgcgctcggcgaggaaggcatctacatcgtcacctgggccgatttggatcaggctgagcgcgaccgattgtcgacctatttcaacgaacaggtcttccccgtcctgaccccgctggccgtcgatcccgcccacccgttcccgtttgtcagcgggttgagcttgaacctggcggtcacggtacgccaacctgaagacggcacccagcatttcgcgagggtcaaggtgcccgacaacgtcgaccgcttcgtcgaactcgctgcacgtgaggccagcgaggaagctgcggggaccgaaggccggaccgcgctgcggttcctgccgatggaggagctgatcgcggccttccttccggtgcttttcccgggtatggaaatcgtcgagcaccacgcatttcgcatcactcgcaacgctgacttcgaggttgaagaggatcgcgacgaggacctactgcaggcgctcgagcgagaactggcccgccgccggttcggttcaccggtgcgactcgagatcgcagacgacatgaccgagagcatgctggagttgctgcttcgcgaactcgacgtgcatcccggtgatgtcatcgaagtgcccgggctgctcgacctatcgtcgttgtggcagatctacgccgtggaccgcccgacgcttaaggatcggacattcgtcccagctacccatcccgccttcgccgagcgggaaacacccaaaagcatcttcgcgacgctgcgcgaaggcgatgtgctggttcaccatccgtatgactcgttctccaccagcgtgcagcgattcatcgaacaggccgcggccgaccccaacgtgctggcgatcaaacagacgctgtaccgcacctccggcgactcgccgatcgtccgggcgctgatcgacgccgccgaagccggaaagcaagtggtggcactggtcgagatcaaggcacgcttcgacgaacaggccaacatcgcctgggcgcgcgcactagaacaagccggcgtgcatgtggcgtacgggctcgtcgggctcaagacgcactgcaagaccgccttggtggtgcgccgcgaaggtccgacaatccggcggtactgccatgtcggcaccggcaattacaacagcaagacagcacgactctacgaggacgtcggactgctgaccgctgcacccgatatcggcgccgacttgaccgacttgttcaattcgctcaccggctactcacgcaagttgtcctaccgcaacttgttggtggccccgcacggaatccgcgccggcatcattgaccgcgtcgagcgggaggtcgcggcgcaccgtgcagagggtgcccacaacggcaaaggccgcatccgactcaagatgaatgcccttgttgatgagcaggtcatcgatgcgctgtaccgcgcgtcgcgagccggtgtgcggatcgaggtggtggtacgcggcatctgcgcgctgcgtccaggtgcgcagggcatttcggaaaacatcatcgtgcgctcgattctcggccgcttcctcgagcactcgcggatcctccatttccgtgccatcgacgagttctggatcggcagcgccgacatgatgcaccgcaacctcgaccggcgagtcgaggttatggctcaagtcaaaaacccgaggctgaccgcgcagctggacgaattgttcgaatccgcactggacccgtgcacccggtgctgggagctcgggcccgacgggcagtggaccgcgtcgccgcaagaaggccatagcgtgcgcgaccatcaggaatcgctgatggaacggcaccgcagcccctga

SEQ ID NO: 6561 - protein, 741 aa, Mycobacterium tuberculosis CDC1551
MSNDRKVTEIENSPVTEVRPEEHAWYPDDSALAAPPAATPAAISDQLPSDRYLNRELSWLDFNARVLALAADKSMPLLERAKFLAIFASNLDEFYMVRVAGLKRRDEMGLSVRSADGLTPREQLGRIGEQTQQLASRHARVFLDSVLPALGEEGIYIVTWADLDQAERDRLSTYFNEQVFPVLTPLAVDPAHPFPFVSGLSLNLAVTVRQPEDGTQHFARVKVPDNVDRFVELAAREASEEAAGTEGRTALRFLPMEELIAAFLPVLFPGMEIVEHHAFRITRNADFEVEEDRDEDLLQALERELARRRFGSPVRLEIADDMTESMLELLLRELDVHPGDVIEVPGLLDLSSLWQIYAVDRPTLKDRTFVPATHPAFAERETPKSIFATLREGDVLVHHPYDSFSTSVQRFIEQAAADPNVLAIKQTLYRTSGDSPIVRALIDAAEAGKQVVALVEIKARFDEQANIAWARALEQAGVHVAYGLVGLKTHCKTALVVRREGPTIRRYCHVGTGNYNSKTARLYEDVGLLTAAPDIGADLTDLFNSLTGYSRKLSYRNLLVAPHGIRAGIIDRVEREVAAHRAEGAHNGKGRIRLKMNALVDEQVIDALYRASRAGVRIEVVVRGICALRPGAQGISENIIVRSILGRFLEHSRILHFRAIDEFWIGSADMMHRNLDRRVEVMAQVKNPRLTAQLDELFESALDPCTRCWELGPDGQWTASPQEGHSVRDHQESLMERHRSP

SEQ ID NO: 6562 - DNA, 2049 bp, Clostridium acetobutylicum ATCC 824
  CDS (1)..(2049): transl_table=11
atagagaacttagctgatagaaatttaatagaagagttttggaggaggcggaagaataaaactaatccacttcttgagagatttagatttttatctatagcaagttctaatttagatgaattttttatggtaagggtagcgtctatagttgaccagataagtgctggtattactataccggatattgccggatatacacctcttaagaagcttcaattgataagagaaaaggttcactttatggtatatgaagagtacttgtgttttaaggaacttatttgtgacttaaaaaaacaagaaattacccttataaaccctaaagaattaagtgatacacagaaaaagtacataactaattattactacaatacaatttttccagtaattactcctatagtagtcgataaaagtaggccttttcctctcatattaaataaaagtcttaatattgcacttttaatagagggtgataatgattcagttatatttggtacagttcaggttccctctgtaataggtaggcttgtaaagcttcctatgggaaataagtttattcttttagaggatgtaataaagatgttttctaaagaattatttaatggtcataaaattttaaacatgagctgttacagaataactagaaatgctgatttggcaatagatgaagagggtgcagaagatttacttgagactatagaacagtctataaggagaagaaaatggggagaagttataagaatagaagtggaaaagaatatagatataaagcttttaaatatattgagaacagaggtagaggcagatgaagctgatgtatataagatagatggtgctatagatttgacctttctaaataaaattgcagctattaagggatatgaatgtttacgatacccaaaatttgaagcccaagtagtaccggagtttaatataaaagataagagtatgtttgaagtaataagggaaaaagatgtgcttttgtatcatccgtaccaatcctttcaacacgtagttgattttgtgaaaaaagcagcttctgatcctaatgttctagcaataaaacaaacactttatagagtgagtggtaaatcacctattgtagaggctttaatggaagctgctgaaaatggaaaagaagtaacggttttagtagagttaaaagcaagatttgatgaagaaaataatatagtttgggcaaaaagacttgaaaagtcaggatgtcatgtcatatatggacttgtaggattaaaaactcatggaaaactgcttattgtagtcagaaaagaagtaggtagaattaaaagttatgttcatatggccacagggaactataatgatgtaacggctaatttttatactgatttagggttatttacttcaaatgatatgattgcaaaagatgcttcttcaattttcaatatgctgtctggatatgctaagataagcagtatgaacaagctttttgtagcacctcttaatatgaggagtaaatttatagatttgataaacgaacaaattaagagtgcaaaggaagggaagaatgcaagaattatagttaagataaatgctcttgtagatagagagttaataacaaagctttatgaggcatcttttgcgggtgttgtaatagatttaattgtaagaggaatatgctgtttaagacctaattatggtgagataagtaggaatataaatgttataagtatagttggaagatttttagagcacagcagaatattttatttttataatggggaagaagaaaaagtatatctttcaagtgctgattggatgacaagaaatctggatagaagagttgaaatactgtttccagttgaagataaaaaaaataaatttatgataaaagaacagcttaagacgtaccttatggataatgtaaaggcaagaagattgagaagtgatggttcttatgaaagaatagaggatagtcatgatactttaaattctcaaaaatattttcaagaaaaggcaaaaaagattgctgtaaggagtagtgtcagaaagaaaataatagattttcatagatag

SEQ ID NO: 6563 - protein, 682 aa, Clostridium acetobutylicum ATCC 824
MENLADRNLIEEFWRRRKNKTNPLLERFRFLSIASSNLDEFFMVRVASIVDQISAGITIPDIAGYTPLKKLQLIREKVHFMVYEEYLCFKELICDLKKQEITLINPKELSDTQKKYITNYYYNTIFPVITPIVVDKSRPFPLILNKSLNIALLIEGDNDSVIFGTVQVPSVIGRLVKLPMGNKFILLEDVIKMFSKELFNGHKILNMSCYRITRNADLAIDEEGAEDLLETIEQSIRRRKWGEVIRIEVEKNIDIKLLNILRTEVEADEADVYKIDGAIDLTFLNKIAAIKGYECLRYPKFEAQVVPEFNIKDKSMFEVIREKDVLLYHPYQSFQHVVDFVKKAASDPNVLAIKQTLYRVSGKSPIVEALMEAAENGKEVTVLVELKARFDEENNIVWAKRLEKSGCHVIYGLVGLKTHGKLLIVVRKEVGRIKSYVHMATGNYNDVTANFYTDLGLFTSNDMIAKDASSIFNMLSGYAKISSMNKLFVAPLNMRSKFIDLINEQIKSAKEGKNARIIVKINALVDRELITKLYEASFAGVVIDLIVRGICCLRPNYGEISRNINVISIVGRFLEHSRIFYFYNGEEEKVYLSSADWMTRNLDRRVEILFPVEDKKNKFMIKEQLKTYLMDNVKARRLRSDGSYERIEDSHDTLNSQKYFQEKAKKIAVRSSVRKKIIDFHR

SEQ ID NO: 6564 - DNA, 2304 bp, Agrobacterium tumefaciens str. C58
  CDS (1)..(2304): transl_table=11
ttgactgtcacagttccgtcgtcaaactgttatacgggcaagaaggacgatcacgcgatgcagcaggatcacgggacggcaatcggtcaggggacggaacagggcatggacgctatcgcgcaggaagacttcaacaaggtgcagccggtggctgaggtcgagaacctctgggacagcccggcgcgtttcatcaaccgcgaattctcctggctgcagttcaaccgccgtgttctcgaggaaacgctgaacacggatcacccgcttctggaacggctgcgcttcctgtccatctcggccgccaatcttgatgaattcttcatggtccgcgtcgccggtctcgaaggccaggtgcgccagaagatcaccgtcaggacgcccgacggcaagacaccggccgagcagttggaagatattctaaaggaaatcgacaatctgcagatggagcaacaggcctcgcttgccgtcctgcagcaatatctcgccaaggaagaaatcttcatcgtgcggcctgccgcactttccgaagcggaccgtacctggcttggcaccgaattcgaggaacgtattttcccggtgctgacgccgctgtccatcgaccctgcgcacccgtttcccttcattccgaacctaggcttctccatgggcctgcagctcgacagcgtcaacggccgcgagccgatgacggcgctgttgcgtctgcccacggcgctcgatcgcttcgttcgtttgccggatgaaaaaaacgccatccgttacatcacgctggaagatgtggtcggcctgttcattcaccggctttatccgggctataccgttcgaggattcggcacgttccgcatcatcagagacagcgatatcgaggtggaggaagaggcggaagatctggttcgctttttcgaaagcgcgctgaagcgccgccgccgcggttcggtcatccgcatcgagaccgatagcgaaatgccgccgtcgctgcgccagttcgtggtgcatgagcttggcgtgcctgataatcgcgttgctgttctgcccggtttgctcgcgctcaacaccatttcggaaatcgtgcgtgcgccgcgcgacgacctgaaattcgagccttacaacgcccgtttcccggagcgcgtgcgcgaacatgccggcgattgcctcgctgccatccgcgaaaaggacatggtggttcaccacccctatgaaagcttcgacgtggttgtgcagttcctgttgcaggctgcgcgcgatcccgaagtgcttgccattaagcagacgctttaccgcacctccaatgacagcccgatcgttcgtgcgctgattgacgcggcggaagccggcaaatccgtgaccgcgctggtcgagttgaaggcgcgtttcgacgaagaggcgaacatccgctgggcgcgcgatctggagcgcgccggtgtgcaggtcgtgttcggcttcatcgaactcaagacccatgccaagatgtcgatggtggtgcgccgcgaagacggcaaactcagaacctattgccacctcggcaccggtaactatcacccgatcacggcgaagatttataccgacctgtccttcttcacctgcaacccgaagatcgcccatgacatggcgaatatcttcaacttcatcacgggttacggcgaaccggaagagggcatgaagctcgccatttcgccttacacgctgcgcgcccgcatcgtgaagcacatcaacgaagagatcgagcacgccaagcgcggtgcgccggcggcgatctggatgaagatgaattcgctggtcgaccctgaaatcatcgatacgctttaccgtgccagtgcggcgggcgttgagatcgatctggtaatccgcggtatctgctgcctgcgcccgcaggtggcgggactgtcggataacatccgcgtcaaatccatcgtcggccgcttcctggaacacagccgcatcttctgcttcggcaatggtttcggcctgccatccgacaaggctctggtctatatcggctctgccgacatgatgccgcgtaaccttgatcggcgcgtcgaaacgctggtgccgctcaccaatcccaccgtgcatgagcaggttctttcacagattatgctgggcaatctcattgacaaccagcagagctacgagatacttgcggacggaacgtcgaggcgcatcgaggtgcgtaaaggcgaagaaccgttcaacgcgcagcactatttcatgaccaatcccagcctttccggacgtggtgaagccttgaaatccagtgcgcccaaattgattgccgggttgatttcgtcccgcaagaaacaggctgaatga

SEQ ID NO: 6565 - protein, 767 aa, Agrobacterium tumefaciens str. C58
MTVTVPSSNCYTGKKDDHAMQQDHGTAIGQGTEQGMDAIAQEDFNKVQPVAEVENLWDSPARFINREFSWLQFNRRVLEETLNTDHPLLERLRFLSISAANLDEFFMVRVAGLEGQVRQKITVRTPDGKTPAEQLEDILKEIDNLQMEQQASLAVLQQYLAKEEIFIVRPAALSEADRTWLGTEFEERIFPVLTPLSIDPAHPFPFIPNLGFSMGLQLDSVNGREPMTALLRLPTALDRFVRLPDEKNAIRYITLEDVVGLFIHRLYPGYTVRGFGTFRIIRDSDIEVEEEAEDLVRFFESALKRRRRGSVIRIETDSEMPPSLRQFVVHELGVPDNRVAVLPGLLALNTISEIVRAPRDDLKFEPYNARFPERVREHAGDCLAAIREKDMVVHHPYESFDVVVQFLLQAARDPEVLAIKQTLYRTSNDSPIVRALIDAAEAGKSVTALVELKARFDEEANIRWARDLERAGVQVVFGFIELKTHAKMSMVVRREDGKLRTYCHLGTGNYHPITAKIYTDLSFFTCNPKIAHDMANIFNFITGYGEPEEGMKLAISPYTLRARIVKHINEEIEHAKRGAPAAIWMKMNSLVDPEIIDTLYRASAAGVEIDLVIRGICCLRPQVAGLSDNIRVKSIVGRFLEHSRIFCFGNGFGLPSDKALVYIGSADMMPRNLDRRVETLVPLTNPTVHEQVLSQIMLGNLIDNQQSYEILADGTSRRIEVRKGEEPFNAQHYFMTNPSLSGRGEALKSSAPKLIAGLISSRKKQAE

SEQ ID NO: 6566 - DNA, 2211 bp, Sinorhizobium meliloti 1021
  CDS (1)..(2211): transl_table=11
atggacagcgcaacgtctgcaatcacggaacacgaggcatctgccgagcagaagcgtgaggcgccggccgaggcgctggaccttctcaagagccccgagcgcttcgtcaaccgcgagttctcctggcttcagttcaaccgccgggtcctcgaggagacgctgaacacggcgcatccccttctggagcgcgtccgttttctatcgatctccgccgccaatctcgatgaattcttcatggttcgcgtcgcgggtctggagggccaggtccgttccgggctttcgctgcgcagcccggacggcctgacgccggcggaaacgctcgagagcattctgacggaggtcgacaatctgcagatggagcagcaggcatcgcttgccgtcctgcagcaatatctcgccaaggaagatatcctcatcgtccgtccggcttcgctttccgcgcaggatcgcagctggctcgcgaacgaattcgaccaggcgatcttccccgtgctgacgccgctctcgatcgacccggcacatccgttcccgttcattcccaatctcggcttctcgatcggcctgcagctcgtcagcaagaccggtcgcgacccgatgacggcactgctgcgcctgcccgtggcgctcgatcgcttcgttcgcctgccggacgtcaagaacgtcatccgctacatcaccctcgaagacgtcgtcagccagttcatcgaccggcttttccccggctacgaggtgaaggggtcgggcacgttccgcatcattcgagacagcgacatcgaagtcgaggaggaagccgaagacctcgtgcgccttttcgagacggccctcaagcgccgccgccgcgggtcggtgatccgcatcgagaccgattccgaaatgccggcttcgctgcgtcagttcgtcgtgcaggaactcggcgttcccgaaaatcgcgtcgcggtactgcctggcctgctggcgctgaatacgctttcggaaatcaccaaggcgccgcgcgaggatctgcgcttcgagccctacaacccgcgcttcccggaacgcgtacgcgaacacgcgggcgactgtcttgcggccatccgcgaaaaggacatggtggtccaccacccctacgaatccttcgacgtcgtcgtgcagttcctgctgcaggctgcgcgcgatccggacgtgctggcgatcaagcagacgctctaccgaacctcgaacgacagcccgatcgtgcgcgcgctgatcgatgccgccgaggccggcaagtcggtgaccgcgcttgtcgagctgaaggcgcgcttcgacgaggaggcaaatatccgctgggcgcgcgatctcgagcgcgccggcgtgcaggtggttttcggcttcatcgaattgaagacccacgcaaagatgtcgatggtggtgcgccgtgaggagggcaagctcaggacctattgccatctcggtaccggcaactaccacccggtcacggcgaaaatctacaccgacctgtcgttcttcacctgcaacccggtgatcgcccacgacatggcgaacatcttcaacttcatcaccggctacggcgagccggaagggggcatgaagctcgcggtctcaccgcatacgctgcgtccgcgcatcctcaagcacatcgaggaggagatcgtccatgcgcaagccgggcgtccggcgtcgatctggatgaagatgaactccctggtggatccggaaatcatcgacgcgctctacaaggcaagctgcgcgggcgtcgtgatcgatctcgtcgtgcgcggcatctgctgtctcaggccgcaggtgcccgggctctccgacaacatccgcgtcaaatccatcgtcggccgcttcctggagcattcaagaattttctgcttcggcaacggacatggacttccatcggagaatgcgcttgtctatatcggctcggcggatatgatgccgcgcaatctggataggcgggtggagacgctcgttcctctcatcaaccgcactgtgcacgaacaggttctttcgcagatcatgctgggcaatctcatcgacaaccagcagagctacgagattcttccggacggcacctcgcgccgcatggaagtcggcaaggacgccgagccgttcaacgctcagcattatttcatgaccaatccgagcctttcgggccggggtgaggctctgaaatccagtgcaccgaagctgatcgccggctggaagagcggctggcacaagtaa

SEQ ID NO: 6567 - protein, 736 aa, Sinorhizobium meliloti 1021
MDSATSAITEHEASAEQKREAPAEALDLLKSPERFVNREFSWLQFNRRVLEETLNTAHPLLERVRFLSISAANLDEFFMVRVAGLEGQVRSGLSLRSPDGLTPAETLESILTEVDNLQMEQQASLAVLQQYLAKEDILIVRPASLSAQDRSWLANEFDQAIFPVLTPLSIDPAHPFPFIPNLGFSIGLQLVSKTGRDPMTALLRLPVALDRFVRLPDVKNVIRYITLEDVVSQFIDRLFPGYEVKGSGTFRIIRDSDIEVEEEAEDLVRLFETALKRRRRGSVIRIETDSEMPASLRQFVVQELGVPENRVAVLPGLLALNTLSEITKAPREDLRFEPYNPRFPERVREHAGDCLAAIREKDMVVHHPYESFDVVVQFLLQAARDPDVLAIKQTLYRTSNDSPIVRALIDAAEAGKSVTALVELKARFDEEANIRWARDLERAGVQVVFGFIELKTHAKMSMVVRREEGKLRTYCHLGTGNYHPVTAKIYTDLSFFTCNPVIAHDMANIFNFITGYGEPEGGMKLAVSPHTLRPRILKHIEEEIVHAQAGRPASIWMKMNSLVDPEIIDALYKASCAGVVIDLVVRGICCLRPQVPGLSDNIRVKSIVGRFLEHSRIFCFGNGHGLPSENALVYIGSADMMPRNLDRRVETLVPLINRTVHEQVLSQIMLGNLIDNQQSYEILPDGTSRRMEVGKDAEPFNAQHYFMTNPSLSGRGEALKSSAPKLIAGWKSGWHK

SEQ ID NO: 6568 - DNA, 2370 bp, Caulobacter crescentus CB15
  CDS (1)..(2370): transl_table=11
atgaggggtcgatcaccctatccgcccagaaacccctcatccggcgcttcgcgccaccttctcccacaaggggagagggcgttttcaagctgtcttcaccgcgtcattcaccgcgttcaccatgacggaacaaagttcgcctatatagagtccatgaccgacgccctgccgatcgccgccaacgctcctgtcgccgccaacgccagcgccttgacgctggacgtcgagctgatggcctcgcccgaacggttcttcaatcgcgagctgtcgtggctggccttcaaccagcgggtgctggaggagagctccaatccgcgccatccgctgctggagcggctgcggttcctgtcgatcagcgccaacaacctcgacgaattctacatggtgcgcgtggccggcctcaaaggccaggtgcgcgagggcgtgcgggtgatcagccaggacggcctgatccccagcgagcagctgacccgcatcaacgcctcggccgccgagctgatggccgagcagcagaagatctggcgcctgctgcgcacccagctgtgggacgagggcctgaagctgctggacgccaaggacatcgagggcgacgacaaggtccgggccgaggagatcttccgcaaccagatcttcccggtgatgacgccgctggccatcgatccggcccacccgttcccgttcatcccgaacctgggcttctgcctggcgctgaagctgcggcggatcgccgacgacaagcacctctacgccctggccccgatcccctcgcaggtgcggcggttctgggagctgtcctcggtggtgtcgcgcgggcgcaagcgccagcgcaagatcgtggccctggagagcctgatcatcctctttctggagcacctgttccccggctacgaggtcgaggggctgggcctgttccgcctgatccgcgactcagacctcgagatcgaggaagaggccgaagacctggtgcgcgagttcgaggcgcggttgaagaagcggcgcctgggtcaggtggtgcgggtcaagatccagaccaccatgccggccgacctgcgcgacttcatcgtcgaaggcctgcgcgccgagcccgaggatgtggtgctgctggacggcaagctcggtttggcacagatgtcggaactgatcccgccggaccgtccggacctgaagttcccgcccttcaacgcccgcttccccgagcgcatccgcgaccacggcggcgactgcttcgcggcgatccgcgagaaggacatcctggttcaccacccgttcgagagcttcgatgtggtggtgcagttcctgcgccaggccgcgcgcgatccgaacgtgctggcgatcaagcagaccctgtaccgcacctccaaggacagcccgatcgtggcggccctgatcgaggcggccgacaacggcaagaacgtcacggccctggtggagatcaaggcccgcttcgatgaggagaacaacctcaaatgggcgcgcgacctggagcgggcgggcgtgcacgtggtgttcggcttcgtcgactggaagacccacgccaagctgtcggtggtggtgcgccgcgagggcgaggccctgcgcacctattgccactatggcaccggcaactatcacccgcagacggccagggtttacaccgaccttagcctgttcacctgcgacccggccctggggcgcgacggcggcaagctgttcaacttcatcaccggctacgcccagcccgggcggctggagaagctgtcgttctcgccccagacgctgaagcccgatctcctgcggatgatcgccctggaggccgacgccgcccgcgagggccggccggccgggatctgggccaagatgaacgcggtcgtggatccgcagatcatagacgcgctgtacaaggccagccaggcgggcgtgcagatcgatctggtggtgcgcggcatctgctgcctgcgtccgggcatcaagggtctgtcggagaacatccgggtcaagtcgatcgtcggccggttcctggagcactcgcgcatcgtggccttcgccaacggcgcgcccatgcccagcgcccagacgcggctctatatgagctcggccgactggatgccgcgcaacctcgatcgccgggtcgagagcctggtgccgatcgagaacccgaccgtgcaccagcaggtgctggaccagatcatggtcgccaacctcaatgacgaggcccagagctggaagctgggcagcgagggcgactacgcccgcgacccggcctggaagaccaagggggcgttctcggcccacgactacttcatgaccaatcccagcctgtcgggacgcggtcacggggcccgcgacctgccgcgcgccttcgaccacgtggggcccaagcgcaagcggtga

SEQ ID NO: 6569 - protein, 789 aa, Caulobacter crescentus CB15
MRGRSPYPPRNPSSGASRHLLPQGERAFSSCLHRVIHRVHHDGTKFAYIESMTDALPIAANAPVAANASALTLDVELMASPERFFNRELSWLAFNQRVLEESSNPRHPLLERLRFLSISANNLDEFYMVRVAGLKGQVREGVRVISQDGLIPSEQLTRINASAAELMAEQQKIWRLLRTQLWDEGLKLLDAKDIEGDDKVRAEEIFRNQIFPVMTPLAIDPAHPFPFIPNLGFCLALKLRRIADDKHLYALAPIPSQVRRFWELSSVVSRGRKRQRKIVALESLIILFLEHLFPGYEVEGLGLFRLIRDSDLEIEEEAEDLVREFEARLKKRRLGQVVRVKIQTTMPADLRDFIVEGLRAEPEDVVLLDGKLGLAQMSELIPPDRPDLKFPPFNARFPERIRDHGGDCFAAIREKDILVHHPFESFDVVVQFLRQAARDPNVLAIKQTLYRTSKDSPIVAALIEAADNGKNVTALVEIKARFDEENNLKWARDLERAGVHVVFGFVDWKTHAKLSVVVRREGEALRTYCHYGTGNYHPQTARVYTDLSLFTCDPALGRDGGKLFNFITGYAQPGRLEKLSFSPQTLKPDLLRMIALEADAAREGRPAGIWAKMNAVVDPQIIDALYKASQAGVQIDLVVRGICCLRPGIKGLSENIRVKSIVGRFLEHSRIVAFANGAPMPSAQTRLYMSSADWMPRNLDRRVESLVPIENPTVHQQVLDQIMVANLNDEAQSWKLGSEGDYARDPAWKTKGAFSAHDYFMTNPSLSGRGHGARDLPRAFDHVGPKRKR

SEQ ID NO: 6570 - DNA, 2211 bp, Nostoc sp. PCC 7120
  CDS (1)..(2211): transl_table=11
atgcctaaatcaaaaaaaagctctaattctatcaacttaaacgatcctcaatactatcttaaccgagagttaagctggttagaattcaataaccgagttttacatgaagcttgtgactcgcgcacaccactattagaaagacttaaatttttagcaatttttagttctaacttggatgagtttttcatggtgcgggttgcagcattgaaacaacaggtagaagcaaaggttagccagttaacccccgatgggcggacacctcaacaacagctaaatgatattcggctgaatctcataccccaagttaccaaacaacatcaacattgtgaacaaataattcgcccgttgttagctagtcatggtatccatattttggattatattaacttgactcaaaaacaacgcagttatctagataattactttgaagaccaaattttcccagttctgacacccctagctgttgaccctagccatccatttccctatatttctaatctcagcttgaatttagctgttgtggtgaaaaaccccgacacagaagaagaattttttgccagagtcaaagttcctagcgttcttcctagatttttgccattaccgccagagttagcatttcaggagaacggacaagcagctaactgggtaggtgtaccattagaacaggcgatcgctcataatctagattccctatttccagggatgaatatccaagaatatcaccccttccgcattacccgcgatgctgacctcgccctcgaagaagatgaagctgatgatttattattagcgatagaacaagaactgcgaaaacgccgcatgggtggttctccagtcagaatcgaaattcaatcccaaaccccacaagcaatacgcatcaggttattacaagacctagacttaacagaacaagatgtctacgaggtagagggactgttaggattgcgtgacttaatgtcatttatggctttaccattaccagaactcaaagatccaccacgccaatctgtagtagttccccgtctacaacggttgggagaaccaagcgtagacccaaatgctttagagttggaagatggtaaagatttcttttctgtaattcgagaaaaagatttattcgtacaccatccttaccaatctttttctgctacggttgtacgcttcattacccatgcagcccatgacccgaatgttttagcaattaagatgacactgtaccggacttcgggagattcgcccatcgtcaatgccttgattgcggcggcagaaaatggtaaacaagtgtcagtcttggtagaacttaaagcccgatttgatgaagaaaataatatttattgggctagacgattagaaagagttggagttcacgtcgtctatggtttagtgggtctaaaaactcactgcaaaactgtgatggtagtaaggcgagaaaaagaccggatgcgccgctatgtgcatattggaaccggcaactacaacccaaaaacggcacgactctatacagatataggcttatttacttgtcgtgaagaattaggtgctgacatcaccgatttatttaattttttgacagggtattcacgacaaaagtcttatcgagaattgttggttgcgcctgtaaatatgcgcgatcgctttttggaattaatccgcagggaaatcaccaacgtccagaatggattctctggtcgcatagtagcaaaaatgaattcccttgttgatccccaaattattaccaccttatatgaagcttccagcgcgggagtacaaatcgatttaattattcggggcatttgctgtttgcgtccagggattaaagatatcagtgacaatattcgcattatcagcattatcggccgctttttagaacactcccgtatctattatttccataacaatggacaagaagaaatttttattggtagtgccgattggatgagccgtaacttagatcggcgagtagaagtaattacccccataaaagacccagatattgccaaggatttgcaagaaatcttgggaattttgctggctgataatcgtcaagcttgggatttacaagctgatggtagttacattcaacgccttccaggagaaaattgtccagaaactaactcacagaaaactctcatgaatatggctttacgttcaacgggaatcgctacaaacctgatcgattcaccaaaaagttctgcatataaagacaattaa

SEQ ID NO: 6571 - protein, 736 aa, Nostoc sp. PCC 7120
MPKSKKSSNSINLNDPQYYLNRELSWLEFNNRVLHEACDSRTPLLERLKFLAIFSSNLDEFFMVRVAALKQQVEAKVSQLTPDGRTPQQQLNDIRLNLIPQVTKQHQHCEQIIRPLLASHGIHILDYINLTQKQRSYLDNYFEDQIFPVLTPLAVDPSHPFPYISNLSLNLAVVVKNPDTEEEFFARVKVPSVLPRFLPLPPELAFQENGQAANWVGVPLEQAIAHNLDSLFPGMNIQEYHPFRITRDADLALEEDEADDLLLAIEQELRKRRMGGSPVRIEIQSQTPQAIRIRLLQDLDLTEQDVYEVEGLLGLRDLMSFMALPLPELKDPPRQSVVVPRLQRLGEPSVDPNALELEDGKDFFSVIREKDLFVHHPYQSFSATVVRFITHAAHDPNVLAIKMTLYRTSGDSPIVNALIAAAENGKQVSVLVELKARFDEENNIYWARRLERVGVHVVYGLVGLKTHCKTVMVVRREKDRMRRYVHIGTGNYNPKTARLYTDIGLFTCREELGADITDLFNFLTGYSRQKSYRELLVAPVNMRDRFLELIRREITNVQNGFSGRIVAKMNSLVDPQIITTLYEASSAGVQIDLIIRGICCLRPGIKDISDNIRIISIIGRFLEHSRIYYFHNNGQEEIFIGSADWMSRNLDRRVEVITPIKDPDIAKDLQEILGILLADNRQAWDLQADGSYIQRLPGENCPETNSQKTLMNMALRSTGIATNLIDSPKSSAYKDN

SEQ ID NO: 6572 - DNA, 2214 bp, Ralstonia solanacearum GMI1000
  CDS (1)..(2214): transl_table=11
atgaaaaagtggccggatagtcattcgttggaaaccaccatgtcgacccttccgaccggcgacctgctcaatcgggaagtcggcatcctcgagttcaacgcgcgcgtgctcgcacaggcggccgacccgggcgttccgctgatggagcgcttgaagttcatctgcatcgtgtcgagcaatctggatgagttctttgagatccgcgtcgccgggctgaaggaacagatgcgcgacaacgcctcggccctcacccccgacggcctgtcggtgcagcaggcatttggcgtggtgacggagcgggtacggcagctggtcgcgcaacagtatgccatgctgcaggacgaaatcctgccgctgctcgagaaggaaggcgtgttcttccacatgaccaccaactggaacgaagcccagcgcgcctggtgccgcggcttcttccagcgtgagctggtgcccatcctgacgccgatggcgctggacccggcccaccccttcccgcgcgtgctcaacaagagcctgaacttcatcatcgaactgtcgggcaaggatgccttcgggcgcgaagccgaactggccatcgtgcaggcgccgcgcgccctgccccgcctggtgcagatgccgccggagctgtcggggtatccgtacggcttcgtgctgctgtcgtcgttcatgcagggcttcgtgcacgagctgtttccgcagatcgacgtgcatggctgctaccagttccgcgtcacgcgcaactccgacctgttcgtctccgaagacgaaatcaccgacctgcgcgaagcgctgcaaggcgaactgtcgacccggcacttcggcgatgcggtgcggctggagatcgcgcacgacatctcgcccgcgctggcgcgccggctgcagcaggaattcggcctgtccgaagccgactgctaccgcgtcaaggggccggtgaacctggtgcgcctgctgcaggtgcccgacctggtggaccgcccgatgctgaagtacccgccgcatgcgcccgccgccgtgaaggccgtggccgcgtcgtcgagcatcttcgatgccatccgccagggcgacatcctgatgcaccacccgtacgagagcttcatgcccgtgctggagctgctgcagcaggccgcgcgcgatccggacgtggtcgccatcaagcagaccgtgtaccgcaccggcaacgaatccccggtgatggaggcgctgatcaaggccgcccgcaacggcaaggaagtgacggtggtggtcgagctgctggcgcgcttcgacgaagagaccaacatcaactgggccgaccagctcgaatcggccggcgcccacgtggtgtacggcgtggtcggccacaaatgccacgccaagatgctgctggtggtgcgccgcgaggccgccggcggcaaggccaagaccgtcaagctgcgccgctatgcgcatctcggcaccggcaactaccacccgaagaccgcccggctctataccgacttcggcctgatgacggccgacgaagccatctgcgaagacgtccaccacgtgttccagctgctgaccggcaccggcgcccaggtgaagctgcaccacctgtggcactcgccgttcacgatgcacgccaacctgatcgagcacatccgcgcggaagcgcgcgccgcccgtgccggcaagcgcgcgcgcatcatcggcaagatgaacgcgctgctggagccgaccatcatcgacgagctctacaaggcctcgcgcgcgggcgtcaagatcgacctgatcgtgcgcggcgtgtgcgcgctcagggccggcgtgccggggctgtcggaacacatcagcgtgcgctcgctcgtcgggcgcttcctggagcatcaccgcgtctactacttccatgccggcggcgaggaagtcgtctatctgtccagcgccgactggatggaccgcaacctgttccgccgcgtcgaggtcgccttcccggtgctcgatcgcaagctgaaggcgcgcgtgatccgcgaaagcctgcaggtgcacctgcgcgacaacgcctcggcctgggtgatgcagccgaacggctcgtacgtgcggcgccagaccaagggcaagcacgtgcgcgtgagccagatggatctgctgaaccacttctcgccgcaagccgccgcggccgcggaaacggccgccgccgtcgcagcggccaccgcgaccgagccgccgcgcaagccgcccgcggaaatctccgcgggctga

SEQ ID NO: 6573 - protein, 737 aa, Ralstonia solanacearum GMI1000
MKKWPDSHSLETTMSTLPTGDLLNREVGILEFNARVLAQAADPGVPLMERLKFICIVSSNLDEFFEIRVAGLKEQMRDNASALTPDGLSVQQAFGVVTERVRQLVAQQYAMLQDEILPLLEKEGVFFHMTTNWNEAQRAWCRGFFQRELVPILTPMALDPAHPFPRVLNKSLNFIIELSGKDAFGREAELAIVQAPRALPRLVQMPPELSGYPYGFVLLSSFMQGFVHELFPQIDVHGCYQFRVTRNSDLFVSEDEITDLREALQGELSTRHFGDAVRLEIAHDISPALARRLQQEFGLSEADCYRVKGPVNLVRLLQVPDLVDRPMLKYPPHAPAAVKAVAASSSIFDAIRQGDILMHHPYESFMPVLELLQQAARDPDVVAIKQTVYRTGNESPVMEALIKAARNGKEVTVVVELLARFDEETNINWADQLESAGAHVVYGVVGHKCHAKMLLVVRREAAGGKAKTVKLRRYAHLGTGNYHPKTARLYTDFGLMTADEAICEDVHHVFQLLTGTGAQVKLHHLWHSPFTMHANLIEHIRAEARAARAGKRARIIGKMNALLEPTIIDELYKASRAGVKIDLIVRGVCALRAGVPGLSEHISVRSLVGRFLEHHRVYYFHAGGEEVVYLSSADWMDRNLFRRVEVAFPVLDRKLKARVIRESLQVHLRDNASAWVMQPNGSYVRRQTKGKHVRVSQMDLLNHFSPQAAAAAETAAAVAAATATEPPRKPPAEISAG

SEQ ID NO: 6574 - DNA, 2199 bp, Agrobacterium tumefaciens str. C58
  CDS (1)..(2199): transl_table=11
atggacgctatcgcgcaggaagacttcaacaaggtgcagccggtggctgaggtcgagaacctctgggacagcccggcgcgtttcatcaaccgcgaattctcctggctgcagttcaaccgccgtgttctcgaggaaacgctgaacacggatcacccgcttctggaacggctgcgcttcctgtccatctcggccgccaatcttgatgaattcttcatggtccgcgtcgccggtctcgaaggccaggtgcgccagaagatcaccgtcaggacgcccgacggcaagacaccggccgagcagttggaagatattctaaaggaaatcgacaatctgcagatggagcaacaggcctcgcttgccgtcctgcagcaatatctcgccaaggaagaaatcttcatcgtgcggcctgccgcactttccgaagcggaccgtacctggcttggcaccgaattcgaggaacgtattttcccggtgctgacgccgctgtccatcgaccctgcgcacccgtttcccttcattccgaacctaggcttctccatgggcctgcagctcgacagcgtcaacggccgcgagccgatgacggcgctgttgcgtctgcccacggcgctcgatcgcttcgttcgtttgccggatgaaaaaaacgccatccgttacatcacgctggaagatgtggtcggcctgttcattcaccggctttatccgggctataccgttcgaggattcggcacgttccgcatcatcagagacagcgatatcgaggtggaggaagaggcggaagatctggttcgctttttcgaaagcgcgctgaagcgccgccgccgcggttcggtcatccgcatcgagaccgatagcgaaatgccgccgtcgctgcgccagttcgtggtgcatgagcttggcgtgcctgataatcgcgttgctgttctgcccggtttgctcgcgctcaacaccatttcggaaatcgtgcgtgcgccgcgcgacgacctgaaattcgagccttacaacgcccgtttcccggagcgcgtgcgcgaacatgccggcgattgcctcgctgccatccgcgaaaaggacatggtggttcaccacccctatgaaagcttcgacgtggttgtgcagttcctgttgcaggctgcgcgcgatcccgaagtgcttgccattaagcagacgctttaccgcacctccaatgacagcccgatcgttcgtgcgctgattgacgcggcggaagccggcaaatccgtgaccgcgctggtcgagttgaaggcgcgtttcgacgaagaggcgaacatccgctgggcgcgcgatctggagcgcgccggtgtgcaggtcgtgttcggcttcatcgaactcaagacccatgccaagatgtcgatggtggtgcgccgcgaagacggcaaactcagaacctattgccacctcggcaccggtaactatcacccgatcacggcgaagatttataccgacctgtccttcttcacctgcaacccgaagatcgcccatgacatggcgaatatcttcaacttcatcacgggttacggcgaaccggaagagggcatgaagctcgccatttcgccttacacgctgcgcgcccgcatcgtgaagcacatcaacgaagagatcgagcacgccaagcgcggtgcgccggcggcgatctggatgaagatgaattcgctggtcgaccctgaaatcatcgatacgctttaccgtgccagtgcggcgggcgttgagatcgatctggtaatccgcggtatctgctgcctgcgcccgcaggtggcgggactgtcggataacatccgcgtcaaatccatcgtcggccgcttcctggaacacagccgcatcttctgcttcggcaatggtttcggcctgccatccgacaaggctctggtctatatcggctctgccgacatgatgccgcgtaaccttgatcggcgcgtcgaaacgctggtgccgctcaccaatcccaccgtgcatgagcaggttctttcacagattatgctgggcaatctcattgacaaccagcagagctacgagatacttgcggacggaacgtcgaggcgcatcgaggtgcgtaaaggcgaagaaccgttcaacgcgcagcactatttcatgaccaatcccagcctttccggacgtggtgaagccttgaaatccagtgcgcccaaattgattgccgggttgatttcgtcccgcaagaaacaggctgaatga

SEQ ID NO: 6575 - protein, 732 aa, Agrobacterium tumefaciens str. C58
MDAIAQEDFNKVQPVAEVENLWDSPARFINREFSWLQFNRRVLEETLNTDHPLLERLRFLSISAANLDEFFMVRVAGLEGQVRQKITVRTPDGKTPAEQLEDILKEIDNLQMEQQASLAVLQQYLAKEEIFIVRPAALSEADRTWLGTEFEERIFPVLTPLSIDPAHPFPFIPNLGFSMGLQLDSVNGREPMTALLRLPTALDRFVRLPDEKNAIRYITLEDVVGLFIHRLYPGYTVRGFGTFRIIRDSDIEVEEEAEDLVRFFESALKRRRRGSVIRIETDSEMPPSLRQFVVHELGVPDNRVAVLPGLLALNTISEIVRAPRDDLKFEPYNARFPERVREHAGDCLAAIREKDMVVHHPYESFDVVVQFLLQAARDPEVLAIKQTLYRTSNDSPIVRALIDAAEAGKSVTALVELKARFDEEANIRWARDLERAGVQVVFGFIELKTHAKMSMVVRREDGKLRTYCHLGTGNYHPITAKIYTDLSFFTCNPKIAHDMANIFNFITGYGEPEEGMKLAISPYTLRARIVKHINEEIEHAKRGAPAAIWMKMNSLVDPEIIDTLYRASAAGVEIDLVIRGICCLRPQVAGLSDNIRVKSIVGRFLEHSRIFCFGNGFGLPSDKALVYIGSADMMPRNLDRRVETLVPLTNPTVHEQVLSQIMLGNLIDNQQSYEILADGTSRRIEVRKGEEPFNAQHYFMTNPSLSGRGEALKSSAPKLIAGLISSRKKQAE

SEQ ID NO: 6576 - DNA, 2352 bp, Brucella melitensis 16M
  CDS (1)..(2352): transl_table=11
atgacagccataggctttgggccgagccggaatgttccggcaaaggccgggacaggaaaaatgaacgaaaacagcgttatggcgaacgagccccacaatgggagcgcagatatgacagtcgaactgccccccagttccccttattccggctttgcttcgggcgatctggcgcagacggacattcacgaagctttgaacggcgggttgatgcaaagtgccgaccgcttcgtcaatcgagagttttcctggcttcagttcaatcgccgcgttcttgaggaggcggcgaatatccgccagccgctgctggagcgcttacgcttcctttccatctcggcggccaatctcgatgagttcttcatggtgcgcattgccggtctggccggtcaggttcgcgcaggcatagccttgcgcagccccgacgggcgcacaccgcaggagcagcttgatttcgttctggaagaggtggggcgccttcaggcggagcagcagcaatgtctgcgcacgttgcgcaaggagctggaaaaggaaaatatcgagatcgttcgcccgcccgccttgtcgaaacacgaaaaggaatggctggaaaaccattttctggaaacgatcttccctgtcctgacgccgctttccatcgacccggcgcatccgtttccgttcattcccaatctgggcttttccatcgccttgcagcttgcgcggcgtgccgataatcatccgatgacggcgcttctgcgcattccggtcgcgttgaaacgcttcatccagctaccgaccgaccagaacaacatctatcgctttattactatcgaggatgcggtaagcctctttatcgggcggctattccccggttatgaggtgcgcggcgccggtacgttccgcatcatccgcgacagcgatattgaagtggaggaagaggcggaagacctcgttcgcctgttcgagacggccttgaaacgccgacgccgcggtcaggtgatccgcatcgaatttgacggtgaaataccggaggcgctgcgcatcttcgtggcgatggagcttggtgtttccgaaaatcgcatcagcgtgcatgaaggccttctggcgctgaacatgatttcagaggtcgtttccatcccgcgcgaggaccttaaattcgtctcctacaatccgcgtttcccggaacgtatccgcgaacatggcggcgattgcctggcggcgattcgcgaaaaggacatcgtggtccatcacccctatgaatccttcgatgtcgtggtgcagtttctgcgtcaggcggcagccgaccccgatgtgctggctatcaagcagacgctttaccgcacctccaacgatagcccgatcgtccgcgcgctggtggatgccgccgaggcgggcaagtcggtgacggctctggtggaattgaaggcccgcttcgatgaggaggcgaatattcgttgggcgcgcgatctggagcgtgcgggcgtgcaggtggtattcggcttcatcgaattgaaaacacatgcgaaaatgtcgctcgtggtgcgccgcgaagaccagaagctgcgctcctatgtgcatctgggaaccggcaattatcatcccatcacagcgcgtatttataccgatctttccttcttcacctcggatgctgaaattgcgcgtgacgtggcgcatatcttcaatttcattaccggctatgcgcagccggccgaggaaatgaagattgcgatttctcctttcacactgcgcgcgcgcatcttgaaacacattgaggatgaggttgcccatgcgaaggcgggaaagcctgcggcaatctggatgaagatgaactcgctcgtcgatccacagataatcgatgcgctctatatggcgagccaggcgggcgtgcagatcgatctggtcgtgcgcggcatctgctgcctgcgtccgggggttccggggctttcagataatatccgcgccaagtcgattgtcgggcgttttctggagcacagccgcatattctgtttcggaaacggccacgacctgccgtccggcaaggcaattgtctatattggttccgccgatatgatgccgcgtaatctcgaccgtcgcgtggagaccctcgttccgatcacaaatgccacagtgcatcagcaaatcctgtcgcaaatcatgtttgccaacataattgataaccaacagagctatcagctacttgcggacggcacctctcgccggatagaaaaggaagcaggagaagaagctttcaacgcgcaggaatatttcatgaccaatcccagcctgtcgggtcgcggaaagtcgctgaagtcttcggccccccgccttatcgcgcatcgcaagcgcgcgcaggcggagagaaaaacgactgcatga

SEQ ID NO: 6577 - protein, 783 aa, Brucella melitensis 16M
MTAIGFGPSRNVPAKAGTGKMNENSVMANEPHNGSADMTVELPPSSPYSGFASGDLAQTDIHEALNGGLMQSADRFVNREFSWLQFNRRVLEEAANIRQPLLERLRFLSISAANLDEFFMVRIAGLAGQVRAGIALRSPDGRTPQEQLDFVLEEVGRLQAEQQQCLRTLRKELEKENIEIVRPPALSKHEKEWLENHFLETIFPVLTPLSIDPAHPFPFIPNLGFSIALQLARRADNHPMTALLRIPVALKRFIQLPTDQNNIYRFITIEDAVSLFIGRLFPGYEVRGAGTFRIIRDSDIEVEEEAEDLVRLFETALKRRRRGQVIRIEFDGEIPEALRIFVAMELGVSENRISVHEGLLALNMISEVVSIPREDLKFVSYNPRFPERIREHGGDCLAAIREKDIVVHHPYESFDVVVQFLRQAAADPDVLAIKQTLYRTSNDSPIVRALVDAAEAGKSVTALVELKARFDEEANIRWARDLERAGVQVVFGFIELKTHAKMSLVVRREDQKLRSYVHLGTGNYHPITARIYTDLSFFTSDAEIARDVAHIFNFITGYAQPAEEMKIAISPFTLRARILKHIEDEVAHAKAGKPAAIWMKMNSLVDPQIIDALYMASQAGVQIDLVVRGICCLRPGVPGLSDNIRAKSIVGRFLEHSRIFCFGNGHDLPSGKAIVYIGSADMMPRNLDRRVETLVPITNATVHQQILSQIMFANIIDNQQSYQLLADGTSRRIEKEAGEEAFNAQEYFMTNPSLSGRGKSLKSSAPRLIAHRKRAQAERKTTA

SEQ ID NO: 6578 - DNA, 2091 bp, Methanosarcina acetivorans C2A
  CDS (1)..(2091): transl_table=11
ctgagcaacccatgcctttatgcggacagggaatacagctggctccagttcaatgaccgggtactcgaagaagctctggatgaacgtaatcccctgcttgagagagttaaatttctttccatcttcgggagcaatcttgatgagtttttcatggtcagggtctccggagtccagaaacgtattgctgaaggggcaaaagaagaccaggcagatgaactggcccaggaacagctgcaggtaatccgggaagaacttctaaagcagcttcccgtaaacgacagttgctggaacgaaatgctcgaaccggctctgagggaaaggggaattaaagtccttaactactttgagctttccggagaagacagagaaaaactcagggactacttcgaaagaaatatttttccattacttactcccctcggtttcgattcggggcatcctttcccccatatatcaaacctcagtctcaaccttgccgtacttattgatgaccctgactacggggaacgttttgccagggttaagatccctccaatgtttgcaaggcttattgttgtccctgaagaaggtcaggaaaaaataagttccagttttgaagaactgaaatcaggacgttttgtgtggctcgaacagctgattgctgcaaacctcgatttgctgttccccgggcagcgtatcctcggagcctatcctttcaggatcacccgggatgctgacttaggctttgacgaagatggggacaaggacctcctgaccgctgttaagcagagggtggggagaaactacttcgggcctgctgttcggcttgagaccgacgataccatgcctgaaagggtttctgagattctccttaaaaatctggagctgacttctcctcttatgttcaggtcagcggcgcctctgggcctctcaagcctcatgaagcttactcaaattaaccgccctgagcttaaatataagccttttaagccaagaaaacattcccttatggctgataaagaaaacattttttcagccctgaaaaagcaggatatcctgctctatcacccttacgacagttttgaatcggtagtcgatctggtcgaagaagccgctgatgacccggatgtcctggcaattaaaatgactctgtacagggtagacgacaactccaggattatccaggctctcatgaaagccgcggaccggaacaagcaggttgcagtccttgtcgaacttaaagcccgctttgacgaagagaataacattggctgggcaaaggaactcgagcgcaaaggcgttcacgtagcctatggttttccggggcgtaaaacccatgccaagatgtgccttattgtaagagccgaaaaagagggcattaaatattatgtgcatatgggcactggaaactataatgccgtcaccggaagactctatacagacttcggctatcttacaagtgaccccttcataggcaaagatatctctgaccttttcaatgccctcacaggctattcaaggaaggatcattacatcaagctccttgtagcgccccagaacatgaggcatcagatcctcgaacgcatcaggcgcgagattgacatgcaagaaaaattcggaaacggacacctgatcttcaagatgaactcccttgtggactaccagtgcatccgggaactctacagggcttcacgggttggagtaaaggtagatctcattgtcaggggcatctgctgcctcaggcccggaatctacggactgagcgaaaatatcagggtcacctcaatagtcgggcgttttcttgagcattcaagggcatactatttcaggaacggcggaaaagaagagatcttcatgggtagtgcagaccttatgccccgaaatctcgacaatcgggtcgaagtcctctttcccgtttcttcggattacatccctattctgcgcgatgctattctcgggacccacatgaaggataacataaaagctcgccttctcctccccaacggcagaactgaaaggatctacccgcagcctgaagaagaagaactggactcccagctctggatgcttgagaatagaggcgtctgggagcttaaaacggaaaagagctga

SEQ ID NO: 6579 - protein, 696 aa, Methanosarcina acetivorans C2A
MSNPCLYADREYSWLQFNDRVLEEALDERNPLLERVKFLSIFGSNLDEFFMVRVSGVQKRIAEGAKEDQADELAQEQLQVIREELLKQLPVNDSCWNEMLEPALRERGIKVLNYFELSGEDREKLRDYFERNIFPLLTPLGFDSGHPFPHISNLSLNLAVLIDDPDYGERFARVKIPPMFARLIVVPEEGQEKISSSFEELKSGRFVWLEQLIAANLDLLFPGQRILGAYPFRITRDADLGFDEDGDKDLLTAVKQRVGRNYFGPAVRLETDDTMPERVSEILLKNLELTSPLMFRSAAPLGLSSLMKLTQINRPELKYKPFKPRKHSLMADKENIFSALKKQDILLYHPYDSFESVVDLVEEAADDPDVLAIKMTLYRVDDNSRIIQALMKAADRNKQVAVLVELKARFDEENNIGWAKELERKGVHVAYGFPGRKTHAKMCLIVRAEKEGIKYYVHMGTGNYNAVTGRLYTDFGYLTSDPFIGKDISDLFNALTGYSRKDHYIKLLVAPQNMRHQILERIRREIDMQEKFGNGHLIFKMNSLVDYQCIRELYRASRVGVKVDLIVRGICCLRPGIYGLSENIRVTSIVGRFLEHSRAYYFRNGGKEEIFMGSADLMPRNLDNRVEVLFPVSSDYIPILRDAILGTHMKDNIKARLLLPNGRTERIYPQPEEEELDSQLWMLENRGVWELKTEKS

SEQ ID NO: 6580 - DNA, 2325 bp, Streptomyces coelicolor A3(2)
  CDS (1)..(2325): transl_table=11
atgaagccgaccgagccacagccttccgggcccttcgggccctccgacgcgcctgacgcgcgcgcggcgcggaagaatgggttcatgaggcagccgaacactcaggccgaggcccagcacacgcagccctccgtgggttccatcgcggcgcaccgcccgaacaccgtggccgccacggtctccggcctggagccggacatcgacgccgacctcgacgcgtacgaggagtcggaggagtcccaggacggcggcgcccgcctcccgcagggccgcttcctggaccgcgaacgcagctggctcgcgttcaacgaacgcgtgctcgaactcgccgaggacccgagcacccccctcctcgagcgtgccaacttcctcgcgatcttcgccagcaacctggacgagttcttcatggtccgcgtcgccggcctcaagcgccgcatcgcgaccggcgtcgccacccgctccgcctccggcctccagccccgcgaggtgctggagatgatctgggcccgctcccgcgagctgatggcccggcacgccgcctgcttccacgaggacgtcgccccggccctcgccgaggagggcatccacctggtccgctggagcgagctggccgagaaggagcaggcccgcctgttcaccctcttccggcaccggatcttcccggtcctcacccccctcgcggtcgaccccgctcaccccttcccgtacatctcgggcctctccctcaacctcgcggtcgtcgtccgcaaccccgtcaccggccaccgccacttcgcccgcgtcaaggtccccccactgctctcccgcttcctggaggcctccccgggccgctacgtccccgtcgaggacgtcatcgccgcccacctggaggagctgttcccgggcatggaggtcctggagcaccacaccttccgcctcacccgcaacgaggacctggaggtcgaggaggacgacgcggagaacctgctccaggccctggagaaggagctgatgcggcgccgcctgggcccgcccgtccgactggaggtcgaggagtccgtcgaccgcgaggtcctggacctcctcgtacgcgagctgaagatcggcgaggcggaggtctacccgctccccggccccctggacctcaccggcctcttccgcatccacagcatcgaccggcccgagctgaagtacccgaagttcgtcgccggcacccaccgcgacctggccgaggtcgagtccgcgtccgcgccggacatcttcgccgccctgcgcaccaaggacgtcctgctccaccacccgtacgactccttctccacctccgtgcaggcgttcctggagcaggccgccgccgacccggacgtcctcgcgatcaagcagacgctgtaccggacgtccggcgactcccccatagtcgacgcgctcatcgaggcggccgagtccggcaagcaggtcctcgtcctggtggagatcaaggcccgcttcgacgagtccgccaacatcaagtgggcccgcaagctggaggagtccggctgccacgtcgtctacggcctggtgggcctgaagacccactgcaagctctccctggtcgtacggcaggagggcgagaccctgcgccggtacagccacgtcggcaccggcaactaccacccgaagacggcccgcctctacgaggacctgggcctgctcacctcggacccgcaggtcggcgcggacctctccgacctgttcaaccgcctctccggctactcacggcgcgagacctaccgccgcctcctcgtcgcgcccaagtcgctgcgcgacggcctcgtctcccgcatccacaaggagatccagcaccaccgcgccgggcgccccgcccacgtccgcatcaaggtcaactcgatggtcgacgaggccgtggtcgacgcctgctaccgcgcctcccaggccggtgtgccggtcgacgtgtgggtgcgcggcatctgcgcgctgcgcccgggcgtgccgggcctgtcggagaacatccgggtccgctccgtcctcggccgcttcctggagcactcgcgggtcttcgccttcggcaacggcggtgagcccgaggtgtggctcggcagcgccgacatgatgcaccgcaacctcgaccgccggatagaggccctggtccgggtgaccgacccggcccaccgggcggccctgaaccggctcctcgagaacggcatgtccgacggcaccgcctcctggcacctcggcccggacggcgagtggacccggcacgcgaccgacgcggacggccagcccctgcgcaacatccaggagatgctcatagacgcccggaggcgccggcgtggcacagcgacaccttga

SEQ ID NO: 6581 - protein, 774 aa, Streptomyces coelicolor A3(2)
MKPTEPQPSGPFGPSDAPDARAARKNGFMRQPNTQAEAQHTQPSVGSIAAHRPNTVAATVSGLEPDIDADLDAYEESEESQDGGARLPQGRFLDRERSWLAFNERVLELAEDPSTPLLERANFLAIFASNLDEFFMVRVAGLKRRIATGVATRSASGLQPREVLEMIWARSRELMARHAACFHEDVAPALAEEGIHLVRWSELAEKEQARLFTLFRHRIFPVLTPLAVDPAHPFPYISGLSLNLAVVVRNPVTGHRHFARVKVPPLLSRFLEASPGRYVPVEDVIAAHLEELFPGMEVLEHHTFRLTRNEDLEVEEDDAENLLQALEKELMRRRLGPPVRLEVEESVDREVLDLLVRELKIGEAEVYPLPGPLDLTGLFRIHSIDRPELKYPKFVAGTHRDLAEVESASAPDIFAALRTKDVLLHHPYDSFSTSVQAFLEQAAADPDVLAIKQTLYRTSGDSPIVDALIEAAESGKQVLVLVEIKARFDESANIKWARKLEESGCHVVYGLVGLKTHCKLSLVVRQEGETLRRYSHVGTGNYHPKTARLYEDLGLLTSDPQVGADLSDLFNRLSGYSRRETYRRLLVAPKSLRDGLVSRIHKEIQHHRAGRPAHVRIKVNSMVDEAVVDACYRASQAGVPVDVWVRGICALRPGVPGLSENIRVRSVLGRFLEHSRVFAFGNGGEPEVWLGSADMMHRNLDRRIEALVRVTDPAHRAALNRLLENGMSDGTASWHLGPDGEWTRHATDADGQPLRNIQEMLIDARRRRRGTATP

SEQ ID NO: 6582 - DNA, 2187 bp, Methanosarcina mazei Go1
  CDS (1)..(2187): transl_table=11
atggaacggaacttcccaattcagtgcgcagattttgatagattggttacggatagtgttgaaggaacccgggttgaagtatcaggcatgcctgacctgagtgacccgtgcttttatgcggatagggaatacagctggctccagttcaatgccagagtgcttgaagaggctctggatgaacgcaatcctctgcttgaaagagtcaaatttctttctatcttcgggagtaaccttgatgaattttttatggtcagagtctccggggttcagaaacgtattacggaagggataaaggaagactgcatagacgaagtggcccaggaacagcttcgagttatccgggaagaacttttaaggcagctccctatcaatgatagctgctggaatgaaatacttgaacccgccctcagggaaaatgggattgaagtccttaattactttgaactttccggagaagatagggagaaactcagagattattttgaaagaaatatttttcctctgctaactcctctcgggttcgactcaggtcatcctttcccgcacatctcaaacctcagtcttaaccttgcagtacttattgatgacccggaatatggcgagcgttttgcgagggtcaagatccctccgatgttctcaaggctcattgttgtgcctgaaggaaaacaggaaaaaataatttccagttttgaagaactgaagacgggacgctttgtgtggcttgaacagctaattgctgcaaatctcgaccttctctttccaggccagcgaatcctcggagcttaccctttcaggatcacaagagatgcagatctcgggtttgatgaagacggggataaagacctccttactgctgtaaagcaaagggtaggaagaaattacttcgggcccgctgtccggcttgaaaccgattacactatgcctgagaaggtttctgatatcctcctcaagaatctggatcttacacgcccacttatgttcaggtcggctgcgcctctggggctttcaagccttatgaagcttgcccagattgaccgccctgagcttaaatacgagcctttcgagcagaaaaaacatccccgaatggctgatagagaaaatatttttgcagccttaaaaaagaatgatatccttctccatcacccttatgacagttttgaatctgtaatcgacctggtagaagaagccgttgacgaccctgatgtcctggcaattaaaatgacgctatacagggtagacgataactccaggatcatccaggctctcatgaaagctgcagaccgtagcaagcaggttgcagtccttgttgagctcaaagcccgttttgacgaagaaaacaacattggctgggcaaaagagcttgaacgtaaaggggtacatgtagcctatggtttccctggccgcaaaacccatgccaagatgtgcctgatagtaagggctgaaaaagaaggcggcatcaggtattatgtgcatatgagcactggaaactacaatgctgttacaggaaagatctatactgactgcggctatctgacaagcgattccttcataggaaaagatatttccgaccttttcaatgcccttacaggctattcaaggaaagaccattatattaaactcctggtagctccccagacaatgagacatcagattcttgaacgtatcaggcgcgaaattgatgtgcacgagaagttcggaaacggtcatctgatcttcaagatgaattcccttgtggactaccagtgcatccgtgagctttacagggcttcacgggccggagtaaagatagaccttattgtcaggggtatctgctgcctcagacccggcatctacgggctgagcgaaaatatcagagtaacttcgatagtcgggcgttttcttgagcactcaagaatatattatttcaggaatggcggaaaagaggaaatcttcctgggaagcgccgaccttatgccccgcaaccttgacaacagggtcgaagtcctcttcccggtgtcccaggactatatacctgtcatgcgcgacatcattctcggtatccatctgaaagataatgtaaaagcccgactcctgcttccaaacggacggactgaaaggatttatccgcagcccgaagaagaagagctggattcccaggtctggatgcttgagaataggggcagctgggatattaaaacagaacgctga

SEQ ID NO: 6583 - protein, 728 aa, Methanosarcina mazei Go1
MERNFPIQCADFDRLVTDSVEGTRVEVSGMPDLSDPCFYADREYSWLQFNARVLEEALDERNPLLERVKFLSIFGSNLDEFFMVRVSGVQKRITEGIKEDCIDEVAQEQLRVIREELLRQLPINDSCWNEILEPALRENGIEVLNYFELSGEDREKLRDYFERNIFPLLTPLGFDSGHPFPHISNLSLNLAVLIDDPEYGERFARVKIPPMFSRLIVVPEGKQEKIISSFEELKTGRFVWLEQLIAANLDLLFPGQRILGAYPFRITRDADLGFDEDGDKDLLTAVKQRVGRNYFGPAVRLETDYTMPEKVSDILLKNLDLTRPLMFRSAAPLGLSSLMKLAQIDRPELKYEPFEQKKHPRMADRENIFAALKKNDILLHHPYDSFESVIDLVEEAVDDPDVLAIKMTLYRVDDNSRIIQALMKAADRSKQVAVLVELKARFDEENNIGWAKELERKGVHVAYGFPGRKTHAKMCLIVRAEKEGGIRYYVHMSTGNYNAVTGKIYTDCGYLTSDSFIGKDISDLFNALTGYSRKDHYIKLLVAPQTMRHQILERIRREIDVHEKFGNGHLIFKMNSLVDYQCIRELYRASRAGVKIDLIVRGICCLRPGIYGLSENIRVTSIVGRFLEHSRIYYFRNGGKEEIFLGSADLMPRNLDNRVEVLFPVSQDYIPVMRDIILGIHLKDNVKARLLLPNGRTERIYPQPEEEELDSQVWMLENRGSWDIKTER

SEQ ID NO: 6584 - DNA, 2103 bp, Xanthomonas campestris pv. campestris str. ATCC 33913
  CDS (1)..(2103): transl_table=11
atgggccacgccaagcactctaaagaccccgcaccttccgaggacatcggcagcgatccgctgcgcgacccggcgctgtatctcaaccgggaactgtcgcagctggatttcaatttccgcgtgctggcgcaggcgctggacgaacaggttccgctattggagcggctgcggttcctgtgcatttcctgcaccaacctagacgagttcttcgagatccgcgcagccaccgtgcggcatgcgcaagagttcggcctgccgcccgcacccgatggcatgagccccaccgccatcctcaacgcggtgcacgaccgcgccgccaagctggtggatcagcagtaccacgtgtggaacgacgtgctgcgcccggcgatggaacaggccggcgtagcggtgctgagccgcaccacctggaattcgcgccagaaacgctggctgcgcgcctacttccgcaacgagatcatgccggtgctgtcgccgctgggcctggacccggcacatccgttcccgaagatcctcaacaagaccttgaacatcgtggtggtgctcgaaggccaggacgcgttcgggcgcgccggccatctggcgatcgtgcgcgcgccgcgctcgctgccgcgcatcatccagctgccggccagcctgtcgccggacggcgagcagagcttcgtgttcctgtcctcggtgctgtcggagttcgtggatgaactgttccccggcatgcaggtcaagggctcctaccaattccgcgtcacccgcaattccgagctggtggtagacgaagaagaagtggaaaacctggcgctggcgttgcgcgacgaactggtcacgcgcggctaccggccggcggtgcgactggagattgcgcacgattgcccgccggcgatcatgcgcaccctgctgcagaatttcggcctcaacgaaaacgcggtgtatcgcattgccggtccagtgaacctgagccgcgtgacccaggtctacgacctggtgcaacggcccgagctcaagtacccggcgttcaatccgcgcaccctgcgcgacaacgtgggcatcttcgagatcgtcaacaagggcgatgtgctgctgcatcaccccttcgatgcgttcactgcggtgctggacgtgatccgccaggcggcggtcgacccgaacgtgctggcgatcaagcagacgctgtaccgcaccggcaaggattcgctgattgtcgatgcgttgatcctggccgcgcgcaacggcaaggacgtcaccgtggtagtggagctgcgtgcgcgcttcgacgaagaagccaatctgggcctggccgacaagttgcaggaagccggcgtgcaggtggtctacggcgtggtcggttacaagacccacgccaagatgttgctgatcgtgcgccgcgaaggacgcaagctcaaacgctacgtgcacctgggcaccggcaactaccacagcggcacagcgcgcctgtacaccgacctgagcctgatcaccgccgatgtggagatcggcaacgatgtgcacatgctgtttcagcagctctccggcctggcgccgcgcatgaagctggaacagctgctgcaatcgcccttcaccctgcataccggcgtgctgcagcggatcgaacgcgagacgcggctagcgcgcaacggccggcccgggcgcatcatcgccaagatgaacgcactcaacgaaccgcaggtggtgcgcgcgttgtataccgcctcgcaggcgggcgtgcagatcgacctgatcgtgcgtggggcctgcaccttgcgcccgggcgtgccgggcgtgtcggacaacatccgcgtgcgctcgatcgtggggcgttttctggaacatagccgcgtgtactggttcggcaacgacggcgcagcggagttgtattgcgccagcgccgactggctggagcgcaatctgctgcgccgggtggagacctgcttcccgatcctggatccggacctggccaagcgcgtctaccgcgaagtgctgcagaactacctggacgacaacgtcaacgcgtgggaactggatgccgaaggcatctatcacaagcgcacgcccgggcctggcgagccggcgcattcggcccagatgaccttgctcgatcgggtctga

SEQ ID NO: 6585 - protein, 700 aa, Xanthomonas campestris pv. campestris str. ATCC 33913
MGHAKHSKDPAPSEDIGSDPLRDPALYLNRELSQLDFNFRVLAQALDEQVPLLERLRFLCISCTNLDEFFEIRAATVRHAQEFGLPPAPDGMSPTAILNAVHDRAAKLVDQQYHVWNDVLRPAMEQAGVAVLSRTTWNSRQKRWLRAYFRNEIMPVLSPLGLDPAHPFPKILNKTLNIVVVLEGQDAFGRAGHLAIVRAPRSLPRIIQLPASLSPDGEQSFVFLSSVLSEFVDELFPGMQVKGSYQFRVTRNSELVVDEEEVENLALALRDELVTRGYRPAVRLEIAHDCPPAIMRTLLQNFGLNENAVYRIAGPVNLSRVTQVYDLVQRPELKYPAFNPRTLRDNVGIFEIVNKGDVLLHHPFDAFTAVLDVIRQAAVDPNVLAIKQTLYRTGKDSLIVDALILAARNGKDVTVVVELRARFDEEANLGLADKLQEAGVQVVYGVVGYKTHAKMLLIVRREGRKLKRYVHLGTGNYHSGTARLYTDLSLITADVEIGNDVHMLFQQLSGLAPRMKLEQLLQSPFTLHTGVLQRIERETRLARNGRPGRIIAKMNALNEPQVVRALYTASQAGVQIDLIVRGACTLRPGVPGVSDNIRVRSIVGRFLEHSRVYWFGNDGAAELYCASADWLERNLLRRVETCFPILDPDLAKRVYREVLQNYLDDNVNAWELDAEGIYHKRTPGPGEPAHSAQMTLLDRV

SEQ ID NO: 6586 - DNA, 2103 bp, Xanthomonas axonopodis pv. citri str. 306
  CDS (1)..(2103): transl_table=11
atgggccacgccaaagaactgcacgacatcacacccggcgacgacgtcgccaccgatccgttgcgtgatccggcgctgtacatcaaccgcgagctgtcgcagttggacttcaatttccgggtgctggcgcaggcgctcgacgagcaggtgccattgctggaacggctgcgcttcctgtgcatctcgtgcaccaacctggacgagttcttcgagatccgcgcggccaccgtgcggcacgcacaggagttcgggctgccgccggcaccggacggactgagcccgaccgccatcctcaacgcggtgcacgatcgcgccgccaagttggtcgagcagcaataccacgcgtggaacgaggtgctgcggccggcgatggaagacgcaggcgttgcggtgctcagccgctcggcatggacggcgcgccagaaacgttggctgcgtgcgtatttccgcaacgagatcatgccggtgctgtcgccgctgggcctggacccggcgcacccgttcccgaagatcctcaacaagaccttgaacatcgtggtggtgctcgaaggccaggacgcgttcggtcgcgccgggcatctggccatcgtgcgcgcgccgcgttcgctgccccgcatcatccagctgccggcaagcctgtcgccggagggcacgcagagcttcgtgttcctgtcgtcggtgttgtccgaattcgtcgacgagctgttcccgggcatgcaggtgatgggctcgtaccagttccgcgtcacccgtaattccgagctggtggtggacgaggaagaagtcgaaaacctggcgctggccctgcgcgacgaattggtcacgcgcggctaccggccggcggtgcggctggagatcgcgcacgattgcccggcaccgatcctgcgcaccttgttgcagaatttcggcctgaacgagaacgcggtgtatcgcatcaccgggccagtcaatctgagccgcgtcacgcaggtctatgacctggtgcagcgccccgaactcaagtacccatcgttcaatccgcgcaccttgcgcgacagcgagggcatcttcgagatcgtcaaaaaaggcgatgtgttgctgcatcaccccttcgatgcgtttaccgcggtgctggatgtcatccgccaggccgcagtcgacccgaacgtgctggcgatcaagcagacgctgtatcgcaccggcaaggattcgttgattgtcgatgcgctgattctggccgcgcgcaacggcaaggacgtcaccgtggtggtggaattgcgtgcgcgcttcgacgaagaagccaacctgggcctggccgacaaactgcaggaagccggcgtgcaggtggtctacggcgtggtcggcttcaagacccacgccaagatgctgctgatcgtgcggcgcgagggccgcaagctcaaacgctacgtacacctgggcaccggcaattaccacagcggcaccgcgcgcctgtataccgacatcagcctgatcaccgccgatgccgagatcggcaacgatgtgcacatgctgttccagcagttgtccgggcttgcgccgcgcatgaagctggaccagttgctgcagtcgccgtttacgctgcatgcgggggtgttgaagcggatcgatcgggagacacggttggcccgcaagggtcgcccgggccgcatcatcgccaagatgaacgccctcaacgaaccgcaggtggtgcgtgcgttgtacacggcgtcgcaggccggggtgcagatcgatctgatcgtgcgcggggcctgcacgctgcgtcccggggtgccaggcgtgtccgacaacatccgcgtgcgttcgatcgtgggccgctttctggaacatagccgcgtgtactggttcggcaacgacggcgctgccgagttgtactgcgccagtgccgactggctggaacgcaatctgctgcggcgggtggagacctgcttcccgatcctggaaccggacctggccaagcgcgtctaccgcgaagtgctgcagaactatctggacgacaacgtcagcgcctgggagctggatgccgagggcgtgtaccacaagcgcactcccgcaccgggcgagccggcgcattcggcgcagatgaccttgctcgagcggatctga

SEQ ID NO: 6587 - protein, 700 aa, Xanthomonas axonopodis pv. citri str. 306
MGHAKELHDITPGDDVATDPLRDPALYINRELSQLDFNFRVLAQALDEQVPLLERLRFLCISCTNLDEFFEIRAATVRHAQEFGLPPAPDGLSPTAILNAVHDRAAKLVEQQYHAWNEVLRPAMEDAGVAVLSRSAWTARQKRWLRAYFRNEIMPVLSPLGLDPAHPFPKILNKTLNIVVVLEGQDAFGRAGHLAIVRAPRSLPRIIQLPASLSPEGTQSFVFLSSVLSEFVDELFPGMQVMGSYQFRVTRNSELVVDEEEVENLALALRDELVTRGYRPAVRLEIAHDCPAPILRTLLQNFGLNENAVYRITGPVNLSRVTQVYDLVQRPELKYPSFNPRTLRDSEGIFEIVKKGDVLLHHPFDAFTAVLDVIRQAAVDPNVLAIKQTLYRTGKDSLIVDALILAARNGKDVTVVVELRARFDEEANLGLADKLQEAGVQVVYGVVGFKTHAKMLLIVRREGRKLKRYVHLGTGNYHSGTARLYTDISLITADAEIGNDVHMLFQQLSGLAPRMKLDQLLQSPFTLHAGVLKRIDRETRLARKGRPGRIIAKMNALNEPQVVRALYTASQAGVQIDLIVRGACTLRPGVPGVSDNIRVRSIVGRFLEHSRVYWFGNDGAAELYCASADWLERNLLRRVETCFPILEPDLAKRVYREVLQNYLDDNVSAWELDAEGVYHKRTPAPGEPAHSAQMTLLERI

SEQ ID NO: 6588 - DNA, 2238 bp, Thermosynechococcus elongatus BP-1
  CDS (1)..(2238): transl_table=11
gtggaagctagtgtgaccaataaacaagaacagacggccatgccctctgcgaagtcccctcgccgtaaagcacccgaacctattgatctggataatccgcaatactacttcaatcgctctttaagctggctggaatttaataagcgggtactccacgaagcctatgacccccgcacaccgctactagagcggctcaaatttatggccattttcagttccaacttggatgaatttttcatggtgcgtgtggctggtttgaagcagcaagtggaaagtggcattctccaagtaggagccgatggtatgcctccagcggagcaattacaggcagtgcggcaatatctcttaccgattgttacggagcaacaccgctatttcgatcaagaactgcgtgccctcttggccaaggagtctatttttctcactcgctttaatgagttgacccccgagcagcaggcctacctcaacgactacttccaggcccaagtgttccctgtgcttacccctttagccgttgatccggcgcaccctttcccctatatttctagtctcagccttaaccttgctgtgctgattcgtgatccagaatctggccaagagcgactggcacgggtgaaggtaccgaatcagtttccacgctttgttgcccttccccagcacttgcactcgccccaaggtgttcattggctgggcgttcccctcgaagaaattattgcccacaacctcagtgccctctttccggggatggagattgaggcctactttgcctttcgcattacccgcagtgccgacctcgaactagaaacggacaaggccgatgatttactgattgccattgaacaggaaattcgtaaacggcgctttggctctgtagtgcggctggaggtgcagcggggcattccaccgcttctgaggcaaaccctaatggaagagatggatctcgaggagatcgatgtctatgaactcgagggtctgttgtgcttgaatgatttatttgcctttatgggattgcccttgccccagttcaaggatcccgagtggcaaccccaagttccccccagtttccaacgggtagaggaacgggagtccatgtttgacaccagcagtgaaattaccacccttggcaccgactattgggaagctgttgccaacgaactctttagtctcattcgcgaaggggatattatcgttcatcacccctaccattcctttgcggcaacggtacagcgctttattactttggcggcccatgatccccaggtgctggccattaagataaccctctatcgcacttctggtgactcgccgattgtcagtgccctgattaaagctgccgagaatggcaaacaggtggcggttttggtggaactgaaggcgcgctttgatgaggaaaataatatcctctgggcacggaagctggagaaagtgggtgtccatgtggtctatggcgtaccgggtctgaagacccacaccaaaacagttctggtggtgcgccaagaggcggggcaaattcgccgctatgtccacattggcactggcaattacaatcccaaaactgctagcctctatgaggatttggggctattttcctgccgtgaggaattgggagcagatctctcggaactctttaatgtgctcacgggctatgcccgccagcgggattatcgcaagcttcttgttgccccagtcacgatgcgcgatcgcacccttcagttgatttaccgcgagattgaacacgcccgcaatggtcagccggcgcggattattgccaagatgaatgcgattacagacacgcaggtgattcgcgccctctatgaggcgtcccaagcaggggtggacattgatttgattattcgcggtatgtgctgtctacgccccggcgtaccgggcgtgagcgatcgcattcgggtgattagtatcattggccgctttttagagcactcccggattttctactttggcaacaatggggacccagagtattacatcggcagtgccgactggcgatcgcgcaacctagaccgccgcgttgaagccattacccccattgaagatccagcgattcaactggaactcaaagaacgactggaaattatgttggcagacaatcgccaagcctgggaactgcaacccgatggcacctaccgccaacggcagccagcacctggagaagccgagcgcggtacccacagtgttttaatggctcgcaccctcaaggacgttcaagggagtcactag

SEQ ID NO: 6589 - protein, 745 aa, Thermosynechococcus elongatus BP-1
MEASVTNKQEQTAMPSAKSPRRKAPEPIDLDNPQYYFNRSLSWLEFNKRVLHEAYDPRTPLLERLKFMAIFSSNLDEFFMVRVAGLKQQVESGILQVGADGMPPAEQLQAVRQYLLPIVTEQHRYFDQELRALLAKESIFLTRFNELTPEQQAYLNDYFQAQVFPVLTPLAVDPAHPFPYISSLSLNLAVLIRDPESGQERLARVKVPNQFPRFVALPQHLHSPQGVHWLGVPLEEIIAHNLSALFPGMEIEAYFAFRITRSADLELETDKADDLLIAIEQEIRKRRFGSVVRLEVQRGIPPLLRQTLMEEMDLEEIDVYELEGLLCLNDLFAFMGLPLPQFKDPEWQPQVPPSFQRVEERESMFDTSSEITTLGTDYWEAVANELFSLIREGDIIVHHPYHSFAATVQRFITLAAHDPQVLAIKITLYRTSGDSPIVSALIKAAENGKQVAVLVELKARFDEENNILWARKLEKVGVHVVYGVPGLKTHTKTVLVVRQEAGQIRRYVHIGTGNYNPKTASLYEDLGLFSCREELGADLSELFNVLTGYARQRDYRKLLVAPVTMRDRTLQLIYREIEHARNGQPARIIAKMNAITDTQVIRALYEASQAGVDIDLIIRGMCCLRPGVPGVSDRIRVISIIGRFLEHSRIFYFGNNGDPEYYIGSADWRSRNLDRRVEAITPIEDPAIQLELKERLEIMLADNRQAWELQPDGTYRQRQPAPGEAERGTHSVLMARTLKDVQGSH

SEQ ID NO: 6590 - DNA, 2238 bp, Bifidobacterium longum NCC2705
  CDS (1)..(2238): transl_table=11
atggcacagatatttgacgcaccctcgaaggcaattctgcgcagccaaatcgcagagcatattgccgaaaacgacaacaacgaccgccgcgtcgatcaggaaggcgaggcaccgctgcccaaggaccgtttcttcgaccgcgagctcagctggctcaagttcaaccagcgcgtgctcgaatgtgcggagaacgaagacatgcccctgctcgagcgcgccaacttcgccgcgatcttcgcctcgaaccttgacgagttcttcatggtccgcgtcgccggcctgaagcgccgtatcgactcgggcatcgccgtgccgtctgccgccggcctgagcccgcgtcagcagctgcgcgcgatcagcgagaccgcacaccgtctgcaagacgagcacgcacattacacgatcgacaccattctgccggaattggagaaggagcgcatcgtcctgctgacgtgggacaagctcacatcctccgagcaggagcgcctctcgcgctactaccgccagcaggtgttcccggtcctgacgccgctcgccgtggatccggcccacccgttcccctacatttccggcggttccatcaacctggccgtgattgtggagaacccggcctccggcaagtcgcacttcgcccgcgtcaagatcccgggcaacctgccgcgcctggtgccggtggacgacatgaccgatgaggagtccaaggacgagcgttacggcttcatcgccatggaaaagctcatcgccgcgcatctggaatccctgttcccgggcatgatcatcaaggaggcccgctccttccgcgtgactcgtaacgaggacatcgacgtggaagaggatgacgccgagaacctgctcaacgccatggagaaggagctgctgcgccgccgcttcggaccgccgatccgcctggagatcacggacaccacgagccccttcctctcccagctgctcgccgaccagctcggcgtgagccaggacgaggtataccgtctgcccagcccgctggacctgaccgtgctctttgagctcggcagcgtggaccgcccggacctgaagaaccgtccgttcgtgccgaccacgaaccgtcagatcgccgaggtcgagtcctcccgcgcacaggatattttcgctgccatccgcgagcgcgacatcctgctgcatcacccctatgactccttctccacttccgtgcaggccttccttgcgcaggccgccgcggacccgaaggtgctggccatcaagcagaccctgtaccgcaccagctccaactcgccgatcatcgacgccctgatcgacgccgctcatgccggcaagcaggtgctggctttggtggaaatcaaggctcgtttcgacgaggacgccaacatcgcgtgggcccgcaagctcgaacgcgccggcgtgcacgtggtgtacggcatcgtgggcttgaagacccactgcaagctcatcgaggtcgtgcgtcaggaagcggacggtctgcgccgctactgccacgtaggcaccggcaactacaacccgaagaccgcgcgactgtacaccgatctgggtctgctgacctgcgacccggtggtcggccaggatctgactcgtctgttcaaccagctctctggttacgcgccgaagtccagcttccaccgtctgctggtggccccgcgtaccgtgcgcaccggcctgattcagcgcatccgccgcgaggaggacgccgcccgcgccggcaaggaggcctggatcaagatcaaggtcaactccatcgtggacgagaagaccatcgacgccttgtaccgtgcctctcaggccggcgtgaagatcgacatcgtcgaacgcggcatctgcgctctgaagcccggcgttcccggcctgtccgagaacatccgcgtgcgttcgattctcggccgcttcctggagcactcccgcatctacgccttctgcaacgcggacggcccgcagatcggcgagggtccggcttccggcccggaggtctacatcggttcggctgacctcatgcaccgtaaccttgaccgccgtgtggaggctctggtgcgtgtcaccgccccggagcaggtcgacgggctcatcaagtacgtggacctgcagatggccgactccaccatgagctggcacatgcagcccgacggcacgtatgtgctgcacaccaaggacgacgagggccgcccgctggtcgacagtcaggaatatctgattcgcaagcaccagcgccgccccaattcgcacaactga

SEQ ID NO: 6591 - protein, 745 aa, Bifidobacterium longum NCC2705
MAQIFDAPSKAILRSQIAEHIAENDNNDRRVDQEGEAPLPKDRFFDRELSWLKFNQRVLECAENEDMPLLERANFAAIFASNLDEFFMVRVAGLKRRIDSGIAVPSAAGLSPRQQLRAISETAHRLQDEHAHYTIDTILPELEKERIVLLTWDKLTSSEQERLSRYYRQQVFPVLTPLAVDPAHPFPYISGGSINLAVIVENPASGKSHFARVKIPGNLPRLVPVDDMTDEESKDERYGFIAMEKLIAAHLESLFPGMIIKEARSFRVTRNEDIDVEEDDAENLLNAMEKELLRRRFGPPIRLEITDTTSPFLSQLLADQLGVSQDEVYRLPSPLDLTVLFELGSVDRPDLKNRPFVPTTNRQIAEVESSRAQDIFAAIRERDILLHHPYDSFSTSVQAFLAQAAADPKVLAIKQTLYRTSSNSPIIDALIDAAHAGKQVLALVEIKARFDEDANIAWARKLERAGVHVVYGIVGLKTHCKLIEVVRQEADGLRRYCHVGTGNYNPKTARLYTDLGLLTCDPVVGQDLTRLFNQLSGYAPKSSFHRLLVAPRTVRTGLIQRIRREEDAARAGKEAWIKIKVNSIVDEKTIDALYRASQAGVKIDIVERGICALKPGVPGLSENIRVRSILGRFLEHSRIYAFCNADGPQIGEGPASGPEVYIGSADLMHRNLDRRVEALVRVTAPEQVDGLIKYVDLQMADSTMSWHMQPDGTYVLHTKDDEGRPLVDSQEYLIRKHQRRPNSHN

SEQ ID NO: 6592 - DNA, 2241 bp, Brucella suis 1330
  CDS (1)..(2241): transl_table=11
atgacagtcgaactgccccccagttccccttattccggctttgcttcgggcgatctggcgcagacggacattcacgaagctttgaacggcgggttgatgcaaagtgccgaccgcttcgtcaatcgagagttttcctggcttcagttcaatcgccgcgttcttgaggaggcggcgaatatccgccagccgctgctggagcgcttacgcttcctttccatctcggcggccaatctcgatgagttcttcatggtgcgcattgccggtctggccggtcaggttcgcgcaggcatagccttgcgcagccccgacgggcgcacaccgcaggagcagcttgatttcgttctggaagaggtggggcgccttcaggcggagcagcagcaatgtctgcgcacgttgcgcaaggagctggaaaaggaaaatatcgagatcgttcgcccgcccgccttgtcgaaacacgaaaaggaatggctggaaaaccattttctggaaacgatcttccctgtcctgacgccgctttccatcgacccggcgcatccgtttccgttcattcccaatctgggcttttccatcgccttgcagcttgcgcggcgtgccgataatcatccgatgacggcgcttctgcgcattccggtcgcgttgaaacgcttcatccagctaccgaccgaccagaacaacatctatcgctttattactatcgaggatgcggtaagcctctttatcgggcggctattccccggttatgaggtgcgcggcgccggtacgttccgcatcatccgcgacagcgatattgaagtggaggaagaggcggaagacctcgttcgcctgttcgagacggccttgaaacgccgacgccgcggtcaggtgatccgcatcgaatttgacggtgaaataccggaggcgctgcgcatcttcgtggcgatggagcttggtgtttccgaaaatcgcatcagcgtgcatgaaggccttctggcgctgaacatgatttcagaggtcgtttccatcccgcgcgaggaccttaaattcgtctcctacaatccgcgtttcccggaacgtatccgcgaacatggcggcgattgcctggcggcgattcgcgaaaaggacatcgtggtccatcacccctatgaatccttcgatgtcgtggtgcagtttctgcgtcaggcggcagccgaccccgatgtgctggctatcaagcagacgctttaccgcacctccaacgatagcccgatcgtccgcgcgctggtggatgccgccgaggcgggcaagtcggtgacggctctggtggaattgaaggcccgcttcgatgaggaggcgaatattcgttgggcgcgcgatctggagcgtgcgggcgtgcaggtggtattcggcttcatcgaattgaaaacacatgcgaaaatgtcgctcgtggtgcgccgcgaagaccagaagctgcgctcctatgtgcatctgggaaccggcaattatcatcccatcacagcgcgtatttataccgatctttccttcttcacctcggatgctgaaattgcgcgtgacgtggcgcatatcttcaatttcattaccggctatgcgcagccggccgaggaaatgaagattgcgatttctcctttcacactgcgcgcgcgcatcttgaaacacattgaggatgaggttgcccatgcgaaggcgggaaagcctgcggcaatctggatgaagatgaactcgctcgtcgatccacagataatcgatgcgctctatatggcgagccaggcgggcgtgcagatcgatctggtcgtgcgcggcatctgctgcctgcgtccgggggttccggggctttcagataatatccgcgccaagtcgattgtcgggcgttttctggagcacagccgcatattctgtttcggaaacggccacgacctgccgtccggcaaggcaattgtctatattggttccgccgatatgatgccgcgtaatctcgaccgtcgcgtggagaccctcgttccgatcacaaatgccacagtgcatcagcaaatcctgtcgcaaatcatgtttgccaacataattgataaccaacagagctatcagctacttgcggacggcacctctcgccggatagaaaaggaagcaggagaagaagctttcaacgcgcaggaatatttcatgaccaatcccagcctgtcgggtcgcggaaagtcgctgaagtcttcggccccccgccttatcgcgcatcgcaagcgcgcgcaggcggagagaaaaacgactgcatga

SEQ ID NO: 6593 - protein, 746 aa, Brucella suis 1330
MTVELPPSSPYSGFASGDLAQTDIHEALNGGLMQSADRFVNREFSWLQFNRRVLEEAANIRQPLLERLRFLSISAANLDEFFMVRIAGLAGQVRAGIALRSPDGRTPQEQLDFVLEEVGRLQAEQQQCLRTLRKELEKENIEIVRPPALSKHEKEWLENHFLETIFPVLTPLSIDPAHPFPFIPNLGFSIALQLARRADNHPMTALLRIPVALKRFIQLPTDQNNIYRFITIEDAVSLFIGRLFPGYEVRGAGTFRIIRDSDIEVEEEAEDLVRLFETALKRRRRGQVIRIEFDGEIPEALRIFVAMELGVSENRISVHEGLLALNMISEVVSIPREDLKFVSYNPRFPERIREHGGDCLAAIREKDIVVHHPYESFDVVVQFLRQAAADPDVLAIKQTLYRTSNDSPIVRALVDAAEAGKSVTALVELKARFDEEANIRWARDLERAGVQVVFGFIELKTHAKMSLVVRREDQKLRSYVHLGTGNYHPITARIYTDLSFFTSDAEIARDVAHIFNFITGYAQPAEEMKIAISPFTLRARILKHIEDEVAHAKAGKPAAIWMKMNSLVDPQIIDALYMASQAGVQIDLVVRGICCLRPGVPGLSDNIRAKSIVGRFLEHSRIFCFGNGHDLPSGKAIVYIGSADMMPRNLDRRVETLVPITNATVHQQILSQIMFANIIDNQQSYQLLADGTSRRIEKEAGEEAFNAQEYFMTNPSLSGRGKSLKSSAPRLIAHRKRAQAERKTTA

SEQ ID NO: 6594 - DNA, 2139 bp, Leptospira interrogans serovar Lai str. 56601
  CDS (1)..(2139): transl_table=11
atgtcaaaatccaaagtacaaggccaaactccggcaataacaaatcaaaacgaatcttccaacggaagccaaccggaaattcatttaaacaatccaaatatattttttgaccgggaactttcttggatcgatttcaatcggcgagtattggaagaagctaatgatcccgaaaatccacttttggaaagactgaaattcttaagtataaccgaaaccaatttagacgaattttatatggttcgagtcgccggacttcgtaacctagtaaaagaaggaaacgacgaaagaagtttaaacggagacagcgcgtccgaaattttatccgacttatcagataaagtcagagtttttgtaagggaagaatatgaaacctttgccagaacattagaagaattgaaagtagccggaattcatttgatactcaatccagaagaactaacaatagaagaaattaaacagattcaaaactattatcaggaagacgtatctccaattcttactcctcttgcaatcgacacggctcatcctttcccacatatacttaacaaatccttaaaccttgcgatggtattaagtacagacgatgaaaaaaccggaggaaaaaaagatttgttcgctgtcgtacaagtgccttctgtacttccaagatttttgcaactcaaaggaaaaggagaagaaagaagattttttccattggaagaaatcatcaaactgcacgtagacgatcttttttacggaatgaccgtaagagaaatttatccgtttagaatcataagagacgcagacatatccatcgacgaggaaaaatccgtcaaagacctactcattacgatgaaagacgaacttagaaaccgaatctggggagatgcggttcggatggatatacaccaaggcacatcaccttttattaaaaacaccttgagagaacttttagaattacaagataacgaagtattcgacgttgcctctattttgaatataaacgacgcaatgtttttttacggattggatcacacttctaaactcaaatatccttttttccaacaaaagaccactcttaagttcgaaactccagaaaaaattttcgaggcgatcaaaaagaaagacagactacttcatcatccatatcaatctttttctgccattgaagatctgttacgaatttcttccgaagatcctaaagttttaggaatcaagatgacactttatcgtacaagcggagattctcctatcatacaatatttaggagaagcggcggagaacggaaaacaagtaaccgttcttgtagaactcaaagctcgttttgacgaagaaagaaatatcaagtgggctcaaaaacttgaagcgagaggagttcacgtagtttacggagtagttggactaaaaattcattgtaaaatgcttatgatcgttagaaaggaagatgatcatctagtgcgttatgtgcatcttggaaccggtaattataattccaccacttccaaatactataccgatctcagtttttttacggtaaataaacagatcacggaagacgtagctacaatctttaacacgatcactagttacgctaagatgccaactttaaaccttttatccgcttctccgcataatctaaaatccaccttcatttctttgatcgataaagaaaaagaaaacgcactttcgggaaaaccggcaaggatcatttttaaaatgaattcccttgtggacccacatattatactttccttatacaaggcaagccaagccggagtaaaagtagacctgatcatccggggaatctgttgtctcaaaccgggactaaaagggatttctgaaaacattaccgtgttatcaatcgtcggaagatttttggaacatactagaatctattactttcattcgggaggtttcgaatctgtttttcttgcgtctgcggattgtatgcctagaaattttgaaagaagaatagaagttctttttccaattatagaaagtaaaaataaagaacgaatcaaaaagatcttagatgtacaattacgagacaacgtaaaagctcggtttttgcgcccagacggacattacgtaaagaaaatattagaaaaagatgaaaaacccgtagattctcaaatcgaaagaatgacatttgcggaataa

SEQ ID NO: 6595 - protein, 712 aa, Leptospira interrogans serovar Lai str. 56601
MSKSKVQGQTPAITNQNESSNGSQPEIHLNNPNIFFDRELSWIDFNRRVLEEANDPENPLLERLKFLSITETNLDEFYMVRVAGLRNLVKEGNDERSLNGDSASEILSDLSDKVRVFVREEYETFARTLEELKVAGIHLILNPEELTIEEIKQIQNYYQEDVSPILTPLAIDTAHPFPHILNKSLNLAMVLSTDDEKTGGKKDLFAVVQVPSVLPRFLQLKGKGEERRFFPLEEIIKLHVDDLFYGMTVREIYPFRIIRDADISIDEEKSVKDLLITMKDELRNRIWGDAVRMDIHQGTSPFIKNTLRELLELQDNEVFDVASILNINDAMFFYGLDHTSKLKYPFFQQKTTLKFETPEKIFEAIKKKDRLLHHPYQSFSAIEDLLRISSEDPKVLGIKMTLYRTSGDSPIIQYLGEAAENGKQVTVLVELKARFDEERNIKWAQKLEARGVHVVYGVVGLKIHCKMLMIVRKEDDHLVRYVHLGTGNYNSTTSKYYTDLSFFTVNKQITEDVATIFNTITSYAKMPTLNLLSASPHNLKSTFISLIDKEKENALSGKPARIIFKMNSLVDPHIILSLYKASQAGVKVDLIIRGICCLKPGLKGISENITVLSIVGRFLEHTRIYYFHSGGFESVFLASADCMPRNFERRIEVLFPIIESKNKERIKKILDVQLRDNVKARFLRPDGHYVKKILEKDEKPVDSQIERMTFAE

SEQ ID NO: 6596 - DNA, 2220 bp, Bradyrhizobium japonicum USDA 110
  CDS (1)..(2220): transl_table=11
atggaccgacttctcatggactccgcgcaagctgttgaaataaaagaaaaagtcccggagacggaaagcctgccggcgatcgcctcgagccccgagcgattcatcaaccgcgagctgtcctggctgcatttcaaccgccgcgtcctggaggaatcggtcaatcccagccatcccgtgctggagcgggtgcgattcctgtcgatttccgcgaacaacctcgacgaattcttcatggtccgcgtcgccggcatcaaggcccaggtgcgcgagggcattgccgagcgtagccccgacggcctgacgccgtccgagcagctcgcgctgatcaaccgcacggtctcccagcttgcttcagaccagcaggcgatctggcgcgacctgcgcgccacgctggccgatgtcggcatcgtgctggtggacggcaaggaggtcaccaaggcggagcggacctggatcgaggactacttcctcaacaacgtgttcccgctgctgacgccgctcgcgatcgacccggcccatcccttcccgttcatcccgagcctcggtttcaccatcgcgctccagctcacgcgcgccgccgacggcaagcagatgaacgcgctgatccgcatgcccggcaagatcgaccgcttcatccgcctgccgtccgagggcacgatgcggctgatctcgctggagcaggcgaccgccctgttcatcaaccgactgttccccggctacaatctgcatggccagggcgccttccgcatcctccgcgactccgagctcgaaatcgaggaagaggccgaggatctcgtccgcctgttcgagaccgcgctgaagcgccgccgccgcggatcggtgatccggctcgagatcgacgccaagatgccggagcagctgcgcaacttcgtgcagcatgccctctccgccgccgacgacgaagtattcctggtcgacggcgtgctcgccatgaatgagctctcgcagctcacccgcctcgaccggcccgacctcgaattcacgccttacgtgccgcgccatcccgagcgcgtgcgcgagcatggcggcgacatctttgccgcgatccggcagaaggaccttgtcgtccatcacccctacgaatccttcgacgtggtggtgcagttcctccagcaggcaacgcgcgaccccgatgtcgtcgcgatcaagcagacgctctaccgcacctccaataactcgccgatcgtgcgcgcgctcgccgaagccgccgaggccggcaagtccgtcaccgcgctgatcgagctcaaggcgcgcttcgacgaggaggccaacatccgctgggcgcgcgacctcgagcgcgcaggcgtgcaggtcgtctatggcttcctcgaactgaagacgcacgcaaaactctcgatggtggtgcgccgcgagggcggcagcctcacgacctacgtccacaccggcaccggcaactaccacccggtcaccgcgcgcatctacaccgacctctcctacttcacctccgagccgaccatcggccgcgacgccgcgcgcgtcttcaacttcatcaccggctatgccgcgccgagcgatctggaaaagatggcggtgtcgccgctgaccctgcgcaagcgcatcatcgagcacatccagggcgagaccgcgcatgcgcggcacggccgccccggcgcggtctggatgaagatgaatgcgctggtcgacccagacatcatcgacgcgctgtatgaggcctcacaggccggcgttcaggtcgaactcgtggtgcgcggtatctgttgcctcaggcccggtatccctggcctgtcggagaacatccgcgtcaagtcgatcatcgggcgcttcctggaacacggccgaatctactgcttcggcatgggccaggggctgccgagcacgaaagcggctgtgtatatctcctcggccgacatgatgccgcgcaacctcgaccgccgcgtcgaggtgctgtgtccgctgcaaaatcccacggtgcatcagcaggttctcgaacagatcatggtcgcgaatctcaaggacaatgagcagagctggcaattgttgccggatgggtcctcaacgcgtatgaagaccgcgaagggcgaggagcctttcaacgtccacaactacttcatgacaatccgagtctgtctggccgtggaaagtcgctcaaggaatcctcgccgcgtcgtctcacgcgccggaacgaacgccatccatcctgatcgggcgtcgacgtga

SEQ ID NO: 6597 - protein, 739 aa, Bradyrhizobium japonicum USDA 110
MDRLLMDSAQAVEIKEKVPETESLPAIASSPERFINRELSWLHFNRRVLEESVNPSHPVLERVRFLSISANNLDEFFMVRVAGIKAQVREGIAERSPDGLTPSEQLALINRTVSQLASDQQAIWRDLRATLADVGIVLVDGKEVTKAERTWIEDYFLNNVFPLLTPLAIDPAHPFPFIPSLGFTIALQLTRAADGKQMNALIRMPGKIDRFIRLPSEGTMRLISLEQATALFINRLFPGYNLHGQGAFRILRDSELEIEEEAEDLVRLFETALKRRRRGSVIRLEIDAKMPEQLRNFVQHALSAADDEVFLVDGVLAMNELSQLTRLDRPDLEFTPYVPRHPERVREHGGDIFAAIRQKDLVVHHPYESFDVVVQFLQQATRDPDVVAIKQTLYRTSNNSPIVRALAEAAEAGKSVTALIELKARFDEEANIRWARDLERAGVQVVYGFLELKTHAKLSMVVRREGGSLTTYVHTGTGNYHPVTARIYTDLSYFTSEPTIGRDAARVFNFITGYAAPSDLEKMAVSPLTLRKRIIEHIQGETAHARHGRPGAVWMKMNALVDPDIIDALYEASQAGVQVELVVRGICCLRPGIPGLSENIRVKSIIGRFLEHGRIYCFGMGQGLPSTKAAVYISSADMMPRNLDRRVEVLCPLQNPTVHQQVLEQIMVANLKDNEQSWQLLPDGSSTRMKTAKGEEPFNVHNYFMTIRVCLAVESRSRNPRRVVSRAGTNAIHPDRAST

SEQ ID NO: 6598 - DNA, 2355 bp, Streptomyces avermitilis MA-4680
  CDS (1)..(2355): transl_table=11
gtgcccgagccctcgccgcctccggtgaacggggagagcaagcgaaccggccgccaggtcgtcgcgctcccgcccgctcgctctgacgcgcccttcccccgcccggcgcggaagaatggggccatgagccagccaaatgtccaggcacaggtccagcacccgcagccctccgtggggtccatcgccgcgcaccgcccgcacaccgtggccgccgcggtctccgacctggagcccgacctcgatgccgacctcgacgcgtacgaggacaccgacgccgacggcgtccagctcccgcagggccgcttcctcgaccgggagcgcagctggctcgcgttcaacgagcgcgtcctcgagctcgccgaggacccgaacacgcccctcctcgagcgggcgaacttcctggcgatcttcgccagcaacctcgacgagttcttcatggtgcgggtggcgggactgaagcgccgcatcgccaccggcgtcgccacccgctccgcctccggtctccagccccgcgaggtcctggagatgatctgggcccgctcccgcgagctgatggcccggcacgccgcctgctaccaggaggacgtcgcccccgcgctggcggaggagggcatccacctggtccgctggaacgagctgacggagaaggagcaggcccgcctgttcaccctgttccggcaccagatcttcccggtgctgacccccctcgccgtcgaccccgcgcaccccttcccgtacatctcgggcctgtccctgaacctcgccgtggtcgtgcgcaacccggtcagcggccaccgccacttcgcccgcgtgaaggtcccgccgctgctctcccgcttcctggaggcgtcccccgaccgctacgtccccatcgaggacgtcatcgcggcgcacctggaagagctgttcccgggcatggaggtcctggagcaccacaccttccgcctcacccgcaacgaggacctcgaggtcgaggaggacgacaccgagaacctgctccaggccctggagaaggagctcatgcgccgccgcttcgggccgccggtgcgcctggaggtcgaggagtccatcgaccggcacgtcctcgatctcctcgtacgggagctgaaggtctccgaggcggaggtctaccccctgcccggccccctggacctcaccggcctcttcggcatcggcgccctcgaccggcccgagctgaagtaccccaagttcatcgcgggcacccaccgcgacctcgccgaagtcgagtcggcgtccgcgccggacatcttcgccgccctgcgcgagcgcgacgtcctgctccaccacccgtacgacagcttctccacctccgtccaggccttcctggagcaggcggcgggcgaccccgacgtcctcgccatcaagcagaccctgtaccggacctcgggcgactcgccgatagtcgacgcgctgatcgaggccgccgaggcgggcaagcaggtcctcgtactggtcgagatcaaggcccgcttcgacgagcaggccaacatcaagtgggcgcggaagctggaggagtccggctgccacgtcgtatacggcctcgtcggcctgaagacccactgcaagctgtcgctggtggtccggcaggagggcgagaccctgcggcgctactgccacgtcggcacgggcaactaccaccccaagaccgcccggctgtacgaggacctgggcctgctcaccgccgacccgcaggtcggcgcggacctctccgacctcttcaaccggctgtcgggctactcacgccgcgagacctaccgccgtctcctcgtcgcccccaagtccctgcgcgacggcctggtctcacggatcaacaaggagatccagcaccaccaggccggacggcccgcgttcgtccgcatcaaggtcaactcgatggtggacgaggccatcatcgacgccctctaccgcgcgtcccaggccggcgtcccggtcgacgtgtgggtgcgcggcatctgcgcggtgcgccccggcgtcacgggcatgtccgaaaacatacgggtgcgctccatcctcggccgcttcctcgaacactcgcgggtcttcacgttcggcaacggcggcgagcccgaggtgtggatcggcagcgccgacatgatgcaccgcaacctcgaccgccgcatcgaggccctcgtcagggtcaccgaccccgcccaccgggccgccctcaaccggctcctggaaaccgggatgtccgacaccaccgcctcctggcatctgggcccggacggcgagtggacacggcacgcgaccgatgccgagggccagcccctgcggaacgtccaggagatgctcatagacgcccggaggcgccggcgtggcacagcgacaccttga

SEQ ID NO: 6599 - protein, 784 aa, Streptomyces avermitilis MA-4680
MPEPSPPPVNGESKRTGRQVVALPPARSDAPFPRPARKNGAMSQPNVQAQVQHPQPSVGSIAAHRPHTVAAAVSDLEPDLDADLDAYEDTDADGVQLPQGRFLDRERSWLAFNERVLELAEDPNTPLLERANFLAIFASNLDEFFMVRVAGLKRRIATGVATRSASGLQPREVLEMIWARSRELMARHAACYQEDVAPALAEEGIHLVRWNELTEKEQARLFTLFRHQIFPVLTPLAVDPAHPFPYISGLSLNLAVVVRNPVSGHRHFARVKVPPLLSRFLEASPDRYVPIEDVIAAHLEELFPGMEVLEHHTFRLTRNEDLEVEEDDTENLLQALEKELMRRRFGPPVRLEVEESIDRHVLDLLVRELKVSEAEVYPLPGPLDLTGLFGIGALDRPELKYPKFIAGTHRDLAEVESASAPDIFAALRERDVLLHHPYDSFSTSVQAFLEQAAGDPDVLAIKQTLYRTSGDSPIVDALIEAAEAGKQVLVLVEIKARFDEQANIKWARKLEESGCHVVYGLVGLKTHCKLSLVVRQEGETLRRYCHVGTGNYHPKTARLYEDLGLLTADPQVGADLSDLFNRLSGYSRRETYRRLLVAPKSLRDGLVSRINKEIQHHQAGRPAFVRIKVNSMVDEAIIDALYRASQAGVPVDVWVRGICAVRPGVTGMSENIRVRSILGRFLEHSRVFTFGNGGEPEVWIGSADMMHRNLDRRIEALVRVTDPAHRAALNRLLETGMSDTTASWHLGPDGEWTRHATDAEGQPLRNVQEMLIDARRRRRGTATP

SEQ ID NO: 6600 - DNA, 2106 bp, Nitrosomonas europaea ATCC 19718
  CDS (1)..(2106): transl_table=11
atggcaccggtagccaagccggagatgcccgctgccaaacagtttctgaaccgtgaacttagtcagatcgaattcaatcgccgggtattggcgcaggcagagaatgaggaaacacctctgctggaacgcctgcgtttcatttgtatcgtcagcagtaacctcgatgaattttttgaagttcgtgttgccgggctgaaagaacaaatcaagctggatgcacctggttccggtgcggatggcatggcgcctggccaggcattcgaacgggtatccgagcaggtgcgtgaactggtctcccggcaatatcagttgctcaatgacaatattcttcccgcactggtggaacagggtatttgtttcctgcggcgcgattcctggaatgatggccagcgcgaatggatcagggatttcttctttcgcgagctgatgccgatgcttacccccatcggtttggatcctttccatcctttcccgcgtatattgaataaaagcctgaatttcgcggttgcattggaaggaaaagatgcttttggccgtaattcaggtgttgcaatcgttcaggcgccgcgtattttgcctcgtgtcatacggctgccaaaagaaatcagtggcagcccctatagtttcgtattcctgtcatccattatccatgctcatgtgggtgaactttttacgggtatgcgggtggtgggctgttaccagtttcgtgtcacccgtaacagtgatttgttcgttgatgaagaggaaataaagaatcttcgtattgcattgcagggtgaattgtcgcaacgtcatctggggaatgcggtcaggctcgaggtggcagatagttgctcgcaacagatggttgaatttttgctggggcagttttctcttgggaacgaagatctgtttcaggtgaacgggccagtcaatctggtgcggctgatacaggtttttgatctgatcgatcgacctgacctcaaatttccacgtttcattcccggtctgccttttttttctcagaaaaagaaagcacataacattttcgagctgatcagtaagggtgacatattactgcatcatccctaccagtcgttccagccggtcattgaattcattcagcaggcttatgcagatccggatgtgattgctgtcaagcagactgtttatcgcaccggttcggattcaacgctgatggaagcgctcgtggcagcggccaggctgggcaaggaagttacggtagtggtagagttgctggcccggttcgatgaagaagccaatatcaactgggcgaaacggctggaagaggtgggtgcccacgtcatttatggtgtgtttggtcacaagacgcattgcaaaatggccatgatagtacggcgtgaggcggggcagttgaaacgttacgtccatctgggtacaggtaattaccaccctggcacagcccgtgtttacacggattttggcttgctgacctgccatgaggaaatttgtaccgatgtcagtgaagtatttttgcaactgaccgggttgggcaaagcgagcaagctgaagcatctctggcaatcaccattcagtctgcatgggcagatactgaacagcattcaacaggagataaagcatgccaacgcgggagaacctgctgccatcatcgctaaaatgaatgcattactggagccgtctgtcattcaggcactttatgcggcttccggtgcaggcgtaaaaattgatctgattgtgcgaggtgcctgcgcactgcgccccggtgtgccgggattatcagagaatattcgtgtgcgctccatcgtcgggcgctttctggaacatacccgcattttctattttctcaatgcaaagcagcataacgtctatctggcaagtgctgactggatgtaccggaatttttttcgtcgggtggagatttgttttccggtactcgatccgcggttgaagaagcgggtaatcctggaggggctgaagccctatctccgtgataacgtacaggcatgggagatgaatggtgacggccactacaaacgaaaatctgcaaggaagaacaacagattcagtgcgcaggaagttttactcgagaaacttgcagcagtaaaacaggacgctgtcgaataa

SEQ ID NO: 6601 - protein, 701 aa, Nitrosomonas europaea ATCC 19718
MAPVAKPEMPAAKQFLNRELSQIEFNRRVLAQAENEETPLLERLRFICIVSSNLDEFFEVRVAGLKEQIKLDAPGSGADGMAPGQAFERVSEQVRELVSRQYQLLNDNILPALVEQGICFLRRDSWNDGQREWIRDFFFRELMPMLTPIGLDPFHPFPRILNKSLNFAVALEGKDAFGRNSGVAIVQAPRILPRVIRLPKEISGSPYSFVFLSSIIHAHVGELFTGMRVVGCYQFRVTRNSDLFVDEEEIKNLRIALQGELSQRHLGNAVRLEVADSCSQQMVEFLLGQFSLGNEDLFQVNGPVNLVRLIQVFDLIDRPDLKFPRFIPGLPFFSQKKKAHNIFELISKGDILLHHPYQSFQPVIEFIQQAYADPDVIAVKQTVYRTGSDSTLMEALVAAARLGKEVTVVVELLARFDEEANINWAKRLEEVGAHVIYGVFGHKTHCKMAMIVRREAGQLKRYVHLGTGNYHPGTARVYTDFGLLTCHEEICTDVSEVFLQLTGLGKASKLKHLWQSPFSLHGQILNSIQQEIKHANAGEPAAIIAKMNALLEPSVIQALYAASGAGVKIDLIVRGACALRPGVPGLSENIRVRSIVGRFLEHTRIFYFLNAKQHNVYLASADWMYRNFFRRVEICFPVLDPRLKKRVILEGLKPYLRDNVQAWEMNGDGHYKRKSARKNNRFSAQEVLLEKLAAVKQDAVE

SEQ ID NO: 6602 - DNA, 2094 bp, Helicobacter hepaticus ATCC 51449
  CDS (1)..(2094): transl_table=11
atgacaattaatgattcaaaaatgtattttaatcgtgagctttcgtggctcaaatttaatacacgtgtgcttaatgaagctaaaaacactaatattccgcttttggagcgattaaaatttgtagcaatttatgggacaaatcttgatgaattttatatgatacgcgtagcagggcttaaacgtttgtatgcaagtggaattaccgaagtgggcgcagataaacttacgccattgcagcagcttaaaagtatacgcgaataccttgataaagaaaaaaatatgcttgagagtgtttttaaggagattcaaagtggcttagcaaaggaaggtatgcacattaaacaagtcaatcagttaaataatgagcaaaaaaagcgattgcacgaattttttattaattatttgtatcctgtgattgtgcctgtggcaatagatgctacacacccctttcctcatctaaataatttaagttttgccattgcgcttaaacttaaagatacacaagaggggagtgtaaaatttgctatggtaagaatctcgcgtttgctttcgcgttttgtggagattgaaagcggcgtgtttatagcggttgaagatattgtaggtgagtttgcaagtgaattgtttggagaatatgagattctcaattatgttccttttagaatcacgcgtaatgcggatatggaaattgaagaagaagaggcagatgattttatagagattatgagtgaggggcttaaaactcgtaggaaaggtgaagtagtgcgtcttgagataggtgcagataaagatagtagccttttagattttattaattctcatttaaaagttgatgctaaagatgtttatgtttatcatattccgctcaatttaagtggattgtgggagttggtagggagcaaggcatatgctcatcttaccactccaccttttaatccaaaaacacttccaccattacacgggagtagagagattctctctacaatggaaaatgatgatattttgctcttccacccctatgaaagctttgatccaatagtgaattttattcagagcgcagcaaaagaccctgatgtgctctccattcgtatgacactttatcgtgtaggaaaaaattcacctattgttaaagctctcatacaggcagctgaaaataataagcaagtaacggcgttggttgagttaaaagcacgatttgatgaagaaaataatctgtattgggcgcattctttagaatctgctggagcacacgttatttatggtgtgcccggacttaaggtgcatgccaaaattgcgcttgtgattaaaaaaattggcaatacacttaaagaatatgtgcatttaagcacaggaaattataatcctagcactgcaaaaatttatactgatatttcgttcttaacttgcaatcagtcttttgcaaaagatgcaattaaacttttccactctctctctacaggttcttcatatcgcaccaagcttagtcatttattgattgctcctacacagattaagactaaaattttagagcttattgaacacgaaaagaaaatgggaagtgaagggcgcattattatgaaagcaaatgcttttatagacattgatgtgatacgtgcactttatggagcatcaatagctggagtaaagattgatttgattgtgcgtggtgtatgtgccttgcgtccgggtataaagggtgtgagtgaaaatattcgtgtattttcaatcattggaaaataccttgaacacgctagaatctatcattttaagaatgataaagtaggcgtatattttgcttcagcagatattatgcctcgtaatttagagcgacgtgtggagattctcacaccaagcttaaatacacagatgagcaaacgtttaatggagattctccaaatgcagcttaatgataacgtccaaatgtatgaactacaaagcaatggggagtatcagaaagtagtgagctcacaaaaaccctttagttcacaacttgcttatgaggaatatgtgaatgctatttatggagatttggtaagaaatgatgaggtgaataaggcaaaaaaacttgctaaaagaatgctcaaagagagttaa

SEQ ID NO: 6603 - protein, 697 aa, Helicobacter hepaticus ATCC 51449
MTINDSKMYFNRELSWLKFNTRVLNEAKNTNIPLLERLKFVAIYGTNLDEFYMIRVAGLKRLYASGITEVGADKLTPLQQLKSIREYLDKEKNMLESVFKEIQSGLAKEGMHIKQVNQLNNEQKKRLHEFFINYLYPVIVPVAIDATHPFPHLNNLSFAIALKLKDTQEGSVKFAMVRISRLLSRFVEIESGVFIAVEDIVGEFASELFGEYEILNYVPFRITRNADMEIEEEEADDFIEIMSEGLKTRRKGEVVRLEIGADKDSSLLDFINSHLKVDAKDVYVYHIPLNLSGLWELVGSKAYAHLTTPPFNPKTLPPLHGSREILSTMENDDILLFHPYESFDPIVNFIQSAAKDPDVLSIRMTLYRVGKNSPIVKALIQAAENNKQVTALVELKARFDEENNLYWAHSLESAGAHVIYGVPGLKVHAKIALVIKKIGNTLKEYVHLSTGNYNPSTAKIYTDISFLTCNQSFAKDAIKLFHSLSTGSSYRTKLSHLLIAPTQIKTKILELIEHEKKMGSEGRIIMKANAFIDIDVIRALYGASIAGVKIDLIVRGVCALRPGIKGVSENIRVFSIIGKYLEHARIYHFKNDKVGVYFASADIMPRNLERRVEILTPSLNTQMSKRLMEILQMQLNDNVQMYELQSNGEYQKVVSSQKPFSSQLAYEEYVNAIYGDLVRNDEVNKAKKLAKRMLKES

SEQ ID NO: 6604 - DNA, 2112 bp, Prochlorococcus marinus subsp. marinus str. CCMP1375
  CDS (1)..(2112): transl_table=11
atggctaaaaaatttcgacttgcagagaattatattaatagagagttaagctggattaatttcaatgaaagagttcttgagaaagccattgataaaaagacccctcttctagatcaagctaaatttagtgcgatttttagtaataatttagatgaattttttatggttagagttgcttcattaaaatcacaagtagaagcaggagtaacaaaaaaaagtgaggataataaaacacccactgaacaattaattcaaattcgtgagaagcttttgccttctcttcaaaaacagcaaacacactatttatctaatttaaaagatgcttttaggaaagagaatattttcttgcttgattatatagagctaacatctcgtgaaaaaaattgggttgataattactttaaaacagccattttcccaatacttacaccactagctgttgatccagctcatccttttccatttgttagcaatcttagtctcaatattgcagcattaattcgtgatcctgattccggtcagcaacaattttcaagagtcaaagtcccacaaaaaacaatcgctagatttataactattccaagtgatttaagtgataaaaatccaaagccaatctatagcgccattcctgttgaacaagtagtggcatttaacttaaatttgctcttcccaggaatggaaatcgaagaacactccttttttcgagtcactagagatgcagacctagagttgagagatcttgaagccgatgacctaatgattgccctagagcaaggtcttcgcaaacgtcgcatgggtggagaaatagtaagacttgaagtattaaaaacaatgccaaagaaaattcttgacttactaatggaaagcatggatgtagaagaagcagacctttattgcgttgatggattattaggcctagatgaactatttgagctaatcactatcgacactcagcatttatcttctacatcaaagtatggcaaaattcataactctctaaaaaatagtcaatatgggttactggaagatggttcaatcaagcaagaagaatttagaagcatattttcgataattagagctaaagatttgctccttcaccatccatatgatctttttacaagttcagtagaagaatttatcaatcaatctgctgatgatcctttagtaatgggaatcaaaatgactctttatagggtttcaaaagactctccaattattgaggcattaattagagccgcagaaaatggaaaacaagtaatggcacttgttgaattaaaagctcgttttgatgaagacaacaatattcaatgggcaaaacaattagaaaaatctggagtgcatgttgtctatggcgttgtaggacttaaaacacatacaaaaattgcattagtcatccgtaaagaaaaagagcgattacgcagttattttcatattggaacaggtaactataattcaaaaacatccaatcaatatacagacttggggttactatcggttcaaccggaattgggacaagatttagtagagctatttaattatctaaccgggttttcaaagcaaccaagctttaggaaattattagttgctccagtaagcctaagacgtggaatagaaacactaatacagcgagaaattgaaaacgcaaaaaatggcaagcaggcaaaaattaaagccaaaatgaatgcacttgttgatccaagtattattaatttactttatgaagcatcacaagcaggagtaaaaatagagctaattgtacgaggaatgtgctgcttataccctaaaaaagaaggccttagtgaaaaaattagagtggtgagcataataggaaaatatctagagcattcaaggattttctggttttataataataatcagccagaagtttttataggaagtgcagattggatgcgaagaaatttagatcgaagagttgaagctgttacgcctattgaagatcccactttaaaaaaacaactaaattctattttagaaatttatttaaatgacaatgtagatgcatgggaaatgcaaagcaatggcaaatttcttagaaaatcagcaataaaaagcgaagaaatttctgctcaaaacaaactaatggatttttaa

SEQ ID NO: 6605 - protein, 703 aa, Prochlorococcus marinus subsp. marinus str. CCMP1375
MAKKFRLAENYINRELSWINFNERVLEKAIDKKTPLLDQAKFSAIFSNNLDEFFMVRVASLKSQVEAGVTKKSEDNKTPTEQLIQIREKLLPSLQKQQTHYLSNLKDAFRKENIFLLDYIELTSREKNWVDNYFKTAIFPILTPLAVDPAHPFPFVSNLSLNIAALIRDPDSGQQQFSRVKVPQKTIARFITIPSDLSDKNPKPIYSAIPVEQVVAFNLNLLFPGMEIEEHSFFRVTRDADLELRDLEADDLMIALEQGLRKRRMGGEIVRLEVLKTMPKKILDLLMESMDVEEADLYCVDGLLGLDELFELITIDTQHLSSTSKYGKIHNSLKNSQYGLLEDGSIKQEEFRSIFSIIRAKDLLLHHPYDLFTSSVEEFINQSADDPLVMGIKMTLYRVSKDSPIIEALIRAAENGKQVMALVELKARFDEDNNIQWAKQLEKSGVHVVYGVVGLKTHTKIALVIRKEKERLRSYFHIGTGNYNSKTSNQYTDLGLLSVQPELGQDLVELFNYLTGFSKQPSFRKLLVAPVSLRRGIETLIQREIENAKNGKQAKIKAKMNALVDPSIINLLYEASQAGVKIELIVRGMCCLYPKKEGLSEKIRVVSIIGKYLEHSRIFWFYNNNQPEVFIGSADWMRRNLDRRVEAVTPIEDPTLKKQLNSILEIYLNDNVDAWEMQSNGKFLRKSAIKSEEISAQNKLMDF

SEQ ID NO: 6606 - DNA, 2088 bp, Prochlorococcus marinus subsp. pastoris str. CCMP1986
  CDS (1)..(2088): transl_table=11
atgaaatacgaagctaacaattttattaatagagaattaagttggatcgactttaataaaagagttcttcttacagggatggagaaagattataaagtactagataaaattaaatttttttcaattttcagtaataatcttgatgaattttttatggttagagttgcatcattaaaagctcaagttgaagccggaattagaaaaaaaagtattgatggacatactcctaaagaacaattaaaaaaaattaacaaggaagtaaaaaaactcacaatccttcaagaaaaatattttaataatgaattaaatgatgagcttaaaaatgaaggcattttcataaaaaagtattgtgaactcaatcaaaatcagaaaaattggtgtgatagctatttcctatcttcaatttttcctttattaacaccattagtagttgatcctgcgcacccattcccttttataagtaatttaagtcttaatttggctgctctcattaatgatggagaagaatcaaaaaatcaatttgtaagaattaaaataccgacaaaaaatattggcagatttatactaattcccaatgaaattattgaaactgaagatgaaagagagcatttttttataactgttgaagacttaattggaaacaatatcaatgccttatttaatggaatggaatgcttaaattattcttttttccgagtaacaagagatgcagatttagaattaaaagaacttgaagctgacgacttacttcttgcggtagagcaaagcttgcaaaaaagaagattagggggagatgtagttagattagaagtaaatgaaaatattccacaaaatattttaaagttactcattgagagtattgcaataccagaagaatatatctacttttgcaaaagcttattaggacttgacgatttaaattacctcttaaaaattaatcgagaagacttaaaagaaaatttattaattggagatacacatccattattaaaatcgttagattcttctaaagacaaaaattttaactctatttttagcattcttagaaaacagagtatacttctacatcatccatacgacttattcaaaacctctgtagaagaatttatcaacaaagctgctgacgacccacttgtactagctattaaaattactctttatagagtttcaaaagattctccaattattgaagccttaatgagagcagctgagaatgggaaagaggtaatgactcttgttgagctcaaagcaagatttgatgaagataacaacatccaatgggcaaaacagcttgagcaagctggaattcatgttgtttatggaataataggctttaaaacacatacaaagattgctttagtggttagaaaagagaaaagaagactaaggaattattttcatattggaacgggaaattacaattcgaacacttctcgctattacacagacataggatttctatcaacagatcctgatatctcctcagatttaattgaactctttaattacttatcaggtttctcaaaacaaaaggcttatcagaaattattagtatctccaacatcattaagaaaaaaattcatctttttaataaatagagaaattgaaaatatcgaagagggcaagaaaggtgaaattattgcaaaaatgaattcattagtagatccagaaattattcaattactttatttagcttcccaaaaaggagtaaaaattcacctgataataagagggatatgttgtttatatcctcaaagagagaatttgagtgaaaatattaaggttacaagtattattgggcattttcttgaacattctagaattttttggttttacaataacaataatccagaagtttttataggcagcgcagactggatgagaagaaatttagacagaagaatagaagctgttacacctatagaagacctaaaattaaaatctcaactatatgatcttttacaaacttatatttatgataattattactcctggatcatgaataaagatggaatatacgaaaaaaaagagagggattcaaactcaaatcgttctcaaattgatctaataaaaagattaaaaaaataa

SEQ ID NO: 6607 - protein, 695 aa, Prochlorococcus marinus subsp. pastoris str. CCMP1986
MKYEANNFINRELSWIDFNKRVLLTGMEKDYKVLDKIKFFSIFSNNLDEFFMVRVASLKAQVEAGIRKKSIDGHTPKEQLKKINKEVKKLTILQEKYFNNELNDELKNEGIFIKKYCELNQNQKNWCDSYFLSSIFPLLTPLVVDPAHPFPFISNLSLNLAALINDGEESKNQFVRIKIPTKNIGRFILIPNEIIETEDEREHFFITVEDLIGNNINALFNGMECLNYSFFRVTRDADLELKELEADDLLLAVEQSLQKRRLGGDVVRLEVNENIPQNILKLLIESIAIPEEYIYFCKSLLGLDDLNYLLKINREDLKENLLIGDTHPLLKSLDSSKDKNFNSIFSILRKQSILLHHPYDLFKTSVEEFINKAADDPLVLAIKITLYRVSKDSPIIEALMRAAENGKEVMTLVELKARFDEDNNIQWAKQLEQAGIHVVYGIIGFKTHTKIALVVRKEKRRLRNYFHIGTGNYNSNTSRYYTDIGFLSTDPDISSDLIELFNYLSGFSKQKAYQKLLVSPTSLRKKFIFLINREIENIEEGKKGEIIAKMNSLVDPEIIQLLYLASQKGVKIHLIIRGICCLYPQRENLSENIKVTSIIGHFLEHSRIFWFYNNNNPEVFIGSADWMRRNLDRRIEAVTPIEDLKLKSQLYDLLQTYIYDNYYSWIMNKDGIYEKKERDSNSNRSQIDLIKRLKK

SEQ ID NO: 6608 - DNA, 2139 bp, Prochlorococcus marinus str. MIT 9313
  CDS (1)..(2139): transl_table=11
atgagtaatccagcagtagcttcggagcactacatcaaccgagagctcagctggatctccttcaacgaaagggtccttgctcaggcactggatacgcgcaccccgctgctggaacaagccaagttcagtgccatcttcagcaacaacctcgacgaattcttcatggttcgcgtggcctccctcaaagcacaagtggaagccggcattaccaaaaccagcgcagacggtctaacccctcttcagcagctcctcacgatccgagatcaccttgttcctctcatcgagcaacaacaagatcactaccgtaaacacctcaaaaaccagctagtcgagcatggtgttcacctactcgactatgagcaactcaatccaaaagaacgcctctggattgacaattatttccaaacagccattttcccggtgctgacaccactagccgtggatcaagcccatcccttccctttcgttagcaatctcagcctcaacattgcgaccctgatcctcgatccggaaacaggccaacaacaattcgcccgggtcaagattccacaaaaaacgatccctcggtttgtagagatacctcctgatctaagtggcatcaatcccaaaccagttcacacagcagttccattggagcaagtggtggccttcaacctcaaattgctcttccccgggatgaagattgaagagcactacttcttccgagtcacccgcgatgccgaccttgaactcagggacctagaagccgacgatctcatgagcgccatggaacaaggcctgcataagcggcggatgggcggagaagtggtgagactcgaagtgacaaacgaaatgccccagagagtcgttgagatgctgattgaaggtatggctgttgaagaaaaagacctttatcgcatcgagggactactaggcctcgatgatctattcggtctcatgcgtttacctctggaacaactcaaagaccaaccccacattggcctgaccgccaaagttctctcccgcagccagcgcagaatgcttgaagacgaatcaatcaaagaagaagaattcaaaagcatcttctcggtgattcgccgcaaagacattctccttcaccacccatacgaactgttcgcgacctctgtagaggaattcatcaatcaggcagcagacgatcccctagtcatgggaatcaagatcacgctctatcggacatctaaggattccccaatcattgcggccctgattcgtgcagccgaacacggaaagcaggtcatggctctggttgaactcaaggcacgcttcgatgaaggcaacaatattcaatgggcccgtcatctagaacgatctggcgttcacgttgtctatggcgttttaggactaaaaacccacacaaaaaccatcttggtcgttcgcaaagaaaaagagcgcctacgcagctacgtgcacatcggcacagggaactacaactcgaagacatcacgtctctataccgatcttggtctgctctctgcaagaccggaactcagccaagatctagtcgagctattcaattatctcactggcttttcaaagcaacaaagcttccgtcgactgctggtggcacctgtcaccctacgcaagggaatggaatcactcatcctccgcgaaatcgaacacgcccgcgaaggtagaggcggacacatccgcgccaagatgaatgctctggtggatccagccatcattagcctgctctacgaagcttcccaagttggagttcgtatcgaactgatcatccgcggtatgtgctgtctctacccaggacgaaaaggattcagcgaaaacatcagcgtgatcagcatcatcggccggttcctggaacactcccgtatcttctggtttgccaatgacaacaacccagaggtttatatcggcagcgcagacttgatgcctcgaaacctagacagacgcgtggaagccattactccaattgaagaaccagagcaaaaggaacacctagagcgactgctgaacctctacctaaacgacaaccgcgaagcatgggatatgcagagcgatggcagctttttacagcgccaacccaatcccaatagtgaagaacatcgtgcacagcaacagctgatcaacctttggcaacaaggcatcccagcagcgtga

SEQ ID NO: 6609 - protein, 712 aa, Prochlorococcus marinus str. MIT 9313
MSNPAVASEHYINRELSWISFNERVLAQALDTRTPLLEQAKFSAIFSNNLDEFFMVRVASLKAQVEAGITKTSADGLTPLQQLLTIRDHLVPLIEQQQDHYRKHLKNQLVEHGVHLLDYEQLNPKERLWIDNYFQTAIFPVLTPLAVDQAHPFPFVSNLSLNIATLILDPETGQQQFARVKIPQKTIPRFVEIPPDLSGINPKPVHTAVPLEQVVAFNLKLLFPGMKIEEHYFFRVTRDADLELRDLEADDLMSAMEQGLHKRRMGGEVVRLEVTNEMPQRVVEMLIEGMAVEEKDLYRIEGLLGLDDLFGLMRLPLEQLKDQPHIGLTAKVLSRSQRRMLEDESIKEEEFKSIFSVIRRKDILLHHPYELFATSVEEFINQAADDPLVMGIKITLYRTSKDSPIIAALIRAAEHGKQVMALVELKARFDEGNNIQWARHLERSGVHVVYGVLGLKTHTKTILVVRKEKERLRSYVHIGTGNYNSKTSRLYTDLGLLSARPELSQDLVELFNYLTGFSKQQSFRRLLVAPVTLRKGMESLILREIEHAREGRGGHIRAKMNALVDPAIISLLYEASQVGVRIELIIRGMCCLYPGRKGFSENISVISIIGRFLEHSRIFWFANDNNPEVYIGSADLMPRNLDRRVEAITPIEEPEQKEHLERLLNLYLNDNREAWDMQSDGSFLQRQPNPNSEEHRAQQQLINLWQQGIPAA

SEQ ID NO: 6610 - DNA, 2079 bp, Chromobacterium violaceum ATCC 12472
  CDS (1)..(2079): transl_table=11
atgtcacaaccgcaagacctgctgctgaaccgtgaactgggactgatagaattcaaccgccgcgtgctggcccaggcggaagacccggacctgccgctgctggagcgcctgaagttcctgtgcatcgtctcctccaacctggacgaattcttcgaagtccgcgtcgcctggctgcaagacgccgcccacgccacgcccgaccgcatcctggcggatggctccacgccggagcaggcgctggccaaggtgtcccgcgccagccaccagctggtgcgcgagcaatacgcggtgatgagcgaggtgctgttcccggcgctgcgcgaacagggcatcgtgttcttgcgccgcagcgagtggaccgagcagcagcaggaatgggtgaaaaactacttcttccgcgagctgatgcccatcctgacgccgatcgggctcgatccgtcccaccccttccccaaggtattgaacaaatcgctcaacttcgcggtggagctggaaggccgcgacgccttcggccgcgcgtccggcaccgccatcgtgcaggcgccgcgcatcctgccgcgcgtgatcaagctgccggccgacgtctgcgacggccgcccgcactgcttcgtgttcctgtcgtcgatactgcactcgcacgtgcacgagctgttccccggcatggcggtcaagggctgctaccagttccgcgtgacccgcgacagcgaactgtcggtcgacgacgacgacttcaagaacctgcgcaccgcgctgcagggcgaactgcgccagcgccagttcggcgacgcggtgcggctggagatcgccgatacctgcccgcaacacatggaatccttcctgctgacccagttcaacctgcagccgcgcgacgtctaccgcgtcaacggcccggtgaacctggtgcggctaatgcaggtgcccgacctggtggaccgcgccgatctcaagttcgcgccgttcacgccgacgctgccggccaatctgcagaagaagtccaagtcctcgctgttcgacgtcatccgcaagggcgacgtgctgctgcaccacccgtaccagagcttccagccggtgatcgacttcctcacccaggcggcgaccgatccgcacgtggtggccatcaagatgacggtgtaccgcaccggcaccgactcggtgctgatggagtcgctgatcgccgccgcccgcgccggcaagcaggtgacggtggtggtggagctgatggcccgcttcgacgaagaggccaacatcggctgggccagccggctggaagacgccggcgcccacgtggtctacggcgtgatcggctacaaagtgcacgccaagatgctgatggtggtgcgccgcgaggcccacggcctgcaccgctacgtgcatctgggcaccggcaactaccacccgcgcaccgcgcgcttgtacaccgacttcggcctgttgacctgcaacgaggaaatcgccagcgacgtcaacgacattttcatccagctcaccggcctgggacgcgccggcagcctgaagcggctgttccagagcccgttcacgctgcacagcatgatcatggaggcgatacagcgcgagaccgagcacgcgcaggccggcaagccggcgcagatcatcgccaagatgaactcgctgctggagccgcaggtgatccacgcgctgtaccgcgccagccaggccggggtgaagatccagctgatcgtgcgcggcgtgtgcgcgctgcggccgggcgtgccggggctgtcggacaatatcaccgtccgctccatcgtcggccgcttcctcgaacacccgcgcgtgttctacttctacaacgatcacaaggaagacctgctgatgtccagcgccgactggatgggtcgcaacttcttccgccgcatcgagacctgcgcgcctatcctggacaacaagttgaagcgccgcatcatcaaggaggcgctgcgcctgtatctggaagacaacgtcaacagctgggaaatgctgccggacggcggctacaagcgccggaccagccgcggcaagccgcactgcgcgcagcgcgagctgctggcctcctataccggcaatccggaagcggaataa

SEQ ID NO: 6611 - protein, 692 aa, Chromobacterium violaceum ATCC 12472
MSQPQDLLLNRELGLIEFNRRVLAQAEDPDLPLLERLKFLCIVSSNLDEFFEVRVAWLQDAAHATPDRILADGSTPEQALAKVSRASHQLVREQYAVMSEVLFPALREQGIVFLRRSEWTEQQQEWVKNYFFRELMPILTPIGLDPSHPFPKVLNKSLNFAVELEGRDAFGRASGTAIVQAPRILPRVIKLPADVCDGRPHCFVFLSSILHSHVHELFPGMAVKGCYQFRVTRDSELSVDDDDFKNLRTALQGELRQRQFGDAVRLEIADTCPQHMESFLLTQFNLQPRDVYRVNGPVNLVRLMQVPDLVDRADLKFAPFTPTLPANLQKKSKSSLFDVIRKGDVLLHHPYQSFQPVIDFLTQAATDPHVVAIKMTVYRTGTDSVLMESLIAAARAGKQVTVVVELMARFDEEANIGWASRLEDAGAHVVYGVIGYKVHAKMLMVVRREAHGLHRYVHLGTGNYHPRTARLYTDFGLLTCNEEIASDVNDIFIQLTGLGRAGSLKRLFQSPFTLHSMIMEAIQRETEHAQAGKPAQIIAKMNSLLEPQVIHALYRASQAGVKIQLIVRGVCALRPGVPGLSDNITVRSIVGRFLEHPRVFYFYNDHKEDLLMSSADWMGRNFFRRIETCAPILDNKLKRRIIKEALRLYLEDNVNSWEMLPDGGYKRRTSRGKPHCAQRELLASYTGNPEAE

SEQ ID NO: 6612 - DNA, 2094 bp, Wolinella succinogenes DSM 1740
  CDS (1)..(2094): transl_table=11
atgaacctaaatgatccaaaactctacttcaatcgagagctctcttggttgcagttcaatactcgtgtgctcaaagaggcgcataacaagaaaaatcccttgctggagcgcctgaagttcatcgcgatttatggcaccaacttagatgagttttatatgattcgtgtggcgggactcaaacgcctctataccgcggggattagcgagagtggtgcggatcgcctcacccctttgcagcagctcacctctattcgtgactcgctccatgaggagaaaaaagagcttgaggcgcttttttttgaagtcaaaggcgagctagaaaaagaaggactctttatcaaagagtttatagaattggataatgaaaaaaaacaggagctaaaagactattttgattcctacctctatcctatcattatccctatcgcggtggacgcgactcaccccttccctcacctcaataatcttagcttcgcgatcgtggtgaagctccaaagtagtgagaatccccaagagattaaatttggcatggtgaggattcctcgaatgttgccacgatttgttgagatgagcgacaacacctatgttcctattgagacggtggtgggagagttcatcggagaggtcttctcaggctatgaggcgctcgagtatgccccctttagggtgacacgaaatgccgatatggaaattgaagaggaggaggcggatgacttcatggagctcatggaggagggattgaagcttcgtaaaaaaggggagatcgtccgccttgaagtgggcagaggctcggatgaagagctttttggattcctcaatctccacctcaaggttcagcctgaagatatctatgagtacgcgatcccgctcaaccttaatgccctgtggcagatcgtgggcaacaaaaactttgcccctctcacctatcctctctacaatccccgtacgcttcctcctttggataaaaatgtgaatattttttcggtgcttgatcagcacgatgtggcgatgtttcacccctatgagagctttgatcccgtggtcactttcatccaaaacgccgctaaagaccccgatgtctattcgattcgcatgacgctctatcgcgtgggcaaaaactctcccatcgtcaaggcgctcatggaggcggcggagaataacaagcaggtgactgcgcttgtggagctcaaggcgcgctttgatgaggagaacaacctccactgggcaaaagccttggagtcagcgggtgctcatgtcatctatggagttccagggctcaaggtgcatgccaaaatcgcactcgtgattaaaaaggtgggcaaggagctaagagagtatgttcacctctctacgggcaactataaccccgccaccgctaaaatctacaccgacattagcttcatgagctccaagcgcgaattcacgcaagatgcgaccaaatttttccataatctctcaggcttctcccatcgttcgcgccttgacactatctttgtcgcgcctttgcagatcaagcccaagattcttgccctcattgagaacgagaccaagaggggcgcagaggggcgaatcatccttaaggctaactctgttgtggatactgatgtgatcaaagcactctacaaagcctctcaagcgggcgtgaagatcgatatgatcgtgcggggaatctgctgccttaggcctaaagtggagggggtgagcgagaatatccgtgtcatctccattgtggggcgctatttggagcacgcgagaatctactatttcaaaaacagcactccaagcgtctatttctcaagcgcggatttgatgccaaggaatctagagcgtcgcgtggagcttatgacccctgtctttgatgagggaattgctgagaagtttttggggatcctcaaactccagctcgaagataatgtccaatcctacgagctcaaagaggatggaagctacgagagaatcgtgggtgagggcaagaatgtgagtagtcaaaaaatctttgaagagtatgtaagcacgctctatgcctcactcaagaaggacgaagaggatatcaaagccaagcgcttggccaagcgaatgttcaaggagagctag

SEQ ID NO: 6613 - protein, 697 aa, Wolinella succinogenes DSM 1740
MNLNDPKLYFNRELSWLQFNTRVLKEAHNKKNPLLERLKFIAIYGTNLDEFYMIRVAGLKRLYTAGISESGADRLTPLQQLTSIRDSLHEEKKELEALFFEVKGELEKEGLFIKEFIELDNEKKQELKDYFDSYLYPIIIPIAVDATHPFPHLNNLSFAIVVKLQSSENPQEIKFGMVRIPRMLPRFVEMSDNTYVPIETVVGEFIGEVFSGYEALEYAPFRVTRNADMEIEEEEADDFMELMEEGLKLRKKGEIVRLEVGRGSDEELFGFLNLHLKVQPEDIYEYAIPLNLNALWQIVGNKNFAPLTYPLYNPRTLPPLDKNVNIFSVLDQHDVAMFHPYESFDPVVTFIQNAAKDPDVYSIRMTLYRVGKNSPIVKALMEAAENNKQVTALVELKARFDEENNLHWAKALESAGAHVIYGVPGLKVHAKIALVIKKVGKELREYVHLSTGNYNPATAKIYTDISFMSSKREFTQDATKFFHNLSGFSHRSRLDTIFVAPLQIKPKILALIENETKRGAEGRIILKANSVVDTDVIKALYKASQAGVKIDMIVRGICCLRPKVEGVSENIRVISIVGRYLEHARIYYFKNSTPSVYFSSADLMPRNLERRVELMTPVFDEGIAEKFLGILKLQLEDNVQSYELKEDGSYERIVGEGKNVSSQKIFEEYVSTLYASLKKDEEDIKAKRLAKRMFKES

SEQ ID NO: 6614 - DNA, 2091 bp, Gloeobacter violaceus PCC 7421
  CDS (1)..(2091): transl_table=11
atgagcgagacttccatcacagacagcgttgaaactaaaattgggctggacgacccggcgcttctgattaaccgggaactcagttggctcgaatttaattcccgggtgctcgacgaagcgctcgacgagcgcaacccgctgttggagcggctcaagtttctggccatcttcagcagcaacctggatgaatttttcatggtgcgcgtctcgggcctcaagcaacaggtcgaattgggtttgacgaacaaaacccccgacggtcttggaccgcaggcgcagctcgacgccatcgcccaccggctgcggccgttgctcgagacccagacgatggcgctgcgcacccagattttgccgaggctcgccgaagagggcatccgcatctgcgactacggcgagatcaagattctgccccggcagcaggagcggctgcagcgttacttcgaggagcaggtcttcccggtgctcaccccgcttgcggtcgatccgggtcacccgtttccgtacatctccaacttgagcctgtccctggcggtgctggtgcgcgatccggtgagccgcaaggaactgttcgcccgcgtcaaggtaccccaggggctgccgcgtctggtgccgctcgggattcccaatcagttcgtttcgcttgaagaggtgatcggtgcccacctcgaccagctgtttccgggcatggaagtcctcagccggcatccgtttcggctcacgcgcaacagcgatctggaaatggccgaggaagaagccgaagatctgctgctcaccatcgagcagtcggtgcgcaatcgccgcttcggcgaagcggtgcgtctggagattaccccccagatgccggttcacgtgcgtgcgcgcctgctcgaagaactcgaactggacgagcaggacgtctatgaaatcaacggcttgctcgatttgcgctgtctttggcaactggccgggctggagaggcccgatctcaagcaccggccctttagcgcccaggtgccgcccgattttcgcaaccctcaactcgatatctttcagctcatccgccagggcgaccggctggtgcaccacccctacgattcgtttgccgccaccgtcgagcgcttcgtctcggcggcggcggacgatccggacgtgctcaccatcaagcagaccctgtaccgcacctccggcgactcgcctatcgtgcgcgccttgattcgcgccgctgaaaacggcaagcaggtggcggtgctggtggaactcaaagcccgcttcgacgaagagaacaacatcaactgggcgcgagccctggagcgcgccggggtgcacgtcgtctacggcctggtgggtcttaagacccacgccaaggcgctgttggtggtccgccgcgaaaaaggccacatccgtcgctacgtgcatctggccaccggcaactacaactccaaaaccgccaatctctacaccgactacggtctatttagctgcaggccggatctgggggccgacgtcaccgatttgttcaactatctgaccggctactcccaccagacccattaccgcaagctgctggtcgctcctgcccgcatgcgcgaccaatttgtcgaactgatcgaccgcgagattgccgcgcgctcccccgaggctcccgggcggatcatcgccaagatgaattccctggtcgacccgattttgatccgggcgctgtgccgggcttcccaggccggggtgcacatcgatctgattgtgcgcggcatctgctgtctgcggccgggctatgccgaggtgagcgaaaatattcgcgtcatcagcatcgtgggccgcctgctcgaacattcgcgggtgttctacttcggcaacgccggcaacagcgaagtctacatcggctctgctgactggatgccccgcaatctcgatcggcgcgtcgaggtgatgacccctgtcgaagagccgcgcctgcgcgaggaactggtcgcttttttgaatctgctgctcagcgacaaccgccagagctgggagttgcagaccaacggcgcctacgcccgccgtcaggcgttgcccggtgaaatcgaaatcagctcccagcaggtgctcatcgaccgggcgctcagccgctga

SEQ ID NO: 6615 - protein, 696 aa, Gloeobacter violaceus PCC 7421
MSETSITDSVETKIGLDDPALLINRELSWLEFNSRVLDEALDERNPLLERLKFLAIFSSNLDEFFMVRVSGLKQQVELGLTNKTPDGLGPQAQLDAIAHRLRPLLETQTMALRTQILPRLAEEGIRICDYGEIKILPRQQERLQRYFEEQVFPVLTPLAVDPGHPFPYISNLSLSLAVLVRDPVSRKELFARVKVPQGLPRLVPLGIPNQFVSLEEVIGAHLDQLFPGMEVLSRHPFRLTRNSDLEMAEEEAEDLLLTIEQSVRNRRFGEAVRLEITPQMPVHVRARLLEELELDEQDVYEINGLLDLRCLWQLAGLERPDLKHRPFSAQVPPDFRNPQLDIFQLIRQGDRLVHHPYDSFAATVERFVSAAADDPDVLTIKQTLYRTSGDSPIVRALIRAAENGKQVAVLVELKARFDEENNINWARALERAGVHVVYGLVGLKTHAKALLVVRREKGHIRRYVHLATGNYNSKTANLYTDYGLFSCRPDLGADVTDLFNYLTGYSHQTHYRKLLVAPARMRDQFVELIDREIAARSPEAPGRIIAKMNSLVDPILIRALCRASQAGVHIDLIVRGICCLRPGYAEVSENIRVISIVGRLLEHSRVFYFGNAGNSEVYIGSADWMPRNLDRRVEVMTPVEEPRLREELVAFLNLLLSDNRQSWELQTNGAYARRQALPGEIEISSQQVLIDRALSR

SEQ ID NO: 6616 - DNA, 2292 bp, Rhodopseudomonas palustris CGA009
  CDS (1)..(2292): transl_table=11
atggaaacgtcatgcagcgtcagcattgtctcgcggcgccgcagccgcggtgcgccccatcctggtctggatcaacttctcatggactccgagcaagtgattgccatcgaagagaaaaaaggcgaaaccgagccggcgtcgatgatcgccgccggccccgagcgattcatcaatcgcgagctgtcatggcttcacttcaaccgtcgggtgctcgaagaatcggtcaatccgcaccacccggtgctggagcgggtgcgatttctgtcgatttcggccaacaacctcgacgaattcttcatggtccgcgtcgccggcatcaaggcgcagatccgcgagggcatcaccgaacgcagtccggatggcctgaccccttccgaacagctcggcctgatcaacgaggcggtctccaaactcgccagcgaccagcagtcgatctggcgtgacctgcgtggggttttggccgattccggtattctgttgttggacggcaaggatgtcaccaaggctgagcgggcctggatcgaggatcacttcctccacaacatcttcccgctgctgacgccgctggcgatcgacccggcgcatccgttccccttcattccgagcctcggcttcaccatcggcctgcagcttgcccgggtgtccgacggcaggccgatgaatgcgttgatccggatgccggcgcggatcgaccgtttcatccgtctgcccgggaatgggcgcgaccagaccgtccgggtgatgacgctggagcaggcgacctcgctgttcatcgggcggctgttccccggctaccacgtcaaggggcagggctcgttccggatcatccgcgacagcgaactggaaatcgaggaagaggccgaggacctggtgcggctgttcgagaccgcgctgaagcggcggcggcgcgggtcggtgatccggatggaggtcgactcctccatgccggaggagctacgcgtgttcgtgcagcgtgcgctgaccgcggccgacgacgaggtgttcctggtcgacggcgtgctcgcgatgaacgaactgtcgcagctgacccgggtcgatcgtcctgacctcgaattcgttccctatgtgccgcggcatccggaacgggtgcgcgaccatggcggcgacatcttcgcggcgatccggcagaaggacctgatcgtccaccatccatatgaatcgttcgacgtcgtcgtccagttcctgcagcaggcggcgcgcgaccccgacgtcgtcgcgatcaagcagacgctgtatcgcacatcgaacaactcgccgatcgtgcgcgcgctcgccgaagccgccgaggccggcaagtcggtcaccgcgctggtcgaactgaaagcgcggttcgacgaagaagccaatatccgctgggcgcgcgacctcgagcgcgccggcgtgcaggtggtgtacggcttcctgcagctcaagacccacgccaagctgtcgctggtcgtgcggcgcgagggtggcagcctgacgacctacatccacaccggcaccggcaactaccatccggtgacggcgcgtatttatacggacctgtcgtacttcacgtccgatccgatcctcggccgcgacgccgcgcgggtgttcaactacatcaccggctacgccgagccgagcgacatcgagaagatggcggtatcgccgatcacgctgcgcaagaccatgctggagcacatccgcggcgagaccgcgttcgccaagcacggcaagccggcggcgatctggctgaagatgaatgcgctggtcgatccggagatcatcgacgcgctgtacgaagcctcccgggcaggggtctcggtcgagctggtggtccgcggcatctgctgcctgcggccgggggtgccggggctgtccgacaacatccgggtgaagtcgatcatcggccggttcctcgaacacggccgcatctattgcttcggcaacggctacgggctgccgagcgccaaggcggcggtgtacatctcctccgccgacatgatgccgcgcaatctcgaccgccgggttgaagtgctgtgcccgatgctcaacccgaccgtgcatcagcaggtgctggaacagatcatggtcgccaacctgaaagataccgagcagagctggcggttgttgccggacggatcgtcgacgcgtatgaaggccgccaagggcgaggagcccttcaacgtccacaactacttcatgaccaatccgagtctgtccggccgtgggaagtcgctccaggaatcctcgccccgccggcttacccggcgggccgagcgccagcagtcccagcaatcttcctaa

SEQ ID NO: 6617 - protein, 763 aa, Rhodopseudomonas palustris CGA009
METSCSVSIVSRRRSRGAPHPGLDQLLMDSEQVIAIEEKKGETEPASMIAAGPERFINRELSWLHFNRRVLEESVNPHHPVLERVRFLSISANNLDEFFMVRVAGIKAQIREGITERSPDGLTPSEQLGLINEAVSKLASDQQSIWRDLRGVLADSGILLLDGKDVTKAERAWIEDHFLHNIFPLLTPLAIDPAHPFPFIPSLGFTIGLQLARVSDGRPMNALIRMPARIDRFIRLPGNGRDQTVRVMTLEQATSLFIGRLFPGYHVKGQGSFRIIRDSELEIEEEAEDLVRLFETALKRRRRGSVIRMEVDSSMPEELRVFVQRALTAADDEVFLVDGVLAMNELSQLTRVDRPDLEFVPYVPRHPERVRDHGGDIFAAIRQKDLIVHHPYESFDVVVQFLQQAARDPDVVAIKQTLYRTSNNSPIVRALAEAAEAGKSVTALVELKARFDEEANIRWARDLERAGVQVVYGFLQLKTHAKLSLVVRREGGSLTTYIHTGTGNYHPVTARIYTDLSYFTSDPILGRDAARVFNYITGYAEPSDIEKMAVSPITLRKTMLEHIRGETAFAKHGKPAAIWLKMNALVDPEIIDALYEASRAGVSVELVVRGICCLRPGVPGLSDNIRVKSIIGRFLEHGRIYCFGNGYGLPSAKAAVYISSADMMPRNLDRRVEVLCPMLNPTVHQQVLEQIMVANLKDTEQSWRLLPDGSSTRMKAAKGEEPFNVHNYFMTNPSLSGRGKSLQESSPRRLTRRAERQQSQQSS

SEQ ID NO: 6618 - DNA, 2184 bp, Geobacter sulfurreducens PCA
  CDS (1)..(2184): transl_table=11
atgccgcgcaaggcacaggcagccgggaccggcgccccggaaccgactggcgcgcgcgccccggagacgagccttgcctcgcccgagctctacctgaaccgggaactcacctggctcgagttcaaccggcgtgtcctccacgaagccgaggacacccgcacccctttgctggagcgggtcaagttcacggcaatcgtgagctcgaacctggacgagtttttcatgaaacgcatcggcggcctcaagcagcaggtcggggccgggttgcagcaccccaccgtggacggccgcaccccccgtcagcagattgccgaatgctacgccgtggtgcgggatctggccgaacgcaagcggcgggtgttcggggagctgctgggtctcctgcgggacgggggcatccggattctcggctacagcgagctgagcgagaaagaacgtaaggggctgcggcagcactaccagcgcaatatctaccccctggtgaccccccagtccatcgacccggctcacccgttccccttcatctccaacctctccctcaatctcctggtgaccttgcgctatccgcgagagcgcgagacgtccctggcccgggtgaaggtgccggtaggagcgggcatcccgcgcttcatccgcgtgggagacgacgaccggttcgtccccctggaagaggtgatgcgccacaacctggacatgctctttccggagatggaggtgacggcgtgcgaactcttccgggtgacccgcaacgcgaacactgaacgtaacgaagaacaggcggacgatctgctgtccctgatcgagtcggagttgcaggaccgccggtttgcccccatcgtccggctggaggtgggcgcggacatggacccggtccaccgggggatgctggccgcagagctggagctgaccgaagccgacgatgtcttcgatgtcgaggggatgctggcctttcgcgacctcttcgagatcgcggcccttggctacccggaactgcgcgatcctccccaccatcccgtcgaccacccccgactcatgaccgaccggaacattttccacgtgctccgcgacgccggggccatcctcttgcagcacccctacgactcctttgccacgtcggtggagcgctttctcatggaggcaagcgaagacccgaaggtgcgcgccatcaagatgaccctctaccggaccgcctccgacagccggatcatcgactgcctggtgaacgcggccaacaacggcaagcaggtggccgtggcggtggagctcaaggcccgcttcgacgaggcggccaacatcaggctggcggagcggatggaggaggcgggaatccatgtcacctacggcgtggtgggactcaagacccactgcaaggtgatcctggtggtacggcaggattacaacgggctgcggcgctacgttcacattggaaccggcaactaccatcccggaacggcccgggtctactccgacctgggactgctcaccagcgacgaaaccatcggccaggatgccaccgagcttttcaactatctcacaaccggctataccccgcggcgcaactaccggaaactgctgcccgctccgaagcacctgaagcgggcgctgctggccaggatcgagcgtgaagcggaacttcactcggaaaagagcccggggctcatccaattcaagatgaacgccctggaagacgccgatatcgttgcagccctctaccgggcagcacggcagggagtgcggatcgacctcattatccgtgacagttgccgcctccggccgggcgtaccggggctctcggaatcggtgcgggtggtgagcgtggtgggaagattcctggaacacgcccggatctactacttccgcaacggcggcgacgaggagtacttcatcggttccgcagacgccatgaagcgcaatcttgagtaccgagtcgaagtcctggcgccggtggaagcgccggaactgcgaaaggaactccgaaccatgatcgacgtgcaactgggagaccggcggagcgcttgggacatgcggcccgacggcagttacgtgcaacggatgccgggcgaaggggacgatccccgtggaagtcacgaaattctggtggacttggctgaaaagcgtcgcaaggccggggcgcgcctgaaaaagaaaaaagcccggggagtcgttcggcgccctgtccggtaa

SEQ ID NO: 6619 - protein, 727 aa, Geobacter sulfurreducens PCA
MPRKAQAAGTGAPEPTGARAPETSLASPELYLNRELTWLEFNRRVLHEAEDTRTPLLERVKFTAIVSSNLDEFFMKRIGGLKQQVGAGLQHPTVDGRTPRQQIAECYAVVRDLAERKRRVFGELLGLLRDGGIRILGYSELSEKERKGLRQHYQRNIYPLVTPQSIDPAHPFPFISNLSLNLLVTLRYPRERETSLARVKVPVGAGIPRFIRVGDDDRFVPLEEVMRHNLDMLFPEMEVTACELFRVTRNANTERNEEQADDLLSLIESELQDRRFAPIVRLEVGADMDPVHRGMLAAELELTEADDVFDVEGMLAFRDLFEIAALGYPELRDPPHHPVDHPRLMTDRNIFHVLRDAGAILLQHPYDSFATSVERFLMEASEDPKVRAIKMTLYRTASDSRIIDCLVNAANNGKQVAVAVELKARFDEAANIRLAERMEEAGIHVTYGVVGLKTHCKVILVVRQDYNGLRRYVHIGTGNYHPGTARVYSDLGLLTSDETIGQDATELFNYLTTGYTPRRNYRKLLPAPKHLKRALLARIEREAELHSEKSPGLIQFKMNALEDADIVAALYRAARQGVRIDLIIRDSCRLRPGVPGLSESVRVVSVVGRFLEHARIYYFRNGGDEEYFIGSADAMKRNLEYRVEVLAPVEAPELRKELRTMIDVQLGDRRSAWDMRPDGSYVQRMPGEGDDPRGSHEILVDLAEKRRKAGARLKKKKARGVVRRPVR

SEQ ID NO: 6620 - DNA, 2193 bp, Mycobacterium avium subsp. paratuberculosis K-10
  CDS (1)..(2193): transl_table=11
gtgatgcgccatgatcgcaatgtgactgaaatcgacgctgagactcgacccgacgagaacctgtggcattcgggcgactcggccgtgggggcgccacccgcggcgaccccggccgcgatgaccgacctgccggaggaccgttatctcaaccgggaactgagctggctggatttcaacgcccgggtgctggcgctggccgacgacaactcgctgccgctgctggaacgggccaagttcctggccattttcgcctccaacctcgacgagttctacatggtgcgggtcgccgggctgaagcggcgcgacgagatgggcttgtcggtgcgctcggccgacgggttgacgccgcgcaaacaactcgccctgatcggcgagcacacccagcggatcgcgacccggcacgcgcgggtgttcctcgactcggtgcgcccggcgctggccgaggagggcattcacatcgtcacctgggccgatctcgatcaggccgagcgcgacgaattgtccacctatttcaccgaacaggtctttcccgtcctgacgcccctggccgtcgatcccgcgcacccgttccccttcgtcagcgggctgagcctgaacctggcggtgatggtgcgccagaccgaggacggcggccaacacttcgcccgcgtcaaggtgcccaacaacgtcgatcgcttcgtcgaactcgcggcgccgagagcgggcgccgagggcgaaaaccgcggcgtcgtccggtttctgccgatggaggaactgatcgcggcgttcctgccgctgctgttcccgggcatggagatcgtcgaacaccacgcgttccgcatcacccgcaacgccgacatggaggtcgaggaggaccgcgacgaagatctgctgcaggcgctggaacgggagttggcgcggcggcgcttcggcccgccggtgcggctcgagatcgccgacgacatgaccgagggcatgctggaactgctgctgcgcgaactcgacgtgcatcccggcgacgtcatcgaagtgcccggcctgctcgacctttcgtcgctgtggcagatctacgatttggatcgccccgcgctcaaggatccggcgttcgtcccggacacccaccccgccttcgccgaccgcgaatcccccaagagcatcttcgcgacgctgcgcgagggcgacgtgctggtgcaccacccctacgactcgttctccaccagcgtgcagcgcttcatccagcaggccgccgccgaccccaacgtgctggcgatcaagcagacgctgtaccgcacctccggtgattcgccgatcgttcgggcgctgatcgaagcggccgaggccggcaagcaggcggtggcactggtcgagatcaaggcgcgattcgacgagcaggccaacatccgctgggcgcgcgccctcgaacaagcgggcgtgcacgtggtttacgggctcgtcggcctcaagacgcattgcaagacatgcctggtggtgcgccgcgaaggttcggcgatccgccggtactgccacatcggaaccggcaactacaacagcaagaccgcccgcctgtacgaggatgtcggtctgctgacggcggcgccggacatcggcgccgacctcaccgatttgttcaattcgcttaccggctattcgcgtaaggtctcctaccgcaatctgttggtggcgccgcacggaattcgcaccggcatcatcgaacgcgtcgaacgcgagatcgccgcgcaccgcgaacgcgggcagggccgaattcggttgaagatgaacgcgttggtggacgagcaggtgatcaactccctgtaccgggcgtcgcaggcgggggtgcgggtcgaggtcgtggtgcgcggcatctgcgcgctgcgcccgggcgtgcagggttactccgaaaacatcttcgtgcgctcgattctgggacgtttcctggagcactcgcggatcatccacttccgcaacatcaacgaattctggatcggcagcgccgatatgatgcaccgcaatctcgatcgccgcgtcgaagtgctggcgcaggtcaaggatcccaaactcaccgcgcagctggacgagttgttcgaatccgcgctggatccgtccacccggtgctgggaattgggacccgacgggcagtggaccccgtcgccgcaggagggccataccgtgcgtgatcaccaagtatcgttgatggagcggcatcgcagtccctag

SEQ ID NO: 6621 - protein, 730 aa, Mycobacterium avium subsp. paratuberculosis K-10
MMRHDRNVTEIDAETRPDENLWHSGDSAVGAPPAATPAAMTDLPEDRYLNRELSWLDFNARVLALADDNSLPLLERAKFLAIFASNLDEFYMVRVAGLKRRDEMGLSVRSADGLTPRKQLALIGEHTQRIATRHARVFLDSVRPALAEEGIHIVTWADLDQAERDELSTYFTEQVFPVLTPLAVDPAHPFPFVSGLSLNLAVMVRQTEDGGQHFARVKVPNNVDRFVELAAPRAGAEGENRGVVRFLPMEELIAAFLPLLFPGMEIVEHHAFRITRNADMEVEEDRDEDLLQALERELARRRFGPPVRLEIADDMTEGMLELLLRELDVHPGDVIEVPGLLDLSSLWQIYDLDRPALKDPAFVPDTHPAFADRESPKSIFATLREGDVLVHHPYDSFSTSVQRFIQQAAADPNVLAIKQTLYRTSGDSPIVRALIEAAEAGKQAVALVEIKARFDEQANIRWARALEQAGVHVVYGLVGLKTHCKTCLVVRREGSAIRRYCHIGTGNYNSKTARLYEDVGLLTAAPDIGADLTDLFNSLTGYSRKVSYRNLLVAPHGIRTGIIERVEREIAAHRERGQGRIRLKMNALVDEQVINSLYRASQAGVRVEVVVRGICALRPGVQGYSENIFVRSILGRFLEHSRIIHFRNINEFWIGSADMMHRNLDRRVEVLAQVKDPKLTAQLDELFESALDPSTRCWELGPDGQWTPSPQEGHTVRDHQVSLMERHRSP

SEQ ID NO: 6622 - DNA, 2181 bp, Bdellovibrio bacteriovorus HD100
  CDS (1)..(2181): transl_table=11
ttgaacacgcccaaagcggcttcgccgaaacgcacatcgaaaaagaaatctacacgcaagccgaaggttgtcgaacatcctctgtcatctgaaagtcttttctccagccgggagatcggctggctgaatttcaacagacgggtgttggctgaagccgaggacgctcgcaatcctttgttggagcgtgtgaaattcttaagcatctccggatccaatctggatgagttctttatgaaacgtgtgggcggtttgaaacgtcacatggcctatggtgtttccgccaaatcgtctgacggaaaaacaccgatgcatcagttgcaggaaatccgtcagtttgtgattccgatgattcaggatcaggctcatgcctacaacaaggtgcttaagcctgctctggaaaaagaaggcatccatctgctttcttggaaggacctttctgacaaagaaaaagaaagtgtcaaaaagtactataaccgcaatgtcttcccggtactgacgccgctgtcggtggatccaggacatccattcccgttcatctcgaatctgtcgatttctttaggagtgaccctgaaacatcccggaagtgaagaaaagctctttgcccgggtgaaaatccccaaagttttgccgcagtggattcgtactgatgctgaaagcaaggattatcgcttcatcagtcttttggatgtgatcaaggaaaatctggcggatctgttcccggccatgcaggtgctgggagtgatgccgttccgactgactcgtaatgccgattcggaccaggatcaggaagatgcggaagacttgctggaagccattgaggaagaactgcgccagcgccgttttgccgaagtggtgcgcctggagcacgggccgcacccggatccgtggatgctgaagttcctgatggaggaactggagctgattgaagaggacatttatgagacctccagtcttttggatttcacagacttgggtgtgatctcggatgtaaatctgccgaaattgaaatttgatccttacactccggtggtggcgcccgcatttgccgaagacgggcacgggatgtttaacgccattaagatggcggaccagctggtgcatcatccctatgaaagcttcgcggcttcggtggaaaagttcattcgtgtggccagtgaagatcccaaggtgctggcgatcaagatgactttgtaccgcaccggtgataacagcccctttattcgctcactgattcgtgcggccgaacagggcaagcaggtcgtgtgtctggtggaactgaaggcgcgcttcgatgaagagcgcaatatctattgggccactgaacttgaaaatgccggcgtgcatgtggtttatggcgttgttggtttgaagactcacgccaagaccgcgctggtggttcgtcaggagcaagagggcttgcgctgttactgccatatcgggacgggaaattacaacgtggcgacttcgcgattctatacggatctggggcttttgacggcgcgtgaagaaatcaccaatgatgtggtggagtttttccattatctgacgggaagatctttaaagagcaactatcagaatctgctgattgcgcccgtgaatatgttctcgcgctttaagtccatgatcgaacgcgaggccgaacacgccaaagcgggtcgtccggcgcagatcattgccaaattcaataacttcgaagaaaacgacattgctgtggccctgtacgcggcttcgcaaaaaggggttgatatcgagatgatcgtgcggggcttctgctgtcttcgtcccggggtcccgggcatgagtgagcgcatccgcgtgacctcgatcatcggtcgtttcctggagcattcacgcattttctatttccgcaacggggaaaaggacccggtggacggagagttctatctgggatctgccgattggatgtatcgcaatctgcatgcccgggtggaggccattgtgccgattctggatcgcagtttgaaagaaaagtgctgggagatcctgagtttgtgtgtgaaagagcaacgccagtcctgggaaatgaagtccgatgggacttatgtacgtcagaactcgcaggatgtcggtttgcatcaaaccctgatgcaaattgcgaaagcccgggttacatttgtggatgaaaataccagttcatccaccagttcaaattcggagtag

SEQ ID NO: 6623 - protein, 726 aa, Bdellovibrio bacteriovorus HD100
MNTPKAASPKRTSKKKSTRKPKVVEHPLSSESLFSSREIGWLNFNRRVLAEAEDARNPLLERVKFLSISGSNLDEFFMKRVGGLKRHMAYGVSAKSSDGKTPMHQLQEIRQFVIPMIQDQAHAYNKVLKPALEKEGIHLLSWKDLSDKEKESVKKYYNRNVFPVLTPLSVDPGHPFPFISNLSISLGVTLKHPGSEEKLFARVKIPKVLPQWIRTDAESKDYRFISLLDVIKENLADLFPAMQVLGVMPFRLTRNADSDQDQEDAEDLLEAIEEELRQRRFAEVVRLEHGPHPDPWMLKFLMEELELIEEDIYETSSLLDFTDLGVISDVNLPKLKFDPYTPVVAPAFAEDGHGMFNAIKMADQLVHHPYESFAASVEKFIRVASEDPKVLAIKMTLYRTGDNSPFIRSLIRAAEQGKQVVCLVELKARFDEERNIYWATELENAGVHVVYGVVGLKTHAKTALVVRQEQEGLRCYCHIGTGNYNVATSRFYTDLGLLTAREEITNDVVEFFHYLTGRSLKSNYQNLLIAPVNMFSRFKSMIEREAEHAKAGRPAQIIAKFNNFEENDIAVALYAASQKGVDIEMIVRGFCCLRPGVPGMSERIRVTSIIGRFLEHSRIFYFRNGEKDPVDGEFYLGSADWMYRNLHARVEAIVPILDRSLKEKCWEILSLCVKEQRQSWEMKSDGTYVRQNSQDVGLHQTLMQIAKARVTFVDENTSSSTSSNSE

SEQ ID NO: 6624 - DNA, 2103 bp, Bacillus cereus ATCC 10987
  CDS (1)..(2103): transl_table=11
  misc_feature (647)..(647): k is g or t
atgttgaaggggaatatagtcaatttaaatgatacagcttattacaacaatagagaactaagttggttagcatttaatgaacgtgtactacaagaagcacaggatgagatgaatccgcttttagaaagattaaagtttattagcatttttagctccaatttagatgaattctttatggtacgtgtagcaggattgaaggatcaagtgagcgctgggtttaaccaaccagaaaataaggctggcttaacaccaaaaaagcaattaaataaaattgcgataaaggcccatgaattaatgactgtacaatatgatacgtttaaaaattatgtgttgccagcgttggagttagaggggattgagcgtttaacattccatgatttgacgaaagaacaaagagaatttatagaagagtattttgatgagcaaattttcccagtcttaacacctgtagctatcgatgcgtatcgtccatttcctatgttattaaataaaagtttgaatttagctactcttttatatgatgagaaacaagtggaggaagaaaaccgcacgaagttaggaattgtacaagttccttcattacttgaacgtttcatatttttaccgagtgaagggcaaaagcataaatttattttattagaagatgkaattagtggttttactcataaattattcactggatataaagtatcatctgttactcgtttccgtattacacgcaatgcggatttaacgattcatgaagaaggtgcgagagatttattaaaagtaattgaaaaagaattaaaaaagcgtaagtggggagctgctgtacgtttagaagttggcaaagaacacattgatgaaagagtattagcgttattatatgaagtgttggaagtaaaagatgaagatgtgtatataatggatggaccgttagatttaacatgtctattttctttatataaaaaactagcgcctttatatgaacatttagtatatccggctcttattccgcaacgacctcaagatttaggggatgcggaagatgtatttgaaaaagcaattgagcatgatattttattacatcatccgtttgaatcgtttcagccagtagttgattttgttcgtgatgcagcagacgacccgaatgtacttgcgatcaaacaaacattatatcgagtaagtggtgattctccaattattcaggcgctaaaggtagcggctgaaaaagggaaacaagtgacggtattagttgagttaaaggcaaggtttgatgaagaaaataatgtgcattgggctaaagaattagaacaggcgggttgtcatgtgatttacggtgtaagtcatttgaaaacacatagtaaaattacgctagttgtaagaagaaaaaacggaaaaattgaaaggttcgtacatcttggaaccggaaattacaatgatgcaaccgcaaagctatatactgattttggctatattacatcacgaaaagactttggggtcgatgcaacaaatttctttaattatttgagtggttatacaacaaagccgcattttcatcatttatcggttgcaccatttgatataagagagcaatttatcgatttaatagatgaagaaattcgttatcataggcaatatggaaatggatatatcattgctaaaatgaattcattaactgataaaccacttattaaaaaaatgtatgaagcatcacaagctggagtaaaggtagagctcatcgttcgaggaacatgctgcctacgacctggtattccaaatgtaagtgaaaatattcgggtagttagtgttgtcgggagatatttagaacatagccgtatttattatttccatcataatggagaagagaaaatatatttatcttcagctgactggatgacaagaaatatggagaaacgtgtagaaatatctttcccgatattagatattgaaatgaaggcacgaattaaggcgattttacagcttactttagctgataatgtgaaaacacgtgaacaaaataaagacggtgaatattattatgttattaataatggggcagaagagattgatagccaagtgaagttatttaagatggcgtatcaaaacacagatgctgaataa

SEQ ID NO: 6625 - protein, 700 aa, Bacillus cereus ATCC 10987
  misc_feature (216)..(216): The Xaa at location 216 stands for Gly, or Val.
MLKGNIVNLNDTAYYNNRELSWLAFNERVLQEAQDEMNPLLERLKFISIFSSNLDEFFMVRVAGLKDQVSAGFNQPENKAGLTPKKQLNKIAIKAHELMTVQYDTFKNYVLPALELEGIERLTFHDLTKEQREFIEEYFDEQIFPVLTPVAIDAYRPFPMLLNKSLNLATLLYDEKQVEEENRTKLGIVQVPSLLERFIFLPSEGQKHKFILLEDXISGFTHKLFTGYKVSSVTRFRITRNADLTIHEEGARDLLKVIEKELKKRKWGAAVRLEVGKEHIDERVLALLYEVLEVKDEDVYIMDGPLDLTCLFSLYKKLAPLYEHLVYPALIPQRPQDLGDAEDVFEKAIEHDILLHHPFESFQPVVDFVRDAADDPNVLAIKQTLYRVSGDSPIIQALKVAAEKGKQVTVLVELKARFDEENNVHWAKELEQAGCHVIYGVSHLKTHSKITLVVRRKNGKIERFVHLGTGNYNDATAKLYTDFGYITSRKDFGVDATNFFNYLSGYTTKPHFHHLSVAPFDIREQFIDLIDEEIRYHRQYGNGYIIAKMNSLTDKPLIKKMYEASQAGVKVELIVRGTCCLRPGIPNVSENIRVVSVVGRYLEHSRIYYFHHNGEEKIYLSSADWMTRNMEKRVEISFPILDIEMKARIKAILQLTLADNVKTREQNKDGEYYYVINNGAEEIDSQVKLFKMAYQNTDAE

SEQ ID NO: 6626 - DNA, 2190 bp, Bartonella quintana str. Toulouse
  CDS (1)..(2190): transl_table=11
atggaaaaaacggttgcagatcagatttctatgtcggacataacaatggaaagtccgacgcggtttattaaccgagaattttcatggcttcaatttaataatcgtgtattgatggaggctgctaatccgaagaatcctttattagaacggctacaatttctttcgatttcagcgacaaatcttgatgagttttttatggtgcgtgttgctggccttgctgctcaaattcgtgctggagttacagcatgcagtgcagatgggtgcacaccgcaggagcaacttgattttgtgttagctgagacttcacgtttgcaggctcatcagttgcgagaattgagggttttatgtcatgaattaaaacaaaatgatattgaaattatttgtcctgctaagcttgcagaaattgaaaaatcatggcttgaaaaatatttttttgatacgattttccctgttttaacgcctttgcctgttgatcttgatcgttcttttccatttattcctaatttaacgctttctattgctcttcaattatcccggtgtgctaatcaacactctatcatagtgttgttaccactcccaactgttctgaaacgttttattctccttcctcaagaagacaatcgttttcgttttattgcggctgaagatgttatgtgcctttttataagtcatatatttcctgattacgaagttgatggaattggtacatttagagtgattcgcgatagtgatattgaagtagaagaagaggctgaagatcttgttcatttttttgaaactgcgcttaaaaggcgtcgtcgcgggcaggttattcaaattgaatttgacgcaaaaatgccagaaaatttacgccaatttataaccaatggtcttgctgttcctgatgattgtataagtgttcttgatggatttttagcacttaatatggtctcagagattgtttcgatttcacgcagtgatttaaaatttattccttataatcctcgttttcctgaatatattcgtgagcataatggtgattgctttgcggctattcgtaaaagtgatatcgtgattcatcatccttatgaatcatttgatgttgttgtacagtttttacgtcaggctgctagtgatcctgatgttattgaaatcaaacaaaccctttatcgcacatcgaatgatagcccaattgttagcgctttgattgatgctgccaaacagggtaagtcggtgacggctttggtagaacttaaagcgcgttttgatgaagaagcgaatattcgttgggcacgtgatcttgagcgtgcgggcgttcaagttttttttggttttattaccttaaaaacacatgctaaaatgtcgcttgttgtgcggcgtgaaggaaaccgtcattgcttttacgttcatcttggaactggaaattaccatcccattaatgctaaagtttatactgatctctctttttttaccactgatgatgatattggtcatgatgttgcattactattcaattatatcgctcaatatgtgcgccatgtgcgcccaaataaagcaatgaagattgctttttcgcctttaacattgcgcagccgtattcttaagcatatcgaagaagaaattaccaatgcgcaacaggggcgatttgctgctatttggataaaagttaatgcattggttgatcctgaaattattgatgctttataccgtgccagtcaagcgggtgtacagatcgatttggtcgtgcgtggcatatgttgtttgcgttctggtattccgggaatttcagataatattcgtgtgaaatcaattgtagggcgttttcttgaacatagccgcattttttgttttggtaatggtggagatttaccaggtgagaatgcgcttgtttatttaggatctgctgatatgatgcctcgtaatctggattatcgtattgaaatattggttccagtttttaacaaaatggttcgtaagcagattcttttacaaattatgttggctaatatcattgataatcaacaaagctttgatatactaagtgacggaacgtcaaaacgtataataccgcaaagaggtgaaagcccatttaatgcacaggaatattttatgaccaacgcaggtctttcggggtgggaaaaatcttttgagtcttctgcttcgcgtttggttgcgttgcatcggcagcaagctaaagtatataaagactga

SEQ ID NO: 6627 - protein, 729 aa, Bartonella quintana str. Toulouse
MEKTVADQISMSDITMESPTRFINREFSWLQFNNRVLMEAANPKNPLLERLQFLSISATNLDEFFMVRVAGLAAQIRAGVTACSADGCTPQEQLDFVLAETSRLQAHQLRELRVLCHELKQNDIEIICPAKLAEIEKSWLEKYFFDTIFPVLTPLPVDLDRSFPFIPNLTLSIALQLSRCANQHSIIVLLPLPTVLKRFILLPQEDNRFRFIAAEDVMCLFISHIFPDYEVDGIGTFRVIRDSDIEVEEEAEDLVHFFETALKRRRRGQVIQIEFDAKMPENLRQFITNGLAVPDDCISVLDGFLALNMVSEIVSISRSDLKFIPYNPRFPEYIREHNGDCFAAIRKSDIVIHHPYESFDVVVQFLRQAASDPDVIEIKQTLYRTSNDSPIVSALIDAAKQGKSVTALVELKARFDEEANIRWARDLERAGVQVFFGFITLKTHAKMSLVVRREGNRHCFYVHLGTGNYHPINAKVYTDLSFFTTDDDIGHDVALLFNYIAQYVRHVRPNKAMKIAFSPLTLRSRILKHIEEEITNAQQGRFAAIWIKVNALVDPEIIDALYRASQAGVQIDLVVRGICCLRSGIPGISDNIRVKSIVGRFLEHSRIFCFGNGGDLPGENALVYLGSADMMPRNLDYRIEILVPVFNKMVRKQILLQIMLANIIDNQQSFDILSDGTSKRIIPQRGESPFNAQEYFMTNAGLSGWEKSFESSASRLVALHRQQAKVYKD

SEQ ID NO: 6628 - DNA, 2181 bp, Bartonella henselae str. Houston-1
  CDS (1)..(2181): transl_table=11
atggaaaaaacggttgcagatcagatttctctgtcggatataacaatgaaaaatccggcgcggtttattaaccgagaattttcatggctacaatttaataaccgtgtattgatggaagctgctaattcaaagaatcctttattagaacggttacagtttctttcaatttcagcaacaaatcttgatgagttttttatggttcgtgttgctggacttgctgctcaaattcgtgctggagttacagcgtgcagtgcagatggtcgtactccgcaggagcaacttgattttgtattagctgagatttcgtgtttgcaggataatcaactacgagaattgagtattttacgtcatgaattaaaacaaaataatattgaaattatttgttctgctgggctttcagaaactgaaaagtcatggattgaaaaatattttttggatacgatctttcctgttttgacacctttatctgttgatcctgttcgcccttttccatttattcctaatctagggttttccattgctcttcaattatctcgctgtgctgatcaacactcttttatagctttgttgccacttccaacgaccttgagacgttttattcctcttcctcaaaaagataatcgctttcgttttattgcatgtgaagatgttataaacctttttatgcgtcatgtatttcctgattatgaagtcgagggaattggtacatttagggtgattcgtgatagtgatattgaagtagaagaagaagctgaagatcttgttcatttttttgaaactgcacttaagaggcgtcgtcgtgggcaagtcattcggattgaatttgaggcaaaaatgccagatcatttacgccaatttattaccaatggtcttgcggttcctgagtattgtatcaatgttcttgatggatttttggcgcttaatacagtctcagagattgtttctattccacgcaatgacttaaagtttgctccttatgatcctcgtgttcctgaatgtatctgtcagcataagggtgattgttttgcagctattcgtcaaaatgatatcgtgattcatcatccttatgaatcctttgatgttgttgtagagtttttacgtcaggctgctcgtgatcctgatgttattgaaatcaaacaaacactttatcgcacatcaaatgatagcccaattgttagcgctttgattgaggctgctgaacagggtaagtcagtgacagctttagtagaacttaaagcacgttttgatgaggaagccaatattcgctgggcacgtgatcttgaacgtgcgggcgttcaagttttttttggttttattgcattaaaaacacatgctaaaatgtcactcgttgtgcggcgtgaaggaaaacgccgttgctcttatgttcatcttggaacgggaaattaccatcctattaatgctaaagtttataccgatctttctttttttactactgatgatgatattgctcatgatgttgcattattgtttaattatattgctgaatatgtacgcccaaatgaagcaatgaagattgctttttcacccttaacattgcgcagtcgtattttggagcatattgaaggagaaattaccaatgcacggcaggggcagcttgctgctatttggatgaaagtcaatgcattggttgatcctgaaataattgatgctttatatcgtgccagtcaagcgggagtgcagattgatttggtggtgcgtggaatatgttgcttgcgtcctggtattccaggaatttccgataatattcgtgtcaaatcaatcgtagggcgttttcttgaacatagtcgcattttttgttttggtaatggtgtaaatctcccaagtgagaatgcgcttgtttatttcggatctgctgatatgatgcctcgtaatctcgattaccgtattgaaatattggttccagtttttaataaaatggtccgtcagcagattcttttacaagttatgctagcgaatatcattgataatcaacagagctttgatatattaaacgatggaacatcacaacttataacaccgcaaagaggtgaaagcccatttaatgcgcaggagtattttatggccaatgcgggtctttcaaggatggaaaggtcttttgactcttctgtttcgcatttggttgcgttgtatcagcagaaggtcaaactatataaagactga

SEQ ID NO: 6629 - protein, 726 aa, Bartonella henselae str. Houston-1
MEKTVADQISLSDITMKNPARFINREFSWLQFNNRVLMEAANSKNPLLERLQFLSISATNLDEFFMVRVAGLAAQIRAGVTACSADGRTPQEQLDFVLAEISCLQDNQLRELSILRHELKQNNIEIICSAGLSETEKSWIEKYFLDTIFPVLTPLSVDPVRPFPFIPNLGFSIALQLSRCADQHSFIALLPLPTTLRRFIPLPQKDNRFRFIACEDVINLFMRHVFPDYEVEGIGTFRVIRDSDIEVEEEAEDLVHFFETALKRRRRGQVIRIEFEAKMPDHLRQFITNGLAVPEYCINVLDGFLALNTVSEIVSIPRNDLKFAPYDPRVPECICQHKGDCFAAIRQNDIVIHHPYESFDVVVEFLRQAARDPDVIEIKQTLYRTSNDSPIVSALIEAAEQGKSVTALVELKARFDEEANIRWARDLERAGVQVFFGFIALKTHAKMSLVVRREGKRRCSYVHLGTGNYHPINAKVYTDLSFFTTDDDIAHDVALLFNYIAEYVRPNEAMKIAFSPLTLRSRILEHIEGEITNARQGQLAAIWMKVNALVDPEIIDALYRASQAGVQIDLVVRGICCLRPGIPGISDNIRVKSIVGRFLEHSRIFCFGNGVNLPSENALVYFGSADMMPRNLDYRIEILVPVFNKMVRQQILLQVMLANIIDNQQSFDILNDGTSQLITPQRGESPFNAQEYFMANAGLSRMERSFDSSVSHLVALYQQKVKLYKD

SEQ ID NO: 6630 - DNA, 2076 bp, Acinetobacter sp. ADP1
  CDS (1)..(2076): transl_table=11
atgaatactgcgatgacaacaccaccagtagaatacacttataatgatcgatacattaatcgtgaactttctattttagatttccatttacgtgttttggaacaagcggttgatcctttgcatccattattggagcgcatgaattttctattaatcttttctcgtaatctggatgaattctttgaaattcgtgtggcaggcgttttggagcaattggatttaggtaatgagagccgcagtccagatggtttgacaccgaaacaggtgcttgagcaaatttccaagacggcacatgcagcgattgagcgtcaatatcgtattttaaatgaagagatattgccaaaattgcgtgaagaagatatttgctttttacgtcgtggtgaattaacaccagcacagtcatcttgggtgaaaaaatactttcaagagcaggttgcacctgtattaaccccgattagtctggatcctgcgcatccgttccctcgcttagtcaataaaagtctcaattttgtgattacgcttgaaggtaaagatgcatttggtcgacagattgatctggctgttgtacctgcacctcgttcgttaccacgtgtggttcgtttacctgatgagcttacgggtggaaaagagcatcatgtgatgctgtctgcaatcattcatgaacatgtttcagatctgtttccgggcatgaccgcaacggggtgctatcaatttcgtgtaacacgtaatgcagatcttgcattaaatgaagatgtagaagatttggcaaaagccttgaaaggcgagttgagctcacgccgttttggacgtgctgtacgtctggaagtgactgaaaactgtccaaaacatatttatgaatatctgcttgatgaatttgatcttgatgaagaacagctttataaggttgaagggcctgtcaatctggctcgcttattgtcaaacttcaagcgtccgcatttacgttacgactcacatacgcctgttattccaaaaatcctgaaaaaatcagaaaatatttttgcggcaatgcaaaagcaggacatcttgctgcatcatccatttgaatcatttgcacctgtcattaatctcttgcgtgaagctgcacgtgatccgcaagtgctggcaatcaaacaaacgctgtatcgcagtggtccagattccgagattgttcagattcttgctgaagccgcgcgtaatggtaaagaagtgaccgcagtgattgagctacgtgcccgttttgatgaagaatccaatattgcagttgccaatgtgcttcaggaagcgggggctgtggtggtatatgggattgtaggctataaaacccatgccaaaatgattatggttgtgcgccgagaaaacaataaactggtgcgttatgtacatttgggtacgggtaattaccatgcaggaaatgccagaatctataccgattatggtctgttaacgaccgacaaagaactatgtgaagatgtgcaccgtatctttcaagaactgacaggtatgggcaaaatggcaaaacttaaaaagttattgcatgcgccatttaccttacatgcgcagttgctcaatttcattgatgatgaaattgccaatgtcaaagcaggaaagcctgcgcatattattgtaaaagtcaacgcactcaccgaattgcaattgatcaataaactatatgaagcctctcaggctggcgtacaaattgatctgattattcgttcaatttgttgtttacgtccaggtttgccagggctttcagaaaatatccgtgttcgttcgattgtggggcgctttcttgagcatacgcgtgtttattattttagtaataatggtgacgcacgaatttattgctcaagtgcagactggatggatcgtaatctattcaatcgtgttgaagcatgttttccgattgaagattcagctttgaaaaaacgcatttaccaacaaggtttgttaaattatttacaagataatcagcaagcatggttattgcaaagtgatggaacatgggtaagagtggaatctactgaaggcgaaaccgcacacaatgcgcagcaaactttgctgtctatctttgcctaa

SEQ ID NO: 6631 - protein, 691 aa, Acinetobacter sp. ADP1
MNTAMTTPPVEYTYNDRYINRELSILDFHLRVLEQAVDPLHPLLERMNFLLIFSRNLDEFFEIRVAGVLEQLDLGNESRSPDGLTPKQVLEQISKTAHAAIERQYRILNEEILPKLREEDICFLRRGELTPAQSSWVKKYFQEQVAPVLTPISLDPAHPFPRLVNKSLNFVITLEGKDAFGRQIDLAVVPAPRSLPRVVRLPDELTGGKEHHVMLSAIIHEHVSDLFPGMTATGCYQFRVTRNADLALNEDVEDLAKALKGELSSRRFGRAVRLEVTENCPKHIYEYLLDEFDLDEEQLYKVEGPVNLARLLSNFKRPHLRYDSHTPVIPKILKKSENIFAAMQKQDILLHHPFESFAPVINLLREAARDPQVLAIKQTLYRSGPDSEIVQILAEAARNGKEVTAVIELRARFDEESNIAVANVLQEAGAVVVYGIVGYKTHAKMIMVVRRENNKLVRYVHLGTGNYHAGNARIYTDYGLLTTDKELCEDVHRIFQELTGMGKMAKLKKLLHAPFTLHAQLLNFIDDEIANVKAGKPAHIIVKVNALTELQLINKLYEASQAGVQIDLIIRSICCLRPGLPGLSENIRVRSIVGRFLEHTRVYYFSNNGDARIYCSSADWMDRNLFNRVEACFPIEDSALKKRIYQQGLLNYLQDNQQAWLLQSDGTWVRVESTEGETAHNAQQTLLSIFA

SEQ ID NO: 6632 - DNA, 2106 bp, Propionibacterium acnes KPA171202
  CDS (1)..(2106): transl_table=11
atggccaagaagcccacccccgggacttccccgtcttctcccgacgagctgccggagggtcgctacagcgatcgtgagctatcgtggctcgccttcaacgaacgggtgctggatcttgcgcgcgataccgaacgcatccctctgctcgagagagcgaagtttctggccattttctcgtccaacctcgacgaatttttcatggtgcgagtcgccggtctcaaacgccgtatcgacgctggagtcgccgtgccttccgtcgctgggatgctaccccgtgagctccacgatgccattctggcccgcacccatgacctagtttctgaacaatctcgggtattcgctgaggaggtgcgccccgggctggtagatgaaggcattgagatcctgcgttgggccgagctgtccgatgatgaaaagggccgcatgcgcaccttgttctcggaacggattttccccattcttacccccttagccgtcgacccatcccaccccttcccgtacattcgcggcctatcgatcaacctggccgtcatgctggcaaatcccattactggcgcagagcagttcgctcgggtcaaagtgccgtcggtgctgcctcggctggtcaacctgggcgagggacgattccttccgctagaggaaatcatcagtcgtcacctcgaccaactgttcaccggcatgcacgtgctgcaacacaccaccttccgcgtcactcgaaacgaagacctcgaggtcgaggaggatgacgccgagaacctgctgttcgctctcgagaaggagctgctgcgccgcaaggtgggccgccctccggtgcgattggaggtccaggacgacatttccgcggagatgctcgagctactcacccgtgaacttgacatcagagacaaggaggtcttccggctgccggccccactggacctgaccggcctgttctcgctggccgacgtcgaccgcgacgatctgtcctacccgaacttcctgcccatcacgcatccgcacttggccgaggtggagacggctcgcccagccgacatgtttgccgcgatccgtcgtcgcgacgtgctcgtccatcacccctacgactccttcgccaccagcgtgcagcggttcatcgagcaagctgctcaagacccccaggtgctggccatcaaacaaaccctgtaccgcacttccggcgactcccccatcattgacgccctcgtcgatgccgccgaggctggcaagcaggtgctggcggtcgtggagattaaggcgaggttcgacgaacaggccaacatcacctgggcccgactgctggaacgggccggagtccacgtcgtttacggcatggtgggcctcaagacccactgcaagttggccatggtaatccgcgacgagggcgaagggttgcgccgctacgcccacatcggcaccggaaactacaatcccaagacggctcgccagtacgaggacctcggtctactaacctccaacccgatcattaccgaagacgtcgcgaggctgtttaatcacctatccgggatgacggctgagaaacgttaccgccgtctcctggtagcccctgaaagcatccggagcggcatcatcgacgcgattgagcgcgagatcgacaataagaaggctgggttgcctgccggagtgaggatcaaggtcaactccatcgtcgatgagcgcgtcatcgacgccctttaccgcgcctcccgcgccggtgttccagtagacctgtgggtacgtggtatttgctctatcagaccgggggttcccgggctcagtgagaacatccgggtcatctctatcctgggccggttcctagaacactcccgcatcttctggttcgccaacggtggtcgcccgatggtggcaatcggctcagccgatctcatgcaccgcaacctggaccgccgggtagaagcccttgtcggcttgtccaacaagcagcacgtggcggaggttgaagagatgttcgacatggccttcgacccaggtacggtgtcgtggcacctgcaggatcgcacttggaccgaggtgtcacgcggaccggacgacatccccctaactgacttacaagaagaactcatccgacgcacccgcgacaggaggcggtga

SEQ ID NO: 6633 - protein, 701 aa, Propionibacterium acnes KPA171202
MAKKPTPGTSPSSPDELPEGRYSDRELSWLAFNERVLDLARDTERIPLLERAKFLAIFSSNLDEFFMVRVAGLKRRIDAGVAVPSVAGMLPRELHDAILARTHDLVSEQSRVFAEEVRPGLVDEGIEILRWAELSDDEKGRMRTLFSERIFPILTPLAVDPSHPFPYIRGLSINLAVMLANPITGAEQFARVKVPSVLPRLVNLGEGRFLPLEEIISRHLDQLFTGMHVLQHTTFRVTRNEDLEVEEDDAENLLFALEKELLRRKVGRPPVRLEVQDDISAEMLELLTRELDIRDKEVFRLPAPLDLTGLFSLADVDRDDLSYPNFLPITHPHLAEVETARPADMFAAIRRRDVLVHHPYDSFATSVQRFIEQAAQDPQVLAIKQTLYRTSGDSPIIDALVDAAEAGKQVLAVVEIKARFDEQANITWARLLERAGVHVVYGMVGLKTHCKLAMVIRDEGEGLRRYAHIGTGNYNPKTARQYEDLGLLTSNPIITEDVARLFNHLSGMTAEKRYRRLLVAPESIRSGIIDAIEREIDNKKAGLPAGVRIKVNSIVDERVIDALYRASRAGVPVDLWVRGICSIRPGVPGLSENIRVISILGRFLEHSRIFWFANGGRPMVAIGSADLMHRNLDRRVEALVGLSNKQHVAEVEEMFDMAFDPGTVSWHLQDRTWTEVSRGPDDIPLTDLQEELIRRTRDRRR

SEQ ID NO: 6634 - DNA, 2109 bp, Desulfotalea psychrophila LSv54
  CDS (1)..(2109): transl_table=11
atgtggcttaaatttaatggcagggtccttgctgaggccatggattcccgtaatcctctgttggcaagggtgttcttttttgccgtggttgattcgaatctggatgagttttttatgaagcgcattggtcggttgaagcagcaggtcagcgccggggtaaagacccttagtgttgatgctctcctgcctcaggaacagattgatgtctgtaccccacttatccaggatataataaagaggcagtatactctggggcgtgaacttcaggcgggactggccagtgaagggattgttgttgccagttatgcagggcttcctcgcgaacaacgtgcctggttggataatttttttatcgatcaggtttttcctctcttgactcctcagggagttgatcccgctcacccttttccttttatctctaacctttccataaatctattgattagtgtccgttatccgggcagtgaacatgtctatcgtaatcgggtaaagatgccggtcaatgaggtgatccctcgtttcgttagagttggtagtgatgatgtttatatcccccttgaggatctggtcagtaataacctgcaaatgcttctgcccggtatggagatagacagtgttgatgtctttcgcgttactagaaatgctatgacagggccgagtggggggcaggtaaatgatcttttgcatatgattgagtctgctctgcgcgagaggaaatttgccgagattgtccgtctggaagtggggcgggggatcagttctctaaatcgggggatgcttgccgctgagctggggattgacgaggaaaaagatgttgttgagttggatgatctgctgggtaagggatcactgatggaaattgctaaaatagatagagatcagcttcatttttctccgcatcatttggttaataaccctgatctcatagaggacgatccaaatatttttcatgtactgcgggagaagaaggctgttttacttcagcatccctatgaatcgtttgaaacatccgttgagcgttttctggatgaggcgagtcaggatcccaaggtattggccataaagatgaccctctatcgtacggcaaatgactccagaattattgagtatttaatagaggcatcgcagaatggtaagcaggttgcggtggtgatggaactcaaggcacgatttgatgagtcagccaatattagatgggcgggttatttagagcaggcagggatccatgtgacctatggtgttcttgggctgaagacacactctaaggtgatctttgtggtgcgtaaagattatgatgggattcgtcgttatgctcacatcggtacgggtaattatcattcgggaacggcaagaggctactgtgatcttggtttgttgacctgcgatcctgatatcgtctctgatcttaccgagttttttaattatctgaccacgggctatacccctatccgtcgttataaaaagctcctgccctccccccggattctcaagaaggcattgctctcaaagattaacagagagattgccgttcaggagaagggaggcgtggggcttattcagttgaaaaccaacgctctggaagaccgtgacctgacagaggcgctctatagggcctcgcaggcaggggtgcatgttgatctcattgttcgggattcatgtcgtctccgccccggaattgaggggctttctgaaaatgttcgggtgatctctattgtggggaggtttctggagcatagccgacttttttattttagaaataacggcgcggaagagtactatattggctctgcagatctcatgaccaggaatttggagaggcgggtggaggcctgtgtgcccgtagaacttcctcaccttcaggcgcagttgcgggagattcttgatctacagttggctaatagtaggaatgtctgggagatggactccgggggtaactatctgcagaggacaaccaagggcaagaaaaaatcagagacgctttctgtgcatcagctcttgattgatagcgcggaaaaacgggacgccgcaggtaagcttaagttggccaagaagcgtagccaaaaacagataaaaattagatccagatcgtccccttcttcggagaggtga

SEQ ID NO: 6635 - protein, 702 aa, Desulfotalea psychrophila LSv54
MWLKFNGRVLAEAMDSRNPLLARVFFFAVVDSNLDEFFMKRIGRLKQQVSAGVKTLSVDALLPQEQIDVCTPLIQDIIKRQYTLGRELQAGLASEGIVVASYAGLPREQRAWLDNFFIDQVFPLLTPQGVDPAHPFPFISNLSINLLISVRYPGSEHVYRNRVKMPVNEVIPRFVRVGSDDVYIPLEDLVSNNLQMLLPGMEIDSVDVFRVTRNAMTGPSGGQVNDLLHMIESALRERKFAEIVRLEVGRGISSLNRGMLAAELGIDEEKDVVELDDLLGKGSLMEIAKIDRDQLHFSPHHLVNNPDLIEDDPNIFHVLREKKAVLLQHPYESFETSVERFLDEASQDPKVLAIKMTLYRTANDSRIIEYLIEASQNGKQVAVVMELKARFDESANIRWAGYLEQAGIHVTYGVLGLKTHSKVIFVVRKDYDGIRRYAHIGTGNYHSGTARGYCDLGLLTCDPDIVSDLTEFFNYLTTGYTPIRRYKKLLPSPRILKKALLSKINREIAVQEKGGVGLIQLKTNALEDRDLTEALYRASQAGVHVDLIVRDSCRLRPGIEGLSENVRVISIVGRFLEHSRLFYFRNNGAEEYYIGSADLMTRNLERRVEACVPVELPHLQAQLREILDLQLANSRNVWEMDSGGNYLQRTTKGKKKSETLSVHQLLIDSAEKRDAAGKLKLAKKRSQKQIKIRSRSSPSSER

SEQ ID NO: 6636 - DNA, 2109 bp, Bacillus cereus E33L
  CDS (1)..(2109): transl_table=11
atggaattaccgaaggggaatatagtaaatttaaatgatacagcttattacaacaatcgagagttaagttggttggcatttaatgaacgtgtactacaagaagcacaagatgaaacgaatccactcttggaaagattgaagtttattagcatttttagctcaaatttagatgaattctttatggtacgcgtggcaggattgaaggatcaagtaagtgctggttttaaccaaccagaaaataaggccggcttaacaccaaaaaagcaattaaataaaattgcgataaaagcacatgaattaatgacagtacaatatggtacgtttaaaaattatgtgttaccagcgctggagttagaagggattgagcgtttaacatttcatgatttgacgaaagaacagagagaatttatagaagagtattttgatgaacaaattttcccagtcttaacacctgtggctatcgatgcatatcgtccatttccgatgttattaaataaaagtttaaatttagctactcttttatatgatgagaaacaagtggaagaagaaaaccgcacgaagttaggaattgtacaagttccttcactacttgaacgtttcatatttttaccgagtgaagggcaaaagcataaatttattttattagaagacgtaattagtagttttactcataaattattcacaggatataaagtatcatctgttacccgtttccgtattacacgcaacgcggatttaacaattcatgaagaaggtgcgagagatttattaaaggtaattgaaaaagaattaaaaaaacgtaagtggggagctgctgtacgtttagaagttggcaaagagcatattgatgaaagagtattagcattgttatatgaggtgttggaagtaaaggatgaagatgtatatataatggatggaccattagatttaacatgtctattttctttatataaaaaactagctcctttatatgaacatctagtatatccggctcttattccgcaacggcctcaagacttaggggatgcagaagatgtatttgaaaaagcgattgagcatgatattttattacatcatccctttgaatcgtttcagccagtagttgattttgtccgtgatgcggcagacgatccgaatgtacttgcaattaaacaaacattatatcgagtaagtggggattcgccgatcattcaggcgctaaaggtagcagctgaaaaaggaaagcaagtgacagtattagttgaattaaaggcaaggtttgatgaggaaaataatgtgcattgggctaaagaattagaacaggctggatgtcatgttatttacggtgtaagtcatttgaaaacacatagtaaaattacactagttgtaagaagaaaaaacggaaaaattgaaaggttcgtacatcttggaaccggaaattataatgatgcaactgcaaagctatatactgattttggctatattacatcacgaaaagactttggggtcgatgcaacaaatttctttaattatttgagtggttatacaacaaaaccgcattttcatcatttatcggttgcgccatttgatataagagagcaatttatggatttaatagatgaggaaatccgttatcatagacaatatggaaatggctatattatcgctaagatgaattcattaactgataaaccactcattaaaaaaatgtatgaagcatcacaagctggagtaaaggtggaactcatcgttcgaggaacatgttgcctacgacctggtattccaaatgtaagtgaaaatattcgggtagttagtgttgttgggagatatttagaacatagtcgaatttattatttccatcataatggggaagagaaaatatacttatcttcagctgactggatgacgcggaatatggagaagcgagtagaaatatctttcccaatattagatattgaaatgaaggcgagaattaaggcgattttacagcttactttagctgataatgtgaaaacgcgcgaacaaaataaagacggtgactattattatgttattaatagcggtgcagaagagattgatagccaagtgaaattgtttaagatggcgtatcaaaacacagatgctgaataa

SEQ ID NO: 6637 - protein, 702 aa, Bacillus cereus E33L
MELPKGNIVNLNDTAYYNNRELSWLAFNERVLQEAQDETNPLLERLKFISIFSSNLDEFFMVRVAGLKDQVSAGFNQPENKAGLTPKKQLNKIAIKAHELMTVQYGTFKNYVLPALELEGIERLTFHDLTKEQREFIEEYFDEQIFPVLTPVAIDAYRPFPMLLNKSLNLATLLYDEKQVEEENRTKLGIVQVPSLLERFIFLPSEGQKHKFILLEDVISSFTHKLFTGYKVSSVTRFRITRNADLTIHEEGARDLLKVIEKELKKRKWGAAVRLEVGKEHIDERVLALLYEVLEVKDEDVYIMDGPLDLTCLFSLYKKLAPLYEHLVYPALIPQRPQDLGDAEDVFEKAIEHDILLHHPFESFQPVVDFVRDAADDPNVLAIKQTLYRVSGDSPIIQALKVAAEKGKQVTVLVELKARFDEENNVHWAKELEQAGCHVIYGVSHLKTHSKITLVVRRKNGKIERFVHLGTGNYNDATAKLYTDFGYITSRKDFGVDATNFFNYLSGYTTKPHFHHLSVAPFDIREQFMDLIDEEIRYHRQYGNGYIIAKMNSLTDKPLIKKMYEASQAGVKVELIVRGTCCLRPGIPNVSENIRVVSVVGRYLEHSRIYYFHHNGEEKIYLSSADWMTRNMEKRVEISFPILDIEMKARIKAILQLTLADNVKTREQNKDGDYYYVINSGAEEIDSQVKLFKMAYQNTDAE

SEQ ID NO: 6638 - DNA, 2061 bp, Burkholderia mallei ATCC 23344
  CDS (1)..(2061): transl_table=11
atgtccctccgttatccgctcctgaatcgcgaactcggcatcctgggcttcaacgagcgcgtgctcgcccaagccgccgatccgcacgtccccctcctcgagcgtctgcgcttcatctgcatcacgagcagcaacctcgacgaattcttcgaagtccggatggccgggctgcaagagcagatgcgcgacaatccgggggcgctcgcgccggacggcatgtcgctgcagcacgtgtacgatctcgtcgtcgagcgcgcgcagcggctcgtgcaccggcaatatacgatgctgcacgaaacgatcctgcccgcgctcgagcaggaaggcatctatttccacggcaccgagacatggagtgacgcgcagatcgaatgggcgcgccgctacttcttcgacgagctgctgcccgttctcacgccgatcgggctcgaccccgcgcacccgttcccgcgcgtgctgaacaagagcctgaacttcgtgatcgagctcgagggccgcgacgcgttcggccgccaggcggtgatgggcatcgtgcaggcgccgcgcgcgctgccgcgcctcgtgcgcatgccgcacgcgctgtcgggtttccagcacggcttcgtgctgctgagctcgctgatgcagcgcttcgtcggcgagctgtttcccaaactcgtcgtgaagagctgcaaccagtttcggatcacgcgcaacagcgagctcttcgtcgacgaagacgaaatcacgaacctgcgcgtcgcgctgcagggcgagctgcccgcgcgccatctcggcaacgcggtgcggctcgaggtgtcggccgacacgcctgcgcatctcgtgcggcgcctgctcgacgaaagcggcctgaccgagaaggactgctatcgcgtcgacggccccgtcaatctcgtgcggctgatgcagttgccggatctcgtcgatctgcccgagctgaagttcacgccgttcctgccggcgatctcgcccgcgatcgcgaacgcgccgtcgatgttcgacgcgatcgatcacggcgacatcctgctgcaccatccgtacgagagcttccagccggtgctcgagctgctgcagcaggccgcgcaggatccgagcgtcgtcgcgatcaagcagacgatctaccgcaccggcaccgattcgccgctgatggatgcgctgatggaagcggcgcgcaacggcaaggaggtgacggtcgtcgtcgagctgctcgcgcgcttcgacgaggagacgaacatcaactgggccgcgcagctcgaatcggtgggcgcgcacgtcgtgtacggcgtcgtcggccacaagtgccacgcgaagatgatgctgatcgtgcgccgcgtgacgcagggcggcaagtccgtgctgcgccgctacgtgcatctcggcaccggcaactatcacccgcgcaccgcgcgcctttacaccgacttcggcttgatgacgtccgagcccacgatctgcgaggacgtgcatcacgtgttccagcaactgacgggcatcggcggcgagctgaagctgcacgagatgtggcaatcgccgttcacgctgcacccgcggctcatggagcacatccgcgcggaagccgggaacgcgcgcgcgggcaagcgcgcgcggatcgtcgcgaagatgaacgcgctgctcgagccgaccgtgatcgccgagctctacgaggcgtcgcaagccggcgtgaaaatcgatctgatcgtgcgcggcgtctgcgcattgcagcccggcgtgccggggctgtcggagaacatcacggtgcgctcgatcgtcgggcgctttctcgagcaccaccggatctactactttcacgcgaacggcgaagaactcgtctatctgtcgagcgccgactggatggatcgcaatctgttcaggcgcgtcgaagtcgcgttccccgtgcgcgagcgcaagctgaagcgccgcgtgatcgccgaggggctgtcggtgttcctcggcgacaatcaatccgcgtggctcatgcaaagcgacggtcactatcgccgccgccgcgcaggcaaggcgccgcgcaacgcgcagctcgggctgctcgcgaaattctgctga

SEQ ID NO: 6639 - protein, 686 aa, Burkholderia mallei ATCC 23344
MSLRYPLLNRELGILGFNERVLAQAADPHVPLLERLRFICITSSNLDEFFEVRMAGLQEQMRDNPGALAPDGMSLQHVYDLVVERAQRLVHRQYTMLHETILPALEQEGIYFHGTETWSDAQIEWARRYFFDELLPVLTPIGLDPAHPFPRVLNKSLNFVIELEGRDAFGRQAVMGIVQAPRALPRLVRMPHALSGFQHGFVLLSSLMQRFVGELFPKLVVKSCNQFRITRNSELFVDEDEITNLRVALQGELPARHLGNAVRLEVSADTPAHLVRRLLDESGLTEKDCYRVDGPVNLVRLMQLPDLVDLPELKFTPFLPAISPAIANAPSMFDAIDHGDILLHHPYESFQPVLELLQQAAQDPSVVAIKQTIYRTGTDSPLMDALMEAARNGKEVTVVVELLARFDEETNINWAAQLESVGAHVVYGVVGHKCHAKMMLIVRRVTQGGKSVLRRYVHLGTGNYHPRTARLYTDFGLMTSEPTICEDVHHVFQQLTGIGGELKLHEMWQSPFTLHPRLMEHIRAEAGNARAGKRARIVAKMNALLEPTVIAELYEASQAGVKIDLIVRGVCALQPGVPGLSENITVRSIVGRFLEHHRIYYFHANGEELVYLSSADWMDRNLFRRVEVAFPVRERKLKRRVIAEGLSVFLGDNQSAWLMQSDGHYRRRRAGKAPRNAQLGLLAKFC

SEQ ID NO: 6640 - DNA, 2061 bp, Burkholderia pseudomallei K96243
  CDS (1)..(2061): transl_table=11
atgtccctccgttatccgctcctgaatcgcgaactcggcatcctgggcttcaacgagcgcgtgctcgcccaagccgccgatccgcacgtccccctcctcgagcgtctgcgcttcatctgcatcacgagcagcaacctcgacgaattcttcgaagtccggatggccgggctgcaagagcagatgcgcgacaatccgggggcgctcgcgccggacggcatgtcgctgcagcacgtgtacgatctcgtcgtcgagcgcgcgcagcggctcgtgcaccggcaatatacgatgctgcacgaaacgatcctgcccgcgctcgagcaggaaggcatctatttccacggcaccgagacatggagtgacgcgcagatcgaatgggcgcgccgctacttcttcgacgagctgctgcccgttctcacgccgatcgggctcgaccccgcgcacccgttcccgcgcgtgctgaacaagagcctgaacttcgtgatcgagctcgagggccgcgacgcgttcggccgccaggcggtgatgggcatcgtgcaggcgccgcgcgcgctgccgcgcctcgtgcgcatgccgcacgcgctgtcgggtttccagcacggcttcgtgctgctgagctcgctgatgcagcgcttcgtcggcgagctgtttcccaaactcgtcgtgaagagctgcaaccagtttcggatcacgcgcaacagcgagctcttcgtcgacgaagacgaaatcacgaacctgcgcgtcgcgctgcagggcgagctgcccgcgcgccatctcggcaacgcggtgcggctcgaggtgtcggccgacacgcctgcgcatctcgtgcggcgcctgctcgacgaaagcggcctgaccgagaaggactgctatcgcgtcgacggccccgtcaatctcgtgcggctgatgcagttgccggatctcgtcgatctgcccgagctgaagttcacgccgttcctgccggcgatctcgcccgcgatcgcgaacgcgccgtcgatgttcgacgcgatcgatcacggcgacatcctgctgcaccatccgtacgagagcttccagccggtgctcgagctgctgcagcaggccgcgcaggatccgagcgtcgtcgcgatcaagcagacgatctaccgcaccggcaccgattcgccgctgatggatgcgctgatggaagcggcgcgcaacggcaaggaggtgacggtcgtcgtcgagctgctcgcgcgcttcgacgaggagacgaacatcaactgggccgcgcagctcgaatcggtgggcgcgcacgtcgtgtacggcgtcgtcggccacaagtgccacgcgaagatgatgctgatcgtgcgccgcgtgacgcagggcggcaagtccgtgctgcgccgctacgtgcatctcggcaccggcaactatcacccgcgcaccgcgcgcctttacaccgacttcggcttgatgacgtccgagcccacgatctgcgaggacgtgcatcacgtgttccagcaactgacgggcatcggcggcgagctgaagctgcacgagatgtggcaatcgccgttcacgctgcacccgcggctcatcgagcacatccgcgcggaagccgggaacgcgcgcgcgggcaagcgcgcgcggatcgtcgcgaagatgaacgcgctgctcgagccgaccgtgatcgccgagctctacgaggcgtcgcaagccggcgtgaaaatcgatctgatcgtgcgcggcgtctgcgcattgcagcccggcgtgccggggctgtcggagaacatcacggtgcgctcgatcgtcgggcgctttctcgagcaccaccggatctactactttcacgcgaacggcgaagaactcgtctatctgtcgagcgccgactggatggatcgcaatctgttcaggcgcgtcgaagtcgcgttccccgtgcgcgagcgcaagctgaagcgccgcgtgatcgccgaggggctgtcggtgttcctcggcgacaatcaatccgcgtggctcatgcaaagcgacggccactatcgccgccgccgcgcgggcaaggcgccgcgcaacgcgcagctcgggctgctcgcgaaattctgctga

SEQ ID NO: 6641 - protein, 686 aa, Burkholderia pseudomallei K96243
MSLRYPLLNRELGILGFNERVLAQAADPHVPLLERLRFICITSSNLDEFFEVRMAGLQEQMRDNPGALAPDGMSLQHVYDLVVERAQRLVHRQYTMLHETILPALEQEGIYFHGTETWSDAQIEWARRYFFDELLPVLTPIGLDPAHPFPRVLNKSLNFVIELEGRDAFGRQAVMGIVQAPRALPRLVRMPHALSGFQHGFVLLSSLMQRFVGELFPKLVVKSCNQFRITRNSELFVDEDEITNLRVALQGELPARHLGNAVRLEVSADTPAHLVRRLLDESGLTEKDCYRVDGPVNLVRLMQLPDLVDLPELKFTPFLPAISPAIANAPSMFDAIDHGDILLHHPYESFQPVLELLQQAAQDPSVVAIKQTIYRTGTDSPLMDALMEAARNGKEVTVVVELLARFDEETNINWAAQLESVGAHVVYGVVGHKCHAKMMLIVRRVTQGGKSVLRRYVHLGTGNYHPRTARLYTDFGLMTSEPTICEDVHHVFQQLTGIGGELKLHEMWQSPFTLHPRLIEHIRAEAGNARAGKRARIVAKMNALLEPTVIAELYEASQAGVKIDLIVRGVCALQPGVPGLSENITVRSIVGRFLEHHRIYYFHANGEELVYLSSADWMDRNLFRRVEVAFPVRERKLKRRVIAEGLSVFLGDNQSAWLMQSDGHYRRRRAGKAPRNAQLGLLAKFC

SEQ ID NO: 6642 - DNA, 2358 bp, Methylococcus capsulatus str. Bath
  CDS (1)..(2358): transl_table=11
atggagaccgtggaaggcaatagaacggagaaggaggggggacgtttggtcatcagtaaagtcaaaggcatcagcaagtcgacacggatcatgctggcggagcacgggatcttttcggtcgaggagctcgccgacgccgacgtcggccggctcaccaagattccgggcctgagccggcagaaggcactgcgcatggtcagggccgccaaattcatggtgggtgacatggaaaaagggcgcgatgaggtctctgccggcacgggctccgccgaaacggcggagatttcctcggcggacgtcggtctggatgattcgcgatgcttcctgaaccgtgaactcagcctgctggagttcaaccgccgggtactggaccaggccaaggatgtacggacgccgctgctggaacggctcaatttcctgagtatcgcctgttccaatatggatgagttcttcgaaatcagggtcgccggtctgctgcaaaaatctgaactcggggcggcgcaaaccgaaccggatggcatgacgccgcaggaagtcctcgccgccatcagcgaacgcgcccacgagctggtcgccgagcagtatcacgtgctcaatcaggaactgctgcccgcgctggaagccgaaggcatccgcttcatccgccgttccgactggactgatgcccagcataaatggctgcggcgctacttcgaggaggagctggcgccgattctcagcccgatcgggctggatccgacccatccgtttccgcgtcccctcaacaaagccctcaatttcatcatctcccttgccggtaaggatgccttcggccgcaacatccatctcgccatcctgcaggcgccgcgggctctgccgcgcatcatccagttgccgaagagcgtgaccagcggccggctccacgatttcgtattcctttcctccgtcatccacgccttcgtcgatgacctgtttcatggcatgaaggtgaaagggtgctaccagttccgggtgacccgcaacagcgatctgtttctggacgaggaggaaatcgacgatctgctgcaggcggtcgaaggcgaactggcgagccgcaactacggcgacgaggtacggctggaggtggccgacaactgcccggacgcagtcatcgagttcctgctgagccagttcggtctcggcgaggaccgcctgtaccgggtggacggtccggtcaatctgagccgggcccgcgagatctacgatctggtcgaccgtccggacctcaaatatccgcccttcacgccgggctggccggcgcagctcacgggccaccaggatttcttcgagatcctgcgccggcaggacatcctgctgcaccatccttacgagtccttcatccccgtcatcgacctgatccgccaggccgccgacgatccgcaggtggtagccatcaagcagacgctgtatcgcaccggaccggattcacccatcgttgatgcactggcgcgggccgcgcgggctggcaaggaggtgaccgtcgtggtcgagctcctggcgcggttcgacgagcgtgccaatatttcactcgccacccgcctgcaggatgccggggtccaggtggtctatggcatcgtcggctacaagacccacgccaagatcctgctgattctgcgccgggaagggcgttcgctgcggtactacacccatctgggcactggcaattaccacccccgtaccgcccggatgtacaccgactacggcctgatgacttccgacaaggcgctgggtgaggacgtgcagcgagtgttcgtccagctcaccagtctgggcaagatgggcaagctgcacaagctcttgcagtcacctttcactctccacaagaccctgatccgcaagatcgagcgggaaatcgagcatgcgaaggagggaaagccggcgcggatcgtcatcaagatcaattccctggtcgagcccaagctgattcgcgcgctttatcgtgcctcgtgcgctggggtacaggtcaggctgatcgtgcgaggcatctgctgcttgcggcctggtattccaggtgtttcggagaacatcgaggtgcgttccatcgtcggcaggttcctcgaacacagccgcgtgtactgcttcgaaaacggaggagaacccgaggtctatgcggcgagcgcggatttcatggcgcgcaacatgtttcgccgggtggaaacctgctttcccatcgaaaacaagaagctggccgagcgggtacgcaatgatctcgagctttatttgagagacgattgccagacctggcagctgcgctcggatggcagctacgagcggctgcccgacgtccaccattgcgacgctcaggcggaactgctggaggcgctcaagaaaaccgtctga

SEQ ID NO: 6643 - protein, 785 aa, Methylococcus capsulatus str. Bath
METVEGNRTEKEGGRLVISKVKGISKSTRIMLAEHGIFSVEELADADVGRLTKIPGLSRQKALRMVRAAKFMVGDMEKGRDEVSAGTGSAETAEISSADVGLDDSRCFLNRELSLLEFNRRVLDQAKDVRTPLLERLNFLSIACSNMDEFFEIRVAGLLQKSELGAAQTEPDGMTPQEVLAAISERAHELVAEQYHVLNQELLPALEAEGIRFIRRSDWTDAQHKWLRRYFEEELAPILSPIGLDPTHPFPRPLNKALNFIISLAGKDAFGRNIHLAILQAPRALPRIIQLPKSVTSGRLHDFVFLSSVIHAFVDDLFHGMKVKGCYQFRVTRNSDLFLDEEEIDDLLQAVEGELASRNYGDEVRLEVADNCPDAVIEFLLSQFGLGEDRLYRVDGPVNLSRAREIYDLVDRPDLKYPPFTPGWPAQLTGHQDFFEILRRQDILLHHPYESFIPVIDLIRQAADDPQVVAIKQTLYRTGPDSPIVDALARAARAGKEVTVVVELLARFDERANISLATRLQDAGVQVVYGIVGYKTHAKILLILRREGRSLRYYTHLGTGNYHPRTARMYTDYGLMTSDKALGEDVQRVFVQLTSLGKMGKLHKLLQSPFTLHKTLIRKIEREIEHAKEGKPARIVIKINSLVEPKLIRALYRASCAGVQVRLIVRGICCLRPGIPGVSENIEVRSIVGRFLEHSRVYCFENGGEPEVYAASADFMARNMFRRVETCFPIENKKLAERVRNDLELYLRDDCQTWQLRSDGSYERLPDVHHCDAQAELLEALKKTV

SEQ ID NO: 6644 - DNA, 2091 bp, Azoarcus sp. EbN1
  CDS (1)..(2091): transl_table=11
atgagacccatgcacaggcccccgctaagccaggttttcccccccgagcatttcatcaaccgggagctgtctcttctccagttccagcgccgggtgctggcccaggcggccgatcacagcgttccgctgctcgagcgcttgcgcttcctgtgcatcgtatcgagcaatctcgacgaattcttcgaaatccgggtatccggcatcaaggaacagatccgcctcggcagccgtaccgcgggcaatgacggcctgctgccgaccgagttgctcgaccgcgtcagtctcgaggtccacagcatcatcgctcagcagtacgaactgctcaacgacgacatcctgccggcgctcgcagccgaaagcatcgtgtttccgcgccggcccctgtggaccgacgcccagcgtgcatgggtgcgcgactatttcctgcgcgaagtgatcccggtcctcactccgatcggcctcgatccggcgcatccgtttccgcgcgtgctcaacaagagcctgaatttcgccgtcgaactcgaagggctcgacgccttcggccgcgattcgggcgccgcgatcgtccaggcgccacgcgcgttgccacgcgtgatccggctgccgcgcgaaatctgcgagcacgaatacagcttcgtctttctgtcgtcggtgctgcacgcacacgttggcgagctgttctccgggatgcgcgtgctgggctgctaccagttccgcgtcacgcgcaactcggacctgttcgtcgacgaagaagaagtcaaggacttgcgcgtatcgctgaaaggcgaactgcagcagcgccacttcggcgacgcggtgcgactggaaattgcggacaactgctcggaaaagatggcggcgttcctgctgcagcacttccggctcggccccaaggatctctacagcatgccgggcatcgtcaacctggtgcgcctgatgcaggtgacggactgggtgaaccgtcccgacctgaattacccgcctttcctgccgggcctgccgaaagcactcgaaaaaggccgcgagatcttcgacgcgatccgcaagcaggacgtgctgctgcaccatccgttccagagcttcacgccggtcatcgacctgctgcgggcagcagccgacgacccgcaggtgctggcgatcaagatgacggtgtatcgcaccgggaccgattccgtgttgatggaacatctcgtgcgcgccgcgcagaaaggcaaggaagtcacagtcgtgctcgaactgatggcacgcttcgacgaggaggcgaacatcaactgggcgaaccggctcgaggaagtcggcgcgcatgtcgtctatggcgtgttcggctacaagacccacgcgaaactgctgatgctggtgcggcgggaagaaaacgggttgcgccgctatgtgcacatgggcaccggcaattaccatccgcgcacgacgcgcttctacaccgacttcggcctgctcacatgcaacgaggagatcggccaggatgtcgccgaagtcttcaagcagcttaccgggctgggcaaggcgagcacgctgaagcacctgtggcaggcgccgttcgtgctgcagtcgaacgtcgtcgcggcgatcaacgccgaggccgaactcgcgcgtgcgggtcgccgcgcccacatcatggtgaagatgaatgcgctgctggaaccggaaacgatcgaggcgctctatgccgcctcgcaggccggcgtcgacatcgacctgatcgtgcgtgggccgtgcgcgctgcgcccgggcgtcgccgggctgtcggagaacatccacgtgcgctcggtcatcggccgcttcctcgaacaccatcggatcttctatttccgcgccgatggcgaagaccgggtttacctgtcgagcgccgactggatggaccgcaatttcttcggtcgcatcgagatcgcgtttccggtgctcgaccagcgcctgaaacggcgcgtgatcaaggaaggcctgcgcgcctacctcggcgacaactgccaggcctgggagatgctcgaagacgggcgctatcgccgcaagacgccgcgcagcgtgcgccgggcggcgcagatggtcctgctcacggaactgtcggcgagccgctga

SEQ ID NO: 6645 - protein, 696 aa, Azoarcus sp. EbN1
MRPMHRPPLSQVFPPEHFINRELSLLQFQRRVLAQAADHSVPLLERLRFLCIVSSNLDEFFEIRVSGIKEQIRLGSRTAGNDGLLPTELLDRVSLEVHSIIAQQYELLNDDILPALAAESIVFPRRPLWTDAQRAWVRDYFLREVIPVLTPIGLDPAHPFPRVLNKSLNFAVELEGLDAFGRDSGAAIVQAPRALPRVIRLPREICEHEYSFVFLSSVLHAHVGELFSGMRVLGCYQFRVTRNSDLFVDEEEVKDLRVSLKGELQQRHFGDAVRLEIADNCSEKMAAFLLQHFRLGPKDLYSMPGIVNLVRLMQVTDWVNRPDLNYPPFLPGLPKALEKGREIFDAIRKQDVLLHHPFQSFTPVIDLLRAAADDPQVLAIKMTVYRTGTDSVLMEHLVRAAQKGKEVTVVLELMARFDEEANINWANRLEEVGAHVVYGVFGYKTHAKLLMLVRREENGLRRYVHMGTGNYHPRTTRFYTDFGLLTCNEEIGQDVAEVFKQLTGLGKASTLKHLWQAPFVLQSNVVAAINAEAELARAGRRAHIMVKMNALLEPETIEALYAASQAGVDIDLIVRGPCALRPGVAGLSENIHVRSVIGRFLEHHRIFYFRADGEDRVYLSSADWMDRNFFGRIEIAFPVLDQRLKRRVIKEGLRAYLGDNCQAWEMLEDGRYRRKTPRSVRRAAQMVLLTELSASR

SEQ ID NO: 6646 - DNA, 2196 bp, Synechococcus elongatus PCC 6301
  CDS (1)..(2196): transl_table=11
atgcatcccttgctaggatcagcggctgattctgtgatgagattggccatgaccgatgctgcgattgaactgaatcggccagaaaatttctttaatcgtgaaattagctggctggctttcaatcagcgcgttctacaccaagccctcgacccccgcacgcctctgctggaacgcctcaagttcatggggattttcagcaataacctcgatgaatacttcatggtgcgcgtggcgagtctcttgcagcaaattgaggctggcgtcagcaagcgatcgcccgatggcctcaccccagcggagcaactcgagcaaattcgagcctgccttggccccctggtggagcaacaacacagccatttctaccgagagctacgccccctgctggctgaaacgggcatccatctgctcaactacaacgacctcaaccgcacccaacagcgatacctcgatcagtatttcgcagcgcagatttttccagtcttgacaccgctcgcggttgatccggcgcaccccttcccccacatttccaatctcagtctcaacttggcggtcttgatccaagacgacagtgttggcgaggagcagtttgcgcggattaaggtgccgaacattctgccgcgctttattgaactgccggccaaaacccgccggcgatcgcagcaaccgattgtctggatgggcgtaccgatcgaacaggtaatcgcccacaacctcagcacgcttttcccaggcatgagcgtgatcgattggtttgtcttccgtgtcacccgcgatgctgacctcgatgtcaaggaagacgaagctgacgatctgctgttggcgatcgaacaagaattgcgtaagcgacgcctgggggcaggctcagtcgtccgcctagaaattgaggcaggctctccagcctccatcctcgaaatcctgatgaacggcatggacctcgatccgcaggatgtctatgccctacccggtctcctgagccttgaagacctgatgtcgctgacgtccttgccgttgcccgaactgaaggatcagccttggacgcaagtggttcccaagcgattgcggcgggtacaaatgcccgttggcgaagacctgcagcgttctaagcccagtgaggaaagcgaagacatctttacggtgattcgccagcgcgacctgttgatgcatcacccctacgattcttttgcggcttcagtcgaacagttcgttgcccaagccgcaacagatccccacgtgctggctatcaaaatgacgctctatcgcacctcgggagattcgccgattgtgcagagcctgatgcaggctgcggagcatggcaagcaggtgctcgctcttgtagaactcaaagctcgctttgatgaagagaacaacatcacctgggcgcggcgccttgagaaagcaggtgtgcatgttgtctatggcttagtgggtctcaagattcacaccaaagtggtgttggtggttcgccaagagcgcaaccaaatccgtcgctatgttcatatcggcaccggcaactacaactccaaagcagcccgcatctacactgacttggggctcttgagctgccgtgaggatttgggcgctgatatttctgaactcttcaactacctgacgggtttctcgaagcaacgggactatcgcaagctgctgattgcgccggtcagcttgcgggagcaaatgatcggcctgatcgatcgcgaaattcagcatgcgatcgcagggcgtccggcagcgattcgcgccaagatgaactcgctagttgatcctaaaatcatcctcaagctctatgaggcctcacaagctggcgtcgagattgatttgattgtgcggggggtctgctgcctacgaccgggtgtgccggggttgagcgatcgcattcgggtgattagtatcattggccgcttcctcgaacactcgcgcatcttcagcttccacaacaacggccaggaagagtttttcatcggcagtgcggactggatgacccgtaacctcgatcgccgcgtagaagcgattacccctattgaagatgaagcgatcgcagcagaactgcgggcaatcctggatatttccttagccgacgaccgactggcctgggatttactgcccagtggtgagtaccaactccggcaaccggtggatcccgagactccccatagttcgcagcagcaattcatgaatcgcgcggctaccacccgctag

SEQ ID NO: 6647 - protein, 731 aa, Synechococcus elongatus PCC 6301
MHPLLGSAADSVMRLAMTDAAIELNRPENFFNREISWLAFNQRVLHQALDPRTPLLERLKFMGIFSNNLDEYFMVRVASLLQQIEAGVSKRSPDGLTPAEQLEQIRACLGPLVEQQHSHFYRELRPLLAETGIHLLNYNDLNRTQQRYLDQYFAAQIFPVLTPLAVDPAHPFPHISNLSLNLAVLIQDDSVGEEQFARIKVPNILPRFIELPAKTRRRSQQPIVWMGVPIEQVIAHNLSTLFPGMSVIDWFVFRVTRDADLDVKEDEADDLLLAIEQELRKRRLGAGSVVRLEIEAGSPASILEILMNGMDLDPQDVYALPGLLSLEDLMSLTSLPLPELKDQPWTQVVPKRLRRVQMPVGEDLQRSKPSEESEDIFTVIRQRDLLMHHPYDSFAASVEQFVAQAATDPHVLAIKMTLYRTSGDSPIVQSLMQAAEHGKQVLALVELKARFDEENNITWARRLEKAGVHVVYGLVGLKIHTKVVLVVRQERNQIRRYVHIGTGNYNSKAARIYTDLGLLSCREDLGADISELFNYLTGFSKQRDYRKLLIAPVSLREQMIGLIDREIQHAIAGRPAAIRAKMNSLVDPKIILKLYEASQAGVEIDLIVRGVCCLRPGVPGLSDRIRVISIIGRFLEHSRIFSFHNNGQEEFFIGSADWMTRNLDRRVEAITPIEDEAIAAELRAILDISLADDRLAWDLLPSGEYQLRQPVDPETPHSSQQQFMNRAATTR

SEQ ID NO: 6648 - DNA, 2058 bp, Neisseria gonorrhoeae FA 1090
  CDS (1)..(2058): transl_table=11
atgaccgaacaaaaccgcatcctctgccgcgaactgagcctgctggcattcaaccgccgcgtgttggcacaggcggaagacaaaaacgtcccccttttggaacgcctgcgcttcctgtgcatcgtgtcgtccaatcttgacgagttttttgaagtccgcatggcgtggctcaagcgtgaaaacaagctgcacccccggcgcaggccggacaacggcaaaatgccgtctgaaaccatcgccgacgttaccgaagcggcgcgctccctgatacggcaccagtacgacctgttcaacaacgtccttcagcccgagttggcgcgggaaagcatccatttttaccgccgccgcaattggacgggcacgcagaaaaaatggatcgaagactatttcgaccgcgaactgctgccgatcctgacccccatcggactcgacccttcccaccctttcccgcgcccgctgaacaaatcgctcaacttcgccgtagaactcgacggcacggacgcgttcggcaggccttcgggtatggcgattgtccaagcaccgcgcatcctgccgcgcgttgttcccctgccgtccgaactgtgtggcggcggacacggcttcgtcttcctgtcgtccatcctccacgcccacgtcggcaaactcttcccgggcatgaacgtcaaaggctgccaccagttccgcctcacgcgcgacagcgacttgaccgttgacgaagaagacgtacaaaacctccgcgccgccattcaaaacgaactgcacgaccgcgaatacggcgacggcgtgcggctcgaagtcgccgacacctgtcccgcctacatccgcgactttctgctcgcgcaattcaggctgaccgacgccgaactctatcaggtcaaaggcccggtcaacctcgtccgcctcaacgccgtccccgacctagtcaaccgccccgatttgaaatttccgccgcacacgccgggccgtctgaaagccttgggcaaaaacagcccgatcttcgatttggtgcgccaatcgcccatcctgctgcaccacccctaccaatctttcgatcccgtggtcgatatgatacgcgaagccgccgccgatcccgccgttcttgccgtcaaaatgacgatttaccgcaccggcacgcgctccgaactcgtccccgccctgatgaaggcggcactcgccgacaaacaagtaaccgtcgtcgtcgaactgatggcgcgttttgacgaagccaacaacgtcaactgggcgaagcagctcgaagaggcgggagcgcacgtcgtgtacggcgtgttcggctacaaagtccacgccaaaatggcactggtcatccgccgcgaagacggcgtgctcaagcgttacgcccacctcggcacgggcaactaccaccaaggcacatcgcgcatctacaccgacttcggcctcattaccgccgacgaacaaatcaccgccgacgtgaacacattatttatggaaatcacaggcttgggcaaacccgggcggctgaacaaactctaccaaagtccgtttaccctgcacaaaatggttatcggccgcatcgctcgcgaaaccgaacacgcaaaagccggcaaaccggcgcggattaccgccaagatgaattcgctcatcgaaccgactgtcatagaagccctgtatcgggcaagcgcggcaggcgtgcaaatcgatttgattgtgcgcggtatgtgtaccttgcgcccgggtgtaaaaggcttgtccgaaaacatccgcgtccgctccatcgtcggcaggcagctcgaacacgcgcgcgtatattgtttccacaacaacggcgcggacgacacctttatttccagcgcggattggatggggcgcaatttcttccgccgcatcgaaaccgccaccccgattaccgcgcccgaactcaaaaaacgcgtcatccgcgaaggtttggaaatggcactggcagacaatacccacgcgtggctgatgcagcccgacggcggctatatccgcgccgcgcccgccgaaggcgaaagcgaagccgacctgcaaaacgatttatgggatttgctccgaggctga

SEQ ID NO: 6649 - protein, 685 aa, Neisseria gonorrhoeae FA 1090
MTEQNRILCRELSLLAFNRRVLAQAEDKNVPLLERLRFLCIVSSNLDEFFEVRMAWLKRENKLHPRRRPDNGKMPSETIADVTEAARSLIRHQYDLFNNVLQPELARESIHFYRRRNWTGTQKKWIEDYFDRELLPILTPIGLDPSHPFPRPLNKSLNFAVELDGTDAFGRPSGMAIVQAPRILPRVVPLPSELCGGGHGFVFLSSILHAHVGKLFPGMNVKGCHQFRLTRDSDLTVDEEDVQNLRAAIQNELHDREYGDGVRLEVADTCPAYIRDFLLAQFRLTDAELYQVKGPVNLVRLNAVPDLVNRPDLKFPPHTPGRLKALGKNSPIFDLVRQSPILLHHPYQSFDPVVDMIREAAADPAVLAVKMTIYRTGTRSELVPALMKAALADKQVTVVVELMARFDEANNVNWAKQLEEAGAHVVYGVFGYKVHAKMALVIRREDGVLKRYAHLGTGNYHQGTSRIYTDFGLITADEQITADVNTLFMEITGLGKPGRLNKLYQSPFTLHKMVIGRIARETEHAKAGKPARITAKMNSLIEPTVIEALYRASAAGVQIDLIVRGMCTLRPGVKGLSENIRVRSIVGRQLEHARVYCFHNNGADDTFISSADWMGRNFFRRIETATPITAPELKKRVIREGLEMALADNTHAWLMQPDGGYIRAAPAEGESEADLQNDLWDLLRG

SEQ ID NO: 6650 - DNA, 2211 bp, Pseudomonas syringae pv. syringae B728a
  CDS (1)..(2211): transl_table=11
atgaataccgaagcactcatcgaagccgctgttcaagtcgatgtcccggaggcaacgcccgtggtcgaacctgacatcgaagtaatcccggccatcgaggcacccgccgctgtggtgcccgctatcgtcgcgcccaacctggacgacagcagcctgtatatccaccgtgaactgtcgcaactgcagttcaatatccgggttctggaacaggcgctcgatgagtcctacccgttgctggagcggctgaagtttctgctgatcttctccagcaacctcgatgagttcttcgagattcgtgttgcaggcctgaagaagcagatcacctttgcccgtgaacaggcgggcgccgacggtctgcagccgcatcaggcgctggccaggatcagcgagctggtccacggtcatgtggatcgtcagtacgcgatcctcaacgacattctgctgccggagctggagaaacatcaggtccgcttcattcgtcgccgtcactggacggccaagctcaaggcctgggtacgacgctacttccgcgacgagatcgcgccgatcatcaccccgatcggtctcgacccgacgcacccgttcccgttgctggtcaacaagagcctgaacttcatcgtcgagcttgaaggtatcgatgccttcgggcgcgactccggtcttgcgatcattcccgcgccgcgtctgctgccgcgtgtgatcaaggtgccggaagaggtctgcgggcctggcgataacttcgtgttcctgtcgtcgatgatccacgcccacgctgacgatctgtttcagggcatgaaggtcaagggctgctaccagttccgcctgacccgaaacgctgacctggcgctggactccgaagatgtggaagacctggcgcgcgcactgcgtggcgagctgttctcgcgtcgctatggtgatgcggtacgtctggaagtggcggacacctgcccgaaacacctgtcggactacctgctcaagcagttcaacctgcacgagtccgagctgtatcaggtgaatggcccggtcaacctgacgcgtctgttcagcatcaccggcctggacagccaccccgaattgcaatacccgccgttcacgccagccatccccaagctgctgcagaacagcgaaaacgttttcagcgtggtcagcaagcaggacatcctgttgctgcaccctttcgagtcgttcacgccggtggtcgacctgctgcgccaggcggcaaaagatccgcacgtgctggcggtacgccagacgctgtatcgcagcggcgcgaactcggaaatcgtcgatgcgctggtcgatgccgcgcgtaacggcaaggaagtcactgcggtgatcgagttgcgtgcgcgtttcgacgaagagtccaacctgcaactggccagccgcctgcaggccgccggtgcggtggtgatctacggcgtggtcggcttcaagacccacgccaagatgatgctgatcctgcgtcgcgaagccggcgagatcgtacgttatgcgcacctcggcaccggcaactaccacgccggtaacgcacgtctgtataccgactacagcttgctgacctccgatgacgccctgtgcgaagacgtcggcaaactgttcagccagttgatcggcatgggcaagacgctgcgcatgaagaagctgctgcatgcgccgttcacgctcaagaaaggcatgctcgacatgatcgcccgcgagacgcaatttgcgctcgatggcaaacctgcgcacatcatcgccaagttcaactcgctgaccgatccgaagatcatccgggcgttgtacaaggccagccagtccggtgtgcgcatcgatctggtggtgcgcggcatgtgctgcctgcgtccgggcatcgccggggtttcgcacaatatccatgtgcgctcgatcatcggccgcttcctggagcacacgcgggtgttctacttcctcaatggcggcgacgagcagatgttcctgtcgagtgccgactggatggagcgcaacctcgacaagcgcgtcgagacctgcttcccggtggaaggcaagaagttgattctgcgtgtgaagaaggagctggaaagctacctgaccgacaacacccacagctggctgttgcagtcggacgggcgttacgtgcgcagcacgccgaccggcaaccagaacccgcgaagcgcccaggcgacccttctggagcgcctgagcaacccggtcctcagcgtacgctga

SEQ ID NO: 6651 - protein, 736 aa, Pseudomonas syringae pv. syringae B728a
MNTEALIEAAVQVDVPEATPVVEPDIEVIPAIEAPAAVVPAIVAPNLDDSSLYIHRELSQLQFNIRVLEQALDESYPLLERLKFLLIFSSNLDEFFEIRVAGLKKQITFAREQAGADGLQPHQALARISELVHGHVDRQYAILNDILLPELEKHQVRFIRRRHWTAKLKAWVRRYFRDEIAPIITPIGLDPTHPFPLLVNKSLNFIVELEGIDAFGRDSGLAIIPAPRLLPRVIKVPEEVCGPGDNFVFLSSMIHAHADDLFQGMKVKGCYQFRLTRNADLALDSEDVEDLARALRGELFSRRYGDAVRLEVADTCPKHLSDYLLKQFNLHESELYQVNGPVNLTRLFSITGLDSHPELQYPPFTPAIPKLLQNSENVFSVVSKQDILLLHPFESFTPVVDLLRQAAKDPHVLAVRQTLYRSGANSEIVDALVDAARNGKEVTAVIELRARFDEESNLQLASRLQAAGAVVIYGVVGFKTHAKMMLILRREAGEIVRYAHLGTGNYHAGNARLYTDYSLLTSDDALCEDVGKLFSQLIGMGKTLRMKKLLHAPFTLKKGMLDMIARETQFALDGKPAHIIAKFNSLTDPKIIRALYKASQSGVRIDLVVRGMCCLRPGIAGVSHNIHVRSIIGRFLEHTRVFYFLNGGDEQMFLSSADWMERNLDKRVETCFPVEGKKLILRVKKELESYLTDNTHSWLLQSDGRYVRSTPTGNQNPRSAQATLLERLSNPVLSVR

SEQ ID NO: 6652 - DNA, 2220 bp, Pseudomonas fluorescens Pf-5
  CDS (1)..(2220): transl_table=11
atgaatactgaaggactctcagaagttgccgtaaaagaagctcagccggtggtcgagcaagtggtggagaccccgccggaactggagccagtggccccggtcgcggtggccgagacgcaaccggcaccggccatcgtcattcccaacctggatgacagcagcctgtacatccaccgcgagctgtcgcagctgcaattcaacatccgcgtgctggagcaggcactggatgagtcctatccgttgctggagcgcctgaagttcctgctgatcttctccagcaacctggacgagttcttcgagatccgcgtggcgggcctgaagaagcagatcaccttcgctcgcgaacaggccggtgccgacggtctgcagccgcaccaggcgctggcgcgcatcagcgaactggtgcacgggcatgtcgaccgccagtacgcgatcctcaacgacatcctgttgccggaactggaaaaacatcagatccgcttcatccgtcgccgctactggaccaccaagctcaagacctgggttcgccgctatttccgcgacgagatcgcgccgatcatcacccccatcggcctggacccgacgcaccctttcccattgctggtgaacaagagcctgaacttcatcgtcgagctggagggcatcgacgccttcgggcgcgattcgggtctggcgatcatccccgcgccgcgcctgctgccgcggatcatcaaggtgcccgaagaagtcggcggccctggcgacaactatgtgttcctctcgtcgatgatccacgcccacgccgatgacctgttccagggcatgaaggtaaaaggctgctatcagttccgcctgacccgaaacgccgacctggcagtggacaccgaggacgtcgaagacctggcccgtgcgctgcgcggcgagctgttctcccgtcgctacggtgacgcggtgcgcctggaagtggccgacacctgccccaagcacctgtcggactacctgctcaagcagttcaacctgcacgagaccgagctgtaccaggtcaacggcccggtgaacctgacgcggctgttcagcatcaccggcctggacagccacccggagctgcaatacatcccgttcaccccgcagatccccaagctgctgcagaacagcgagaacatcttcagcgtcatcagcaagcaggacatcctgctgctgcacccgttcgaatccttcaccccggtggtcgacctgctgcgccaggctgccaaggacccgcatgtgctggcagtgcgccagaccctgtaccgcagtggtgccaactcggagatcgtcgacgccctggtggacgcggcgcgcaacggcaaggaggtcaccgcggtgatcgaattgcgtgcgcggtttgacgaagagtccaacctgcagatggccagccgtctgcaggcggccggtgcggtggtgatttacggcgtggtggggttcaagacccacgccaagatgatgctgatcctgcgtcgcgaagccggcgagatcgtgcgttatgcgcacctaggcaccggcaactaccacgcggccaacgcccgtctgtacaccgactacagtctgctgacctccgacgatgccttgtgcgaggacgtgggcaagctgttcagccaactgatcggcatgggcaagaccctgcgcatgaagaagttgctgcatgcgccgttcaccctgaagaagggcatgctcgacatgatcgcccgggagactcagttcgccctggacggcaaaccggcgcacatcatcgccaagttcaactcattgaccgatccgaagatcattcgcgcgctgtacaaggccagccagtcgggcgtgcgcatcgacctggtggtgcgtggcatgtgctgcctgcgtccgggcattgccggggtctcgcacaacatccacgtgcgctcgatcatcggccgcttcctggagcacacccgggtgttctacttcctcaatggcggcgaggaacagatgttcctttccagcgccgactggatggagcgcaacctcgacaagcgggtcgagacctgcttcccggtggaaggcaagaagctgattctgcgggtcaagaaagagttggagagctatctcaccgacaacacccacagctggagcctgcagtccgacggccgctatatccgcaatacgccgaccggcaaccagaacccgcgcagtgcgcaggcaaccctgctggagcgccttggcagcccggtactgccggtgcgctaa

SEQ ID NO: 6653 - protein, 739 aa, Pseudomonas fluorescens Pf-5
MNTEGLSEVAVKEAQPVVEQVVETPPELEPVAPVAVAETQPAPAIVIPNLDDSSLYIHRELSQLQFNIRVLEQALDESYPLLERLKFLLIFSSNLDEFFEIRVAGLKKQITFAREQAGADGLQPHQALARISELVHGHVDRQYAILNDILLPELEKHQIRFIRRRYWTTKLKTWVRRYFRDEIAPIITPIGLDPTHPFPLLVNKSLNFIVELEGIDAFGRDSGLAIIPAPRLLPRIIKVPEEVGGPGDNYVFLSSMIHAHADDLFQGMKVKGCYQFRLTRNADLAVDTEDVEDLARALRGELFSRRYGDAVRLEVADTCPKHLSDYLLKQFNLHETELYQVNGPVNLTRLFSITGLDSHPELQYIPFTPQIPKLLQNSENIFSVISKQDILLLHPFESFTPVVDLLRQAAKDPHVLAVRQTLYRSGANSEIVDALVDAARNGKEVTAVIELRARFDEESNLQMASRLQAAGAVVIYGVVGFKTHAKMMLILRREAGEIVRYAHLGTGNYHAANARLYTDYSLLTSDDALCEDVGKLFSQLIGMGKTLRMKKLLHAPFTLKKGMLDMIARETQFALDGKPAHIIAKFNSLTDPKIIRALYKASQSGVRIDLVVRGMCCLRPGIAGVSHNIHVRSIIGRFLEHTRVFYFLNGGEEQMFLSSADWMERNLDKRVETCFPVEGKKLILRVKKELESYLTDNTHSWSLQSDGRYIRNTPTGNQNPRSAQATLLERLGSPVLPVR

SEQ ID NO: 6654 - DNA, 2211 bp, Pseudomonas syringae pv. phaseolicola 1448A
  CDS (1)..(2211): transl_table=11
atgaataccgaagcactcatcgaagccgctgttgaagtcgatgttccgcaggcgacgcccgcggttgaacctgacatcgaagtaatcccggccattgaggcacctgccgctacagtgcccgctatcgtcgctccgaacctggacgacagcagcctgtatatccaccgtgaactgtcgcaattgcagttcaacatccgggtactggaacaggcgctcgatgagtcctacccgttgctggagcggctgaagttcctgctgatcttctccagcaacctcgatgagttcttcgagattcgtgtcgcaggtctgaagaaacagatcacctttgcccgtgaacaggccggggccgacggtttgcagccgcatcaggcgttggccagaatcagcgagctggtgcatggtcatgttgatcgtcagtacgcgatcctcaacgacattctgctccctgagctggaaaagcatcaggtccgcttcattcgtcgtcgtcactggacggccaagctcaaggcctgggtacgtcgttacttccgtgacgagatcgcgccgatcatcaccccgatcggtctggacccaacccatccgttcccgttgctggtcaacaagagcctgaacttcattgtcgagcttgaaggtatcgacgccttcggtcgcgactcgggccttgcgatcattccggcaccgcgtttgctgccgcgtgtcatcaaggtgccggaagaggtctgtggccctggcgacaacttcgttttcctgtcgtcgatgatccacgctcacgccgacgatctgtttcagggcatgaaggtcaagggctgctaccagttccgcctgacccgaaacgccgatctggcgctggactcggaagacgtggaagacttggcacgtgccctgcgcggcgagctgttctcgcgtcgctacggcgatgcggtacgtctggaggtagcggatacctgccccaaagacctgtcggactacctgctcaagcagttcaacctgaacgagtccgagctgtatcaggtcaacgggccggtcaacctgacgcgcctgttcagtattactggcctggacagccaccctgaattgcaatacccgccgttcacgccagcgatccccaaactgctgcagaacagcgaaaacattttcagcgtgatcagcaagcaggacattctgctgctgcaccctttcgagtcgttcaccccggtcgtcgacctgctgcgtcaggcggcaaaggatccacatgttctggctgtgcgccagacgctgtaccgcagcggtgcaaactcggaaatcgtcgatgcgctggttgatgcggcgcgtaacggcaaagaggtcaccgcggtgatcgaattgcgtgcccgcttcgacgaagagtccaacctgcaactggccagccgtcttcaggctgccggtgcggtggtgatctatggtgtggtcggcttcaagacccacgccaagatgatgctgatcctgcgtcgcgaagccggcgagatcgtacgttatgcacacctcgggaccggtaactatcacgctggtaatgcgcgtctttacaccgactacagcctgctgacctctgacgacgcattgtgcgaagacgtcggcaaactgttcagtcagctgatcggcatgggcaaaacgctgcgcatgaagaaactactgcatgcgccgttcacgctcaagaaaggcatgctcgacatgattgcccgcgagacgcagtttgcgctcgacggcaagccagcgcacatcatcgccaagttcaactcgctgaccgatccgaagatcattcgcgcgttgtacaaggccagtcagtccggtgtgcgcatcgatctggtggtgcgcggcatgtgctgtttgcgtccgggcatcgccggggtttcgcacaacatccatgtgcgctcgatcatcggccgattcctggagcacacgcgggtgttctacttcctcaacggcggcgacgagcaaatgttcctgtcgagtgccgactggatggagcgcaacctcgacaagcgtgtcgagacctgcttcccggtggaaggcaagaaattgattctgcgtgtgaagaaggagctggaaagctacctgaccgacaacactcacagctggctgctgcagccagacgggcgttacgtgcgtagcatgccgacaggcaatcagaacgcccgaagcgcccaggcgaccctgctggagcgcctgagcaacccggttctcagcgtacgctga

SEQ ID NO: 6655 - protein, 736 aa, Pseudomonas syringae pv. phaseolicola 1448A
MNTEALIEAAVEVDVPQATPAVEPDIEVIPAIEAPAATVPAIVAPNLDDSSLYIHRELSQLQFNIRVLEQALDESYPLLERLKFLLIFSSNLDEFFEIRVAGLKKQITFAREQAGADGLQPHQALARISELVHGHVDRQYAILNDILLPELEKHQVRFIRRRHWTAKLKAWVRRYFRDEIAPIITPIGLDPTHPFPLLVNKSLNFIVELEGIDAFGRDSGLAIIPAPRLLPRVIKVPEEVCGPGDNFVFLSSMIHAHADDLFQGMKVKGCYQFRLTRNADLALDSEDVEDLARALRGELFSRRYGDAVRLEVADTCPKDLSDYLLKQFNLNESELYQVNGPVNLTRLFSITGLDSHPELQYPPFTPAIPKLLQNSENIFSVISKQDILLLHPFESFTPVVDLLRQAAKDPHVLAVRQTLYRSGANSEIVDALVDAARNGKEVTAVIELRARFDEESNLQLASRLQAAGAVVIYGVVGFKTHAKMMLILRREAGEIVRYAHLGTGNYHAGNARLYTDYSLLTSDDALCEDVGKLFSQLIGMGKTLRMKKLLHAPFTLKKGMLDMIARETQFALDGKPAHIIAKFNSLTDPKIIRALYKASQSGVRIDLVVRGMCCLRPGIAGVSHNIHVRSIIGRFLEHTRVFYFLNGGDEQMFLSSADWMERNLDKRVETCFPVEGKKLILRVKKELESYLTDNTHSWLLQPDGRYVRSMPTGNQNARSAQATLLERLSNPVLSVR

SEQ ID NO: 6656 - DNA, 2082 bp, Dechloromonas aromatica RCB
  CDS (1)..(2082): transl_table=11
atgacccatccccaattaaaaccccgcttcccgcccgagaactatctcaaccgcgaacttggcttgctggctttcaatcgccgggttctcgcccaggcgcaagacgaacggatacccttgctcgaacgcctgcgcttcctgtgcatcgtttccagcaatctggatgagttcttcgagattcgcatggccgggctgaaggaacaggtcaaggcacacgccacggtggtcacgaccgacggcaagaccgcgcaggaggcctaccgcctggtctcggccgagacgcatgcaatggtcgccgagcagtaccagcacctgaacgatgtcattctgccggcactggcggaacagagtatccgcttcctgcgccgcacgacctggaacgaagcacagcgcgagtggattcgcaattacttcatccgcgagatggttccggtgttgacccccatcggtctcgacccctcgcaccccttcccgcgtgtgctcaacaagagcctgaatttcgccatcgagctggaaggcaaggatgccttcggccgcagctccaacgccgccattgtccaggccccgcgcgtgctaccgcgcgtcatccgcctgccggaagaactggccggctgtgaatacggcttcgtgttcctgtcttccatcctgcacgaattcgtcggcgaattgttcaccggcatgaccgtactcggctgctaccagttccgcgccacgcgcaactccgacctgtttgtcgacgaggaagaagtcaccaacctgcgcaccaagctgcagggcgaattgccacagcgccacttcggcaatgccgtccgcctcgaagtcgccaataattgctcggaggcaatgaccgaattcctgcttgcccagttcgatctgaagccaaccgacctttaccgcgtcaatggcccggtgaacctggttcgtctgatgcaggtgccggactgggtcgaccgtccggacatgaaattccgccccttcacacccggcaccccgaaaggactggccaagggggccaacatcttcgagagcattcgcaagaacgatatcctgctgcatcatccctaccagtccttcgcaccggtcatcgagtttctcaaccaggcagcgaccgacccgagcgtggtcgcgatcaagatgaccgtctaccggaccggcaccgattcggtcttgatggagtcgctgattcgcgccgcccagaacggcaaggaagtcaccgtcgtcgtcgaattgatggcccgttttgacgaggaagccaacatcagctgggcaaccaagctggaacaggttggcgcccatgtcgtctatggcgtcgtcggctacaagacacacgccaaggccttgctgatcgtacgccgggaagaaggcggcctgaagcgctacgcccacctcggcaccggcaactaccacccgcgtacggcccgtctctacaccgactttggcctgatgacggccaacgaggaagtcacgcacgacgttgccgaagtgttcaagcaactgaccggtctgggcaaggcacggaccctgaagcacctgtggcaggcaccatttaccttgcagcagaacgtcgtcgccggcatccaggccgaggcggagattgcccgcaagggcggcaaggcgcgcatcgtcgccaagatgaattcgctgctcgagtccgaagtgatcgatgcactctacaaggcctcacaggccggcgtcgagatcgacctgatcgtgcgcggtgtctgcgcgctgcggcccggcgtccccggcctgtccgacaagattcgcgtccgctcgatcattggccgcttcctcgaacaccatcgcattttctacttcctggccggcggcaaggaaaacgtctacctgtcgagcgccgactggatggaccgcaatttcttcaaacgcatcgaactggccttccccatcctcgaccccaagctaaagaaacgggtcattaacgaagggttgaagttctacctggccgataaccagcaaggctgggaaatgaacggtcagggcgtctaccagcgtcgccgctcgacccgcagcacgccgcacaatgcgcaaggcgagttgatggtcaacgtagggaacagctaa

SEQ ID NO: 6657 - protein, 693 aa, Dechloromonas aromatica RCB
MTHPQLKPRFPPENYLNRELGLLAFNRRVLAQAQDERIPLLERLRFLCIVSSNLDEFFEIRMAGLKEQVKAHATVVTTDGKTAQEAYRLVSAETHAMVAEQYQHLNDVILPALAEQSIRFLRRTTWNEAQREWIRNYFIREMVPVLTPIGLDPSHPFPRVLNKSLNFAIELEGKDAFGRSSNAAIVQAPRVLPRVIRLPEELAGCEYGFVFLSSILHEFVGELFTGMTVLGCYQFRATRNSDLFVDEEEVTNLRTKLQGELPQRHFGNAVRLEVANNCSEAMTEFLLAQFDLKPTDLYRVNGPVNLVRLMQVPDWVDRPDMKFRPFTPGTPKGLAKGANIFESIRKNDILLHHPYQSFAPVIEFLNQAATDPSVVAIKMTVYRTGTDSVLMESLIRAAQNGKEVTVVVELMARFDEEANISWATKLEQVGAHVVYGVVGYKTHAKALLIVRREEGGLKRYAHLGTGNYHPRTARLYTDFGLMTANEEVTHDVAEVFKQLTGLGKARTLKHLWQAPFTLQQNVVAGIQAEAEIARKGGKARIVAKMNSLLESEVIDALYKASQAGVEIDLIVRGVCALRPGVPGLSDKIRVRSIIGRFLEHHRIFYFLAGGKENVYLSSADWMDRNFFKRIELAFPILDPKLKKRVINEGLKFYLADNQQGWEMNGQGVYQRRRSTRSTPHNAQGELMVNVGNS

SEQ ID NO: 6658 - DNA, 2109 bp, Thermobifida fusca YX
  CDS (1)..(2109): transl_table=11
atggtgcagaagaagacagcggccgtagcggtgaacgcagcgcagatgctcacccgagacagagacctcctgccccccgaccgcttcatgaaccgggagatcggctggctccgcttcaaccagcgggtcctggaactcgcggaagacaccacgctgccgctgctggaacgggccctgttcctgtccatcttctccagcaacctcgacgagttcttcatggtgcgggtcgccggactcaaacgccgcctcgccaccggggtccccgtctcctcccggcaggacccccgcgaacaactacgggagatcagcaaagtcacccacgagctcatggaacggcacgcggcatgcttccacacctcggtagcgccggcgctcgccgaagccgggatccgcatcgtgcgctggaacgacctcaccaccgaagagaagcagcagatgcaccgcttcttccgccgcacgatctacccggtgctcaccccgctcgccgtcgacccggcccacccgttcccctacatttccgggcgctccctcaacctcgcggtccgagtgtgcgacccgcacacgggacggcagacgttcgcgcgcatcaaagtccccccggcgctgccgcgcttcaccgaactcggcggccagcgtttcgtccccgtcgaagacgtcatctccgcgcacctgccgcaactgttcgaaggcatggagatcctggaacaccacgcgttccgggtcacccgcaacgccgacctagaagtggacgaagacgaaaccgacgacctcgtcaaatccctggaacgggaactgctgcgccgccgcttcggacccctcgtgcgcctggaggtcgaagagaccatctccgacgagatcctcaccctcctccgcgaagaactcggcgcggacgaagaagagacctaccgcgtgcccggcccgctggacctctccggcctcgcccaactccacgaactcgaccggccggaactcaaatacccgccgatggtcccggtcgagccgcgcgtcctcgcccacaacgacttcttcgaagtgctgcgccgcagcgaactcctcgtccaccacccctacgagtcgttcgccaccaccacccagcggttcatcgaactcgcggcctccgacccgaaagtgcgggcgatcaaacagaccctgtaccgcaccagcggcgactccccgatcatggaggccctcatcgaagccgcccgctccggcaaagaagtcatcgtcctcgtggagatcaaggcccgcttcgacgagcagaacaacattcgctgggcccgcaaactggagatggcgggctgccacgtggtctacggggtggtcgggttgaagacccactgcaagctcgccctcgtcgtccgggaagaagacgacggcagcctgcgccgctactgccacatcggtaccggcaactacaatccgcgcaccgcccgcatctacgaggacttcggactgttcagcgccgacccggaagtaggcgaagacctcagcgacctgttcaaccacctcaccggcttctcccgtaaaaagcactaccggcggctgctcgtggccccgcacgcgctgcgggaagccctgctgcgccagatccagcacgagatcgccaaccatgagcaagggctgccagcccgcatccgcatcaaaaccaactcgctggtcgacgaggagatcgtcgacgccctctacctcgcgtcccgggccggggtccccatcgacctgtgggtgcggggcagctgcgtcctccgccccggggtgccagggctctccgagacgatccgggtgcgcagcatcctcggccggttcctggagcactcccgcatcttcgtcttcgccaacggcggagagccacaggtgtggatcggaagcgccgacctcatgccgcgcaacctggaccgcagggtggaagtgctggtccgcatcgttgatccggggcagcgttcccggctcatgaccctcatggacctggccatggcggacagcacgtcgtcgtggcacctcaacccggacggcagttggacccggttcacccacgatgaggaaggaaacccgctcgtggacgtacagagcaccctgcgcggcgaccgctacctgagggtggtcgatgactga

SEQ ID NO: 6659 - protein, 702 aa, Thermobifida fusca YX
MVQKKTAAVAVNAAQMLTRDRDLLPPDRFMNREIGWLRFNQRVLELAEDTTLPLLERALFLSIFSSNLDEFFMVRVAGLKRRLATGVPVSSRQDPREQLREISKVTHELMERHAACFHTSVAPALAEAGIRIVRWNDLTTEEKQQMHRFFRRTIYPVLTPLAVDPAHPFPYISGRSLNLAVRVCDPHTGRQTFARIKVPPALPRFTELGGQRFVPVEDVISAHLPQLFEGMEILEHHAFRVTRNADLEVDEDETDDLVKSLERELLRRRFGPLVRLEVEETISDEILTLLREELGADEEETYRVPGPLDLSGLAQLHELDRPELKYPPMVPVEPRVLAHNDFFEVLRRSELLVHHPYESFATTTQRFIELAASDPKVRAIKQTLYRTSGDSPIMEALIEAARSGKEVIVLVEIKARFDEQNNIRWARKLEMAGCHVVYGVVGLKTHCKLALVVREEDDGSLRRYCHIGTGNYNPRTARIYEDFGLFSADPEVGEDLSDLFNHLTGFSRKKHYRRLLVAPHALREALLRQIQHEIANHEQGLPARIRIKTNSLVDEEIVDALYLASRAGVPIDLWVRGSCVLRPGVPGLSETIRVRSILGRFLEHSRIFVFANGGEPQVWIGSADLMPRNLDRRVEVLVRIVDPGQRSRLMTLMDLAMADSTSSWHLNPDGSWTRFTHDEEGNPLVDVQSTLRGDRYLRVVDD

SEQ ID NO: 6660 - DNA, 2130 bp, Prochlorococcus marinus str. NATL2A
  CDS (1)..(2130): transl_table=11
atgactagtccaaaaatcaataatgaaacttatattaatcgtgaactcagttggatagattttaacaaacgtgttttagaacttgctacagaagaggaaacgccattactagaaaaaattaaattcagttcaatttttagcaataatttagacgaattttttatggttagagttgcttcattaaaatcacaagtagaaggtggaatctcaaaaagaagccaagatggaaaatcacctgaagaacaacttatcggaattcgaaattatttagaccctattttaaagacgcagcaatataaaacaaaacaatatattgaagatgactttaaaaaagaggatatatttattcttgaatataaagaattaaatgaaagacaaaaagtttggataaataattattttaccactgcaatttttccgatactaactcccttagcagttgacccttctcatccattcccatttataagtaatcttagtttaaatttagctgcaattatcgtcgatagtgaatcagataaagagcaatttacccgcataaaaattcctggagaaagtatttccagatttataagtattccaattgaactacatgataatgaatcaacaaaatacacaggaatagcgattgaacaaatcattgcaaataatctgtccatgcttttccctggaatgagtgttaaagaatattcgttctttcgcgttacaagagatgctgatctagagcttcgagaccttgaagctgatgatttaatgagtgctctagaagaaggtttacgcaagcgccgcaaaggaggtgaagtagtcaggctcgaagtctctacaaataccccaaaagtgattcttgatcttttacaagaagggatgaatattgacaaagaaaacttatatcaaattgaggggttactagcattagatgaattaatagaattaactaatttcaatcttcctaaattaaaatttagagagcatcaaggcgttactcataattcactcaaaaatagtcaattacgagaacaagaagaattagatactagaagtaacagcaattttaaaagtatattctccattattcgccgtagtgatttactagtccatcacccatacaatctattctcaacatcagtcgaagagtttattaatcaagctgcggaagataagcaagtcatgggaatcaaaatgaccttgtatagaatttccaaagactctttaattattgatgccctaataagagctgctgagaaaggaaagcaagtcatggctctagttgaactaaaagcaagatttgatgaagataataatatccaatgggcaaaacaattagagcaagctggagtgcatgttgtctatggagtaattggactaaaaactcatacaaaaatcgctttgattataagaaaagaaaaaaacagattaagaacatactttcatattgggactggtaattataattcgaagacgtctaaaacatatacagattttggcttactgtcttgccaacctgaacttggtcaagatcttattgaactatttaattatctgactggatttgctaaacaacaatcctacagaaaattattagttgcaccggtaactcttagaagtggaatagaaaaactaataaaaagagaaatcaattatgcaaaaaatggcttaccagccaagataatagccaaaatgaactccctagttgatccagaaatcataaaattactttatatagcatcgcaggaaggagtaaaaattgaacttataattagaggaatgtgctgcctataccctcagaaaaaagggttaagcgaaaatataaaagtaacaagcattattggtagatttttagaacattcaagaatcttttggtttaataacgatggagatgcagaagtatttattggtagtgcagattggatgaggcgtaatttagatagaagagttgaagcagttacacctattgaagagaataagattaaaaaagaaattaaacatttattagattcttatttagaagcaaatcaagactcttggaacatgcaaagtgatggaagctataccaagaatcaaattttgaatgataagaaaaaatatattcaagaaaaaattattaagctatacaaaaaagaagaaaattaa

SEQ ID NO: 6661 - protein, 709 aa, Prochlorococcus marinus str. NATL2A
MTSPKINNETYINRELSWIDFNKRVLELATEEETPLLEKIKFSSIFSNNLDEFFMVRVASLKSQVEGGISKRSQDGKSPEEQLIGIRNYLDPILKTQQYKTKQYIEDDFKKEDIFILEYKELNERQKVWINNYFTTAIFPILTPLAVDPSHPFPFISNLSLNLAAIIVDSESDKEQFTRIKIPGESISRFISIPIELHDNESTKYTGIAIEQIIANNLSMLFPGMSVKEYSFFRVTRDADLELRDLEADDLMSALEEGLRKRRKGGEVVRLEVSTNTPKVILDLLQEGMNIDKENLYQIEGLLALDELIELTNFNLPKLKFREHQGVTHNSLKNSQLREQEELDTRSNSNFKSIFSIIRRSDLLVHHPYNLFSTSVEEFINQAAEDKQVMGIKMTLYRISKDSLIIDALIRAAEKGKQVMALVELKARFDEDNNIQWAKQLEQAGVHVVYGVIGLKTHTKIALIIRKEKNRLRTYFHIGTGNYNSKTSKTYTDFGLLSCQPELGQDLIELFNYLTGFAKQQSYRKLLVAPVTLRSGIEKLIKREINYAKNGLPAKIIAKMNSLVDPEIIKLLYIASQEGVKIELIIRGMCCLYPQKKGLSENIKVTSIIGRFLEHSRIFWFNNDGDAEVFIGSADWMRRNLDRRVEAVTPIEENKIKKEIKHLLDSYLEANQDSWNMQSDGSYTKNQILNDKKKYIQEKIIKLYKKEEN

SEQ ID NO: 6662 - DNA, 2085 bp, Ralstonia eutropha JMP134
  CDS (1)..(2085): transl_table=11
atgtcgacgacaccgtccagcacgctgctcaatcgcgagctgggcattctggaattcaatgcacgcgttctggcacaggctgccgacttccaggtaccgctgctggaaagactcaaattcatctgcattgtgtccagcaatctggatgagttctttgaaatccgcatggccgggttgaaggaacagatgcgggacaacgcctccggcctcacccccgacggtctttccttccagcaagcctaccagctggtcacggcgcggacgcagcaacttgttgcttcgcagtatgacatgctgcagaacgtcatttttccccttcttgagaaggaaggcatcttttttcacctgacaaccacctggaccgatgcgcagcgcgagtgggccagggatttcttcgtgcgcgagcttgggccggtgctcacaccgatcgccctggaccccgcgcaccctttcccgcgggtactcaacaagagcctgaacttcgtcgtcgaactttcaggcaaggatgcgtttggccgcgaggcggatctggccatcgtgcaggcgccgcgcgcgctaccgcgcgtcgtgaagatgcccgaaaagctgtcgggctatccgttcggtttcgtgatgctgtcgtcgttcatgcaaggtttcgtgcatgaactgttcccgtccatcgacgtccggggctgctatcagttccgcgtcacgcgcaattccgacctcttcgtttccgaagacgaaatcacggacctgcgcgaagcactgcaaggcgagctgccgacgcggcacttcggcgatacggttcggctcgaagtctcgtcagacacaccacccgcgctgtcgcgccgcctgctgctggaatcgggcctgggcgaacaggacctgtaccgcgtgtcgggtccggtgaacctggtgcggcttatgcagatcccagacatggtcgaccgcccggcgctgaagtttccgccgcatgtgccggcaccggtcaagcctttcaccagtggcgcaccgatcttcgatgtcatacgccagcaggacgtgctgctgcaccatccatacgaaagcttcaactctgtactggacttactgcaacaggcggcgaccgaccccaacgtggtggcgatcaagcagacggtgtaccggaccggcaacgaatcgctggtcatggaagcgctgatgaccgcagcgcgcaatggcaaggaagtcacagtcgtggtggaactgctcgcacgcttcgacgaagaaaccaacatcaactgggccgagcggctggagtcggccggcgcccacgtcatctacggcgtggtcggccacaagtgccacgccaagatgctgctgatcgtgcgccgcgaactggccggcgccaaggccaagcaggtcaagctccgccgctatgcccacctcggcaccggcaactaccatccgcgcacggcacgcctgtacacggacttcggccttctgaccgcgaacgaggccatctgcgaggatgtccatcacgtcttccagctgctgacgggcactgccggcacgatacggctgaaccacctgtggcagtcgccgttcagcatgcatagcaacctggtcgagcatatccgtgccgaagcgcgcaatgcgcgcgccggcaagcctgctcgcatcatcgcaaagatgaacgcgctgctggaaccgtccatcatcgatgagctctacaaagcgtcgcgctcgggcgtgaagatcgacctgatcgtgcgcggcgtctgcgcgttgatgcccggcgtgcccggcatgtcagagaacatctcggtgcgctcgatcgtcggtcgcttcctggagcatcatcgcgtctactacttcctggccggcggcgaggaagtgctctacctgtcgagcgccgactggatggaccgtaacctctaccgccgcgtggaagtcgccttcccggtcctggacaaggcgctcaaggcacgcgtcatcaaggaaagcctgcaggtgcacctgcgcgacaacgcctcggcgtggatcatgcagcccgacggcaactatgtacgcaagcagacgcgttccaagcatccacacgtcagccagaacgacctgctggcatcgttcggaaacgcataa

SEQ ID NO: 6663 - protein, 694 aa, Ralstonia eutropha JMP134
MSTTPSSTLLNRELGILEFNARVLAQAADFQVPLLERLKFICIVSSNLDEFFEIRMAGLKEQMRDNASGLTPDGLSFQQAYQLVTARTQQLVASQYDMLQNVIFPLLEKEGIFFHLTTTWTDAQREWARDFFVRELGPVLTPIALDPAHPFPRVLNKSLNFVVELSGKDAFGREADLAIVQAPRALPRVVKMPEKLSGYPFGFVMLSSFMQGFVHELFPSIDVRGCYQFRVTRNSDLFVSEDEITDLREALQGELPTRHFGDTVRLEVSSDTPPALSRRLLLESGLGEQDLYRVSGPVNLVRLMQIPDMVDRPALKFPPHVPAPVKPFTSGAPIFDVIRQQDVLLHHPYESFNSVLDLLQQAATDPNVVAIKQTVYRTGNESLVMEALMTAARNGKEVTVVVELLARFDEETNINWAERLESAGAHVIYGVVGHKCHAKMLLIVRRELAGAKAKQVKLRRYAHLGTGNYHPRTARLYTDFGLLTANEAICEDVHHVFQLLTGTAGTIRLNHLWQSPFSMHSNLVEHIRAEARNARAGKPARIIAKMNALLEPSIIDELYKASRSGVKIDLIVRGVCALMPGVPGMSENISVRSIVGRFLEHHRVYYFLAGGEEVLYLSSADWMDRNLYRRVEVAFPVLDKALKARVIKESLQVHLRDNASAWIMQPDGNYVRKQTRSKHPHVSQNDLLASFGNA

SEQ ID NO: 6664 - DNA, 2139 bp, Ralstonia eutropha JMP134
  CDS (1)..(2139): transl_table=11
atggaagacgactcgatcactccactgagcgcgctgccgccgccggccggtatcgaggccgcgcacgcgtcggacgccgcttcttcggcgtggcccaacggcaatgcatggttcgtcaaccgggaactgagtcagcttgaattcaaccggcgcgtgctgatgcaggccgccgacgcgggtacgcccttgctggaacggctgaagttcctgtgcatcttcagcagcaacctggacgagttctacgagatccgggttgcggggctgaaggagcagtgcctggtgcagtcgccggtcaccggtcccgatggcctgtccccgcagacgctctacgacctcgtgaacgcgagggtccgcgagttggtcgcgctgcagtaccagatgttcaacgatgtcctgattcccgcgctggccgccgaagacgtgtgttttctgcggcggccatcgtggaacccggcacaggcggaatggatccgtgagtatttcttcaatgaactgatgcccgtgctcacgccgatcggcctagatcccgcgcacccgttcccgcgcgtactgaacaagagcctgaatttcgcggtggagctggaaggcaaggatgcatttgggcgccgctccggcaacgccatcgtccaggcgccgcgtgcattgccgcgcgtcattgccttgccgccggacgtggccgggtgccggcatggtttcgtcttcctgtcttccatcctgcatgcacatgtcggcgagctgttcagcggcatgacggtgcgcggctgctaccagttccgagtgacgcgcaacagcgaactgttcgtcgacgatgaagaaatcaagaacctgcgtgaagcattgcagggtgaattgccacagcggcatttcggcgatgcgttgcggcttgaagtggcagacaactgcccgccggccgtgaccttgttcctgcagcagcagttcggcctgtcggcaacggaggtgttttcggttaacgggccggtcaacctggtgcgcttgctgaaagtgcccgaccaggtcgaccggcccgatctcaaatacccgcctttccggccgggcctgcccaaggcgctgcagcagcagagcgacatgttccgagcgatccgcgacggggacgtgctgctgcaccacccgttccagtcgttctcgccggtggtcgattttgtccggcaggctgcgcaggacccggatgtcgtggccatccgccagaccgtttatcgggccggccacgactcggtgctgctgtcggcgctgactgaggccgcgcgcaagggcaaggaggtcacggcggtcgtggaactgctcgcgcgctttgacgaggaagccaatatcggctgggccgcgcagctggaagaggcgggcgcgcatgttgtctatggcgtggttggctacaaggcgcacgccaaaatggtgcttgtggtccggcgcgaaggtggacgcctgcggcactatgcgcacctgggtactggcaactatcacagcatgacgacgcgcttctatacggactttggcctgatgacctgcaatcctgaaatcacccaggacatcgccaatgtcttcgcccagctgaccggactcgggcagaccagcaagatggcgcatgtctggcagtcgccattcacgctgcacaagtcgctgatgcatgcgatccgcggcgaagccgagcatgcgaaggcagggcgcaagggctggatcattgccaagatgaatgcgttgctggagccgggactgattcaggccctttatgacgcctcgcgtgacggcgtgcgcatcgacctgatcgtgcgcggtgcctgtgccttgcggcccggtgtcccgggtttgtccgagaacatcagcgtgcgctcggtcatcggccgcttcctggagcattcgcgcatcttttacttctacaacgacaaggccgaagacgtcatgctgtccagcgcggactggatgggccgcaacctgttccggcggattgaaatctgtttcccggtgctcgatgcgcgcctgaaaaagcgcgtgatcggcgaaggcctgaagccgtacctgcatgacaagcgcgatgcctgggaaatggaacccgccggcggctaccggcgcaagcgctcgcgccagggggaatcggcacagagcgtgctgctggccaccctgacctga

SEQ ID NO: 6665 - protein, 712 aa, Ralstonia eutropha JMP134
MEDDSITPLSALPPPAGIEAAHASDAASSAWPNGNAWFVNRELSQLEFNRRVLMQAADAGTPLLERLKFLCIFSSNLDEFYEIRVAGLKEQCLVQSPVTGPDGLSPQTLYDLVNARVRELVALQYQMFNDVLIPALAAEDVCFLRRPSWNPAQAEWIREYFFNELMPVLTPIGLDPAHPFPRVLNKSLNFAVELEGKDAFGRRSGNAIVQAPRALPRVIALPPDVAGCRHGFVFLSSILHAHVGELFSGMTVRGCYQFRVTRNSELFVDDEEIKNLREALQGELPQRHFGDALRLEVADNCPPAVTLFLQQQFGLSATEVFSVNGPVNLVRLLKVPDQVDRPDLKYPPFRPGLPKALQQQSDMFRAIRDGDVLLHHPFQSFSPVVDFVRQAAQDPDVVAIRQTVYRAGHDSVLLSALTEAARKGKEVTAVVELLARFDEEANIGWAAQLEEAGAHVVYGVVGYKAHAKMVLVVRREGGRLRHYAHLGTGNYHSMTTRFYTDFGLMTCNPEITQDIANVFAQLTGLGQTSKMAHVWQSPFTLHKSLMHAIRGEAEHAKAGRKGWIIAKMNALLEPGLIQALYDASRDGVRIDLIVRGACALRPGVPGLSENISVRSVIGRFLEHSRIFYFYNDKAEDVMLSSADWMGRNLFRRIEICFPVLDARLKKRVIGEGLKPYLHDKRDAWEMEPAGGYRRKRSRQGESAQSVLLATLT

SEQ ID NO: 6666 - DNA, 2187 bp, Methanosarcina barkeri str. fusaro
  CDS (1)..(2187): transl_table=11
atggagcggaacttccccattcagtgtgcagattttgatagactgattatggataatgttgaaggaactcgggtagaagtttccggtatgcctgaactaagcgatccatgtttatatacggaccgcgagtacagctggcttcagttcaatgacagggtactcgaagaggcttttgatgatcgcaatcctctgctggaaagagtcaagtttctttcgatctttggaagtaatcttgatgaatttttcatggtcagggtttcaggtgtccagaaaagaatagtggaggctatgaaagaggaccggacagatgaaaccgcacaggaacagcttcgcgtcatccgggaagagcttctcagtcagcttcctctcaatgacagttgctggaatgaaatgcttgagcctgctctcaggaaagaaggaattaaagtccttaattactttgagctttctaagaaggaaagagataagttgagaaactatttcgagagaaacattttccctttgcttactcctctgggttttgattcagggcatcctttccctcatatctccaacctcagccttaaccttgcggtattaattgatgatccggactacggggaacgttttgccagagtcaagatccctccaatgtttatgcgactaattgttgttcctgaaggagaccaggagaaaataacttccagtctggaggagttgaaaaaagggcgttttgtctggcttgaacagcttatcgctgcaaatcttgacctcctatttcccggacagcgcatccttggagcttatcctttcagaatcacacgcgatgcagaccttgggtttgatgaggatggagacaaagaccttctgaccgctgtaaaacagagagtcggcaggaactatttcgggtcggttgtcagacttgagaccgactatacaatgccagcaaaagtctcggatattcttcttaagaacctggaactttccccttctcttatgttcaggtctgcagctccgctggggctttcaaatctaatcaaacttgcaaagatcaaccgtcctgaccttaagtacgaacccttcgagccgaaaaaacattctcagctagcaaacagggagaaaatttttgcaactctgacaaaacgagatattcttctctatcatccctatgacagtttcgaatcggtaattgattttgtggaagaatctgccgacgatcctgatgttctggcaatcaaaatgactctgtacagggtggatgacaattccagaattgttcaggcccttatgaaggctgcggaccggagaaagcaggtagcggtcctggttgagcttaaagctcgtttcgatgaggaaaacaatatcggatgggcaaaagagcttgagcgcaaaggggtccatgtagcttacggcttcccggggcgtaagattcatgccaaaatgtgcctggttgtcagagctgaaaaagaaggtatcaggtattatgtgcacatgagtacaggtaactataacgcagtcacaggaaaactgtataccgatatgggatatctgacaagtgatccatgcataggtaaggacgtctctgacctttttaatgcccttaccggatattcgcgaaaagatcattatatcaaactccttgtagccccccagactctaagacatcagattttagagcgtatcaggcgtgaaatcgaccttcacgaaaagtgtggtaacggacacctgatcttcaagacgaactcccttgtggactaccagtgtatccgggaactttacagggcttctcaggctggagtgaaggtagatcttcttgtccgaggaatctgctgtctcaggccaggtattattgggctcagtgaaaatatcagggttacctcgatagttggccgttttctcgaacattccaggatatattatttcaggaatggtggaaaagaagagatccttatgggaagtgcagatctcatgccgcgcaacctggacaacagggtagaaatcctctttccggtatcttccgaatatattcctgtcttgagagatgtaatccttggcgttcacctcaaagataacgtaaaagctcgcctgctgcttcctaatggcaagactgagagaatctacccgcagcccgaagaagaagaactggattctcagttatggatgcttgaaaatagcagaagctgggatttaagctataagaaagactga

SEQ ID NO: 6667 - protein, 728 aa, Methanosarcina barkeri str. fusaro
MERNFPIQCADFDRLIMDNVEGTRVEVSGMPELSDPCLYTDREYSWLQFNDRVLEEAFDDRNPLLERVKFLSIFGSNLDEFFMVRVSGVQKRIVEAMKEDRTDETAQEQLRVIREELLSQLPLNDSCWNEMLEPALRKEGIKVLNYFELSKKERDKLRNYFERNIFPLLTPLGFDSGHPFPHISNLSLNLAVLIDDPDYGERFARVKIPPMFMRLIVVPEGDQEKITSSLEELKKGRFVWLEQLIAANLDLLFPGQRILGAYPFRITRDADLGFDEDGDKDLLTAVKQRVGRNYFGSVVRLETDYTMPAKVSDILLKNLELSPSLMFRSAAPLGLSNLIKLAKINRPDLKYEPFEPKKHSQLANREKIFATLTKRDILLYHPYDSFESVIDFVEESADDPDVLAIKMTLYRVDDNSRIVQALMKAADRRKQVAVLVELKARFDEENNIGWAKELERKGVHVAYGFPGRKIHAKMCLVVRAEKEGIRYYVHMSTGNYNAVTGKLYTDMGYLTSDPCIGKDVSDLFNALTGYSRKDHYIKLLVAPQTLRHQILERIRREIDLHEKCGNGHLIFKTNSLVDYQCIRELYRASQAGVKVDLLVRGICCLRPGIIGLSENIRVTSIVGRFLEHSRIYYFRNGGKEEILMGSADLMPRNLDNRVEILFPVSSEYIPVLRDVILGVHLKDNVKARLLLPNGKTERIYPQPEEEELDSQLWMLENSRSWDLSYKKD

SEQ ID NO: 6668 - DNA, 2067 bp, Thiobacillus denitrificans ATCC 25259
  CDS (1)..(2067): transl_table=11
atgaacctgcccagccccgacacactcatcaatcgcgaactcggcattctcggcttccagcgccgggtcctcgcccaggccgaggacccggccgtaccgctgctcgagcggctgcgctttctgtgcatcgtgtcgagcaacctcgacgagttcttcgaggtgcgcgtcgccggcctcaaggaacagatccgcgccgattcgacccgcacctcgcccgacggcctgacgccgcgccagcagttccgcgccgtggcggacgccgcgcacctgctcgtcgcgcgccaatacgcgctcttcaacgaggacctcattccggaactcgccgcgcacggcatccatttcatccgccgcacgcagtgggacgaggcccaggcggcgtggatacgcgactatttcttcaacgaactgatgccggtgctgacgccggtcggcctcgacccttcgcacccgtttccgcgcgtgctcaacaagagcctcaatttcgccgtcgaactgtcggggcgcgatgccttcggccgcaattcgggcgctgccgtcgtgcaggcgccacgctcgctgccgcgcgtgatccgtctgccgcccgagatcgccggcgccgagtacggcttcgtcttcctgtcttcgatcctgcacgcgcacgtcggcgaactcttcgccgggatgacggtgcagggctgctaccagttccgcgtcacgcgcaactcggacctcttcgtcgacgaggaggaaaacaagaacctgcgtcagtcgctgcagggcgagttgccgcagcgccacttcggcgccgccgtgcgcctcgaggtcgccgacaactgctcgccggagatggcggccttcctgctcgcccagttcgagctcgacgccgacgacctctaccaggaacgcggcccggtcaacctcgtgcggctcatgcaggtgccggactgggtcgagcggcccgacctcaagttcacgcccttcgtccccgcgctgccggcgcggctcgccaagcaggacgacatctttgcgcacatccgcaagaacgacatcctgctgcatcaccccttcgaatccttccagccggtcatcgacttcatcgaacaggccgccgccgatcccgccgtcgtcgcgatccgccagaccgtctaccgtaccggcaccgattcgcagctcatgcaggcgctgatccgcgccgcccagtccggcaaggaagtcacggtcgtcgtcgaactgatggcgcgcttcgacgaagaggccaacatcaactgggcggccaggctcgaggaaaccggcgcccacgtgatctacggcgtcgtcggccacaagacccacgccaagctcgcgctcgtcgtgcgccgcgaggaaggcaagctcaggcgctacgtccacctcggcaccggcaactaccacgcgcgcaccgcgcggctctacaccgacttcggcctgctcaccgccgacgaggcgatcagcgccgacgtcgcgagtctcttcacccagatcaccgggctcggcaaggccggcaagctcaaacgcctgtggcagtcgccgttcacgttgcacagcgaggtcatcgccgcgatcaaccgcgaggccggattcgccgccgccggcaagcccgccgcgatcgtcgccaagatgaacgcgctggtcgagccgcaggtcatcgccgcgctctacgccgcgagccaggccggcgtccggatcgatctcgtcatccgcggcgtctgcgcgctgcgcccgggcatcccgggcctctcggagacaatccgcgttcgctcggtggtcgggcgctttctcgagcactcgcggatcttctacttccgcaacggcggcgacgagcaggtctacctgtcgtcggccgactggatggaccgcaacttcttccgccgcatcgagacgagctttcccatccttaaccccaagctgaaaaagcgcgtcatcaacgaaggcctcacgccctatctgcgcgacaacgtccaggcctgggatatgcagcccgacggcagctaccgccgccgcaccaagcgcggcgcgaaagcctattgcgcgcagtgcgcactgctggcgctgctgacgacccccagctga

SEQ ID NO: 6669 - protein, 688 aa, Thiobacillus denitrificans ATCC 25259
MNLPSPDTLINRELGILGFQRRVLAQAEDPAVPLLERLRFLCIVSSNLDEFFEVRVAGLKEQIRADSTRTSPDGLTPRQQFRAVADAAHLLVARQYALFNEDLIPELAAHGIHFIRRTQWDEAQAAWIRDYFFNELMPVLTPVGLDPSHPFPRVLNKSLNFAVELSGRDAFGRNSGAAVVQAPRSLPRVIRLPPEIAGAEYGFVFLSSILHAHVGELFAGMTVQGCYQFRVTRNSDLFVDEEENKNLRQSLQGELPQRHFGAAVRLEVADNCSPEMAAFLLAQFELDADDLYQERGPVNLVRLMQVPDWVERPDLKFTPFVPALPARLAKQDDIFAHIRKNDILLHHPFESFQPVIDFIEQAAADPAVVAIRQTVYRTGTDSQLMQALIRAAQSGKEVTVVVELMARFDEEANINWAARLEETGAHVIYGVVGHKTHAKLALVVRREEGKLRRYVHLGTGNYHARTARLYTDFGLLTADEAISADVASLFTQITGLGKAGKLKRLWQSPFTLHSEVIAAINREAGFAAAGKPAAIVAKMNALVEPQVIAALYAASQAGVRIDLVIRGVCALRPGIPGLSETIRVRSVVGRFLEHSRIFYFRNGGDEQVYLSSADWMDRNFFRRIETSFPILNPKLKKRVINEGLTPYLRDNVQAWDMQPDGSYRRRTKRGAKAYCAQCALLALLTTPS

SEQ ID NO: 6670 - DNA, 2211 bp, Anabaena variabilis ATCC 29413
  CDS (1)..(2211): transl_table=11
atgcctaaatcaaaaaaaagctctaattctattaatttaaacgatcctcaatactatcttaaccgggagttaagctggttagaatttaataaccgagttttacatgaagcttgcgactcacgcacaaaactattagaaagacttaagtttttggcaatttttagttccaacttagatgagtttttcatggtgcgggtggcagctctaaaacaacaggtagaagcaaaggtcagcaaactaactcccgatggacgcacaccccaacaacaattaaatgatattcgcctgaatctcataccccaagttacaaaacagcatcaacattttgaacaaataattcgccccttgttagctagtcatggtatccatattttggattacattaacttgactcaaaaacaacgcagttatctagataactattttgaagatcaaattttcccggttctgacacccttagccgttgaccccagtcatccctttccctacatttctaatctcagcttgaatttggctgttgtggtcaagaacccagagacagaagaagaattttttgccagagtcaaagttcccagcgttctccctcggtttttgcccctaccgccagagttagcatttcaagagaacggacaagcagctaactgggtaggtgtaccattagagcaggcgatcgctcataatctagattccctctttccagggatgaatatccaagaatatcatcccttccgcattacccgcgacgctgacctaactctggaagaagatgaagctgatgacttgttattggcaatagaacaagaactgcgaaaacggcgtatgggtggttctcccgtcagaattgaaattcaatcccaaacgccagaactcatccgcaccaggttactgcaagacctagacctaacagaacaagatgtctacgaagtcgatggtctgttaggactgcgtgatttgatgtcctttatggctttgccgttgccagaactcaaagatccaccacgccaatctgtagtaccgatgcgtctacaacgattgcgagaaccaaacttaaatcctgatgttttggagttagaggaaggtaaagactttttctcggtcattcgagaaaaagatttgttcgtacaccatccctatcaatctttttctgccacagtcgtgcgctttatcacccatgcagcccacgacccaaatgtcttagcaataaagatgacattgtatcgtacttccggcgattcacccatcgttaatgctttaattgcggcggcagaaaatggtaaacaagtatcagtcctagtagaacttaaagcacgatttgatgaagaaaataatatttattgggcaaggcgattagaaagagttggtgttcacgttgtctatggcttagtaggtctgaaaactcactgcaaaacggtgatggtagtgcgacgagaaaaagaccggatgcggcgttatgtacatattggaactggcaattacaacccaaaaacagccagactatatacagatttaggattgtttagttgtcgggaagaattgggtgcggatattacagatttgtttaatttcttgactggttattcacggcaaaagtcttatcgagaattgctagttgcgcctgtaaatatgcgcgatcgctttttggagttaatacgtcgggaaatcaccaacgtacagaatggattttcaggtcgtattgttgccaaaatgaactctcttgttgatccacaaattattgcgactttgtacgaagcttcccgtgctggcgtacaaattgatttaattattcgaggcatttgctgtttgcgcccaggtattaaagatatcagtgagaatattcgcattatcagcattatcggccgctttttagaacactcccgcatctattacttccataacaatggacaagaagaaatttttattggtagtgcagattggatgagccgtaacttagatcggcgagtagaagtaattacccctataaaagacccagatattgctaaggatttgcaagaaatattgggaattttgctagctgataatcgtcaagcttgggatttacaagctgatggtagttacattcagcgccttccgggagaaaattgtccagaaactaactcacagaaaactctcatgaatatggcgttacgttcaacgggaatcgctacaaatctgatcgattcaccaaaaagtcctgcatataaagacaattaa

SEQ ID NO: 6671 - protein, 736 aa, Anabaena variabilis ATCC 29413
MPKSKKSSNSINLNDPQYYLNRELSWLEFNNRVLHEACDSRTKLLERLKFLAIFSSNLDEFFMVRVAALKQQVEAKVSKLTPDGRTPQQQLNDIRLNLIPQVTKQHQHFEQIIRPLLASHGIHILDYINLTQKQRSYLDNYFEDQIFPVLTPLAVDPSHPFPYISNLSLNLAVVVKNPETEEEFFARVKVPSVLPRFLPLPPELAFQENGQAANWVGVPLEQAIAHNLDSLFPGMNIQEYHPFRITRDADLTLEEDEADDLLLAIEQELRKRRMGGSPVRIEIQSQTPELIRTRLLQDLDLTEQDVYEVDGLLGLRDLMSFMALPLPELKDPPRQSVVPMRLQRLREPNLNPDVLELEEGKDFFSVIREKDLFVHHPYQSFSATVVRFITHAAHDPNVLAIKMTLYRTSGDSPIVNALIAAAENGKQVSVLVELKARFDEENNIYWARRLERVGVHVVYGLVGLKTHCKTVMVVRREKDRMRRYVHIGTGNYNPKTARLYTDLGLFSCREELGADITDLFNFLTGYSRQKSYRELLVAPVNMRDRFLELIRREITNVQNGFSGRIVAKMNSLVDPQIIATLYEASRAGVQIDLIIRGICCLRPGIKDISENIRIISIIGRFLEHSRIYYFHNNGQEEIFIGSADWMSRNLDRRVEVITPIKDPDIAKDLQEILGILLADNRQAWDLQADGSYIQRLPGENCPETNSQKTLMNMALRSTGIATNLIDSPKSPAYKDN

SEQ ID NO: 6672 - DNA, 2226 bp, Pseudomonas fluorescens PfO-1
  CDS (1)..(2226): transl_table=11
atgaataccgaaggactcactgaagttgccgtaaaagacgctcaacccgtggtcgagcagattaccgaaaccccgccggaactcgagcctgcgccacccgcgcaggcggcagagcccgtcgtggcggttccggcgatcgcgattcccggtctggatgacagcagcctgtacatccaccgggaattgtcgcaactgcagttcaacatccgcgtgctggaacaggcgctggacgagtcctacccgttgctggagcggctgaagttcctgctgatcttctccagcaacctcgacgaattctttgaaatccgcgtcgccggcctcaagaaacaaatcaccttcgcccgtgaacaggccggcgccgatggcctgcaaccgcatcaggccctggcccgcatcagcgagctggtgcacggtcatgtagaccgccagtacgcgatcctcaacgacatcctgctgccggagctggaaaagcatcaggtgcgcttcatccgtcgtcgccactggacgaccaagatcaaaacctgggtgcgtcgctactttcgcgacgagatcgcgccgatcatcaccccgatcggtctcgacccgacgcacccgttcccgttgctggtgaacaagagcctgaacttcatcgtcgagctcgagggcatcgacgccttcggtcgcgattccggtctggcgatcatcccggcaccgcgtctgctgccgcggatcatcaaggtgccggaagaagtcggcggccctggcgacaactatgtgttcctgtcgtcgatgatccacgcccacgccgatgacctgttccagggcatgaaggtcaagggctgctaccagttccgcctgacccgaaacgctgacctggcgcttgattccgaagacgtcgaagacctggcgcgcgccctgcgtggcgagctgttctcccgccgttacggtgatgcggtgcgtctggaagtcgccgacacctgcccgaaacacctgtcggactacctgctcaagcagttcaacctgagcgagaccgagctgtatcaggtcaacggtccggtgaacctgacgcgtctgttcagcatcaccggtctggacagccatccggagctgcaatacacgccgttcacgccgcagatcccgaaactgctgcaaaacagcgagaacattttcagcgtgatcagcaagcaggacatcctgctgctgcacccgttcgagtcgttcaccccggtggtcgacctgctgcgccaggccgccaaggacccgcacgttctggccgtgcgccagaccctgtatcgctccggcgccaactcggaaattgtcgatgcgctggtggacgccgcgcgtaacggcaaggaagtgacggcggtcatcgaactgcgtgcgcgtttcgacgaagaatccaacctgcaactggccagccgtctgcaagcggccggggcggtggtgatctacggcgtggtcggcttcaagacccacgccaagatgatgctgatcctgcgccgcgagcagggcgagatcgtgcgttacgcgcacctcggcaccggtaactaccacgccggcaacgcccgcctgtacaccgactacagcctgctgacttccgacgacgccttgtgcgaagacgtcggcaaactgttcagccaattgatcggcatgggcaagacgctgcggatgaagaagctgctgcatgcgccgttcaccctgaagaagggcatgctcgacatgatcacccgcgagacgcaattcgcgctcgacggcaaaccggcgcacatcatcgccaagttcaactcgctgaccgatccgaagatcatccgcgcgctgtacaaggccagccagtccggcgtgcgcatcgatctggtggtgcgcggcatgtgctgtctgcgtccgggcatcgccggggtttcgcacaacattcacgtgcgctcgatcatcggccgcttccttgagcacacccgagtgttctacttcctcaacggtggcgaggagcagatgttcctgtccagcgccgactggatggagcgcaacctcgacaagcgcgtcgagacctgcttcccggtggaaggcaagaagctgctgacccgggtcaagaaagagctggagctgtacctgaccgacaacacccacagctggagcctgcaatcggacggccgctacattcgcaacacgccaaccggcaaccagaacccgcgcagtgcgcaggcgacgttgctggagcgattgggcagcccgattctgccggtgagcagctga

SEQ ID NO: 6673 - protein, 741 aa, Pseudomonas fluorescens PfO-1
MNTEGLTEVAVKDAQPVVEQITETPPELEPAPPAQAAEPVVAVPAIAIPGLDDSSLYIHRELSQLQFNIRVLEQALDESYPLLERLKFLLIFSSNLDEFFEIRVAGLKKQITFAREQAGADGLQPHQALARISELVHGHVDRQYAILNDILLPELEKHQVRFIRRRHWTTKIKTWVRRYFRDEIAPIITPIGLDPTHPFPLLVNKSLNFIVELEGIDAFGRDSGLAIIPAPRLLPRIIKVPEEVGGPGDNYVFLSSMIHAHADDLFQGMKVKGCYQFRLTRNADLALDSEDVEDLARALRGELFSRRYGDAVRLEVADTCPKHLSDYLLKQFNLSETELYQVNGPVNLTRLFSITGLDSHPELQYTPFTPQIPKLLQNSENIFSVISKQDILLLHPFESFTPVVDLLRQAAKDPHVLAVRQTLYRSGANSEIVDALVDAARNGKEVTAVIELRARFDEESNLQLASRLQAAGAVVIYGVVGFKTHAKMMLILRREQGEIVRYAHLGTGNYHAGNARLYTDYSLLTSDDALCEDVGKLFSQLIGMGKTLRMKKLLHAPFTLKKGMLDMITRETQFALDGKPAHIIAKFNSLTDPKIIRALYKASQSGVRIDLVVRGMCCLRPGIAGVSHNIHVRSIIGRFLEHTRVFYFLNGGEEQMFLSSADWMERNLDKRVETCFPVEGKKLLTRVKKELELYLTDNTHSWSLQSDGRYIRNTPTGNQNPRSAQATLLERLGSPILPVSS

SEQ ID NO: 6674 - DNA, 2187 bp, Rhodobacter sphaeroides 2.4.1
  CDS (1)..(2187): transl_table=11
atgacaccggcagatttcctgagagcccccttccccgatcccgtcaccctgcccgaggaggaagtctcgggaccgaggcgcttcttcaaccgcgagctcagctggctcgccttcaactggcgcgtcttggacgaggccggcaatccgcgcgttcccctgctcgaacgtctgcgcttcctgtcgatctcggccaccaacctcgacgaattctatacggtgcgcgtcgcgggcctgcgggcgctcgtccgggcgggcaacctcatgctctccgaggacgggcggacgcctgccgagcagcttcagctcatcaacgccgatgcgcggcggctgatgcagacccagcagacggtgtggaacaagctgcgccgcgagatggaggagcaggggatctcgatcctgacccgctcgaagctcaccgcccgcgacctgcgccacctcgaggatcatttcctctcgaaggtctttccggtgctctcgccgctggccatcgacccggcccacccgttccccttcatcccgaacacgggcttcacgctcgggctcgaactcgagcgcatgtcggaccgccgcccgcttcaggccctgctgccgatcccgcagcagatcgcccgcttcatcgagctgccggcgaagcccggcgagcaccgtttcctgccgctcgaggaactgcttcttttgcatctggggatgctctttcccggctacagcgaacgcgggcactgcgccttccgcgtgctgcgcgacagcgacctcgaggtcgaggacgaggccgaggatctggtgcgcgaattcgagaccgcgctgaagcggcggcgccggggcgaggtcatccgcatgaagatctcggccggtgcgccgaaggagctgcatgccctcatcatggaagaactcggcgtcacctcggacgaggtgatcgaggtgcgcggcctgatcggcgtggccgacctgaaggagctggtgatctcgtcgcgcgccgatctgctctggcccgccttcacgccgcgcgtgcccgagcggctggccgaccacgagggcgacatgttctcggcgatccggcagaaggacatcctgctgcatcacccctacgagaccttcgatctcgtgatccgcttcctccagcaggcggcgagcgatccgaacgtgctggcgatcaagcagacgctctaccgcaccagctgggacagccccatcgtctcggcgctctgcgaggcggccgaggcgggcaagtcggtcacggcgctggtggagctgaaggcccgcttcgacgaagccgccaacatccgccagagccgacgtctggaacgggcgggcgcgcatgtggtctatggcttcatgcacctgaagacccacgccaagatctcgaccgtggtccggcgcgagggcgacaatctcgtgacctacacccactacgggacgggcaactaccacccgatcaccgcgcgggtctacacggacctctcgttcttcacctgcgatccggccctcgggcgggatgcgaccaagatcttcaactatctctcgggctacgttcagcctgcggggctcgagaatgtggcgatcgcgcccatcaccctgcgcggccgcctgcacgagctgatcgcggccgaggccgaccatgcccgcgccggccgcccggccgagatctggctcaaggtcaattcgatcatcgaccccgagctgatcgacgcgctctatgccgccagtcaggccggcgtgaagatcagcctgatcgtgcgcgggatctgcgggctgcgccccggcgtgaagggcctgtcggacaatatccgggtgaagtcggtggtcggacgcttcctcgagcacagccgcatcgtctgcttcggcaacggatcgggcctgccctcgaagaaggcgcgggtgttcttctcctcggccgactggatgggccgcaacatggaccgccgggtcgagacgctggtcgaggcgctgaaccccacggtgaaggcgcagatcgtggggcagatcatggccgccaacctcgccgacgagtcgcagagctggctgctccagccgaacggccgctatgtccgtccgccggtcgcggccgacgaacctctcttctcctgccacgccttcttcatggagaacccctcgctgtccggccgcggcacggccggcgccaaggacgtgcagcgcctcgccacgttgcgcgacgaggggccgctgtga

SEQ ID NO: 6675 - protein, 728 aa, Rhodobacter sphaeroides 2.4.1
MTPADFLRAPFPDPVTLPEEEVSGPRRFFNRELSWLAFNWRVLDEAGNPRVPLLERLRFLSISATNLDEFYTVRVAGLRALVRAGNLMLSEDGRTPAEQLQLINADARRLMQTQQTVWNKLRREMEEQGISILTRSKLTARDLRHLEDHFLSKVFPVLSPLAIDPAHPFPFIPNTGFTLGLELERMSDRRPLQALLPIPQQIARFIELPAKPGEHRFLPLEELLLLHLGMLFPGYSERGHCAFRVLRDSDLEVEDEAEDLVREFETALKRRRRGEVIRMKISAGAPKELHALIMEELGVTSDEVIEVRGLIGVADLKELVISSRADLLWPAFTPRVPERLADHEGDMFSAIRQKDILLHHPYETFDLVIRFLQQAASDPNVLAIKQTLYRTSWDSPIVSALCEAAEAGKSVTALVELKARFDEAANIRQSRRLERAGAHVVYGFMHLKTHAKISTVVRREGDNLVTYTHYGTGNYHPITARVYTDLSFFTCDPALGRDATKIFNYLSGYVQPAGLENVAIAPITLRGRLHELIAAEADHARAGRPAEIWLKVNSIIDPELIDALYAASQAGVKISLIVRGICGLRPGVKGLSDNIRVKSVVGRFLEHSRIVCFGNGSGLPSKKARVFFSSADWMGRNMDRRVETLVEALNPTVKAQIVGQIMAANLADESQSWLLQPNGRYVRPPVAADEPLFSCHAFFMENPSLSGRGTAGAKDVQRLATLRDEGPL

SEQ ID NO: 6676 - DNA, 2139 bp, Synechococcus sp. CC9605
  CDS (1)..(2139): transl_table=11
atgtgcgcagcagccttagccccggagcattacatcaaccgggagctgagctggatcgccttcaacgaaagggtgctggcccaggccctggattcgcgcacacctctgctcgatcaagccaagttcagcgccatcttcagcaacaacctcgacgaattcttcatggttcgcgtggcgtcactgaagtctcaggtggaggcgggcgtcagcaagccaagtgaggatggcaaatcgcccttggaacaactgctggcgatccgggaacggctgattcccctgctgcgcgggcaacaggtgcattaccgccagcacctgaggccgaagctgctggaacacaaggttgagctgctcgattacaaacagctgaacgacgaccaacgccagtgggttgacgacaccttccagaactcggtgtttccggtgctcacacccctggctgtggaccccgcccatccgtttcccttcgtcagcaacctgagcctcaacgttgcggccgtggttgttgatccggaaacagggcaaaggcaatttgcccgggtcaaagttccccagaaaaatctgcctcgcttcatcgccatcccatcgaatctttgcggccaggagcacaaacccgttcacaccgccatcgccctcgagcaggtgatcgccttcaacctgaaagagctgttccctggcatgacgattgaggggcactacttcttccgcgtgacgcgggatgcggatctggagctgagggatctggaagccgatgacctgatgctggcccttgaacagggactgcgaaagcgacgcatgggcggtgaggtggtgcgcctcgaggtgcccaacgaaatgcctcaggacgtggtggaaatgctgatgacaggactcaacgttgaagaggaagacctctacgtgatcgatggccccctgggcctggacgacctactcagcctgaccgcactaccgctgccgaaactcaaggcccaaagccacggaggccagacaccgacggtgcttgcccgcagtcagcaacacctgctggacgagggagcgatcaagccggatgagttcagatcgatcttctcggtgattcgcagtcaggacattcttctgcaccatccctatgacctcttctcgacaaccgtcgaagagttcatcaaccaggcagcggacgatccccaggtgatgggcatcaagatgacgctctaccgcacctccaaagactcgccgatcattgctgcactgatccgtgccgccgaaaacggcaagcaggtgatggctttggtggaattgaaagcacgatttgacgaagacaacaacatccaatgggcccggcatctggaacagtccggagtgcatgtggtctacggggtgctggggctaaaaacccacaccaagattgttctggtggtgcgcaaggagaaggataagcttcagagctacgtgcacatcggcacgggaaactacaactccaaaacctccaagctctacaccgacctgggcctgctcaccgccaaccaggaactgggtcaagacctggtggaactgttcaattacctcaccggtttttccaagcagcaaagttttcgtcgcctgctcgtggcccccgtaaccctgcggaaagggatggagctgttaatccgccgcgaaattgaacatgctcagcagggccaagaggccgtgatccgagccaagatgaactccctggtggacccaacaatcattgcgcttctttatgaagcgtcccaagccggagtgtcgatcgaattgatcattcgcggcatgtgcagcctctatcccggttgtgaaggactgagtgaaaacattcgggtgatcagcatcatcggcccgttcctggaacactcgagaatcttttcgttcgccaacggcggatcaccggaggtgtacatcggcagtgccgactggatgagccgcaacctcgaccgccgcattgaagcggtcacaccgatcgaagaccccgagcatcgccagaaactggaacgcctgctgcagctgtacttgaatgacaaccaggctgcctgggacatgctgagcgacggcacatttgtgcaacgcaaactcgagaacgacgcctcgaaatgcaattctcagattcaattggtcaaggaatggagcgacggcatccaatccttgtaa

SEQ ID NO: 6677 - protein, 712 aa, Synechococcus sp. CC9605
MCAAALAPEHYINRELSWIAFNERVLAQALDSRTPLLDQAKFSAIFSNNLDEFFMVRVASLKSQVEAGVSKPSEDGKSPLEQLLAIRERLIPLLRGQQVHYRQHLRPKLLEHKVELLDYKQLNDDQRQWVDDTFQNSVFPVLTPLAVDPAHPFPFVSNLSLNVAAVVVDPETGQRQFARVKVPQKNLPRFIAIPSNLCGQEHKPVHTAIALEQVIAFNLKELFPGMTIEGHYFFRVTRDADLELRDLEADDLMLALEQGLRKRRMGGEVVRLEVPNEMPQDVVEMLMTGLNVEEEDLYVIDGPLGLDDLLSLTALPLPKLKAQSHGGQTPTVLARSQQHLLDEGAIKPDEFRSIFSVIRSQDILLHHPYDLFSTTVEEFINQAADDPQVMGIKMTLYRTSKDSPIIAALIRAAENGKQVMALVELKARFDEDNNIQWARHLEQSGVHVVYGVLGLKTHTKIVLVVRKEKDKLQSYVHIGTGNYNSKTSKLYTDLGLLTANQELGQDLVELFNYLTGFSKQQSFRRLLVAPVTLRKGMELLIRREIEHAQQGQEAVIRAKMNSLVDPTIIALLYEASQAGVSIELIIRGMCSLYPGCEGLSENIRVISIIGPFLEHSRIFSFANGGSPEVYIGSADWMSRNLDRRIEAVTPIEDPEHRQKLERLLQLYLNDNQAAWDMLSDGTFVQRKLENDASKCNSQIQLVKEWSDGIQSL

SEQ ID NO: 6678 - DNA, 2187 bp, Geobacter metallireducens GS-15
  CDS (1)..(2187): transl_table=11
atggcccgcaagccctcctccccgaagagaaccgcccccgaaacagcggcgggcggggagtggtcggtctgcgacctggccgcccccgagctctacctgaaccgggagctcacctggctcgcgttcaaccgccgggtcctccacgaggccgaggacgagcggacgccgcttctggagcgggtcaagtttgccgccatcgtcagcagcaacctggacgagtttttcatgaagcggatcggcggcctcaagcagcaggtgggggcgggcatccagaacctgaccgtggacggccgcaccccccggcagcagatcgaggagtgctacgccgtggtgcgggaactgggggagcggaagcggctccttttcggcgagctcctgacgctcctgcggtcggccggcatccagatcctcggctacagcgagatcccggcccgggagcggaaagggctccgcgactattacatccggaacatctttcccctggtcaccccccagtccatcgaccccgcccaccccttccccttcatctccaacctctccctgaacctgctggtgacgctccgctacccccgggagcgggagacctccctggcccgggtcaaggtgccggtggggaccgggattccccgtttcctccgggtgggtgacaaggaccggttcgtccccctggaggaggtgatgcagcacaacctggacctcctcttcccggagatggaggtggtggcctgcgagttcttccgggtcacccgcaacgccaataccgagcggaacgaggagcaggccgacgacctcctctccatgatcgagtcggaactccaagaccggcgcttcgctcccatcgtgcggctggaggttgtggccggcatgggggcggtgcaccgggggatgctcgccgcggagctggaactgaacgaggccgccgacgtcttcgaggtggaggggatgctggccctgcgggacctgttcgagatcgccggcctcggctacccggagctccacgacccgtcccaccacccggtcgaccacccccgcctcatgaccgaccggaacatctttcacgtgatccgggacgccggcgccattctcctccagcacccctacgactccttcgccacctcggtggagcgcttcctcttcgaggcaagcgaggatcccaaggtgcgggccatcaagatgaccctctaccggaccgcctccgacagccggatcatcgattgcctggtgaacgcggcgagtaacggtaagcaggtggcggtggcggtggagttgaaggcccgcttcgacgaggcggccaacattcggcttgcggagcggatggaggaggcggggatccacgtcacctacggcgtggtggggctcaagacccactgcaaggtgatcctcgtggtgcggcaggactacgatgggctgcggcgctacgtccacatcggcaccggcaactaccatcccggcaccgcccggctctactccgacctggggctcctcaccagcgacgaggcgattggccaggacgccaccgagcttttcaactacctcaccaccggctacaccccccggcgcaactatcagaaactgctgccggcgccgaagcacctgaagcgggcgctcctggccaggatcgagcgggaggcggaactccactcggagaagacgccggggctcatccagttcaaaatgaacgccctggaagacgccgacatcgtggcagccctctaccgttcggcccggaagggggtgcggatcgacctcctcatccgggacagctgccgcctgcgccccggcgttccggggctctcggagacggtgcgggtggtgagcgtggtgggacggttcctggagcactcacggatctactacttccgcaacaatggtgacgaggagtactacatcggttccgccgacgccatgaagcggaacctggaataccgggtcgaggtcctcgcaccggtggaggccccggacctgcggaaggaactccgagccatgctcgacgcgcaactcggcgaccggcggagcgcctgggagatgcagcccgacggcagctccgtgcagcggatgccgggggaaggggacgacccgaggggaagccacgagatcctcatcgccctggccgaaaaacgccgcaaggccggtgcgcgcctcaaaaagaaaaaggccaggggagttgtccggcgccctgtccggtaa

SEQ ID NO: 6679 - protein, 728 aa, Geobacter metallireducens GS-15
MARKPSSPKRTAPETAAGGEWSVCDLAAPELYLNRELTWLAFNRRVLHEAEDERTPLLERVKFAAIVSSNLDEFFMKRIGGLKQQVGAGIQNLTVDGRTPRQQIEECYAVVRELGERKRLLFGELLTLLRSAGIQILGYSEIPARERKGLRDYYIRNIFPLVTPQSIDPAHPFPFISNLSLNLLVTLRYPRERETSLARVKVPVGTGIPRFLRVGDKDRFVPLEEVMQHNLDLLFPEMEVVACEFFRVTRNANTERNEEQADDLLSMIESELQDRRFAPIVRLEVVAGMGAVHRGMLAAELELNEAADVFEVEGMLALRDLFEIAGLGYPELHDPSHHPVDHPRLMTDRNIFHVIRDAGAILLQHPYDSFATSVERFLFEASEDPKVRAIKMTLYRTASDSRIIDCLVNAASNGKQVAVAVELKARFDEAANIRLAERMEEAGIHVTYGVVGLKTHCKVILVVRQDYDGLRRYVHIGTGNYHPGTARLYSDLGLLTSDEAIGQDATELFNYLTTGYTPRRNYQKLLPAPKHLKRALLARIEREAELHSEKTPGLIQFKMNALEDADIVAALYRSARKGVRIDLLIRDSCRLRPGVPGLSETVRVVSVVGRFLEHSRIYYFRNNGDEEYYIGSADAMKRNLEYRVEVLAPVEAPDLRKELRAMLDAQLGDRRSAWEMQPDGSSVQRMPGEGDDPRGSHEILIALAEKRRKAGARLKKKKARGVVRRPVR

SEQ ID NO: 6680 - DNA, 2079 bp, Prochlorococcus marinus str. MIT 9312
  CDS (1)..(2079): transl_table=11
atgaaaagacaggctgatgtttttattaatagagaattaagttggattaagttcaataaaagagtactcctaactggaatggaaaaggaatacaaaatcctagataaagtaaaattttgttcaatttttagtaataatctagatgaattttttatggtaagggtagcttcattaaaagctcaagttgaagcaggtattacaaaaaaaagtattgatggacttacccctaaagagcaattaacaaaaatcaataaagaagtaaagaatttaactgccctacaagaaaactacataaataatgaattaaataatgaattaaaagaaaaaggtgtaattttaaaaaaatataaggacctaaatgaaaatcaaagaaattggtgcgataactacttttcttcatctattttccctttattaactccattagttgttgatccagcacatccgtttccttttataagtaatttaagtctaaatttggcagctctaataagggatggggaagattctaaaaatcagtttgtcagagtgaaaataccaacaaaaaatatcaatagatttatacaaattccaaatgaaatgattgaatatgatgatgaaagtacatattttttcataagtgttgaagatttaattgggaataatataaatactttatttaacggaatggaatgtataaattactctttttttagagtgacaagggatgcagatttagaattaaaagaacttgaagctgatgatcttcttttagcagttgaacaaagtttgcaaaagagaagattaggtggagacgtagttagattagaagttgaatcggatatgccagaaaatattctgaaattactcattgaaagtatctcaatacaaaaagaatatatttacttttgcaaaagttttttaggacttgacgatttaaatcagcttacaaaaattaatagagatgatttaaaagaaaatctactaattgggaaaactcacccaaaattaaacaatttagatttaccttccaacaaaaaccgcaattcgatttttaatatacttagaaaaaaaaatattctgcttcatcatccatacgacttatttaaaacttcagttgaagagtttataaacaaagcagctgatgatccacttgtaatggctataaaaattactttatatcgagtttccaaggattcgcctatcattgcagctttaatgagagctgcagagaatggaaaagaagtaatgactcttgttgaactaaaagcaagatttgatgaagacaataatattcaatgggcaaaacagcttgaacaagctggaattcatgttgtatatggaatcataggatttaaaacacatacaaaaatagctttaatagtaagaaaagaaaaaggaagattaaggaattatttccatattgggacgggaaattataactctaatacttcaaagttttatacagatttaggattactttcaactgatcctgatattgcatcagatttacttgagttatttaactacttatcaggtttttctaaacaaaaaagttatcaaaagttattagtttctccctcatcgatgagagagaaatttatatttctgataaagagagaaattaaaaatgcagaggaaggcaaaaaagccgaaataattgcaaaaatgaattctttagtcgacccagaaataattaaacttctttatttagcttcagactcaggtgtaaaaattagtcttatcattagaggtatttgttgcttgtatccccaaagaaaaaatttaagtgaaaatattaaagtcataagcattattggccattttcttgaacactcaagaattttttggttttgtaataacggtgataatgaggtttttattgggagtgcagattggatgagaagaaatcttgatagaagaatagaagctgttactccgatagaggattatgaattgaaatctaaaatatactcgcttttgcaaacctacattaaagatgattacttttcttggataatgaaggaagatggttcttattctaaatatgaattagattcatcggataatcgttcgcaaattgacctcatagaaaaataa

SEQ ID NO: 6681 - protein, 692 aa, Prochlorococcus marinus str. MIT 9312
MKRQADVFINRELSWIKFNKRVLLTGMEKEYKILDKVKFCSIFSNNLDEFFMVRVASLKAQVEAGITKKSIDGLTPKEQLTKINKEVKNLTALQENYINNELNNELKEKGVILKKYKDLNENQRNWCDNYFSSSIFPLLTPLVVDPAHPFPFISNLSLNLAALIRDGEDSKNQFVRVKIPTKNINRFIQIPNEMIEYDDESTYFFISVEDLIGNNINTLFNGMECINYSFFRVTRDADLELKELEADDLLLAVEQSLQKRRLGGDVVRLEVESDMPENILKLLIESISIQKEYIYFCKSFLGLDDLNQLTKINRDDLKENLLIGKTHPKLNNLDLPSNKNRNSIFNILRKKNILLHHPYDLFKTSVEEFINKAADDPLVMAIKITLYRVSKDSPIIAALMRAAENGKEVMTLVELKARFDEDNNIQWAKQLEQAGIHVVYGIIGFKTHTKIALIVRKEKGRLRNYFHIGTGNYNSNTSKFYTDLGLLSTDPDIASDLLELFNYLSGFSKQKSYQKLLVSPSSMREKFIFLIKREIKNAEEGKKAEIIAKMNSLVDPEIIKLLYLASDSGVKISLIIRGICCLYPQRKNLSENIKVISIIGHFLEHSRIFWFCNNGDNEVFIGSADWMRRNLDRRIEAVTPIEDYELKSKIYSLLQTYIKDDYFSWIMKEDGSYSKYELDSSDNRSQIDLIEK

SEQ ID NO: 6682 - DNA, 2196 bp, Synechococcus elongatus PCC 7942
  CDS (1)..(2196): transl_table=11
atgcatcccttgctaggatcagcggctgattctgtgatgagattggccatgaccgatgctgcgattgaactgaatcggccagaaaatttctttaatcgtgaaattagctggctggctttcaatcagcgcgttctacaccaagccctcgacccccgcacgcctctgctggaacgcctcaagttcatggggattttcagcaataacctcgatgaatacttcatggtgcgcgtggcgagtctcttgcagcaaattgaggctggcgtcagcaagcgatcgcccgatggcctcaccccagcggagcaactcgagcaaattcgagcctgccttggccccctggtggagcaacaacacagccatttctaccgagagctacgccccctgctggctgaaacgggcatccatctgctcaactacaacgacctcaaccgcacccaacagcgatacctcgatcagtatttcgcagcgcagatttttccagtcttgacaccgctcgcggttgatccggcgcaccccttcccccacatttccaatctcagtctcaacttggcggtcttgatccaagacgacagtgttggcgaggagcagtttgcgcggattaaggtgccgaacattctgccgcgctttattgaactgccggccaaaacccgccggcgatcgcagcaaccgattgtctggatgggcgtaccgatcgaacaggtaatcgcccacaacctcagcacgcttttcccaggcatgagcgtgatcgattggtttgtcttccgtgtcacccgcgatgctgacctcgatgtcaaggaagacgaagctgacgatctgctgttggcgatcgaacaagaattgcgtaagcgacgcctgggggcaggctcagtcgtccgcctagaaattgaggcaggctctccagcctccatcctcgaaatcctgatgaacggcatggacctcgatccgcaggatgtctatgccctacccggtctcctgagccttgaagacctgatgtcgctgacgtccttgccgttgcccgaactgaaggatcagccttggacgcaagtggttcccaagcgattgcggcgggtacaaatgcccgttggcgaagacctgcagcgttctaagcccagtgaggaaagcgaagacatctttacggtgattcgccagcgcgacctgttgatgcatcacccctacgattcttttgcggcttcagtcgaacagttcgttgcccaagccgcaacagatccccacgtgctggctatcaaaatgacgctctatcgcacctcgggagattcgccgattgtgcagagcctgatgcaggctgcggagcatggcaagcaggtgctcgctcttgtagaactcaaagctcgctttgatgaagagaacaacatcacctgggcgcggcgccttgagaaagcaggtgtgcatgttgtctatggcttagtgggtctcaagattcacaccaaagtggtgttggtggttcgccaagagcgcaaccaaatccgtcgctatgttcatatcggcaccggcaactacaactccaaaacagcccgcatctacactgacttggggctcttgagctgccgtgaggatttgggcgctgatatttctgaactcttcaactacctgacgggtttctcgaagcaacgggactatcgcaagctgctgattgcgccggtcagcttgcgggagcaaatgatcggcctgatcgatcgcgaaattcagcatgcgatcgcagggcgtccggcagcgattcgcgccaagatgaactcgctagttgatcctaaaatcatcctcaagctctatgaggcctcacaagctggcgtcgagattgatttgattgtgcggggggtctgctgcctacgaccgggtgtgccggggttgagcgatcgcattcgggtgattagtatcattggccgcttcctcgaacactcgcgcatcttcagcttccacaacaacggccaggaagagtttttcatcggcagtgcggactggatgacccgtaacctcgatcgccgcgtagaagcgattacccctattgaagatgaagcgatcgcagcagaactgcgggcaatcctggatatttccttagccgacgaccgactggcctgggatttactgcccagtggtgagtaccaactccggcaaccggtggatcccgagactccccatagttcgcagcagcaattcatgaatcgcgcggctaccacccgctag

SEQ ID NO: 6683 - protein, 731 aa, Synechococcus elongatus PCC 7942
MHPLLGSAADSVMRLAMTDAAIELNRPENFFNREISWLAFNQRVLHQALDPRTPLLERLKFMGIFSNNLDEYFMVRVASLLQQIEAGVSKRSPDGLTPAEQLEQIRACLGPLVEQQHSHFYRELRPLLAETGIHLLNYNDLNRTQQRYLDQYFAAQIFPVLTPLAVDPAHPFPHISNLSLNLAVLIQDDSVGEEQFARIKVPNILPRFIELPAKTRRRSQQPIVWMGVPIEQVIAHNLSTLFPGMSVIDWFVFRVTRDADLDVKEDEADDLLLAIEQELRKRRLGAGSVVRLEIEAGSPASILEILMNGMDLDPQDVYALPGLLSLEDLMSLTSLPLPELKDQPWTQVVPKRLRRVQMPVGEDLQRSKPSEESEDIFTVIRQRDLLMHHPYDSFAASVEQFVAQAATDPHVLAIKMTLYRTSGDSPIVQSLMQAAEHGKQVLALVELKARFDEENNITWARRLEKAGVHVVYGLVGLKIHTKVVLVVRQERNQIRRYVHIGTGNYNSKTARIYTDLGLLSCREDLGADISELFNYLTGFSKQRDYRKLLIAPVSLREQMIGLIDREIQHAIAGRPAAIRAKMNSLVDPKIILKLYEASQAGVEIDLIVRGVCCLRPGVPGLSDRIRVISIIGRFLEHSRIFSFHNNGQEEFFIGSADWMTRNLDRRVEAITPIEDEAIAAELRAILDISLADDRLAWDLLPSGEYQLRQPVDPETPHSSQQQFMNRAATTR

SEQ ID NO: 6684 - DNA, 2265 bp, Rhodospirillum rubrum ATCC 11170
  CDS (1)..(2265): transl_table=11
atgacctccgctccgccgccccccgccgtcgaagccatccagggtgttgccgcccaggatgtcgccccgcggacccgtcagggggtcaaaccgacggcggcggcctctggcgatcaccccgaggcgccggtgatcaccatggacatgcccgatcgcttcatcaatcgcgaggtctcgtggctggccttcaatttccgggtgatggaggaggcgcgcaatacccgccatcccttgatggagcggctgcgcttcctgtcgatttccggctccaacctcgacgagttctatatggtgcgcgtcgccgggctgaaggggcaggtcgaggccggggtgaacaaggtcagccaggatgggctgaccccggcccagcagctgaccgagatcaatcaggccgcccgccagcttctggaagagcagcaggtggcctgggaaatcctccatgacgaactggccgcccagggcatcaccgtggttaccccgggccagttgtccaaggccgaccgggtgtggctcgatacctatttcatggggcaggtcttcccggttctgacgccgctggccatcgatccggcccatccctttccgttcattcccaatctgggccatgccctggtgctgcagctccatcgtcccaacgacgacaccagcctgcgcgccctggtgcccttgcccaatcacgtcagccgcttcacccgcctgccttcggaagaggggcagggggcgcgctatattttcctggaagacatggtcgggctgcatctcgaccggctgttccccggcttcaaggtcagccagggcgggcacttccgggtcattcgcgattccgaaatggaaatcgacgaagaggccgaggatctggtgatgagcttcgaatcggcgctcaagcgccggcggcgcggccattgcatccgcctgaccctcaacgccaatatgcccgaggagctggtcaagctgatctgcgacgagatggacgtcgccgaggaggatatcttcaaggtgcgcgggccgatcggtcaggccgacctcaagcagctgatctccgatgaccgccccgatctgcagttcaccccctataccgcccgcttccccgagcgcatccgcgacttcggcggcgattgcttcgccgcgatccgcaagaaggacatcatcgtccaccacccctatgaatccttcgatgtggtggtgcagttcctgcgtcaggcggcgcgcgatcccaatgtgctgtcgatcaagcagacgctctatcgcacgtcgaataattcctcgatcgtcgcggccctggtcgaggcggccgaggccgggaagtcggtcaccgcgatggtcgagttgaaggcccgcttcgatgaggaggccaatatccgctgggcccgcgatctggaacgctcgggcgccaatgtcgtctatggcttcatggatctgaagacccacgccaagatctcgctggtggtgcgccgggaaagcggcggcgagctgcggtcctatgttcacttcggaacgggcaattaccatccgatcaccgccaagatctatacggatctttcctatttcacctccgacgagaagctgtgccaggacgccgcccgcgccttcaactacatgaccggctatgcccgcccgggcgagatggaaaagctgcgcatcgcgcctttggggctgaaggaatacctgctcgaacgcatccaggccgaagaggatcacgcgcgcgccgggcggccgggaaccatctgggccaagctcaacgccctggtcgatcccgatgtcatcgacgccctttatcgcgcctcgcaggccggggtgcgcatcgatctggtggtgcgcggtatctgctgcctgcgtcccggcgtggccgggctgtcgtcgaccatccgggtgaagtcgatcgtcggccgcttcctcgagcattcgcgcatcgcctgttttggcaatggcaagccgctgcccggacccgatgccctggtctatatctcctcggccgactggatgccgcgcaacctcaatcgtcgcgtcgagtctttcgtccccatcgaaaacccgacggtgaaggcccaggttcttaaccagatcatggtggccaatctcaatgatcgggcccagtcgtggtatctgaccgccgatggcgtcttccgccgggccaaggcctcggatgacgccttctcggcccatacctatttcatgaccaacccgagtctgtcgggacggggatccgcgctcaatgaccctgaaaaggacattcctaccctggaggtttcagctcagaggaactaa

SEQ ID NO: 6685 - protein, 754 aa, Rhodospirillum rubrum ATCC 11170
MTSAPPPPAVEAIQGVAAQDVAPRTRQGVKPTAAASGDHPEAPVITMDMPDRFINREVSWLAFNFRVMEEARNTRHPLMERLRFLSISGSNLDEFYMVRVAGLKGQVEAGVNKVSQDGLTPAQQLTEINQAARQLLEEQQVAWEILHDELAAQGITVVTPGQLSKADRVWLDTYFMGQVFPVLTPLAIDPAHPFPFIPNLGHALVLQLHRPNDDTSLRALVPLPNHVSRFTRLPSEEGQGARYIFLEDMVGLHLDRLFPGFKVSQGGHFRVIRDSEMEIDEEAEDLVMSFESALKRRRRGHCIRLTLNANMPEELVKLICDEMDVAEEDIFKVRGPIGQADLKQLISDDRPDLQFTPYTARFPERIRDFGGDCFAAIRKKDIIVHHPYESFDVVVQFLRQAARDPNVLSIKQTLYRTSNNSSIVAALVEAAEAGKSVTAMVELKARFDEEANIRWARDLERSGANVVYGFMDLKTHAKISLVVRRESGGELRSYVHFGTGNYHPITAKIYTDLSYFTSDEKLCQDAARAFNYMTGYARPGEMEKLRIAPLGLKEYLLERIQAEEDHARAGRPGTIWAKLNALVDPDVIDALYRASQAGVRIDLVVRGICCLRPGVAGLSSTIRVKSIVGRFLEHSRIACFGNGKPLPGPDALVYISSADWMPRNLNRRVESFVPIENPTVKAQVLNQIMVANLNDRAQSWYLTADGVFRRAKASDDAFSAHTYFMTNPSLSGRGSALNDPEKDIPTLEVSAQRN

SEQ ID NO: 6686 - DNA, 2244 bp, Burkholderia thailandensis E264
  CDS (1)..(2244): transl_table=11
gtgtcggtcgcgcgccggccgacaccggctttcattgtatctagaggacgcttttatgaaatcccaggttttcgagcgtatgattggccgacaaacatcaaactgtcatcagcacgtcatcgcaccgtgagaatttccgagcgacctttcgagtctgcgcctgaccttccgtattctctgccgatgtctctccgttatccgctcctgaatcgcgaactcggcatcctgggcttcaacgagcgcgtgctcgcccaagccgccgatccgcacgtgcccctcctcgagcgcctgcgcttcatctgcatcacgagcagcaacctcgacgaattcttcgaagtccggatggccggcctccaggagcagatgcgcgacaatcccggcgcgctcgcgccggacggcatgtcgctgcagcacgtgtacggcctcgtcgtcgagcgcgcccagcggctcgtgcaccggcagtacacgatgctgcacgaaacgatcctgcccgcgctcgaacaggaaggcatctattttcacggcaccgagacgtggagcgacgcgcagatcgaatgggcgcgccgctacttcttcgacgagctgctgcccgtgctcacgccgatcggcctcgatcccgcgcatccgttcccgcgcgtgctgaacaagagcctgaacttcgtggtcgagctcgaaggccgcgacgcgttcggccgccaggcggtgatgggcatcgtgcaggcgccgcgcgcgctgccgcgcctcgtgcgcatgccgcaggagctgtcgggttttcagcacgggttcgtgctgctcagctcgctgatgcagcgcttcgtcggcgagctgtttccgaagctcgtcgtcaagagctgcaaccagtttcgcatcacgcgcaacagcgagctcttcgtcgacgaagacgaaatcacgaacctgcgcgtcgcgctgcagggcgaactgcccgcgcgccatctcggcaatgcggtgcggctcgaggtatcggccgacacgccgccgcatctcgtgcggcgcctgctcgacgaaagcggcctgaccgagaaggactgctaccgcgtcgacggccccgtcaatctcgtgcggctgatgcagttgccggatctcgtcgacctgcccgagctcaagttcacgccgttcctgccggcgatcccgcccgcgatcgcgaacgcgccgtccatgttcgacgcgatcgatcgcggcgacatcctgctgcaccacccatacgagagcttccagccggtgctcgagctgctgcagcaggccgcgcaggacccgagcgtcgtcgcgatcaagcagacgatctaccgcaccggcaccgattcgccgctgatggacgcgctgatggaagccgcgcgcaacggcaaggaagtgacggtcgtcgtcgagctgctcgcgcgcttcgacgaggagacgaacatcaactgggccgcgcagctcgaatcggtgggcgcgcacgtggtatatggcgtcgtcggccacaagtgccacgcgaagatgatgctgatcgtgcgccgcgcgacgcaaggcggcaaatcggtgctgcgccgctacgcgcacctcggcaccggcaactatcatccgcgcaccgcgcgcctttacaccgacttcggattgatgacgtccgagcccacgatctgcgaggacgtgcatcatgtgttccagcagctgacgggcatcggcggcgaactgaagctgcacgagatgtggcaatcgccgttcacgctgcatccgcggctgatcgagcacatccgcgcggaggccggaaacgcgcgcgccggcaagcgtgctcggatcgtcgcgaagatgaatgcgctgctcgagccgaccgtgatcgccgagctctacgaagcgtcgcaagccggcgtgaagatcgacctgatcgtgcgcggcgtgtgcgcgctgcaacccggcgtaccggggctgtcggagaacatcacggtgcgttcgatcgtcgggcgctttctcgagcaccaccggatctattacttccacgcggacggcgaagagcgtgtttatctgtcgagcgccgactggatggatcgcaatctgttccggcgcgtcgaggtcgcgttcccggtgcgcgatcgcaagctcaagcgccgcgtgatcgccgaagggttgtcggtgttcctcggggacaatcaatccgcgtggctcatgcagagcgacggccactatcgccgacgccgcgcgggcaaggcgccgcgcaacgcgcagctcgggctcctcgcgaaattctgctga

SEQ ID NO: 6687 - protein, 747 aa, Burkholderia thailandensis E264
MSVARRPTPAFIVSRGRFYEIPGFRAYDWPTNIKLSSARHRTVRISERPFESAPDLPYSLPMSLRYPLLNRELGILGFNERVLAQAADPHVPLLERLRFICITSSNLDEFFEVRMAGLQEQMRDNPGALAPDGMSLQHVYGLVVERAQRLVHRQYTMLHETILPALEQEGIYFHGTETWSDAQIEWARRYFFDELLPVLTPIGLDPAHPFPRVLNKSLNFVVELEGRDAFGRQAVMGIVQAPRALPRLVRMPQELSGFQHGFVLLSSLMQRFVGELFPKLVVKSCNQFRITRNSELFVDEDEITNLRVALQGELPARHLGNAVRLEVSADTPPHLVRRLLDESGLTEKDCYRVDGPVNLVRLMQLPDLVDLPELKFTPFLPAIPPAIANAPSMFDAIDRGDILLHHPYESFQPVLELLQQAAQDPSVVAIKQTIYRTGTDSPLMDALMEAARNGKEVTVVVELLARFDEETNINWAAQLESVGAHVVYGVVGHKCHAKMMLIVRRATQGGKSVLRRYAHLGTGNYHPRTARLYTDFGLMTSEPTICEDVHHVFQQLTGIGGELKLHEMWQSPFTLHPRLIEHIRAEAGNARAGKRARIVAKMNALLEPTVIAELYEASQAGVKIDLIVRGVCALQPGVPGLSENITVRSIVGRFLEHHRIYYFHADGEERVYLSSADWMDRNLFRRVEVAFPVRDRKLKRRVIAEGLSVFLGDNQSAWLMQSDGHYRRRRAGKAPRNAQLGLLAKFC

SEQ ID NO: 6688 - DNA, 2253 bp, Frankia sp. CcI3
  CDS (1)..(2253): transl_table=11
atgccacatcgatgctgccgagtccatcggggactggcaccatctacaggcatgagcgagctgatggcgacccgtcctgaacagcctcagcgcaaggcccgcagtggcctgctcgagcccctggaggcgccgcgtcagccggcgccgtccgacctgcccgccggccgcttcatcaaccgggaggcgtcctggctcgacttcaacgcccgggtcctcgcgctcgccgaggacgtgtccacgcccctgctggagcgcgcgaagttcctagcgatcttcgccagcaacctggacgagttctacatggtccgggtcgcggggctgatgcgacgcgaggcgacgggactggccgtccgctccgccgacgggctgaccgcccgggaacaactcgatctcatcagcacgatgacggccgaggtcacccggcggcattcgcgatgcttcaccgacgaggtggggccgtcgctggcccatgccgggatcagcatccggttctggccccagctgaccgagacccagcgtgatcagctgcaccactacttccacgaacagatcttcccggtgctcactcccctcgccgtcgatccggcgcaccccttcccctacatcagcgggctgtcgctcaatctggccgtccaggtccgtgacccgggcggggaggtcgaccgcttcgcccgggtgaaggtgccccagaacgttcctcggctggtccccgtagcggtggagcctaccgacacggccggtgtcccggggggtctggccccccaggcgagcgcatgcttcgtcccgctggaggaagtgatcgctgcccatctctcccagctgttcccgggcatggaagtgatcgactcccatctgttccgggtcacccgcaacgccgacctcgaagtcgaggaggacgaggcggaggatctgctccaggctctggagcgcgagctcgcccggcgccggttcggtcccgccgtccgcctggaagtggacgccgacatcgatgatgatctgctcaccctgctgatgcgggagctggagatcaccgagcgcgaggtacatcgggtcgccggcctgctcgacctgtcgaccctgtgggctctctacgacctcgaccgcccggagctgaaagatacgccgcgggtcccaatcacacatcggcggctgacgaccgatgacggcgagacaccggacttcttcagcgtgctccgggagggcgacatcctcgtccaccacccgtacgactcgttcaccacgtccgttcagcggttcatcgagcaggcggcggccgatccgcatgttctcgccatcaagcagacgctctatcgcacgtccggggactcccccatcgtggatgccctcatcggcgcggccgaggcgggaaagcaggtcgtcgtcctcgtcgagatcaaggcccggttcgacgagagcgccaacatccgctgggcccgcgagctggaacgggccggctgccacgtggtctacggtctcatcggcctgaagacccactgcaagacctgcctcgtggtacgccaggaacgcggcggcctgcgccgctactgccatgtgggtaccggcaactacaaccccaagaccgctcggctctacgaggacctcgggctgctgaccgccgacccgggcgtgggcgcggatctcaccgacctgttcaacgtcctcaccggctacagccgacagacggagtaccgctcgctgttggtcgccccgcagcacatgcgggacggcatcctgcagcggatcgaagccgaggcccaggctgcccgggggggcggggagtccgggatccgcatcaaggtcaacagccttgtcgacgaacaggtgatcgacgcgctgtatcacgcctccatcgccggggtacccgtgcactgcctggtccgcgggatctgcgccctacgtcccggagtgccgggcctgtcggagacggtccacgtgcgctcgatcctggggcggttcctggagcacagccgggtcctcgagttcacctcgtctggcgagttctggatcggcagcgcggacatgatgcaccgcaatctcgaccgccgtatcgaggcactcgtgcgcgtcccgcacccggaccggcgagacaccctgcggcagatgctcgaccatgcgttctccgacgaggtgtccgcctgggtgctgcagtccgacggccgctgggaacgacgcacgaccgggccggacgacgttcgcctgtcggactaccagcacgacctgatggccgacgccatgcggcgcgggcaccggtaa

SEQ ID NO: 6689 - protein, 750 aa, Frankia sp. CcI3
MPHRCCRVHRGLAPSTGMSELMATRPEQPQRKARSGLLEPLEAPRQPAPSDLPAGRFINREASWLDFNARVLALAEDVSTPLLERAKFLAIFASNLDEFYMVRVAGLMRREATGLAVRSADGLTAREQLDLISTMTAEVTRRHSRCFTDEVGPSLAHAGISIRFWPQLTETQRDQLHHYFHEQIFPVLTPLAVDPAHPFPYISGLSLNLAVQVRDPGGEVDRFARVKVPQNVPRLVPVAVEPTDTAGVPGGLAPQASACFVPLEEVIAAHLSQLFPGMEVIDSHLFRVTRNADLEVEEDEAEDLLQALERELARRRFGPAVRLEVDADIDDDLLTLLMRELEITEREVHRVAGLLDLSTLWALYDLDRPELKDTPRVPITHRRLTTDDGETPDFFSVLREGDILVHHPYDSFTTSVQRFIEQAAADPHVLAIKQTLYRTSGDSPIVDALIGAAEAGKQVVVLVEIKARFDESANIRWARELERAGCHVVYGLIGLKTHCKTCLVVRQERGGLRRYCHVGTGNYNPKTARLYEDLGLLTADPGVGADLTDLFNVLTGYSRQTEYRSLLVAPQHMRDGILQRIEAEAQAARGGGESGIRIKVNSLVDEQVIDALYHASIAGVPVHCLVRGICALRPGVPGLSETVHVRSILGRFLEHSRVLEFTSSGEFWIGSADMMHRNLDRRIEALVRVPHPDRRDTLRQMLDHAFSDEVSAWVLQSDGRWERRTTGPDDVRLSDYQHDLMADAMRRGHR

SEQ ID NO: 6690 - DNA, 2148 bp, Desulfitobacterium hafniense Y51
  CDS (1)..(2148): transl_table=11
atgatgaaaactatctacgacaccacggggaattttatcaatcgcgaattaagctggctggagtttaatcagcgggttttggagggggctctggatgccgccaaccctctgtttgaacggcttaatttcctggccattgtcagctccaatctggatgagttttttgcggtgagagtcgcatccttgggggaccaaatcctggctggtctggagaaacgtgatccctccggcttgcttccccaggaatgtatggcgcaaattgtggagcgtgcccatgggatagtagagggtcagtaccggtgttacaggaactctctgcttaaaaaactcaggaaggaaaacatcaatattgtcaaccctaaatccttaaccaaggaccaaaagaaatttgtgaaagattattacctgcataaagtttttccggtgctcacccccttggtggtggatcagggccggccttttcctttgctgcgcagcagagagctgtatattgccttattgattaaaggagtggagacccatcttttcgctacggttcaagttccgaaagtcctgccccgctttgtggaagttccctcggcgaccaaagacagggaatttatcatgttggaggatctgatcaccttaaaattgccggatctttttcaagggcataagctggcagccgcaggctttttccgcattacccgcaatgccgacctggatttcgacgaagagggggcggaagatttattagaagccattgaattatccatacgtcagcgcaaatggggttcggtgatccgtctggaggtgggcaaagggtttcataaagatcttctggccatccttaaggaagaattggaaatcactgaggacaagatttatgaagtacggggacccattgatctgacgtttctctcggacttcattaagcttaagggatgtgagcatttacgctatctcccttttcaacctcaggatgtcccggaactgatcagggaaaaggacatcttcaaggccattcaggagcaggatattctgcttcatcacccctaccaatccttccaaccggtggttgagttagtgaaaacggcggccagagatcctcaggttctggcgattaagcaaaccctttaccgcgtcagcggcaattcgccgattattgccgccctggcccaggcagcggagcttggtaaacaggttacggttcttgtggagcttaaggcccgctttgacgaggagaagaacattcactgggccaagcatctggaggaggccggctgccatgtcatctatggtttagtggggctgaaaacccactgtaaggtcctcttgattgtgcgccgggaagaggatggcatcaagcgctatgttcatatgagcacgggcaactataatgatgtgactgccaaaatctatacagatatcgggctgatgacagtgaatccccagtttggggctgatgcctcagcattattcaatatgctttccggactttcccaaccggtcaatcttaataaattcaccttggcacccgctgggatgagagagaaattcctccagcttattgaggatgaagcacataacgcccaaaagggaatgaaggcggtcatcgtcgtcaaggttaattctctgcttgataagcaaatcattctcgctttatatcgtgcttccagtcagggagtggaaatcaaactgattgtgcggggggtctgctgcctccggcccggtctgccgggagtcagcgaaaccattgctgtccgcagtattgtgggaagatttctggagcatagccgtatcttttatttctatcatggcggagaagagctggtgtatttgtccagcgccgactggatgccaagaaacctggatcgccgggttgaactactgtttcctgtcgaaaatcccgatgccaaggaagaagtaaaggccatactggacatagcctggcaggatacggtaaaggcccgcatattaaatgccaaaggtatctataaaaaggtggataaacggcggaaaaaatcagttaaaagccaggacgccctctgtgaacgagcggtagctcaaagcaccagggaaaaagccaggttgcaggaaagactggaggggagttttcatcccgtgactgccggggcggaaatgcaggggtttaccggaatgaaatag

SEQ ID NO: 6691 - protein, 715 aa, Desulfitobacterium hafniense Y51
MMKTIYDTTGNFINRELSWLEFNQRVLEGALDAANPLFERLNFLAIVSSNLDEFFAVRVASLGDQILAGLEKRDPSGLLPQECMAQIVERAHGIVEGQYRCYRNSLLKKLRKENINIVNPKSLTKDQKKFVKDYYLHKVFPVLTPLVVDQGRPFPLLRSRELYIALLIKGVETHLFATVQVPKVLPRFVEVPSATKDREFIMLEDLITLKLPDLFQGHKLAAAGFFRITRNADLDFDEEGAEDLLEAIELSIRQRKWGSVIRLEVGKGFHKDLLAILKEELEITEDKIYEVRGPIDLTFLSDFIKLKGCEHLRYLPFQPQDVPELIREKDIFKAIQEQDILLHHPYQSFQPVVELVKTAARDPQVLAIKQTLYRVSGNSPIIAALAQAAELGKQVTVLVELKARFDEEKNIHWAKHLEEAGCHVIYGLVGLKTHCKVLLIVRREEDGIKRYVHMSTGNYNDVTAKIYTDIGLMTVNPQFGADASALFNMLSGLSQPVNLNKFTLAPAGMREKFLQLIEDEAHNAQKGMKAVIVVKVNSLLDKQIILALYRASSQGVEIKLIVRGVCCLRPGLPGVSETIAVRSIVGRFLEHSRIFYFYHGGEELVYLSSADWMPRNLDRRVELLFPVENPDAKEEVKAILDIAWQDTVKARILNAKGIYKKVDKRRKKSVKSQDALCERAVAQSTREKARLQERLEGSFHPVTAGAEMQGFTGMK

SEQ ID NO: 6692 - DNA, 2109 bp, Saccharophagus degradans 2-40
  CDS (1)..(2109): transl_table=11
atgattgaaatgaactctgcagactccgacctacccgaattagatgattctgcacccagtatcagtttggatgaccccgcgtactatatcaatcgcgaactcagccacttagcttttaatcaacgtgtactggagcaagcgctagacgaaagccaccccattttagagcggctaaagtttctgcttatttttagctcaaacctcgatgagttttttgaaattcgcgttgcaggcctcatgcaaagtattaagtttgagcgtgaaaccgcaggcttagacggcgcacaccccaaagaaaccctgcgcgaaattagccgtatttgccacgaaacggtggaaaaacagtatgaaatactgaataacatcttgtttcctgcattggaaaaagaagatattcgctttttgcgtcgcagcgaatggtctgatgagcaaagcgcgtgggtaaacaactttattgaaaccgaagtactgcccattattagccccataggcttagaccctgcgcaccccttcccgcgattagtaaacaaaagtcttaacttcattgtagagctagaaggtaaagatgcctttggccgcgatttaaactacgcgatagtgcctgcaccgcgcaccttgccacgcatcatcaaattgccagaagacttgggcaaccccggccacaactttattttcttgtcgtcgatgattcacgcccacgccgaccagctcttccccggcatggaagtaaaaggctgctaccagtttcgtttaacccgcaacgccgacctcgacgtagacgtagagggtattgccgatttagcccgcgccctgcgcggtgaattgcactctcgccgctttggtaccgccgtacgcttagaagtggccgacaactgccctagcgaacttaccgactttttattaaaagaaactggcttaaccgaagacgacctgtaccgtgtagacgggccagttaacctcaagcgcctaatgcgcgtgccatcgatggtgggccgcacagatttactctacccgccgtttacccccagcatgcccaagggtatgagccgtaaagacaacatttttgatgcgattgcacgcaaagattacctgctattgcacccattcgagtcgtacgcgccggtagtgcagttgttgcgtcaagccgccaaagacccaaacgtagtagccatcaagcaaaccctctaccgcacgggcaacttatcatcggttgtggatgcccttatcgacgccgcgcgcaacggtaaagaagtcaccgccgttgtagaattgcgcgcccgtttcgacgaagaggaaaacctcgagctagcaagccgcctgcaagaagcgggagccgtggtggtatacggcgtagtgggctacaaaacccacgcaaaaatgatattaattgtgcgacgcgacggcacagagctaaaacgctatgtgcatttgggcaccggtaactaccacagcggcaacgcgcgcttgtacaccgactactcactgctaaccgccgacccagtgatgggcgccgacgtacaccgtgtattccagcaacttaccggtatgggcaaaaccgagcgcatggataaactgctacatgcgccttttacccttaaacgccagctattgcgtttgattgaccgcgaagtacaggcccaacgcgaaggcaagcaggggcgcattattcttaaatgcaacggcttaaccgagccaaaaaccttacaagcgctgtacaaagcatcgcaggaaggcgtgcaaatcgacttgattattcgcggcatgtgctgcttgcgcccaggcatacctggggtgtccgaaaacattcgcgtgcactctattattggccgctttttagagcacacccgtgtttattacttcgccaatgccgaatataacgtttattgtgccagcgccgacttgatggagcgcaacctaaaccgccgcgtggaaacctgcttccctatctgccagcccgagctcgcgcagcgggtgctgacagagcttgaactgtatataaatgatacaaatcagcgttgggaactggataaagaaggggtttacacccgcgtggaggccgaagaaagccgtgcagcgcaagcagaattgctacagaaacttgcaaattag

SEQ ID NO: 6693 - protein, 702 aa, Saccharophagus degradans 2-40
MIEMNSADSDLPELDDSAPSISLDDPAYYINRELSHLAFNQRVLEQALDESHPILERLKFLLIFSSNLDEFFEIRVAGLMQSIKFERETAGLDGAHPKETLREISRICHETVEKQYEILNNILFPALEKEDIRFLRRSEWSDEQSAWVNNFIETEVLPIISPIGLDPAHPFPRLVNKSLNFIVELEGKDAFGRDLNYAIVPAPRTLPRIIKLPEDLGNPGHNFIFLSSMIHAHADQLFPGMEVKGCYQFRLTRNADLDVDVEGIADLARALRGELHSRRFGTAVRLEVADNCPSELTDFLLKETGLTEDDLYRVDGPVNLKRLMRVPSMVGRTDLLYPPFTPSMPKGMSRKDNIFDAIARKDYLLLHPFESYAPVVQLLRQAAKDPNVVAIKQTLYRTGNLSSVVDALIDAARNGKEVTAVVELRARFDEEENLELASRLQEAGAVVVYGVVGYKTHAKMILIVRRDGTELKRYVHLGTGNYHSGNARLYTDYSLLTADPVMGADVHRVFQQLTGMGKTERMDKLLHAPFTLKRQLLRLIDREVQAQREGKQGRIILKCNGLTEPKTLQALYKASQEGVQIDLIIRGMCCLRPGIPGVSENIRVHSIIGRFLEHTRVYYFANAEYNVYCASADLMERNLNRRVETCFPICQPELAQRVLTELELYINDTNQRWELDKEGVYTRVEAEESRAAQAELLQKLAN

SEQ ID NO: 6694 - DNA, 2082 bp, Methylobacillus flagellatus KT
  CDS (1)..(2082): transl_table=11
atgttgcccgtcaaattgactcccgagtatttcatcaatcgcgagctaggcattctcgccttcaaccgtcgcgtattggcccaagctgaggacgaacgcgtacccctgcttgaacgcctcaagttcctctgcattttcagcagcaatatggatgagttcttcgaggtgcgcgtagcaggcctcaagaaccagatcaaatacaactcgccgcatgtaggcgccgacggcatgctgcccaagcaggcgctcgccaagatcagcaagctggcgcatgaaatggtggatcaccagtacaagatcctcaatgaaatcgtactcccacagctggcagcccaggaaatccgctttatccgccgcggtgactggaacgaggtccagcgcgagtggattgctacttacttcttccgcgagttgatgcccattctcaccccgatcgggctggatccagcacacccgttccctcgcgtactgaacaaaagcctgaactttgccgtcgagctggaaggcaaggacgccttcgggcgcaattcgggcgtcgccatcgtgcaggcgccgcgcgcgctgccgcgcgtcatccgcctgccgcgcgacattgccggctgcgaccatggtttcgtattcctgtcatccatcctgcacgcgcatgttaacgaactgttctccggcatgacggtaaaaggttgctaccagttccgcgtcacgcgcgatagcgagttgaccttggatgatgaagagaccaaggacttgcgcctcgccctgcaaggtgagctgactcaccgtcaatacggcgatgccgtacgcctggaagtagccgacagctgcccggcggaaatgtccgcctttttactgggtcaatttggcctgggccaggacgacctctaccaggtcaatggtctggtcaacctcgttcggctgatgcagatcccggacagcgtggaccgcccggacctgaagtatccgcattacacgcccagcctgccacgggagctggataaggaccaggacatcttcaaggccatccgcaagcaggatatcctgctgcatcatccattccagtcgttcaatccggtagtagaattcatcaagcaggctgcggaggatccgcaagtgttggccatcaagcagacgttctaccgcaccagcgcagactccacactgatgacatccctgattgacgccgcacagcgcggcaaggaagtcaccgtggtggtggagctgttggcacgctttgatgaagaagccaatatcaactgggcagccaagctggaaaatgccggcgctcacgtcgtgtatggcgtggtggggcacaagacccatgccaagatggccatggtggtgcggcgcgatgaagacaagctgcggcgttatgtgcatattgccaccggcaactaccaccagcgtaccgcgcgcctgtataccgacttcggcctgctcacctgccaggaagaaatcagcgaggatgtgaatgacgtcttcgcccagctgacgggcctgggcaaggctagcaagctgcgccatctctggcagtcgccgttcaccttgcaccagcgcacggtcaaggcaatccagaatgaagcggaaattgccaggtcgggcaagaaggcccgcatcattgccaagatgaatgccctactcgatcccgacgtgatccgagccttgtacgatgcctcctgcgccggcgtgcaaatcgacctcatcgtgcgcggcgtctgcgccctccgcccaggcattccgggcatatcggagaatatccgggtgcgttccatcgtgggacgatttctcgagcacacgcgcatcttctatttttatgacgacggcgcagaacacatttacctgtcgagcgcagactggatgtatcgcaatttcttccgccgcatcgaagtttgcttcccgctactggatgccaaggtaaagaagcgcgtgttcaaggaaggcctggaaccctatctcaaggataacagcaacgcctgggaaatgcagtccgatggccattacgaacgcaaggccagccgccgggccagttttgcagcacagcaattcctgatggcggagcatggacaggaaatattgcccgagagctga

SEQ ID NO: 6695 - protein, 693 aa, Methylobacillus flagellatus KT
MLPVKLTPEYFINRELGILAFNRRVLAQAEDERVPLLERLKFLCIFSSNMDEFFEVRVAGLKNQIKYNSPHVGADGMLPKQALAKISKLAHEMVDHQYKILNEIVLPQLAAQEIRFIRRGDWNEVQREWIATYFFRELMPILTPIGLDPAHPFPRVLNKSLNFAVELEGKDAFGRNSGVAIVQAPRALPRVIRLPRDIAGCDHGFVFLSSILHAHVNELFSGMTVKGCYQFRVTRDSELTLDDEETKDLRLALQGELTHRQYGDAVRLEVADSCPAEMSAFLLGQFGLGQDDLYQVNGLVNLVRLMQIPDSVDRPDLKYPHYTPSLPRELDKDQDIFKAIRKQDILLHHPFQSFNPVVEFIKQAAEDPQVLAIKQTFYRTSADSTLMTSLIDAAQRGKEVTVVVELLARFDEEANINWAAKLENAGAHVVYGVVGHKTHAKMAMVVRRDEDKLRRYVHIATGNYHQRTARLYTDFGLLTCQEEISEDVNDVFAQLTGLGKASKLRHLWQSPFTLHQRTVKAIQNEAEIARSGKKARIIAKMNALLDPDVIRALYDASCAGVQIDLIVRGVCALRPGIPGISENIRVRSIVGRFLEHTRIFYFYDDGAEHIYLSSADWMYRNFFRRIEVCFPLLDAKVKKRVFKEGLEPYLKDNSNAWEMQSDGHYERKASRRASFAAQQFLMAEHGQEILPES

SEQ ID NO: 6696 - DNA, 2082 bp, Ralstonia metallidurans CH34
  CDS (1)..(2082): transl_table=11
atgtcgacgacgccgcccggcacgcttctcaatcgcgagttgggcattctggagttcaatgcgcgcgtactcgcgcaggccgccgaccctaatgttcccctgctggaaaggctgaagttcatctgtatcgtatccagcaacctggacgaattctttgagatccggatggcgggtctgaaggaacagatgcgggaaaacgcatcgggcctcacgcccgacggtctctcattcctgcaaacctaccagcttgtcaccgagcgcacccagcgactggttgcctcgcagtatgacatgctgcagaacgtgattttccccgcgctggagcaggaaggtgtgttcttccacctgaccagcacctggaccgagcagcagcgcgcctgggcgcgcgatttcttcgtgcgcgagctgggcccggtgctcacgcccatcgcgctcgaccctgcccacccgttcccgcgcgtgctcaacaagagcttgaatttcgtgatcgaactgtccggcaaggacgcgttcggacgtgatgccgatctcgccatcgtgcaggccccgcgcgcgctgccgcgcgtggtgcgcatgcccgagcagctttcgggatacccgtacgggttcgtgatgctgtcgtcgttcatgcaggcatttgtgcatgagctgttccccgcaatcgaggtagaaggctgctatcagttccgcgtaacgcgtaattcggacctgttcgtgtccgaagacgacattaccgatctgcgcgaagccctccagggcgaactgccgacacgtcacttcggcgatatggtccgcctcgaagtgtcgtccgacacgccgcccgcgctgacgcgccggctgctgctcgagtctggcctgaccgaacaggatctgtaccgcgtgagcggtccggtaaaccttgcgcggttgatgcagattcccgacatggtggaccgccctaccctcaagtacccgccccatgtcccggcagcggtcaaggcacttccagcgggttccaacatgttcgacgtgatccgtcagcgcgatgtgctgctgcatcatccgtacgagagcttctcgtctgtgctcgacctgctgcagcttgccgccaacgacccaaacgtcgtggcgatcaagcagactgtctaccggaccggaaacgaatctgcggtgatggaagcgctcatgaccgccgcccgcaatggcaaggaagtgacggtggtggtggaactgctggcgcggttcgacgaggaaaccaacatcaactgggccgaacggctggagtcggttggcgcccacgtcgtgtatggcgtggtcggccacaagtgccatgccaagatgctgctgatcgtgcgccgcgagccggccacgcccaaggcgaagcacttcatgctgcgccgctacgtccaccttggcaccggcaactatcatccgcgcacggcccggctgtacaccgacttcgggctgctgacggccgaggaaaagatctgcgaagacgcgcatcacgtgttccagcttctgacgggcaccgccggcacgatccgcctgaatcacctgtggcagtcgccgttcacgatgcacagcaatctcgtcgagcacatccgtgccgaggcccgcaacgcacgcgcgggcaagcgggcgcgcatcatcgcgaagatgaacgcgctgctggagccgacgatcatcgaagagctgtacaaggcatcgcgttccggcgtgaagatcgacctgatcgtgcgcggcgtttgcgcgcttcgcccaggagtgccagggatgtccgagaacatttcggtacgttcgattgttggccgcttcctcgaacaccatcgcgtctactacttccatgccggtggtgatgacgtgctgtatctgtcgagcgctgactggatggaccgcaacctgttccgccgcgtggaggtggccttcccgatactggatcgcacgctcaaggcacgcgtgatcaaggaaggcctgcaggtgcatctgcgcgacaacgcctcggcgtggatcatgcaatcggacggcgagtatgtgcgcaagccatcgcgcgccaaggagcagcgcgtaagccaggtggagttgctggcgcggttcggtacctga

SEQ ID NO: 6697 - protein, 693 aa, Ralstonia metallidurans CH34
MSTTPPGTLLNRELGILEFNARVLAQAADPNVPLLERLKFICIVSSNLDEFFEIRMAGLKEQMRENASGLTPDGLSFLQTYQLVTERTQRLVASQYDMLQNVIFPALEQEGVFFHLTSTWTEQQRAWARDFFVRELGPVLTPIALDPAHPFPRVLNKSLNFVIELSGKDAFGRDADLAIVQAPRALPRVVRMPEQLSGYPYGFVMLSSFMQAFVHELFPAIEVEGCYQFRVTRNSDLFVSEDDITDLREALQGELPTRHFGDMVRLEVSSDTPPALTRRLLLESGLTEQDLYRVSGPVNLARLMQIPDMVDRPTLKYPPHVPAAVKALPAGSNMFDVIRQRDVLLHHPYESFSSVLDLLQLAANDPNVVAIKQTVYRTGNESAVMEALMTAARNGKEVTVVVELLARFDEETNINWAERLESVGAHVVYGVVGHKCHAKMLLIVRREPATPKAKHFMLRRYVHLGTGNYHPRTARLYTDFGLLTAEEKICEDAHHVFQLLTGTAGTIRLNHLWQSPFTMHSNLVEHIRAEARNARAGKRARIIAKMNALLEPTIIEELYKASRSGVKIDLIVRGVCALRPGVPGMSENISVRSIVGRFLEHHRVYYFHAGGDDVLYLSSADWMDRNLFRRVEVAFPILDRTLKARVIKEGLQVHLRDNASAWIMQSDGEYVRKPSRAKEQRVSQVELLARFGT

SEQ ID NO: 6698 - DNA, 2142 bp, Acidobacteria bacterium Ellin345
  CDS (1)..(2142): transl_table=11
gtgagcacatccctggcaagatcgacgaactacctgaaccgcgaactctcgtggctccagttcaattctcgcgttctcgaagaagctgaagacgcgaacaatcccctgctggagcgggtaaagtttctcgccattaccgccagcaacctcgacgagttctttgagattcgcgttgccagcttgctgcagcggattgaagacggctatgccgattccgcccccgatggcctcacgcccgcgatggagcgcgaccgcctcgccggcgtacttcaggaattcggcgccggccaatatcggtgctggaaccaggcgctgcgcccgcaactcgcggagcatggcgtccgggtgctctccttagaggaactcgatggcccggcccgcgaattcgtagagcactattgccttcaggaactcgatcccctacttacacccgtgaccgtcgatcccgcgcatccgttcccgcgcgtcatcaacaaagcgctctgccaggcgctcctgttacgccgccgtcgtcgcgccgccgagtcctacatgggcgtcgttaccgtgccgcgcgcgctaccgcgcctgatcaaacttcccagtcagggtgcaactgacgactacatctccctcgccgatctcgttgcccttcacactgccaggctctaccgcgggtacgacatcgttgcccagggtgcgttccgcatcacgcgcaacagcaacctctacgtgcaggaagaagatacccgcaatctccttgaatccgtccgcaccgaactgcacaatcgccggcgcggtgacgccgtccgcctcgaaatcgaagccgacgccggcgaagagatcactcagcgccttcgcgagatatttgaactcgatgaatggcagatcttcaaggcccacggcccggtgaatctctcgcgtctctcgcacctctacagcgagaccgaccggcccgatctaaagttcaagccgttcgttgcccgcgaatgggcattgcccaaaggctccaacgacgtcttcgaggccatccgccagcgcgacgtcctactgcatcacccgttcgattcctatacaccggttgtttccttcatcgaagccgcagcggaagacccgcgcgtgctctcgatcaagcagacactctaccgaaccaacgagaagtcgccgatcatcgacgccctcgtcgaagctgcccagagtaaagaagtcaccaccgtcatcgaggtgaaggcccgcttcgatgaagcctccaacatccgctgggcccgcacccttgaagacgccggtgtccaggtcttccacggtctcgttggcctcaagacacattgcaagctcgcgctcatcgctcgcaaagatcccgacggcgtcattcgccgctatgcgcacctcggtaccggcaactacaactcgatcacagcgcagttctacaccgacgtcagcttgatgacagcgagcgaagaaatcactgccgccgtgcaccgtgtcttcaatttcctcacggcgtactccgagcaatccagttacgaaccgctgctcgtcgctccgcttgaaatggccgagcgtattgccggtctcattcgccgcgaagccgattacgcccgcgagaaaaagcccgcccgcatcatcgccaagatgaattcgctcctcgataaagacgtcatccaggagctctacgaagcgtcgcgtgccggcgtacaaattgatttgatcgtgcgtggcatctgcacgttgcgccctggcgtccgcggactgagcgacaacattcgcgtccgcagcatcgtaggccgcttcctcgaacacagccgcatcttctacttcgagaatggtggcaacaacgaaatctatctcggcagcgccgactggatgccgcgcaacctctacgagcgcgtcgaaacacttttcccgttacgcgacgcgttgctcaaagatagggtgcgccaggagattcttgcgccatacttggcggatacttcgaaggctcgcgtgctccacgccgacggcagctatgctttccaccatccgcgcggaaagaatgttcaacccttcagcgcgcaagacttcctgatcgcggtcgcagaagggaaaaagagcattgacgcaattccgacggtgcccgagcataaaccggttcggcgaactcgcagccgcgcccgcgccaggtaa

SEQ ID NO: 6699 - protein, 713 aa, Acidobacteria bacterium Ellin345
MSTSLARSTNYLNRELSWLQFNSRVLEEAEDANNPLLERVKFLAITASNLDEFFEIRVASLLQRIEDGYADSAPDGLTPAMERDRLAGVLQEFGAGQYRCWNQALRPQLAEHGVRVLSLEELDGPAREFVEHYCLQELDPLLTPVTVDPAHPFPRVINKALCQALLLRRRRRAAESYMGVVTVPRALPRLIKLPSQGATDDYISLADLVALHTARLYRGYDIVAQGAFRITRNSNLYVQEEDTRNLLESVRTELHNRRRGDAVRLEIEADAGEEITQRLREIFELDEWQIFKAHGPVNLSRLSHLYSETDRPDLKFKPFVAREWALPKGSNDVFEAIRQRDVLLHHPFDSYTPVVSFIEAAAEDPRVLSIKQTLYRTNEKSPIIDALVEAAQSKEVTTVIEVKARFDEASNIRWARTLEDAGVQVFHGLVGLKTHCKLALIARKDPDGVIRRYAHLGTGNYNSITAQFYTDVSLMTASEEITAAVHRVFNFLTAYSEQSSYEPLLVAPLEMAERIAGLIRREADYAREKKPARIIAKMNSLLDKDVIQELYEASRAGVQIDLIVRGICTLRPGVRGLSDNIRVRSIVGRFLEHSRIFYFENGGNNEIYLGSADWMPRNLYERVETLFPLRDALLKDRVRQEILAPYLADTSKARVLHADGSYAFHHPRGKNVQPFSAQDFLIAVAEGKKSIDAIPTVPEHKPVRRTRSRARAR

SEQ ID NO: 6700 - DNA, 2163 bp, Myxococcus xanthus DK 1622
  CDS (1)..(2163): transl_table=11
atgccgaaacgcggcggcggcggtcgcggcgtcacccagaagccctccaaccgggacgtgctcccggccggcgcggagtcgaaggacacggagctcttcttcaaccgagagctgtcctggatggccttcaatgaccgcgtcctccagctcgccgagtctccggagattccgctgctggagcggctgaagttcatcgccatctacgcgcgcaacctggacgagttcttcatgattcgcgtcgcccgtctgcacgagcagattcgcggcggcgtggcgcgcctggttcccgacggagcctctcccagcgacaccctggacaagctgcacgacggcatcctcaagcagacgcgccggcacggcgacgccttcgagaaggtgctccgccccgccctggccgaaaagggcctgcgcatcctctccgccaggaatctggacgccgagcagcgcgcccaggtggaccagcgcttcaaggagcagattttccccgtcctcaccccgctggccatcggcctgggacggcactttccctacatctccaacctgtcgctcagcctggcggtgctgctgagagacccggacgcggacgaggagagcgtggcccgggtgaaggtgcccaaggagctgctgccgcgcttcctgcccctcaagggcaacgtcttcgtccccttggaggaaatcatcgcccagcacctgggggacttgttccccggcatggaggtgctgagctggggcaccttccgcgtcacccgcgacgcggacttcaccgtgtccgaggacgcggaggacctgctcaaggccgtggagacggagctgcgcgagcgccgcttcggcgacgtcatccgcatggaagtccaggccggcatgagccccaagctgctcgagccgctggtggaggccatgggcctggaggcgcgtcaggtctacgaggagcacggcctggtgggcctcaacgatttgcagtccatcgccttcgccccgggcttcccggagctgaaggacccgccgtgggtccctgtcacccaggcccgcctgcgcacggacgcggacgcgccggatggcggcacggtgatgtcgtccatgcgccggggggacctgctggtccaccacccctatgagtccttcgccacctccgtggagcgcttcgtcaccgaggccgtggccgacccggacgtgctggccatcaagcagacggtgtaccgcacgtcggacagctcgcccctggtgcccgcgctgattaccgccaccgagcgcggcaagcaggcggtgtgcatggtggagctgaaggcccgcttcgacgagcgcaccaacatccgctgggccaacgcgctggaagaggcgggcgtgcacgtcgtctacgggattccgtccctgaagacgcacgcgaaggccatcctcatcgtccggcgcgagggcgacaaggtgcggcactacgtgcacatcggcacgggcaactacaacccgaagacggcgcgcctctacacggacatgggcctgttcaccacggacccggacattggcgcggacgtggcggacgtcttcaactacctcaccggttttggccggccgaagagcttccgcaagctgctggtggccccgctcaccatgcgccagggcctgctggcggaaatcaagcgcaccgtcgccgcgcacacagccgagcgccccgcgcgcatccagatgaagatgaacgcgctggtggaccccggcatcatccacgccctctacgaggcgtcccgcgcgggcgtgaaggtggagctgaacgtgcgcggcatctgctgcctgcgcccgggcgttcccggcgtgtcggagaacatccgcgtggtgtccgtgctgggccgcttcctggagcactcgcgcatctacatcttcgagcgcggcccggagctgcgttgcttcatcggctcggcggacttgatgccgcgcaacctggaccaccgcgtggaaatcctcgcgccggtggaggacgccagcctggccgcccaggtgaaagactcgctggagcgctgcatggcagacaccacgtccgcctgggagctgacggcggatggcggatggcgccgccggctaccgcgcgccggtgacgagaagcgctgggcccagggcgagatgatggagcgcgcccagcgcatggcccagttccagggcggccgtccgctgccctga

SEQ ID NO: 6701 - protein, 720 aa, Myxococcus xanthus DK 1622
MPKRGGGGRGVTQKPSNRDVLPAGAESKDTELFFNRELSWMAFNDRVLQLAESPEIPLLERLKFIAIYARNLDEFFMIRVARLHEQIRGGVARLVPDGASPSDTLDKLHDGILKQTRRHGDAFEKVLRPALAEKGLRILSARNLDAEQRAQVDQRFKEQIFPVLTPLAIGLGRHFPYISNLSLSLAVLLRDPDADEESVARVKVPKELLPRFLPLKGNVFVPLEEIIAQHLGDLFPGMEVLSWGTFRVTRDADFTVSEDAEDLLKAVETELRERRFGDVIRMEVQAGMSPKLLEPLVEAMGLEARQVYEEHGLVGLNDLQSIAFAPGFPELKDPPWVPVTQARLRTDADAPDGGTVMSSMRRGDLLVHHPYESFATSVERFVTEAVADPDVLAIKQTVYRTSDSSPLVPALITATERGKQAVCMVELKARFDERTNIRWANALEEAGVHVVYGIPSLKTHAKAILIVRREGDKVRHYVHIGTGNYNPKTARLYTDMGLFTTDPDIGADVADVFNYLTGFGRPKSFRKLLVAPLTMRQGLLAEIKRTVAAHTAERPARIQMKMNALVDPGIIHALYEASRAGVKVELNVRGICCLRPGVPGVSENIRVVSVLGRFLEHSRIYIFERGPELRCFIGSADLMPRNLDHRVEILAPVEDASLAAQVKDSLERCMADTTSAWELTADGGWRRRLPRAGDEKRWAQGEMMERAQRMAQFQGGRPLP

SEQ ID NO: 6702 - DNA, 2229 bp, Mycobacterium sp. MCS
  CDS (1)..(2229): transl_table=11
atgaacatctcgcacacgcggtggcaggacgacgccgccatgggggaggatcgggccatgaccgaagccgaggccgcgatccgcgcggagggcaccgccgagagcaccgagcggacgccgggagattcgaccccggaggcaccgcccgcggcgacctcccccgcgatcgacaacgccctgcccgaggatcgctacctcaaccgcgaactcagctggctcgacttcaatgcccgggtgctggcgctggccgccgatccgagcctgccccttctcgaacgcgcgaagttcctcgccatcttcgcgtccaacctcgacgagttctacatggtgcgcgtggccggcctcaaacgccgcgacgagatggggctgtcggtgcggtcggccgacgggctgtcgccgcgcgagcagttgcgccggatcagcgaacgcacccagcagatcgcctcacgccacgcgcgggtgttcctcgacgcggtgcgccccgcccttgccgacgagggcatcgtcatcgtcacctggtccgaactcgacgaggctgaacgcgcgcagctgtcgacgtacttccacgaacaggtcttccccgtcctgacccccctggcggtcgaccccgcccacccgttcccgttcgtcagcgggctgtcgctgaacctggcgatcaccgtgcgccaccccgacgacggcggacagcacttcgcgcgaatcaaggtgcccgacaacgtcgaccggttcgtccggctcggggtgcgtggtcagaccggcgaggtcgtgcggttcctcccgatggaggagttgatcgccgcgttcctgcccgtgctgttccccggcctcgagatcgtcgagcaccacgcgttccggatcacccgcaacgcggatttcgaggtcgaggaggaccgcgacgaggatctgctgcaggcactcgagcgcgaactcgcccgcaggcggttcggttcgccggtgcgcctcgaggtctccgacgacatgaccgagagcatgctcgaactgctgctgcgcgaactcgacgtcgatcccggcgatgtggtcgaggtgcccggcctgctcgacctgtccgcgctgtggcagatctacgccgtcgaccgcccggcgctcaaggaccggccgttcgtccccgccaccccaccggctttcggtgagcgggagaccccgaagagcatcttctccacgctgcgcgacggcgacgtgctggtgcaccatccctacgactcgttctccacgacggtgcaacggttcatcgaacaggccgcggccgacccgaacgtgctcgccatcaaacagacgctctaccgcacctcgggtgactccccgatcgtcaacgcgctcatcgatgccgccgaggccggtaagcaggtggtggcgctcgtcgagatcaaggcgcggttcgacgaacaggccaacatcaagtgggcccgcgcactcgagcaggccggcgtccacgtcgtgtacgggttgatcgggctcaagacccactgcaagaccgcgctcgtcgtccggcgcgaagggtcgatgatccggcgctactgccacatcgggaccggtaactacaacccgaagaccgcccgcctctacgaggacgtcgggttgctcaccgcggcaccggacatcggcgccgacctgaccgacctgttcaactcgctgaccgggtactcccggaaggtcgcctaccgcaacctgctggtggccccgtacggggttcgccggggcatcatcgagcggatcgaacgggaggtggcggccgcccgcgacggcgccgagggccggatccgcctgaaggccaacgccttggtcgacgaacaggtcatcgacgcgctctaccgcgcatcgcaggccggtgtccgggtcgaggtggtggtgcgcggtatctgtgcgctgcgaccgggcgccccgggcttctcggacaacatcgtggtgcggtccatcctgggccggttcctggagcactcgcgggtgatccacttccgggccatcgacgagtactggatcggcagcgcggacatgatgcaccgcaacctcgaccgccgcgtcgaggtgatggcccaggtgaaggatccccggctgaccacacagctcaacgacgtgttcgagtcggcgatggatccggcgacgcgctgctgggagctcggtcccgacgggcactggtcggcgtcgccacgcgagggtgagaccgttcgcgaccatcaggtgtcgatgatgcaccgtcatcggcagccgtga

SEQ ID NO: 6703 - protein, 742 aa, Mycobacterium sp. MCS
MNISHTRWQDDAAMGEDRAMTEAEAAIRAEGTAESTERTPGDSTPEAPPAATSPAIDNALPEDRYLNRELSWLDFNARVLALAADPSLPLLERAKFLAIFASNLDEFYMVRVAGLKRRDEMGLSVRSADGLSPREQLRRISERTQQIASRHARVFLDAVRPALADEGIVIVTWSELDEAERAQLSTYFHEQVFPVLTPLAVDPAHPFPFVSGLSLNLAITVRHPDDGGQHFARIKVPDNVDRFVRLGVRGQTGEVVRFLPMEELIAAFLPVLFPGLEIVEHHAFRITRNADFEVEEDRDEDLLQALERELARRRFGSPVRLEVSDDMTESMLELLLRELDVDPGDVVEVPGLLDLSALWQIYAVDRPALKDRPFVPATPPAFGERETPKSIFSTLRDGDVLVHHPYDSFSTTVQRFIEQAAADPNVLAIKQTLYRTSGDSPIVNALIDAAEAGKQVVALVEIKARFDEQANIKWARALEQAGVHVVYGLIGLKTHCKTALVVRREGSMIRRYCHIGTGNYNPKTARLYEDVGLLTAAPDIGADLTDLFNSLTGYSRKVAYRNLLVAPYGVRRGIIERIEREVAAARDGAEGRIRLKANALVDEQVIDALYRASQAGVRVEVVVRGICALRPGAPGFSDNIVVRSILGRFLEHSRVIHFRAIDEYWIGSADMMHRNLDRRVEVMAQVKDPRLTTQLNDVFESAMDPATRCWELGPDGHWSASPREGETVRDHQVSMMHRHRQP

SEQ ID NO: 6704 - DNA, 2109 bp, Rubrobacter xylanophilus DSM 9941
  CDS (1)..(2109): transl_table=11
atgaccgacgtagtagaagagagaacgcccagcctctccgacccttcgctgtacataaaccgggagctctcgtggctgcagttcaacgaccgggtgctcgcgcaggcccgcgaccggcggcacccgctgctggagcgggtcaggttcgtggccatctccgagaccaacatggacgagttcttcatgatccgggtggccggcttgcagcagcaggtcatctccgggctgcccaacccggtgcccgacgggatgacgcccgaggagcagctctccagaatccacgaccatgccgagcggttcttcgccgagcagcggcgggtgctcaaggggctgctctcggagctggagggggaggggataagggtggtcccctacggggagctgcgggccggcgaccggcggctgttgcgggagcggttcgcgcgcgaggtgcagcccatcctcaccccgctcgccatagacccggcccaccccttcccgcacatctccaacctctcgctcaacctgctggtcgtcatcgaggaggggggcaggaccttcatggcccgggtgaaggtgcccaccaccatcgaccgcttcatacggctgccggaccgggagccgaacaacaacggcgggggccggcccgaggtccggctggtgcgggtggaggaggtcatagcggccaacctcgacgccctcttccccggcaagaacatcgccgccagctacgtcttccaggtcacgcgcaacgcggacttcgtgatcgaggaggacgaggcctccgacctcttgcaggccatcgaggacgagctggagagccggtggttcgggcggagcgcccggctggtggtctccgagcggatgcccgggcggctgcgggagtggctggcgggcaacctggacatagacccgggctcggtgtacgccgtccccgagccgctggggctagcggacctggaggagctcacccggctcgaccggccggacctgctctacccgccggtcacgccccgggtgccggcggagctgaagagcgcgcgctccatcacccaggccatccggcagggggacatcctcctctaccacccctacgactccttcgcgccggtggtggagttcgtccggcacgcggccgccgaccccgacgtgctggccataaagcagaccctctaccgggtggggtccaactcgcccatcgtggaggcgctctccgaggcgcgcgacgaggagacgcaggttgcggtgatcgtggagctgaaggcccgcttcgacgagcagccgaacatcgtctgggcgcgccggctggaggcccagggggtgcacgtggcctacgggctggtggggctcaagacccacgccaagctgtgtctggtggtgcggcgggagggctcgggcctcaggcgctacctgcacctcgggaccggcaactacaaccccagcaccgcgcgggtctacacggacttctcgtacttcaccgacgacccggagctggtcgaggacggctccgatctcttcaactacctcaccggctactccggccagcgggagtaccggcggctgctggtggccccggtggggctgcgggagcacgtgctgcgcctgatcggggagcaggtcgagcgcgcccgggccgggggggaggcccggatcctgtggaagatcaactccctcaccgacccgaaggtcatcgaggccctctaccgggcctcccaggagggggtgagggtggatctcgtggtgcgggggatctgctgcctgcgcccggggatagagggggtgagcgagaacataagggtggtctcgctcgtggggcgttttctggagcacgcccgggtcttcatcttcggggagggcgaggacgagcgggtctacctgggcagcgcggacatgatgcagcgcaacctggataagcgggtggagacgctcttccccctaaaggaggagcggcaccggcggcgggtgcgccggatactagagttgcagctctcggacaacgtgaacgcctgggagctgcggcccgacggctcctgggagtggctgcgccccggggagggcgaggggcgggtggacagccaggccatcctgctggaggaccccgacgctaatccaccgggtgaagaccgctga

SEQ ID NO: 6705 - protein, 702 aa, Rubrobacter xylanophilus DSM 9941
MTDVVEERTPSLSDPSLYINRELSWLQFNDRVLAQARDRRHPLLERVRFVAISETNMDEFFMIRVAGLQQQVISGLPNPVPDGMTPEEQLSRIHDHAERFFAEQRRVLKGLLSELEGEGIRVVPYGELRAGDRRLLRERFAREVQPILTPLAIDPAHPFPHISNLSLNLLVVIEEGGRTFMARVKVPTTIDRFIRLPDREPNNNGGGRPEVRLVRVEEVIAANLDALFPGKNIAASYVFQVTRNADFVIEEDEASDLLQAIEDELESRWFGRSARLVVSERMPGRLREWLAGNLDIDPGSVYAVPEPLGLADLEELTRLDRPDLLYPPVTPRVPAELKSARSITQAIRQGDILLYHPYDSFAPVVEFVRHAAADPDVLAIKQTLYRVGSNSPIVEALSEARDEETQVAVIVELKARFDEQPNIVWARRLEAQGVHVAYGLVGLKTHAKLCLVVRREGSGLRRYLHLGTGNYNPSTARVYTDFSYFTDDPELVEDGSDLFNYLTGYSGQREYRRLLVAPVGLREHVLRLIGEQVERARAGGEARILWKINSLTDPKVIEALYRASQEGVRVDLVVRGICCLRPGIEGVSENIRVVSLVGRFLEHARVFIFGEGEDERVYLGSADMMQRNLDKRVETLFPLKEERHRRRVRRILELQLSDNVNAWELRPDGSWEWLRPGEGEGRVDSQAILLEDPDANPPGEDR

SEQ ID NO: 6706 - DNA, 2133 bp, Leuconostoc mesenteroides subsp. mesenteroides ATCC 8293
  CDS (1)..(2133)
atgacagatctgaaacaacacaaatattatgttaatcgtgaaatgagttggttagcttttaataaacgtgtgcttgaagaagggcgcgatacacaaaatcctatcctagagcgcgctaattttttggcgattacacaaaaaaacatggatgaatggttcatggttcgtgtggcaagcttacaacaacaaatgtttgtaggtcacgataaggtggatgcatctggtttatcgcccaaacaacagctaattaaaatttctgccgctgcaggagaacaaattaaaaaccagtaccaagtattaaatcgtagtattattccgaccatgaaaaagttaggtttttcattggtccataaaaatgatttgacgaatgcacaagttaactttttaaagaaattttttgagaaggagttacgtccagtcttaacgccgatggcgattgatagtacacgaccatttccttttttggcaaatgatacgttaaatattggtgttcgtctgaaaaaaaacgacgaaaaatctgaaaaatatattgcagtattacaggttccagaaacctctggacgagtaatcgcactaccagaagaaaatcaagtgattttagtagaagatgttgtgcaactatttttagatgcgctttttccaggttataccattaaagaatcaaatgtttttcatattttacgtgatatggaattagatgttgctgatgatgaagatacgcccaatattttgcaagaagtacaaagtaaattgcaagaacgggagcgtggacgagttatccgtgtgattgtaagtgcgaacacgggtaaaatgttgatgacccaactcatcaaagccttacaggtccctgatgatagaatttatgaagtgagtggtccgattgatttaacattcatcagttcatggttgaaagtaattgatgcacctacactagaatatacatcatttcatgggtacgaaaatcccgacttgaccgctgataaaatatttgaaagtatacgaaaacgcgattatctgttgcatcacccctatgattcatttaagccagtagttcagtttattcaaacagctgctatagatgatgatgtgctagccattaaaatgactctataccgtgtatccggcaattcaccaattattaaggcactctctgatgctgctcaacgtggcaagcaggtaacggtattgcttgaaatcaaggcacgctttgacgaggaaaataatgtccattgggcgcgtgaattagagcaaaagggcgtccatgtggtctatggacttcgtggactaaaagtgcatgctaaaatggccatggtagtgcgacgggaaagtgatactattcgtcgatatgtccatctcgctactggaaactataatgatgttacagcgaatttttatacggatcttggattgctaacagtggatagcgaattaggtgcagatgtggcttcgatttttaatattctaacgggttactctgatccgagtttttttcatcaactgcatatgtcacctaatggcattcgtgagtttatttatgaaaaaataaacgtcgaaattaagaatgctaaggcaggaaaaccatccggtattaagatgaaattcaattcgttatctgatgaacgaatgattcgtcatttgtatgaagcaagtgaagccggtgtaccagtagaattgatagttcgaggaattacaatgctcaaggttggtattccaaaagtcagtgaaacgatagctgtgcattcaattgttggccgttttttggaacatagtcgggtgttcatctttcataatgatgatagtccacaagtttatttatcttctgcagatttaatgacaagaaacttagatcgacgtgttgaattgttattcccaattcgcaatgctggtttgtctcaacaggtgattaatatttttgaaatcatgtgggcagataatgttaaaacacgtgtcttacaaccagatggatcgtttgataaaattgatcgtagaggcttatcctctgttaacgcacaagaaatgtttatagctgaatctatggtcaaacaaattgagttaaagcaacaacaggaccgagaaaatacgcaaaaagaatttgagccaatcaacaacccgtttataggaggtgaatcatga

SEQ ID NO: 6707 - protein, 710 aa, Leuconostoc mesenteroides subsp. mesenteroides ATCC 8293
MTDLKQHKYYVNREMSWLAFNKRVLEEGRDTQNPILERANFLAITQKNMDEWFMVRVASLQQQMFVGHDKVDASGLSPKQQLIKISAAAGEQIKNQYQVLNRSIIPTMKKLGFSLVHKNDLTNAQVNFLKKFFEKELRPVLTPMAIDSTRPFPFLANDTLNIGVRLKKNDEKSEKYIAVLQVPETSGRVIALPEENQVILVEDVVQLFLDALFPGYTIKESNVFHILRDMELDVADDEDTPNILQEVQSKLQERERGRVIRVIVSANTGKMLMTQLIKALQVPDDRIYEVSGPIDLTFISSWLKVIDAPTLEYTSFHGYENPDLTADKIFESIRKRDYLLHHPYDSFKPVVQFIQTAAIDDDVLAIKMTLYRVSGNSPIIKALSDAAQRGKQVTVLLEIKARFDEENNVHWARELEQKGVHVVYGLRGLKVHAKMAMVVRRESDTIRRYVHLATGNYNDVTANFYTDLGLLTVDSELGADVASIFNILTGYSDPSFFHQLHMSPNGIREFIYEKINVEIKNAKAGKPSGIKMKFNSLSDERMIRHLYEASEAGVPVELIVRGITMLKVGIPKVSETIAVHSIVGRFLEHSRVFIFHNDDSPQVYLSSADLMTRNLDRRVELLFPIRNAGLSQQVINIFEIMWADNVKTRVLQPDGSFDKIDRRGLSSVNAQEMFIAESMVKQIELKQQQDRENTQKEFEPINNPFIGGES

SEQ ID NO: 6708 - DNA, 2181 bp, Nostoc punctiforme PCC 73102
  CDS (1)..(2181)
atggcaaaatctaagaaaagcgctacccccaccaatctcagcgatccacaatattatcttaaccgagagttaagctggttagaatttaatggcagggtattacatgaagcctgtgacgatcgcactcctcttcttgaacgcctgaagtttttagcaatcttcaactctaatttggatgagtttttcatggtgcgagttgctggtttaaagcaacaagtagaggcgaaagtcagcctattaactcctgatggtcggacaccacaacaacagctagatgatattaggtctaccctgattcctcatgtcaagaaagagcatcaacattttgaacaagtacttcgtcctctactagcaaatcatggcatccatattctggattacataaatttgaatcaaaaacagcgaactcatctcaataattattttgaggaacaagtctttccagtcttgacacctctggctgtcgatcctagtcatccttttccatttatttctaatctcagtctgaatctggctgttgtggtcaaaaacccagataccgaagaagaattctttgccagagttaaagtccccagtgttctcccacgatttttaccgataccacctgagttgggagatcaaaataacggcaaacctgctcactggactggagtacctttagaacaagcgatcgctcataacttagaatctctatttccagggatgaatattcaagaatatcatccgttccgcattacccgtgatgccgatttggtattggaagaagatgaagcagatgatttgttattagcgattgaacaggaattgcgaaaacggcggctaggtgggagtccagtccggctagaaattcaatcccagactcctgaaatagtgcgatcgcgattattgcacgatttggaattaacagaaagcgatctctacgaagtagacggtcttttgggcctgcgggatttgatgtattttatgtccttgccattgccagaactcaaagatccaccacgccaatctgttgtaccatcacgcttgcaaaggctgagagaaccgagtttagacccagatgcgctagagacggacgagggaaaagatttttttgctgtgattcgggaaaaggatttgctagtacaccatccctatcaatccttttcggctacggtggtgcgctttatcacccatgctgcctatgatccgaatgtgttagccatcaagatgaccctttaccggacttctggcgattcgcccatcgtcaacgccttaattgccgctgctgaaaatggcaagcaagtatccgtgctagtggaattaaaggcgcgatttgatgaggagaataatatttattgggcaaaacggctagaaagagttggagttcatgtagtctatggtttagtagggctgaaaactcacagtaaaaccgttatggtggtacggcgcgaaaaagatcgaatccgccgctacgtacatattggcactggtaactataatcccaaaacagcacggctatatacagatttgggattgtttagttgccgtgaagaattaggtgctgacatcacagatttatttaatttcttgacaggatactccctgcaaaagtcttatcgagaattgttggttgcacctgtgaatatgcgcgatcgctttttggcactaattcatcgcgaaattgaaaatgttcaaaatggattttctggacgcattgttgccaaaatgaattccttagtcgatccagaaattatcgccacattatatgaagcttcccgcgccggagtacaaatagacttaattattaggggcgtttgctgtttgcgtccaggactcaaagacattagtgaaaatattcgcatcatcagcattgttggtcgctttttagaacactctcggatttattattttcataacaatacacaggaggaaatctttatcggtagtgccgactggatgcgccgcaacctagatcgtcgagtcgaagtaattaccccagtaaaagacccagatattgccaaggatttgcaagaaatcatgggaattatgcttgcggataatcgccaagcttgggaattacaagccgatggcacttacattcaacgccgtccttatgatgattctccagaagccaattcacaaaaaattcttatgaatatggcattacgctcaactggcgtaacctcaaacttgattgattaa

SEQ ID NO: 6709 - protein, 726 aa, Nostoc punctiforme PCC 73102
MAKSKKSATPTNLSDPQYYLNRELSWLEFNGRVLHEACDDRTPLLERLKFLAIFNSNLDEFFMVRVAGLKQQVEAKVSLLTPDGRTPQQQLDDIRSTLIPHVKKEHQHFEQVLRPLLANHGIHILDYINLNQKQRTHLNNYFEEQVFPVLTPLAVDPSHPFPFISNLSLNLAVVVKNPDTEEEFFARVKVPSVLPRFLPIPPELGDQNNGKPAHWTGVPLEQAIAHNLESLFPGMNIQEYHPFRITRDADLVLEEDEADDLLLAIEQELRKRRLGGSPVRLEIQSQTPEIVRSRLLHDLELTESDLYEVDGLLGLRDLMYFMSLPLPELKDPPRQSVVPSRLQRLREPSLDPDALETDEGKDFFAVIREKDLLVHHPYQSFSATVVRFITHAAYDPNVLAIKMTLYRTSGDSPIVNALIAAAENGKQVSVLVELKARFDEENNIYWAKRLERVGVHVVYGLVGLKTHSKTVMVVRREKDRIRRYVHIGTGNYNPKTARLYTDLGLFSCREELGADITDLFNFLTGYSLQKSYRELLVAPVNMRDRFLALIHREIENVQNGFSGRIVAKMNSLVDPEIIATLYEASRAGVQIDLIIRGVCCLRPGLKDISENIRIISIVGRFLEHSRIYYFHNNTQEEIFIGSADWMRRNLDRRVEVITPVKDPDIAKDLQEIMGIMLADNRQAWELQADGTYIQRRPYDDSPEANSQKILMNMALRSTGVTSNLID

SEQ ID NO: 6710 - DNA, 2238 bp, Bifidobacterium longum DJO10A
  CDS (1)..(2238)
atggcacagatatttgacgcaccctcgaaggcaattctgcgcagccaaatcgcagagcatattgccgaaaacgacaacaacgaccgccgcgtcgatcaggaaggcgaggcaccgctgcccaaggaccgtttcttcgaccgcgagctcagctggctcaagttcaaccagcgcgtgctcgaatgtgcggagaacgaagacatgcccctgctcgagcgcgccaacttcgccgcgatcttcgcctcgaaccttgacgagttcttcatggtccgcgtcgccggcctgaagcgccgtatcgactcgggcatcgccgtgccgtctgccgccggcctgagcccgcgtcagcagctgcgcgcgatcagcgagaccgcacaccgtctgcaagacgagcacgcacattacacgatcgacaccattctgccggaattggagaaggagcgcatcgtcctgctgacgtgggacaagctcacatcctccgagcaggagcgcctctcgcgctactaccgccagcaggtgttcccggtcctgacgccgctcgccgtggatccggcccacccgttcccctacatttccggcggttccatcaacctggccgtgattgtggagaacccggcctccggcaagtcgcacttcgcccgcgtcaagatcccgggcaacctgccgcgcctggtgccggtggacgacatgaccgatgaggagtccaaggacgagcgttacggcttcatcgccatggaaaagctcatcgccgcgcatctggaatccctgttcccgggcatgatcatcaaggaggcccgctccttccgcgtgactcgtaacgaggacatcgacgtggaagaggatgacgccgagaacctgctcaacgccatggagaaggagctgctgcgccgccgcttcggaccgccgatccgcctggagatcacggacaccacgagccccttcctctcccagctgctcgccgaccagctcggcgtgagccaggacgaggtataccgtctgcccagcccgctggacctgaccgtgctctttgagctcggcagcgtggaccgcccggacctgaagaaccgtccgttcgtgccgaccacgaaccgtcagatcgccgaggtcgagtcctcccgcgcacaggatattttcgctgccatccgcgagcgcgacatcctgctgcatcacccctatgactccttctccacttccgtgcaggccttccttgcgcaggccgccgcggacccgaaggtgctggccatcaagcagaccctgtaccgcaccagctccaactcgccgatcatcgacgccctgatcgacgccgctcatgccggcaagcaggtgctggctttggtggaaatcaaggctcgtttcgacgaggacgccaacatcgcgtgggcccgcaagctcgaacgcgccggcgtgcacgtggtgtacggcatcgtgggcttgaagacccactgcaagctcatcgaggtcgtgcgtcaggaagcggacggtctgcgccgctactgccacgtaggcaccggcaactacaacccgaagaccgcgcgactgtacaccgatctgggtctgctgacctgcgacccggtggtcggccaggatctgactcgtctgttcaaccagctctccggttacgcgccaaagtccagcttccaccgtctgctggtggccccgcgcaccgtgcgcaccggtctaatccagcgcatccgccgcgaggaggacgccgcccgcgctggcaaggaggcctggatcaagatcaaggtcaactccatcgtggacgagaagaccatcgacgccttgtaccgtgcctctcaggccggcgtgaagatcgacatcgtcgaacgcggcatctgcgctctgaagcccggcgttcccggcctgtccgagaacatccgcgtgcgttcgattctcggccgcttcctggagcactcccgcatctacgccttctgcaacgcggacggcccgcagatcggcgagggtccggcttccggcccggaggtctacatcggttcggctgacctcatgcaccgtaaccttgaccgccgtgtggaggctctggtgcgtgtcaccgccccggagcaggtcgacgggctcatcaagtacgtggacctgcagatggccgactccaccatgagctggcacatgcagcccgacggcacgtatgtgctgcacaccaaggacgacgagggccgcccgctggccgacagtcaggaatatctgattcgcaagcaccagcgccgccccaattcgcacaactga

SEQ ID NO: 6711 - protein, 745 aa, Bifidobacterium longum DJO10A
MAQIFDAPSKAILRSQIAEHIAENDNNDRRVDQEGEAPLPKDRFFDRELSWLKFNQRVLECAENEDMPLLERANFAAIFASNLDEFFMVRVAGLKRRIDSGIAVPSAAGLSPRQQLRAISETAHRLQDEHAHYTIDTILPELEKERIVLLTWDKLTSSEQERLSRYYRQQVFPVLTPLAVDPAHPFPYISGGSINLAVIVENPASGKSHFARVKIPGNLPRLVPVDDMTDEESKDERYGFIAMEKLIAAHLESLFPGMIIKEARSFRVTRNEDIDVEEDDAENLLNAMEKELLRRRFGPPIRLEITDTTSPFLSQLLADQLGVSQDEVYRLPSPLDLTVLFELGSVDRPDLKNRPFVPTTNRQIAEVESSRAQDIFAAIRERDILLHHPYDSFSTSVQAFLAQAAADPKVLAIKQTLYRTSSNSPIIDALIDAAHAGKQVLALVEIKARFDEDANIAWARKLERAGVHVVYGIVGLKTHCKLIEVVRQEADGLRRYCHVGTGNYNPKTARLYTDLGLLTCDPVVGQDLTRLFNQLSGYAPKSSFHRLLVAPRTVRTGLIQRIRREEDAARAGKEAWIKIKVNSIVDEKTIDALYRASQAGVKIDIVERGICALKPGVPGLSENIRVRSILGRFLEHSRIYAFCNADGPQIGEGPASGPEVYIGSADLMHRNLDRRVEALVRVTAPEQVDGLIKYVDLQMADSTMSWHMQPDGTYVLHTKDDEGRPLADSQEYLIRKHQRRPNSHN

SEQ ID NO: 6712 - DNA, 2109 bp, Bacillus cereus G9241
  CDS (1)..(2109): transl_table=11
atggaattatcgaaggggaatatagtaaatttaaatgatacagcttattacaacaatcgagagttaagttggttagcatttaatgaacgtgtactacaagaagcacaagatgaaacgaatccactcttagaaagattaaagtttattagcatttttagctcaaatttagatgaattctttatggtacgcgtggcaggattgaaggatcaagtgagtgctggttttaaccaaccagaaaataaggccggcttaacaccaaaaaagcaactaaataaaattgcgataaaagcacatgaattaatgaccgtacagtatggtacgtttaaaaattatgtgttgccagcgctggagttagaggggattgagcgtttaacatttcatgatttgacgaaagaacagagagaatttatagaagagtattttgatgaacaaattttcccagtcttaacacctgtggctatcgatgcatatcgtccatttcctatgttattaaataaaagtttaaatttagctactcttttatatgatgagaaacaagtggaagaagaaaaccgcacgaagttaggaattgtacaagttccttcactactggaacgtttcatatttttaccgagtgaaggacaaaagcataaatttattttattagaagacgtaattagtagttttactcataaattatttacaggatataaagtatcatctgttactcgtttccgtattacacgcaatgcggatttaacaattcacgaagaaggtgcgagagatttattaaaggtaattgaaaaagaattaaaaaagcgtaagtggggagctgctgtacgtttagaagttggcaaagagcatattgatgaaagagtattagcattattatatgaggtgttggaagtaaaggatgaagatgtgtatataatggatggaccgttagatttaacatgtctattttctttatataaaaaactagctcctttatatgaacatctagtatatccggctcttattccgcaacggcctcaagacttaggggatgcagaagatgtatttgaaaaagcgattgagcatgatattttattacatcatccttttgaatcgtttcagccagtagttgattttatccgtgatgcggcagacgatccgaatgtacttgcaattaaacaaacattatatcgagtaagtggggattcgccgattattcaggcgctaaaggtagcggctgaaaaagggaagcaagtgacagtattagttgaattaaaggcaagatttgatgaagaaaataatgtgcattgggctaaagaattagaacaggcgggatgtcatgttatttacggtgtaagtcatttgaaaacacatagtaaaattacactagttgtaagaagaaaaaacggaaaaatcgaaaggttcgtacatcttgggaccggaaattataatgatgcaaccgcaaagctatataccgattttggctatattacatcacgaaaagactttggggtcgatgcaacaaatttctttaattatttgagtggttatacaacgaaaccgcattttcatcatttatcggttgcgccatttgatataagagagcaatttatggatttaatagatgaagaaattcgttatcataggcagtatggaaatggatatatcattgctaaaatgaattcattaactgataaaccactcattaaaaaaatgtatgaagcatcacaagctggagtaaaggtagaactcatcgttcgaggaacatgttgcctacgacctggtattccaaatgtaagtgaaaatattcgggtagttagtgttgtcgggagatatttagaacatagtcgaatttattatttccatcataatggggaagagaaaatatacttatcttcagctgactggatgacgcggaatatggagaagcgagtagaaatatccttcccgatattagatattgaaatgaaggcgagaattaaggcaattttacagcttactttagctgataatgtgaaaacgcgcgaacaaaataaagatggtgactattattatgttattaataacggtgcagaagagattgatagccaagtgaagttgtttaagatggcgtatcaaaacacagatgctgaataa

SEQ ID NO: 6713 - protein, 702 aa, Bacillus cereus G9241
MELSKGNIVNLNDTAYYNNRELSWLAFNERVLQEAQDETNPLLERLKFISIFSSNLDEFFMVRVAGLKDQVSAGFNQPENKAGLTPKKQLNKIAIKAHELMTVQYGTFKNYVLPALELEGIERLTFHDLTKEQREFIEEYFDEQIFPVLTPVAIDAYRPFPMLLNKSLNLATLLYDEKQVEEENRTKLGIVQVPSLLERFIFLPSEGQKHKFILLEDVISSFTHKLFTGYKVSSVTRFRITRNADLTIHEEGARDLLKVIEKELKKRKWGAAVRLEVGKEHIDERVLALLYEVLEVKDEDVYIMDGPLDLTCLFSLYKKLAPLYEHLVYPALIPQRPQDLGDAEDVFEKAIEHDILLHHPFESFQPVVDFIRDAADDPNVLAIKQTLYRVSGDSPIIQALKVAAEKGKQVTVLVELKARFDEENNVHWAKELEQAGCHVIYGVSHLKTHSKITLVVRRKNGKIERFVHLGTGNYNDATAKLYTDFGYITSRKDFGVDATNFFNYLSGYTTKPHFHHLSVAPFDIREQFMDLIDEEIRYHRQYGNGYIIAKMNSLTDKPLIKKMYEASQAGVKVELIVRGTCCLRPGIPNVSENIRVVSVVGRYLEHSRIYYFHHNGEEKIYLSSADWMTRNMEKRVEISFPILDIEMKARIKAILQLTLADNVKTREQNKDGDYYYVINNGAEEIDSQVKLFKMAYQNTDAE

SEQ ID NO: 6714 - DNA, 2211 bp, Pseudomonas aeruginosa UCBPP-PA14
  CDS (1)..(2211)
atgaatacgcagcaaggacttgatgagatcgaacgtatcgccgccgacgaaaccgtagtggcgaacgtggaaagcgaagcagaagtgaagatggccgaaacgatcccgatggaaacgccacctgcggtggttcccagtgtggatgacagcagcctgtacattcatcgcgagctctcccagttgcagttcaacatccgcgtgctggaacaggcgctggacgagtcctacccgctcctggagcggctgaagttcctcctcatcttctcgagcaacctcgacgaattcttcgagatccgcatcgccggcctgaagaagcagatcaccttcgcccgcgagcaggccggcgccgacggcctgctgccgcaccaggccctggcgcggatcagcgagctggtccacgagcaggtatcgcggcagtaccggatcctcaacgagaccctgttgccggagctggccaagcaccagatccgcttcatccgccggcgtcactggacgctgaagatcaagacctgggtgcggcgcttcttccgcgacgagatcgcgccgatcatcaccccgatcggcctcgacccgacccacccgttcccgctgctggtgaacaagagcctcaacttcatcgtcgagctggaggggatggatgccttcggccgcgactccggcctggcgatcatcccggcgccgcgcctgctgccacggatcatcaagctgccggaagacgttggcggcgagggcgacaactacgtgttcctgtcgtcgatgatccacgcccacgccgacgacctgttccccggcatgaaggtgaagggctgctaccagttccgcctgacccgcaacgccgacctgtcggtggacaccgaggatgtcgaggacctggcccgcgcgctgcgcggcgagctgttctcgcgtcgctacggggacgcggtacgcctggaggtggtggatacctgcccgcagaacctgaccaactacctgctcaagcaattcggcctgtccgaaagcgagttgtacaaggtcagcggcccggtcaacctgacccgcctgttcagcgtcaccggcctggaaagccatccggagctgcagtacccgcccttcaccccggcgatcccgcgtcttttgcagaagaaggaaaacctcttcaacgtcctcagcaagctcgatgtgttgctgatgcacccgttcgaatccttcaccccggtgatcgacctgctgcgccaggccgccaaggatccgaacgtgctggcgatcaagcagaccctgtaccgcagcggtgccaactctgagatcgtcgacgccctggtcgaggcggcacgcaacggcaaggaggtcaccgcggtgatcgagctgcgcgcccgcttcgacgaagagtccaacctgcaactggccagccgcctgcaacaggccggcgcggtagtgatctacggcgtggtcggcttcaagacccacgccaagatgatgctgatcctccgtcgcgaggacggcgaactgcgccgctacgcgcacctgggcaccggcaactaccatgccggcaacgctcgcctgtacaccgactacagcctgctgaccgccgacgtggcgctctgcgaggacctgcacaagctgttcaaccagctgatcgggatgggcaagacgctgcgcatgaagaagctgttgcatgcgccgttcaccctgaagaagaacctgctggaaatgatcaaccgcgaggcggcccaggcggcgctcggccagccggcgcacatcatggccaaggtcaactcgctgaccgatccgaaggtcatccgcgccctgtacaaggccagccaggccggggtcaggatcgacctggtggtgcgtggcatgtgctgcctgcggccaggcatcccgggggtctcgcacaatatccacgtgcgctcgatcatcggacgcttcctcgagcacagccgcatctactacttcctcaacggcggcgacgagaagctctatctctccagcgccgactggatggagcgcaacctcgacatgcgcgtcgagacctgcttcccggtggaaggcaagaagctggtgcagcgggtcaagaaggaactggaaacgtatctgaccgacaacacccaggcctgggtgttgcaggccgacggtagctaccagcggctcagtcccaccggtaaccagaacccccgcaatacccaggcgaccctgctggagaagctggccgcgccggtgcttaccgcacgttga

SEQ ID NO: 6715 - protein, 736 aa, Pseudomonas aeruginosa UCBPP-PA14
MNTQQGLDEIERIAADETVVANVESEAEVKMAETIPMETPPAVVPSVDDSSLYIHRELSQLQFNIRVLEQALDESYPLLERLKFLLIFSSNLDEFFEIRIAGLKKQITFAREQAGADGLLPHQALARISELVHEQVSRQYRILNETLLPELAKHQIRFIRRRHWTLKIKTWVRRFFRDEIAPIITPIGLDPTHPFPLLVNKSLNFIVELEGMDAFGRDSGLAIIPAPRLLPRIIKLPEDVGGEGDNYVFLSSMIHAHADDLFPGMKVKGCYQFRLTRNADLSVDTEDVEDLARALRGELFSRRYGDAVRLEVVDTCPQNLTNYLLKQFGLSESELYKVSGPVNLTRLFSVTGLESHPELQYPPFTPAIPRLLQKKENLFNVLSKLDVLLMHPFESFTPVIDLLRQAAKDPNVLAIKQTLYRSGANSEIVDALVEAARNGKEVTAVIELRARFDEESNLQLASRLQQAGAVVIYGVVGFKTHAKMMLILRREDGELRRYAHLGTGNYHAGNARLYTDYSLLTADVALCEDLHKLFNQLIGMGKTLRMKKLLHAPFTLKKNLLEMINREAAQAALGQPAHIMAKVNSLTDPKVIRALYKASQAGVRIDLVVRGMCCLRPGIPGVSHNIHVRSIIGRFLEHSRIYYFLNGGDEKLYLSSADWMERNLDMRVETCFPVEGKKLVQRVKKELETYLTDNTQAWVLQADGSYQRLSPTGNQNPRNTQATLLEKLAAPVLTAR

SEQ ID NO: 6716 - DNA, 2064 bp, Burkholderia vietnamiensis G4
  CDS (1)..(2064): transl_table=11
atgtccgctcgctacccgctactcaatcgtgaactcggcatcctcggtttcaacgagcgtgtgctggcccaggccgccgatccgcaagtgccgctgctcgagcgcctgcgcttcatctgcatcaccagcagcaacctcgacgaattcttcgaggtgcggatggcgggcctgcaggaacagatccgcgacaatcccggtgcgctgacgcccgacggcatgtcgctgcaacacgcttacgatctcgtcgtcgagcgcgcgcagcggctcgtccatcgccagtacacgatgctgcacgaaaccgtgctgcccgcgctcgaacaggaaggcatctacttccacgcgagcgacacctggaacgacgcgcagctcgaatgggcgcgcggctactttctcgacgaactgctgccggtgctcacgccgatcggcctcgaccccgcgcatccgttcccgcgcgtgctgaacaagagcctgaacttcgtggtcgagctcgaaggccgcgacgcgttcggccggcaggcggtgatgggcatcgtgcaggcgccgcgcgcgctgccgcgcgtggtgcgcatgccgcagtcgctgtcgggcttcgagcacggcttcgtgctgctcagctcgttcatgcaacgcttcgtcggcgaactgttcccgcagctcgtcgtgaagagctgcaaccagttccgcatcacccgcaacagcgagctgttcgtcgacgaagacgaaatcaccaacctgcgcgtcgcgctgcaaggcgaactgcccgcgcgtcacctcggcaacgcggtgcgcctcgaagtctcggccgacacgccggcgcacatcgtgcgccgcctgctcgacgaaagcagcctcggcgacaaggactgctaccgcgtggcaggctcggtgaacctcgtgcggctgatgcagattcccgatctcgtcgaccgtcccgacctgaaattcgcgccgttcgtcgcgtcgatcccgcctgcaatcgcgaacgcgccgacgatgttcgacgcgatcgacgccggcgacatcctgctgcaccatccgtacgagagcttccagccggtgctcgagctgctgcagcaggccgcgaaggatccgagcgtggtcgcgatcaagcagacgatctatcgcaccggcaccgattcgccgctgatggacgcactgatggaagccgcgcgcaacggcaaggaagtgacggtcgtcgtcgagctgctcgcgcgcttcgacgaggagaccaacatcaactgggcgtcgcagctcgaagcggtcggcgcgcacgtcgtgtacggcgtggtcggccacaagtgccacgcgaagatgatgctgatcgtgcggcgcgtggtcgaaggcggcaaggcgacgctgcgccgctacgtccacctcggcaccggcaactatcatccgcgcaccgcgcgcctctacaccgacttcgggctgatgacggccgaccagaagatctgcgaggacgtgcaccacgtgttccagcagctgaccggcatcggcggcgagctgacgctgcacgagctgtggcagtcgccgttcacgctgcatccgcgcatcatcgattcgatccgcgccgagatcgacaacgcgcgcgccggcaagcgcgcccgcatcgtcgcgaagatgaacgcgctgctcgagccgtcggtgatcgccgcgctgtacgaagcgtcgcaggccggcgtcaaggtcgacctgatcgtgcgcggcgtgtgcgcactgaagccgggcgtgccggggctgtcggagaacatcacggtgcgctcgatcgtcggccgcttcctcgaacatcaccgcatctactatttccatgcgggcggcgccgaggaagtctatctgtcgagcgccgactggatggaccgcaacctgttccgccgcgtcgaagtcgcgttcccgatccgcgcgcgcaagctcaagcgccgcgtgatcgccgaagggctgtcggtctgcctcggcgacaaccagtcggcctggctgatgcagagcgacggccactaccgccgccggcgcgcgggcaagacggtccgcaatgcgcagctcgggctgctcgcgaagttctgttcgtag

SEQ ID NO: 6717 - protein, 687 aa, Burkholderia vietnamiensis G4
MSARYPLLNRELGILGFNERVLAQAADPQVPLLERLRFICITSSNLDEFFEVRMAGLQEQIRDNPGALTPDGMSLQHAYDLVVERAQRLVHRQYTMLHETVLPALEQEGIYFHASDTWNDAQLEWARGYFLDELLPVLTPIGLDPAHPFPRVLNKSLNFVVELEGRDAFGRQAVMGIVQAPRALPRVVRMPQSLSGFEHGFVLLSSFMQRFVGELFPQLVVKSCNQFRITRNSELFVDEDEITNLRVALQGELPARHLGNAVRLEVSADTPAHIVRRLLDESSLGDKDCYRVAGSVNLVRLMQIPDLVDRPDLKFAPFVASIPPAIANAPTMFDAIDAGDILLHHPYESFQPVLELLQQAAKDPSVVAIKQTIYRTGTDSPLMDALMEAARNGKEVTVVVELLARFDEETNINWASQLEAVGAHVVYGVVGHKCHAKMMLIVRRVVEGGKATLRRYVHLGTGNYHPRTARLYTDFGLMTADQKICEDVHHVFQQLTGIGGELTLHELWQSPFTLHPRIIDSIRAEIDNARAGKRARIVAKMNALLEPSVIAALYEASQAGVKVDLIVRGVCALKPGVPGLSENITVRSIVGRFLEHHRIYYFHAGGAEEVYLSSADWMDRNLFRRVEVAFPIRARKLKRRVIAEGLSVCLGDNQSAWLMQSDGHYRRRRAGKTVRNAQLGLLAKFCS

SEQ ID NO: 6718 - DNA, 2175 bp, Crocosphaera watsonii WH 8501
  CDS (1)..(2175): transl_table=11
atggcacaggcaaaagttaaagaagacaatatcaatcttaaagatccccaatactattttaatcgtgaattgagttggttagaattcaatcatcgtgttttaaacgaagcgttagatagtcggactcctttgttagaaagactgaagtttgccgccatttttagttctaacctagacgaatttttcatggttagggttgctgtattaaagcaacaacttaaagcaggtgtaagaaagttaagcgccgatggaagaagccctttagaacaattaaaagctattagcgatcgccttcgtcctttagtgaaagatcaagatcatctttttgaatataccctgagaaatttattaattaatcaaggcatttatttaattaattatgtagacttagatcaagaacaaaggacttatttacatcagtattttgaagataatatttttcctgctttaacccccttagcagttgatccttctcaccctttcccctacatttctaatcttagtttaaacttgggggtggtggttcgtgatcctgatacagaagaagaacattttgcaagggtaaaagtacctggagttttgcctcgttttgtggcactccccccagaattaagacatcaagaagacgagcaaacagctatttggacgggggttcctttagaacaagttattgcccacaatcttgaggcattatttcctgggatgattgtgcaagagtgtcatggttttcgagtgacaagaaatgcagatttctccgtggaagaagacgaagcagatgacctacttttggccattgaacaagagttaagaaaaagacatattggtaagtctgcggtaagattagaaattcatgcagcgacccctgaacccatcagaaaacaactgatagaagatttaggcttagaggaaattgatgtctatgatatcgagggtttattaggattaaaagacctattttattttatgtctcttccttgtccagacttgaaagataaatcctggagcgcagtagttccccctaaattacaacgtataaaagagattatagatggtaacgatgacgggaaaattcaacaggatggagaggatattttttctctaattcgtcaggaggatattttagttcatcatccctatcaatcttttagtgcttctgtgcaacaatttattactcaagctgcttatgatcccgatgttttaactattaaaatgactctctatagaacgtcaggagattcacccattgttaatgctttaattgctgctgctgctaatgggaaacaagtggctgctttggtggaattaaaagctagatttgatgaagaaaataacattatttgggcccgtcgtttagaacaatcaggggttcacgttgtttatggattggtgggattaaaaacccacacaaaaattattttagttgtgcgtaaagaaggagagaaaatacgtcgttatgttcatattggcacgggtaattataatcctaaaactgctaaattgtatacggatttaggtctattaagttgtcgagagaaattaggggcagatttaacggatttattcaactttttaactggttattctcgacaaaaatcctatcgtaaattgttagttgctcctgttaatatgcgcgagcgcatggtttctatgattaatcgagaagcagaacattgtcgcaatggagggagtggtcgtattgtggcaaaaatgaattctttagtagatccacaaatcattgcaaccctttataaagctagtcaagcaggggttaatatcgatttagttatacggggaatttgttgtttaaaacccggtatcaagggggtgagtgataatattaatgttattagtattgttggccgtttcttggaacattcacgaattttttacttccataatgggggagaagaagagatttatattggtagtgcagactggatgactcgtaatctttctcgtcgagttgaagcgatcacccctgtagaagatccgaaaattgctcaacaattacaagaaattttaggggttatgttagcagataaccgtcaagggtgggaattacaatccgatggtagttatattcaacgtcaacctcaaagcaaagagtatgaacaaagttctcaaaaaacctttatggaaatggcgttgcaatctagtgacatcctccccaactaa

SEQ ID NO: 6719 - protein, 724 aa, Crocosphaera watsonii WH 8501
MAQAKVKEDNINLKDPQYYFNRELSWLEFNHRVLNEALDSRTPLLERLKFAAIFSSNLDEFFMVRVAVLKQQLKAGVRKLSADGRSPLEQLKAISDRLRPLVKDQDHLFEYTLRNLLINQGIYLINYVDLDQEQRTYLHQYFEDNIFPALTPLAVDPSHPFPYISNLSLNLGVVVRDPDTEEEHFARVKVPGVLPRFVALPPELRHQEDEQTAIWTGVPLEQVIAHNLEALFPGMIVQECHGFRVTRNADFSVEEDEADDLLLAIEQELRKRHIGKSAVRLEIHAATPEPIRKQLIEDLGLEEIDVYDIEGLLGLKDLFYFMSLPCPDLKDKSWSAVVPPKLQRIKEIIDGNDDGKIQQDGEDIFSLIRQEDILVHHPYQSFSASVQQFITQAAYDPDVLTIKMTLYRTSGDSPIVNALIAAAANGKQVAALVELKARFDEENNIIWARRLEQSGVHVVYGLVGLKTHTKIILVVRKEGEKIRRYVHIGTGNYNPKTAKLYTDLGLLSCREKLGADLTDLFNFLTGYSRQKSYRKLLVAPVNMRERMVSMINREAEHCRNGGSGRIVAKMNSLVDPQIIATLYKASQAGVNIDLVIRGICCLKPGIKGVSDNINVISIVGRFLEHSRIFYFHNGGEEEIYIGSADWMTRNLSRRVEAITPVEDPKIAQQLQEILGVMLADNRQGWELQSDGSYIQRQPQSKEYEQSSQKTFMEMALQSSDILPN

SEQ ID NO: 6720 - DNA, 2169 bp, Solibacter usitatus Ellin6076
  CDS (1)..(2169): transl_table=11
atggccgtcagctccagtagtgcgccttcgcgggcaaagaaacaccaggcacccacacccgacctgactgaccccagcctgtatgtcaatcgcgaactcggtctgctgagtttccagtggcgggtattggaggaggcgcgcgacggtacgaatccgctgttggagcgcatccgcttcctgagcatcgtgggatcgaacctgaacgaatttttcatggtgcgggtggccagtttgaacgctcagctggacgcggggattccggagttcgggccggaccggatgagcccgagcgcgcaactgatcgcgatccggcgcgagaccaagcgactgatggaggcggcacaccagtgcctggagacggaactcagaccggagctgagcgacgaaggaattcacatcctgccatacgacgatctcaatgaccggcagctgcagagctgcgagagttatttttcggagatcattttcccggtgctgacgccgctggcgttcgaccagggaaggccgtttccgcacatctcgaacctgagcctgaacctggccgtactgatcctggatgcgggaggcgagcaacggtttgcgcggctgaaggtgccagattcgctgcccgcgctggtaccgttgacgcggacgcagaaggccgcctcgaagcgcagccgcccgcggcgggagcaatcctacgtgtggattgaagaagtgatcgcggcgaatctggacagcctttttcccgggatgcagattgtggaggcgcacccgttccacgtgacgcgcgacgcggatattgcgatcaaggaactggaagccgacgatctgctggagacgatcgaggaaggcgtgcggcagcgcaagttcggcagcgtggtgcggctgcaggtcaaccagcagatgccgcaacacattctgcagatcctgatggagaacctggaagtggaaccgagcgaggtatatcgctcgaaggggctgctgggattgagccggctggcggcgctgacgcagatcgaccgcccggatttgaaatacacgccgtttctggcttcgtcgccgccggagttacagccggccaacgaagaagaggacctgttcgcgattatccggcagcgcgacgtgctgctgcaccatccgttccaatcgtttcagccggtggtggattttctgcgcaaggcggcgcgcgatccggatgtgctggcgatcaaggtggtgctgtatcgcgtggggcggaattcgccggtggtggaagcgctgctggaagcgatcgaggagggcaagcaagtcgcggtgctgatggagttgaaggcacgcttcgacgaggagagcaatatcgagtgggccaagacgctggaaaaagcgggctgccacgtggtgtacggcctgcccgggttgaagatccactgcaaggccgcggtagtgctgcggagggagagcggcgcgatccggccgtacatgcacctggccacggggaattacaacgtggtaacggcgcacttgtacaccgatatcggactgttcacctgtaatcccgagatctcgacggacctgctggatcttttcaattttctgacgggctactcggcgaagcgcgactatcagaagctgctggtggcacccgtgaacttgcgcgagcgcctgcaaaagctggtggagcgcgaggtggagaagcacgagaaggagggcaagggccatcttgtgttcaagatgaatgcgctggtggatccgcagatggtgcgcatgttgtacaaggcgtcgcaggcgggtgtgaagatcgacctgctggtgcgcggcatctgctgtctgcgtccgggcgtgcctggcgtgagcgagacgatccgtgtgacgtcgatcgtggggcgatttctggaacacagccggatcttctatttccgcaatggcggagatgaggagatttatctggggagtgctgatctgatgccgcgcaatctgaatcgccgcgtggagatcttgtttccgctaaaggatccggatttattgcggcgcgtgcgggatggaattctggcggagtacttgacggacaacgtgaaggcccggcggatgatggcggatggaagttataaacgcgtgccgcacagcgaggggcacgcggcgcacaacagccaggagagtctgctggggatgggaccgaagtcgcggaagaaggcgcggctaacgtggtga

SEQ ID NO: 6721 - protein, 722 aa, Solibacter usitatus Ellin6076
MAVSSSSAPSRAKKHQAPTPDLTDPSLYVNRELGLLSFQWRVLEEARDGTNPLLERIRFLSIVGSNLNEFFMVRVASLNAQLDAGIPEFGPDRMSPSAQLIAIRRETKRLMEAAHQCLETELRPELSDEGIHILPYDDLNDRQLQSCESYFSEIIFPVLTPLAFDQGRPFPHISNLSLNLAVLILDAGGEQRFARLKVPDSLPALVPLTRTQKAASKRSRPRREQSYVWIEEVIAANLDSLFPGMQIVEAHPFHVTRDADIAIKELEADDLLETIEEGVRQRKFGSVVRLQVNQQMPQHILQILMENLEVEPSEVYRSKGLLGLSRLAALTQIDRPDLKYTPFLASSPPELQPANEEEDLFAIIRQRDVLLHHPFQSFQPVVDFLRKAARDPDVLAIKVVLYRVGRNSPVVEALLEAIEEGKQVAVLMELKARFDEESNIEWAKTLEKAGCHVVYGLPGLKIHCKAAVVLRRESGAIRPYMHLATGNYNVVTAHLYTDIGLFTCNPEISTDLLDLFNFLTGYSAKRDYQKLLVAPVNLRERLQKLVEREVEKHEKEGKGHLVFKMNALVDPQMVRMLYKASQAGVKIDLLVRGICCLRPGVPGVSETIRVTSIVGRFLEHSRIFYFRNGGDEEIYLGSADLMPRNLNRRVEILFPLKDPDLLRRVRDGILAEYLTDNVKARRMMADGSYKRVPHSEGHAAHNSQESLLGMGPKSRKKARLTW

SEQ ID NO: 6722 - DNA, 2160 bp, Exiguobacterium sibiricum 255-15
  CDS (1)..(2160): transl_table=11
gtgaagatagactcccctgagttttttaacaaccgggaaatcagctggttacaatttaatgaacgtgtcttaggcgaagtgaccgatacacgaaatcccttgatggaacgatttaagtttttaggtatcttcagttccaatttggatgaattttatatggttcgtgtcggtggattaaaggatgaggtactggcaggattcaataaaccggaaaataaacaacagctgacaccgaaacaacagttacgtgccatcgcgacgaaaacaaaagagcttgtcgatcaacaatacgaagcctttaaagatgtcactcaagcattaaaggccgaaggtatctcttttctgaagcatgacgagttaaatgaaatgcagtcagaatatgtcaaaacctttttcagagaacaggtttttccggttctgacgccggtcgccgtcgatgcgtatcgaccattcccgatgctgtcttccaaatcattgaatatcgcaacggctctcgaagcggaagacggttccaaacggaatctggcgcttgttcaggttccggccgtcctcccgcgtttcgtcgatttacccgtcgatgatgaagaaacaaccgctgtgatcttactcgaagatgtcatcatttcctttatcgattctttgttcaaaggatatcacgtcctgtctgcgatgccgtttcgaattacacggaacgcggatttaccattccatgaagaaggaacgcatgatttattgaagttgattgaaaaagaattgaagaaacggcgctggggagtcggaatccggcttgagatccagaagaatgccatcaatacgaacttgctcaatatgttacgtgatgtcctcgacctacaggaccgggacatctatgctgtcgatggtccgatcgatttgacattcgctttcgctttttacagccagatcggtgtcgagtatgaccatttgatttatcagacaatcatgcctgtcgaaccgccggcactggagaagtccaaaaaactatttgatcaaattctgcaacaggattatttgttgcaccacccttaccatacgtttgatccaatcgtccgcctgattgttcaagccgccaatgatcccaatgtcttggcaatcaaacaaacgctgtaccgcgtatcaggagattctccgattattaaagcattgaagactgctgcagaaaacgggaaacaggtcactgtcctcgtcgaattgaaagcacggtttgacgaagccaaaaatatcgagtgggcgaaacagttggaaaaagcaggtgctcacgtcatttacggttacagcgatttaaagacccattccaaaatcacattaatcgtccgattacaggaaggccggattcagcggttcgtccatctcggaacaggtaattacaatgactctacggctaaactgtacactgatatcggtcttttgacggcaaaggaacaaattgcagaagatgcgacaaatttctttaactggttatccggttatggggagcaacctgaatggaatgcccttcatacgtcaccgaactcgatgctcgagaaatttttatccttgattgatgaagaaatcaaatatcataaaaaacacggtaacggtcgaatcgttgctaaaatgaacagtttgacggaaaaagacattatcgtgaaactgtatcaagcatctcgggccggggtcagaattgaattgattgtacgtggcgtctgctgccttcgtcctcaaatcaaaggcgtctcggaaaatatccgggtcacgtccgttgtcgatcgttatttggaacattcccgtatcttttacttccatcataacggcgatgatttgatttattgttccagtgccgactggatgacacgcaatatgcggaaacggattgaaatccttttcccaatcgcggatgaagaacagaaaaactatatcaaggattgtttggcattaacgatggcggacaacgtcaaagcacgggaacaagacgactccggtaactatcattacgtaacaaaaggtaaacaggaatgtgaatcacaaattctcattcagctttatacgaatgggaagctaaaagcaaaaccgtcctttgaacatccgcttgagcaaaaatggacaccggtcgaacgtgcggaagaaaagatcacctttgacccgactactagtaaaaaataa

SEQ ID NO: 6723 - protein, 719 aa, Exiguobacterium sibiricum 255-15
MKIDSPEFFNNREISWLQFNERVLGEVTDTRNPLMERFKFLGIFSSNLDEFYMVRVGGLKDEVLAGFNKPENKQQLTPKQQLRAIATKTKELVDQQYEAFKDVTQALKAEGISFLKHDELNEMQSEYVKTFFREQVFPVLTPVAVDAYRPFPMLSSKSLNIATALEAEDGSKRNLALVQVPAVLPRFVDLPVDDEETTAVILLEDVIISFIDSLFKGYHVLSAMPFRITRNADLPFHEEGTHDLLKLIEKELKKRRWGVGIRLEIQKNAINTNLLNMLRDVLDLQDRDIYAVDGPIDLTFAFAFYSQIGVEYDHLIYQTIMPVEPPALEKSKKLFDQILQQDYLLHHPYHTFDPIVRLIVQAANDPNVLAIKQTLYRVSGDSPIIKALKTAAENGKQVTVLVELKARFDEAKNIEWAKQLEKAGAHVIYGYSDLKTHSKITLIVRLQEGRIQRFVHLGTGNYNDSTAKLYTDIGLLTAKEQIAEDATNFFNWLSGYGEQPEWNALHTSPNSMLEKFLSLIDEEIKYHKKHGNGRIVAKMNSLTEKDIIVKLYQASRAGVRIELIVRGVCCLRPQIKGVSENIRVTSVVDRYLEHSRIFYFHHNGDDLIYCSSADWMTRNMRKRIEILFPIADEEQKNYIKDCLALTMADNVKAREQDDSGNYHYVTKGKQECESQILIQLYTNGKLKAKPSFEHPLEQKWTPVERAEEKITFDPTTSKK

SEQ ID NO: 6724 - DNA, 2142 bp, Prosthecochloris aestuarii DSM 271
  CDS (1)..(2142): transl_table=11
atgatggataattctacagaaagcgttgaagacgcagtttctttgcctgattttgacaatccgtccttttatgtcaacagggaactcagctggatggcttttaaccagagggttcttgaagaggcgttgagtcgtgacgagcatccgctgcttgaacgcattaaatttatttcgattttcagttccaatctcgatgagtttttcatgatccgggttgccggtctggaagatcagtatgaggccggtgttcaggaccgttcaattgatggcatgactcctgctgaacagctggaaaagatccgcgagggcgtcactgcccagtttattcagcgcgatgcctgtttttacggagatatctgccctgaactggccaggcatggtatagagtttgtcgattaccgttctttttcggagtcgaacaaggaggtgctgcagcagtatttccgtcatgagatttttcctgttctgacccctcttgctttcgataccggccatccctttcccttcgtgtcgaacctttcgctcaatctggctattgagcttgaggatctggaacatcaatcgatgaaatttgcaagggtcaaggttcccagcatcctgccgcggattttgagacttgatctcattgacgggcttgattttggggatgaccgcataagactgctctggctcgacgatttcatctctcatcatctggagcagttgtttcctctcatgagaatcgttcaggcttatcctttccgggtcattcgcgatgccgatatcgaaatcgaggaagatgaggccggcgatcttttggaaaccattgagcagggcatccgctcccgccgctacggcaaggtggtgcggcttgatgtgacgcctgatatgccggagtcgatcaggcttcttctgataaagcatctcgaggtctcctcgcgtaatgtctatgaaattcccggagctctgggactgagcagtcttatggagttgatgcgtatcgataagccggagctgaaagatgaaccttttgctcccagcaacccgattgaggagaaggccggaggagacattttttctgcgatccgtcagagcgatcatcttttttatcatccctacgattcgtttcagcctgttgtcgatttgatcaatcaggcggcccgcgatcctcaggtgctctctatcaaacagaccttataccgggttggaagcaactctcctatcgtgcaggcgttgatgcatgctgtcgaagagggaaagcaggttgctgttcttgtggaacttaaggcgcggtttgatgaagaaaacaatatcgtatgggccagggcccttgaaaatgtcggtgctcatgtcgtctacggccttgtgggattgaaaactcatgccaaactcacgatgatcgttcgtcgggagcacgataaactcaagcgctatctccatctcggtacggggaactacaatccggctacggctaaaatctatacggattacagttttctgacagcaaacgagattctctccgaggacgtatcggaactcttcaacgccctgacaggttattccaggcatacagcgtatcgcaagctcatcgtttcgccgctcaatacccgtaagcgcatcattgctatgatcgagcgggagattgaatggcacaaaaaggagggcaacggcagaattgttatgaaaatgaatgcccttgtcgataggaaaaccatcaaggctctttatcttgcttccgctgcaggtgttcaagtcgatcttattgtgcgtggaatctgctgtcttgtgcccggtattgaaggggtaagccacaacattcgtgtcataagtgtgataggaagatttttagaacacagccgcgcgtattattttcggaacggaggaatggatgaactgtttctcggaagcgcagatatcatgccaagaaatcttgatcaccgcgttgaggttctctttcctgtactggatagcgaacttatcaatgttgtcaaatctgaacttgagcttatactcagtgacaacgtcaaggcctggcagatgaatgccgatgggacatacagtaaagttgtcgatcaaaggcctgcggtcaacagccagagtgtgtttctccagcaggcgtctatgaaaaaatcaataagtaaatttaaagtaaacggattatga

SEQ ID NO: 6725 - protein, 713 aa, Prosthecochloris aestuarii DSM 271
MMDNSTESVEDAVSLPDFDNPSFYVNRELSWMAFNQRVLEEALSRDEHPLLERIKFISIFSSNLDEFFMIRVAGLEDQYEAGVQDRSIDGMTPAEQLEKIREGVTAQFIQRDACFYGDICPELARHGIEFVDYRSFSESNKEVLQQYFRHEIFPVLTPLAFDTGHPFPFVSNLSLNLAIELEDLEHQSMKFARVKVPSILPRILRLDLIDGLDFGDDRIRLLWLDDFISHHLEQLFPLMRIVQAYPFRVIRDADIEIEEDEAGDLLETIEQGIRSRRYGKVVRLDVTPDMPESIRLLLIKHLEVSSRNVYEIPGALGLSSLMELMRIDKPELKDEPFAPSNPIEEKAGGDIFSAIRQSDHLFYHPYDSFQPVVDLINQAARDPQVLSIKQTLYRVGSNSPIVQALMHAVEEGKQVAVLVELKARFDEENNIVWARALENVGAHVVYGLVGLKTHAKLTMIVRREHDKLKRYLHLGTGNYNPATAKIYTDYSFLTANEILSEDVSELFNALTGYSRHTAYRKLIVSPLNTRKRIIAMIEREIEWHKKEGNGRIVMKMNALVDRKTIKALYLASAAGVQVDLIVRGICCLVPGIEGVSHNIRVISVIGRFLEHSRAYYFRNGGMDELFLGSADIMPRNLDHRVEVLFPVLDSELINVVKSELELILSDNVKAWQMNADGTYSKVVDQRPAVNSQSVFLQQASMKKSISKFKVNGL

SEQ ID NO: 6726 - DNA, 2265 bp, Mesorhizobium sp. BNC1
  CDS (1)..(2265): transl_table=11
atgctggcaacacattatgtgtcgcgggagaagaccgcatgggtggagcagcggaacgccatgaacgagttaaagccggttaaaactgaatttcccaaagtgccggaaggcgaggggcagattgcgctcacgagcccggatcgcttcgtcaaccgcgagttttcatggctgcagttcaatcgccgtgtgcttgaggaatcacagaaccccagccacccgcttctggagcgcgttcgctttctttctatctcggccgacaatctcgacgagttctttatggtccgagtggcgggacttgccggccaggttcgtcagggcatcctcgaaaagagcgcggatggccgcacgcccgaagagcagctggagcatatcctgcgtgaggtgagccggctgcagatcgagcagcagcaaagtttcgctcatcttctggagctgatgaagaagcaggggatcgagatcgtcgggccgggcgccttgtcccgggaagaccgtgcctgggtcgagcagcattttatggatgagatctacccggtgctaacgccgctttccatcgacccggcgcacccgtttcccttcatccccaatctcggcttctcgatagcgctcgacctgcagcacctgtcgaataaggagaccatgacggcgctgttgcgcctgccggtgacactccagcgcttcatcgccttgcccgagcggccgaggcgcgtgcgcttcatcgcgctggaagacgtggtggagatgttcaccggcaagctctttccgggctataaggtgaacggctccggcaccttccgcattatccgcgacagcgatatcgaggtggaggaggaggccgaggaccttgtccgctttttcgaaacggcactgaagcgcaggcgccgtggctccgtgatccggattgagttcgagcgctcgatgccggaggatttgcgtggtttcgtggcgacgcaactgggagtgccgggatcgcgcatcagcgtgctggagcggccgcttgcgatcaatcagatttcggagatcgtcaggctctccagggacgacctcaaattccagccctacaatccgcgtttccctgagcgcatccgcgagcatggcggggattgcttcgccgccatccgcgaaaaggatatgatcgtccaccacccctacgaatccttcgacgtggtggtgcagtttctgcgtcaggccgcgcaggacccggatgttgtggcgatcaagcagacgctctatcgcacctccaatgacagccccatcgtgcgcgcgttgatcgacgcctcggaggcgggcaagtccgtgacggcgttggtggagcttaaggcccgcttcgacgaggaggccaatatccgctgggcgcgcgatctggagcgtgccggcgtgcaggtcgtattcggctttttggaactcaagacacacgccaagatgtcgcttgtggtgcgccgggaagatggccgcttgcggagctatgttcatctaggcacgggcaattatcatccgattacggcgcggatctatacggatctgtcgtttttcaccgacgatccggtcatcgctcacgatgtggccaaggtcttcaatttcatcaccggctatgccgagccggacgtgaaaatgaagcttgccgtttctcccttcacgctgagggacaggattctggagcatattcgggccgagatcgagcatgcgaaagccggcaggcctgcgcagatctggatgaagatgaacgcgcttgtcgatccgcaggttatcgatgccttatactgggcaagccgagcgggcgtggagatcgatctggtggtgcgcggcatatgctgcctgcgtcctcaggtaacggggctctctgaaaacatccgcgtgaaatccattgtcgggcggttcctggagcatagccgcatttattgctttggaaatggtcacggcctgccgtcggacgaagcggtcgtgtacatttcgtcggctgacatcatgccgcgcaatctcgaccgcagggtggagtgcatggtgccgatcacgaacccgactgtgcatgagcaggttttgggtcagatcatgctgggcaatatcatggacaaccagcaaagtttcgaagtattgcctgacggtacctcccggcggatgatgcctgaggagggtgaggaagcattcaacgcccaggagtatttcatgaccaatcccagcctgtcgggtcgaggagaagctttgaagtctcatgcgccaaagcggatcgccgccttcaagcggcgaaaaaaggctgtagccgtcggctaa

SEQ ID NO: 6727 - protein, 754 aa, Mesorhizobium sp. BNC1
MLATHYVSREKTAWVEQRNAMNELKPVKTEFPKVPEGEGQIALTSPDRFVNREFSWLQFNRRVLEESQNPSHPLLERVRFLSISADNLDEFFMVRVAGLAGQVRQGILEKSADGRTPEEQLEHILREVSRLQIEQQQSFAHLLELMKKQGIEIVGPGALSREDRAWVEQHFMDEIYPVLTPLSIDPAHPFPFIPNLGFSIALDLQHLSNKETMTALLRLPVTLQRFIALPERPRRVRFIALEDVVEMFTGKLFPGYKVNGSGTFRIIRDSDIEVEEEAEDLVRFFETALKRRRRGSVIRIEFERSMPEDLRGFVATQLGVPGSRISVLERPLAINQISEIVRLSRDDLKFQPYNPRFPERIREHGGDCFAAIREKDMIVHHPYESFDVVVQFLRQAAQDPDVVAIKQTLYRTSNDSPIVRALIDASEAGKSVTALVELKARFDEEANIRWARDLERAGVQVVFGFLELKTHAKMSLVVRREDGRLRSYVHLGTGNYHPITARIYTDLSFFTDDPVIAHDVAKVFNFITGYAEPDVKMKLAVSPFTLRDRILEHIRAEIEHAKAGRPAQIWMKMNALVDPQVIDALYWASRAGVEIDLVVRGICCLRPQVTGLSENIRVKSIVGRFLEHSRIYCFGNGHGLPSDEAVVYISSADIMPRNLDRRVECMVPITNPTVHEQVLGQIMLGNIMDNQQSFEVLPDGTSRRMMPEEGEEAFNAQEYFMTNPSLSGRGEALKSHAPKRIAAFKRRKKAVAVG

SEQ ID NO: 6728 - DNA, 2166 bp, Kineococcus radiotolerans SRS30216
  CDS (1)..(2166): transl_table=11
atgacggccacgacacgcgccaccgcccccctgcctgccgtgagcccggtcgaggagccgaccgaactgcccgaggaccgcttcgccgaccgcgaggtctcctggctggccttcaacgagcgcgtgctgcagctggccgaggaccccgacgtccacctgctggaacgggcccggtacctgtcgatcttcgccaacaacctcgacgagttcttcatggtccgggtcgcggggctcaagcgccgcatcgccaccggtctggccgtcaccgccgccagcggcctggagccgcgccaggtgctcgacgcgatcgccgtgcgcgcccacgagctgaccgagcgccacgccgccgccttcctggggtcggtgcgccccgcgctggccgaggccggcatcaccatcgtgcgctgggacgagctctcccccggcgagcaggtccgcctgcacgggttcttccgcgacatggtcttcccggtgctgaccccgctggcggtggacccggcccacccgttcccctacatctccgggctgtccctgaacctggccgtcgtcgtgcgcaacccgaccacggacaaggagcacttcgcccgggtgaaggtgccgccgctgctgccgcggttcgtcgccgtcgagccggccgagggcgaggacccccgcgacgcgcggttcgttcccctggaggacgtcgtcggcgtccacctggaccagctgttccccggcatggaggtcgtgcagcaccacaccttccgggtcacccgcaacgaggacctcgaggtcgaggaggacgacgcggagaacctgctccaggccctggagaaggagctcctgcgccgccgcttcggcccggccgtccgcctcgaggtcgcctccgacatcgaccagaaggtgcgcgagctgctggtccgcgagctgggcgtgcacgagcaggaggtctacgagctccccgagcccctcgacctgcgcgggctcggcgacatcgccgacctcgaccgcccggagctgaagttccccaagtccgtcgcgcgcacccaccgcgacctcaccgacggcgccgagacggccaagccctccgacgtgttcgcggccatccgcaaccgcgacgtgctgctgcaccacccctacgactccttctccacgagcgtgcaggcgttcctggagcaggccgcggcggacccgaaggtcctggccatcaagcagacgctgtaccggacctcgggcgactcccccatcgtcgacgccctcatcgacgccgccgaggccggcaagcaggtcctcgcgctggtcgagatcaaggcccgcttcgacgagcaggccaacatcacctgggcccgcaagctggagcaggccggcgtgcacgtcgtctatggcctggtggggctgaagacgcacgcgaagctgagcctggtggtgcgccaggagtccggcgggctgcgccgctactgccacatcggcacgggcaactacaaccccaagaccgcgcgggtctacgaggacatggggctgctcaccgccgacccgcaggtcggcgaggacctgacccgcctgttcaaccagctctccggctacgcgcccaagaccgcctacaagcggctgctggtcgcgccgcgctcgctgcggaccgggctggtggaccgcatcgaccgcgagatcgagaaccaccgccagggccagccctccggggtccggatcaaggtgaactcgatcgtcgacgagggcgtcatcgacgcgctgtatcgcgcctcggcggcgggcgtgcccgtcgacgtgatcgtccgcgggatctgcgccctcaagccgggggtgcccgggctgagcgagaacatccgcgtccgcagcatcctgggccggttcctcgagcacagccggatcttctggttcgcctccggcggcgaccccgtcgccatgatcggcagcgcggacatgatgcaccgcaacctggaccgccgcgtcgaggccgtcgtgcggctcaacgacccgcggcacgtgcgcgaggtctcgcagctgctcgaccagtgcatggccgacaccacgagctcgtggcacctgggcgcggacgggacgtggacgcgccaccaccgcgacgccgacggggccccgctgacggacctgcaggagcacatcatcgccacccgcccgggtcggcgcccgagctcgcgccgccgccggtga

SEQ ID NO: 6729 - protein, 721 aa, Kineococcus radiotolerans SRS30216
MTATTRATAPLPAVSPVEEPTELPEDRFADREVSWLAFNERVLQLAEDPDVHLLERARYLSIFANNLDEFFMVRVAGLKRRIATGLAVTAASGLEPRQVLDAIAVRAHELTERHAAAFLGSVRPALAEAGITIVRWDELSPGEQVRLHGFFRDMVFPVLTPLAVDPAHPFPYISGLSLNLAVVVRNPTTDKEHFARVKVPPLLPRFVAVEPAEGEDPRDARFVPLEDVVGVHLDQLFPGMEVVQHHTFRVTRNEDLEVEEDDAENLLQALEKELLRRRFGPAVRLEVASDIDQKVRELLVRELGVHEQEVYELPEPLDLRGLGDIADLDRPELKFPKSVARTHRDLTDGAETAKPSDVFAAIRNRDVLLHHPYDSFSTSVQAFLEQAAADPKVLAIKQTLYRTSGDSPIVDALIDAAEAGKQVLALVEIKARFDEQANITWARKLEQAGVHVVYGLVGLKTHAKLSLVVRQESGGLRRYCHIGTGNYNPKTARVYEDMGLLTADPQVGEDLTRLFNQLSGYAPKTAYKRLLVAPRSLRTGLVDRIDREIENHRQGQPSGVRIKVNSIVDEGVIDALYRASAAGVPVDVIVRGICALKPGVPGLSENIRVRSILGRFLEHSRIFWFASGGDPVAMIGSADMMHRNLDRRVEAVVRLNDPRHVREVSQLLDQCMADTTSSWHLGADGTWTRHHRDADGAPLTDLQEHIIATRPGRRPSSRRRR

SEQ ID NO: 6730 - DNA, 2163 bp, Xylella fastidiosa Dixon
  CDS (1)..(2163): transl_table=11
gtggcctcactgttgttccttcctacttatatttctttcctagtctctttcgtctcaagacgttctatgtctaaatcttctcccattgaacctgtttcagcatctgatgtcagccagcagttccgtgatcctgggctgtatttgaacagggagctatcacagctcgacttcaattttcgagtgttggcacaggcattggatgagcaggtgccgttgttagagcggttgcgcttcctgtgtatttcttgcacgaatctggatgaattcttcgaaatccgtgttgctaccgtgcgccatgctcaggaattcggtttgccgccagcgcctgatgggatgaggccgacggtaatcctcaacgctgttcacgacctgacaaccaaactcgtccatgatcagtacaactgctggaaccaagtgctgtgtccggcacttgcggcccttggagtgggtgtactgagtcataacagttggaacgtgcgtcagaaacgttggctacgtggttactttcgcaacgaaatcatgccggtgttatcgccacttggtttagatcctgcgcatccatttccgaaaatattcaataaaaccttaaatatcgtggtggtgcttaacggtattgatgcttttggtcgtgctggtcatttggctatcgtgcgtgccccgcgttcgttgccgcgtattatcgagttgccccaacatctgtccagagatggttctcaaaacttcgtcttcttgtcctcagtactgtctgcttttgtcggtgagttgtttcctggcatggtggtcaagggggcttatcaatttcgggttactcgtaattctgaattggtggtggatgaggatgaagtcgagaatctggcgctggcgttgcgtaatgaattggtgacccgcggttatcgtcttgcagtcaggctagagatcgctgaggactgcccaatcccgattgtgcgtacattactgcagaattttgggttgcaagaaaacgctgtatatcggattaacggtcctgtcaatctgagccgagtgagtcaggtctatgacatggtgttgcgtccggaactgaaatatcccccgttcaatccacgcacggtgcgtaacagtgatcacattttcgagatcattgccaagggggatgtgttgttgtaccacccctacgacgcttttaccgcagtccttgatttgctgcgtcaggcggcggctgacccggatgtactggccatcaaacaaaccctctaccgtaccggcaaggattccaccatcgttgatgcgctgatccaagccgcacgtagtggcaaggatgtcactgtggtggttgagttgcgcgcgcgttttgacgaggaagccaacctcggtttggccgataagctgcaggaggctggggtacaagtggtctatggtgtggttggttacaagacccacgccaagatgttgctgattgtacgccgtgagggccgcaaactacgtcgctacgtgcatttgggcactggcaactaccatagtggtacggcacggatatataccgatttgagtttgatgacggctaatgcggcgatcggtaaagatgtgcatcaactatttctgcaattgtctggattagcacccaaaatgaagctggagtgcttattgcagtccccattcaccctgcatgcaggggtgttgttccggatcgaacgtgagaccacgttcgcccggaaggggcgccctgcccgcatcgttgccaagatgaatgcgctgaatgagccacaggtcgtacgcgcactgtacgtcgcctcgcaggcgggtgtgcaaattgatctgattgtgcgtggggcttgcacgttgcggcctggtgtgcagggtatatccgaaaacatccgcgtgcgttcaatcgtcggccgctttttggagcacagccgggtgtattggtttgctaataacggtacgcctgaactgttctgcgccagcgccgattggttagagcgcaatttgctacgtcgggtcgagatctgtttcccgatcttgaatccggatttggcgaaacgtatttattctgatgttttacagagttacttggatgacaacctcaatgcttgggaattggggagtgatggcgtttaccggaaactgctccccgagacagatcatgcgccatactcggcccaggcggctctactggagtctttatag

SEQ ID NO: 6731 - protein, 720 aa, Xylella fastidiosa Dixon
MASLLFLPTYISFLVSFVSRRSMSKSSPIEPVSASDVSQQFRDPGLYLNRELSQLDFNFRVLAQALDEQVPLLERLRFLCISCTNLDEFFEIRVATVRHAQEFGLPPAPDGMRPTVILNAVHDLTTKLVHDQYNCWNQVLCPALAALGVGVLSHNSWNVRQKRWLRGYFRNEIMPVLSPLGLDPAHPFPKIFNKTLNIVVVLNGIDAFGRAGHLAIVRAPRSLPRIIELPQHLSRDGSQNFVFLSSVLSAFVGELFPGMVVKGAYQFRVTRNSELVVDEDEVENLALALRNELVTRGYRLAVRLEIAEDCPIPIVRTLLQNFGLQENAVYRINGPVNLSRVSQVYDMVLRPELKYPPFNPRTVRNSDHIFEIIAKGDVLLYHPYDAFTAVLDLLRQAAADPDVLAIKQTLYRTGKDSTIVDALIQAARSGKDVTVVVELRARFDEEANLGLADKLQEAGVQVVYGVVGYKTHAKMLLIVRREGRKLRRYVHLGTGNYHSGTARIYTDLSLMTANAAIGKDVHQLFLQLSGLAPKMKLECLLQSPFTLHAGVLFRIERETTFARKGRPARIVAKMNALNEPQVVRALYVASQAGVQIDLIVRGACTLRPGVQGISENIRVRSIVGRFLEHSRVYWFANNGTPELFCASADWLERNLLRRVEICFPILNPDLAKRIYSDVLQSYLDDNLNAWELGSDGVYRKLLPETDHAPYSAQAALLESL

SEQ ID NO: 6732 - DNA, 2454 bp, Nocardioides sp. JS614
  CDS (1)..(2454): transl_table=11
atgccggcgtgccgccggatggcggcccggccctcggggatcggcagcgtctcggcgccgggctcgcgcaccagccgctgcatccgcagcatcagctgggtatcggccgcgagggtctggccgtcgcggacgatcgcccggccgcccagcagccgctgcacccgctcgggcagccccatcgcagcccgcagagccagcgtctcgacacggatctgcaggcgctcggtccagcgcggggcgttggtcacgaacgcaacctaccgttcacgccgtagtgccagactggccggcatgagcctggagagcctgccctcggacgccgtctccagccgcggcgaggaggtcccggaggagcccttcgacgtggagccgccgtaccagcccgaccacgacgagatcgccgcggtcgagaagtacgacgaccgcttcctcgaccgggagctctcctggctccggttcaaccagcgggtgctcgagctcgccgaggacagccggctgccgctgctcgagcgggcccggttcctggcgatcttcaccagcaaccttgacgagttcttcatggtccgggtcgccggcctcaagcgccggatcgcggccggggtggccgtgccggccgcgtccgggctgatgccgaccgaggtgctggacgtgatcctctcgacgacccgtggactgctcgagcggcagggccgggtgttccgcgacgaggtggtgcccgcgctcgccgccgccgggatcgagctggtccgctggggcgacctggaccgcgaggagcagaagacctgcaagcggctgttccgcgaccgggtgttcccggtgctgaccccgctcgccgtcgacccggcccacccgttcccctacatctccgggctctcgctcaacctggccgtgctgatccgcaacccgcgcaccggcaaggagcacttcgcgcgggtgaaggtgccgccgatcttcgcccggttcgtgccggtcgggaaccagcggttcgtgccgctggaggacgtgatccgcgagcacctcaagcggctgttccccggcatggaggtgctcgaggtgcacaccttccgggtcacccgcaacgaggacctggaggtcgaggaggacgacgccgagaacatcctggccgcgctggagaaggagctgctgcgccgccggttcggcccgccggtgcgcctggaggtcgaggagtcgatcgcgccgcaggtgctcgacctgctgatgtccgagctcggcatctccgaggaggaggtgttccggctgcgcggcccgctggacctgcgcggcctgcacgacatcgccgacctgccccgccaggagctgaagtaccccgcgttcttgccctccacccatccccggctcgccgaggtggagtcggccgcgccggtcgacgtcttcaaggcgacccggcgccacgacgtgctgctgcaccacccctacgactcgttcgcgacctcggtgcagcgcttcctcgagcaggccgccgccgacccgcacgtgctggcgatcaagcagacgctgtaccgcacgtccggcgactcccccatcatcgacgcgctcgtcgacgccgccgaggccggcaagcaggtgctggtgatcgtcgagatcaaggcccgcttcgacgaggaggccaacatccgctgggcccgcaagctcgagcaggccggctgccacgtggtctacggcctggtcgggctgaagacccactgcaagctctcgatggtggtccgcgacgagcccgacgggatccgccgctacacccacatcggcaccggcaactacaacccgaagacctcccggctctacgaggacctcggcctgctgaccaccgacgagcggatcggcgaggacgtcgcccacctgttcaacaacctctccgggtggtcgcgcaacgcgacgtacgacgagctgctggtcgcaccggactcgatccgcaccggcctggtcgaccagatccaccaggaggtcgcccaccaccaggccgggcggccggcccggatccggctgaaggccaactccgtggtcgacgaggcggtcatcgacgcgctctacctggcctcccaggccggggtgccggtcgagctgctggtccgcggcatctgcgcgctgcgccccggcgtgcccgggctctcggagacgatcgcggtgcgctcgatcctcgggcggttcctcgagcacagccggatcttctggttcgagaacggcggggacccgaccgcgtggatcgggtcggccgacatgatgcaccgcaacctggaccgtcgggtcgaggtgctggtgcggctgcccgacgaggacagcgtcggccaggtcggccggctgctcgacctcgccttcgaccccgacaccatcgcctgggacctggacagcaccggtgagtggcgccgcaacgacggcgacacgcacctccaggaggcgctgatcgagtcgcagcggcggcgccgtacgtcgccgtga

SEQ ID NO: 6733 - protein, 817 aa, Nocardioides sp. JS614
MPACRRMAARPSGIGSVSAPGSRTSRCIRSISWVSAARVWPSRTIARPPSSRCTRSGSPIAARRASVSTRICRRSVQRGALVTNATYRSRRSARLAGMSLESLPSDAVSSRGEEVPEEPFDVEPPYQPDHDEIAAVEKYDDRFLDRELSWLRFNQRVLELAEDSRLPLLERARFLAIFTSNLDEFFMVRVAGLKRRIAAGVAVPAASGLMPTEVLDVILSTTRGLLERQGRVFRDEVVPALAAAGIELVRWGDLDREEQKTCKRLFRDRVFPVLTPLAVDPAHPFPYISGLSLNLAVLIRNPRTGKEHFARVKVPPIFARFVPVGNQRFVPLEDVIREHLKRLFPGMEVLEVHTFRVTRNEDLEVEEDDAENILAALEKELLRRRFGPPVRLEVEESIAPQVLDLLMSELGISEEEVFRLRGPLDLRGLHDIADLPRQELKYPAFLPSTHPRLAEVESAAPVDVFKATRRHDVLLHHPYDSFATSVQRFLEQAAADPHVLAIKQTLYRTSGDSPIIDALVDAAEAGKQVLVIVEIKARFDEEANIRWARKLEQAGCHVVYGLVGLKTHCKLSMVVRDEPDGIRRYTHIGTGNYNPKTSRLYEDLGLLTTDERIGEDVAHLFNNLSGWSRNATYDELLVAPDSIRTGLVDQIHQEVAHHQAGRPARIRLKANSVVDEAVIDALYLASQAGVPVELLVRGICALRPGVPGLSETIAVRSILGRFLEHSRIFWFENGGDPTAWIGSADMMHRNLDRRVEVLVRLPDEDSVGQVGRLLDLAFDPDTIAWDLDSTGEWRRNDGDTHLQEALIESQRRRRTSP

SEQ ID NO: 6734 - DNA, 2163 bp, Trichodesmium erythraeum IMS101
  CDS (1)..(2163): transl_table=11
atgtccaaaaacaaaaagaatacagtagaaactcctatcgaaaaaaaacttagtaatccacaatactactttaatagagaattgagttggttagagtttaaccgtagggttttatctgaaggtttagacccccgtactcccctattagaacgtttaaaatttttaggaatttttagttctaacttagatgaatattttatggttagggtagcagttcttaaaaaacaaatagaagctgaagtgcataagttaactccagacggtcgtactcctcaagaacaactagatgagattaatcaaatactattaccaatggtttctttacaacaccaattctttgagcaaaacttacgaccagagttaagaaaaaatggtattgatatcctaaattatatagacttagatagagaagaaaaaacatatctaagaaactattttgaagaacacatatttcccgtacttactcctctagctattgatgctagtcatccttttccttatttatctaatctcagttttaacttagcagtaatgctgaaaaatccagatactcaagaagatttattagccagaattaaagttcccaaaatattacctcgctttttgtgcttaccagaaaaattacaaatagaacaaaaggctaaaactctaaattggacaggagttcctctcgaacaagtcattgctcacaatttgggagctctgtttcctggtatggatattcaggagtatcacgtatttcggattactcgtgatgctgacttggcagtgcaagaagatgagggagatgacttgctcttagtgattgagaaagaactcagaaaacagcgtataggtggtaccgtagttagaatggaaattaatccaacaatgccaagtaaattaaaaaagacattaatggacaacttggagttatcagaaaaagacgtttacacagtagatggattacttgatttaaaagatttaatgtcatttttagggttgccgttgcctcatcttaaagatccaacttggacatctactatgccaccaaggttgcgacattatggtgatgagctcagaattcctgacctgaatgagaataacaaaattgatttttttgaagtgattcgccagaaagacttattgttacatcatccatatcattcttttgcaagtacggtacaaggtttcattagtcaagcagcacacgatcctaatgtattggcgattaagatgactctttatcggacttctggaaattcacctattgttaatgctttaattgctgcagctgaaaacgataaacaagttgcagtattggtggaattgaaggcaagatttgatgaagaaaataatattcaatgggcgcggaagttagaacaatatggtgttcatgtggtttatggtttagcaggtctgaagactcatactaaaattgtgatggtggtccgtcaggaagaaggtcatatccgtcgctatgttcatattggcactggtaactataatcccaagactgctaaaatttatactgatttgggtttgttgagttgtcgaccagaattaggagcagatttggcagatttgtttaatttcttgacgggatattctcgtcagcagtcttaccggaaattgttggtggcacctgtaaatatgcgcgatcgctttatgaaactgattcgtcgggaaattgaaaattgccaaaatggagatacaggtcgtatagttgcccagatgaactctttggtagatcctaaaattattacttctttgtataaagcgtcccaagtaggggtgaaaattgatttgattgtccgtggtatttgttgtttgcgtccgggtttaaaaggtatcagtgataatattaaggtggtgagtattattgggcgttatttagaacactctcgggttttctacttctataataaaggtaaagaggaggtgtatattggttctgctgattggatgcctcgtaatctcgatcgtcggatagaggctattatacctgtggaagactctgaaatcacaaaagagttgcaagaaattatgggcattctgttatctgacaaccgacaagcttgggatctacaaccagatggtaagtatattcagcgtcgttctactgagaattttcctgaacttgcctgccataaaattttgatggaaaccgtagctaatacttag

SEQ ID NO: 6735 - protein, 720 aa, Trichodesmium erythraeum IMS101
MSKNKKNTVETPIEKKLSNPQYYFNRELSWLEFNRRVLSEGLDPRTPLLERLKFLGIFSSNLDEYFMVRVAVLKKQIEAEVHKLTPDGRTPQEQLDEINQILLPMVSLQHQFFEQNLRPELRKNGIDILNYIDLDREEKTYLRNYFEEHIFPVLTPLAIDASHPFPYLSNLSFNLAVMLKNPDTQEDLLARIKVPKILPRFLCLPEKLQIEQKAKTLNWTGVPLEQVIAHNLGALFPGMDIQEYHVFRITRDADLAVQEDEGDDLLLVIEKELRKQRIGGTVVRMEINPTMPSKLKKTLMDNLELSEKDVYTVDGLLDLKDLMSFLGLPLPHLKDPTWTSTMPPRLRHYGDELRIPDLNENNKIDFFEVIRQKDLLLHHPYHSFASTVQGFISQAAHDPNVLAIKMTLYRTSGNSPIVNALIAAAENDKQVAVLVELKARFDEENNIQWARKLEQYGVHVVYGLAGLKTHTKIVMVVRQEEGHIRRYVHIGTGNYNPKTAKIYTDLGLLSCRPELGADLADLFNFLTGYSRQQSYRKLLVAPVNMRDRFMKLIRREIENCQNGDTGRIVAQMNSLVDPKIITSLYKASQVGVKIDLIVRGICCLRPGLKGISDNIKVVSIIGRYLEHSRVFYFYNKGKEEVYIGSADWMPRNLDRRIEAIIPVEDSEITKELQEIMGILLSDNRQAWDLQPDGKYIQRRSTENFPELACHKILMETVANT

SEQ ID NO: 6736 - DNA, 2097 bp, Xylella fastidiosa Ann-1
  CDS (1)..(2097): transl_table=11
atgtctaaatcttctcccattgaacctgtttcagcatctgatgtcagccagcagttccgtgatcctgggctgtatttgaacagggagctatcacagctcgacttcaattttcgagtgttggcacaggcattggatgagcaggtgccgttgttagagcggttgcgcttcctgtgtatttcttgcacgaatctggatgaattcttcgaaatccgtgttgctaccgtgcgccatgctcaggaattcggtttgccgccagcgcctgatgggatgagaccgacggtaatcctcaacgctgttcacgacctgacaaccaaactcgtccatgatcagtacaactgctggaaccaagtgctgtgtccggcacttgcctcccttggagtgggtgtactgagtcataacagttggaacgtgcgtcagaaacgttggctacgtggttactttcgcaacgaaatcatgccggtgttatcgccgcttggtttagatcctgcgcatccatttccgaaaatattcaataaaaccttaaatatcgtggtggtgcttaacggtattgatgcttttggtcgtgctggtcatttggctatcgtgcgtgccccgcgttcgttgccgcgtattatcgagttgccccaacatctgtccagagatggttctcaaaacttcgtcttcttgtcctcagtactgtctgcttttgtcggtgagttgtttcctggcatggtggtcaagggggcttatcaatttcgggttactcgtaattctgaattggtggtggatgaggatgaagtcgagaatctggcgctggcgttgcgtaatgaattggtgacccgcggttatcgtcttgcagtcaggttagagatcgctgaggactgcccaatcccgattgtgcgtacattactgcagaattttgggttgcaagaaaacgctgtatatcggattaacggtcctgtcaatctgagccgagtgagtcaggtctatgacatggtgttgcgtccggaactgaaatatcccccgttcaatccacgcacggtgcgtaacagtgatcacattttcgagatcattgccaagggggatgtgttgttgtaccacccctacgatgcttttaccgcagtccttgatttgctgcgtcaggcggcggctgacccggatgtactggccatcaaacaaaccctctaccgtaccggcaaggattccaccatcgttgatgcgctgatccaagccgcacgtagtggcaaggatgtcactgtggtggttgagttgcgcgcgcgttttgacgaggaagccaacctcggtttggccgataagctgcaggaggctggggtacaagtggtctatggtgtggttggttacaagacccacgccaagatgttgctgattgtacgccgtgagggccgcaaactacgtcgctacgtgcatttgggcactggtaactaccatagtggtactgcacggatatataccgatttgagtttgatgacggctaatgcggccatcggtaaagatgtgcatcaactatttctgcaattgtctggattagcacccaaaatgaagctggagtgcttattgcagtccccattcaccctgcatgcaggggtgttgttccggatcgaacgtgagaccacgttcgcacggaaggggcgccctgctcgcatcgttgccaaaatgaatgcgctgaatgagccacaggtcgtacgcgcactgtacgtcgcctcgcaggcgggtgtgcaaattgatctgattgtgcgtggggcttgcacgttgcggcctggcgtgcagggtatatccgaaaacatccgcgtgcgttcaatcgtcggccgctttttggagcacagccgggtgtattggtttgctaataacggtacgcctgaactgttctgcgccagcgccgattggttggagcgcaatttgctacgtcgggtcgagatctgtttcccgatcttgaatccggatttggcgaaacgtatttattctgatgttttacagagttacttagatgacaacctcaatgcttgggaattggggagtgatggcgtttaccggaaactgctccccgagacagatcatgcgccatactcggcccaggtggctctactggagtctttatag

SEQ ID NO: 6737 - protein, 698 aa, Xylella fastidiosa Ann-1
MSKSSPIEPVSASDVSQQFRDPGLYLNRELSQLDFNFRVLAQALDEQVPLLERLRFLCISCTNLDEFFEIRVATVRHAQEFGLPPAPDGMRPTVILNAVHDLTTKLVHDQYNCWNQVLCPALASLGVGVLSHNSWNVRQKRWLRGYFRNEIMPVLSPLGLDPAHPFPKIFNKTLNIVVVLNGIDAFGRAGHLAIVRAPRSLPRIIELPQHLSRDGSQNFVFLSSVLSAFVGELFPGMVVKGAYQFRVTRNSELVVDEDEVENLALALRNELVTRGYRLAVRLEIAEDCPIPIVRTLLQNFGLQENAVYRINGPVNLSRVSQVYDMVLRPELKYPPFNPRTVRNSDHIFEIIAKGDVLLYHPYDAFTAVLDLLRQAAADPDVLAIKQTLYRTGKDSTIVDALIQAARSGKDVTVVVELRARFDEEANLGLADKLQEAGVQVVYGVVGYKTHAKMLLIVRREGRKLRRYVHLGTGNYHSGTARIYTDLSLMTANAAIGKDVHQLFLQLSGLAPKMKLECLLQSPFTLHAGVLFRIERETTFARKGRPARIVAKMNALNEPQVVRALYVASQAGVQIDLIVRGACTLRPGVQGISENIRVRSIVGRFLEHSRVYWFANNGTPELFCASADWLERNLLRRVEICFPILNPDLAKRIYSDVLQSYLDDNLNAWELGSDGVYRKLLPETDHAPYSAQVALLESL

SEQ ID NO: 6738 - DNA, 2085 bp, Alkalilimnicola ehrlichei MLHE-1
  CDS (1)..(2085): transl_table=11
atggaccaaaaaacgatcgatctcaagcaaccggacctctacttcaaccgcctgctcagcctgctggagttcaaccgccgggtgctcgcccaggccaaggacaccgacaccccgctgctggaacgcctcaagttcctctgtatctgcacctcgaacatggacgagttcttcgaggtgagggtctcgggggtgaaacacaaggccgaggccggttcggttcaggccgagtcggacaatcgcagcccgcaggagaccctgaatgccatcagtgccgtcagccacgagctggtagccgagcagtaccgcgtcctcaacgaggaattgatcccggccctggcggaagaggacatccgcttcatccgccgggccgattggaccgacgcccagacggagtggctgcgccgttttttcgaggacgagctgctgccggtgctcagccccctgggactggatccggcccaccccttccccaaggtactgaacaagagcctgaacttcatcgtcagcctggagggcaaagatgccttcggccgcaacagcgggttcgccatcgtgcaggcgccgcgcgccctgccgcgcctgattcaactgccccgggagggtgaggacaacggaccctgggacttcgtcttcctgtcctcggtcattcacgccttcgtggatcagctcttcccgggcatgaagatcaagggctgttatcaattccgggtgacccgcaacagcgatctgtttgttgacgaggaggaggtggacgacctgctgcgggcgctggagggggagctgctctcccgccggtacggcgaggccattcgcttggaggtggcggccaactgttccgaggacctggccaacttcctgctgcgcaagttcgagctcgggccggacgacctctaccaggtggacgggccggtcaacctgaaccggatgatggcggtctacgacctggtggaccgccccgatctgaagtatccgtcgttcacccccgggctgccggcggatttcagccacagcggcgatatcttcaaggtcctgcgcaagcgccaggtgctgctgcaccaccccttccagtcctttgccccggtcatcgagctggtgcgccaggcctcgctggatccggacgtgctcgccatcaagcagaccctctaccgcaccgggcccgattccgccatcgtcgatcacctggtgcgcgcggcgcgggacggtaaggaggtcaccgttatcatcgagttgcgcgcccgctttgacgaggcggccaacatcgccctcgccaaccggctgcaggaggccggcgtgcacgtggtctatggggtcgtgggccacaagacccatgccaagatgctgctggtggtgcgccgcgaggggcgcaagctgcgccactacgtgcacctggggaccggcaactaccactcacgcaccgcgcggctctacaccgactatggcctgttcacccgagacaagcatacgggtgaggatgtccaccggctgttcctgcaaatgaccagcctggggcgtttctccgagctgaaacgcctgctgcaatcgcccttcaccttgcgggagggggtgatccagcgcatccaacgggaggccgaacacgccctcgccggtcacgaggcccgcattatcgtcaaggtcaattccctcaccgagcctggtgtcatccaggcgctctaccaggcctcgcaggcaggcgtcaccgtcgacctgatcgtgcgcggcatgtgctgtctgcgccccggggtaccgggggtctcggacaacattcaagtccgctccatcatcggccgcttcctggaacatacccgggtgttctatttccacaaccggggcgacagcgacctctatgccagcagcgccgattggatggagcgcaatttcttccggcgggtggagacggccttccccctcctggacgaggaggcgcgccggcgggtgctgctggacctggagtgctatctcaaggacaacacccaggcctggctgctgcaacccgacggcagttacgtgcgcctccagcccgcggagggcgaggaaccctactgcgcccagcgggccctcctcgcgttgctcgccgacagtgcctga

SEQ ID NO: 6739 - protein, 694 aa, Alkalilimnicola ehrlichei MLHE-1
MDQKTIDLKQPDLYFNRLLSLLEFNRRVLAQAKDTDTPLLERLKFLCICTSNMDEFFEVRVSGVKHKAEAGSVQAESDNRSPQETLNAISAVSHELVAEQYRVLNEELIPALAEEDIRFIRRADWTDAQTEWLRRFFEDELLPVLSPLGLDPAHPFPKVLNKSLNFIVSLEGKDAFGRNSGFAIVQAPRALPRLIQLPREGEDNGPWDFVFLSSVIHAFVDQLFPGMKIKGCYQFRVTRNSDLFVDEEEVDDLLRALEGELLSRRYGEAIRLEVAANCSEDLANFLLRKFELGPDDLYQVDGPVNLNRMMAVYDLVDRPDLKYPSFTPGLPADFSHSGDIFKVLRKRQVLLHHPFQSFAPVIELVRQASLDPDVLAIKQTLYRTGPDSAIVDHLVRAARDGKEVTVIIELRARFDEAANIALANRLQEAGVHVVYGVVGHKTHAKMLLVVRREGRKLRHYVHLGTGNYHSRTARLYTDYGLFTRDKHTGEDVHRLFLQMTSLGRFSELKRLLQSPFTLREGVIQRIQREAEHALAGHEARIIVKVNSLTEPGVIQALYQASQAGVTVDLIVRGMCCLRPGVPGVSDNIQVRSIIGRFLEHTRVFYFHNRGDSDLYASSADWMERNFFRRVETAFPLLDEEARRRVLLDLECYLKDNTQAWLLQPDGSYVRLQPAEGEEPYCAQRALLALLADSA

SEQ ID NO: 6740 - DNA, 2196 bp, Sulfitobacter sp. EE-36
  CDS (1)..(2196): transl_table=11
atgcaacgccataaggccgtcatgacaaacgctgactttctcgaatccgccttcgttccgccgcaggatatgcccgatctggatatcaccggccccggtcgtttctataaccgcgagctcagctggctcgggttcaactggcgtgttctcgaagaggccaagaacccccgcgtgccgctgctggaacgcctgcgcttcctgtcgatctcggcgggcaacctcgacgaattctataccgtgcgtgttgcgggcctgcgcgagctggctcaggccggcaacaccacccccgccagcgacgggctgacccctgcccagcaattggtgctgatcaacgaagacgcgcgcaagctgatgaccgaacaacagcgcgtactggtcgatctgatgtccgagatggacgaccagaatatcatgctcgaacgcgccgctgatctggacgaggccgatctggcctatcttgacgatgtattcctgcaccgcgtttttgcggttctgaccccgctggcgattgaccccgcgcaccccttccccttcatccccaacaccggctacgcgctggcgctgcaactggaacgcaccagcgacaaacgcccccttcaggcgctgctgccgatcccggcgcagatcgaccgtttcgtcgccctgcccgccgccgaagggtcgctgcggttcctgccgcttgaagatctgctggtgctcaaggtgccggggctgtttccgggctacaagctcaaggcgcatttcgaattccgcgtgctgcgcgacagcgatcttgaggtcgaggaagaggccgaagacctagtacgcgaattcgaggtcgccctgaaacgccgccgccgcggcgaggtcgtgcgcctgacccattccgccggtgcccccgaaaagctgaaatccgtggtcatggccgaactgggcgtgcgcccgcaggatgtgatcgaactggacgggatgatcggcatcaacgacctgtccgaactggtgaccgacagccgccccgatctgctctggccgcaattcaccccgcgcatccccgaacgcgtgaccgaccacgaaggcgatatgttcgccgcgatccggtccaaggacatgctgctgcaccacccctacgagaccttcgatatggtggtccgctttctggcacaggccgcacgcgatcccgatgtggtggcgatcaaacagacgctctaccgcacctcgcgcgacagccccattgtcgaggcgctgtgcgaagccgccgaagacgggaaatccgtcaccgcgctggtcgagctcaaggcgcgtttcgacgaggctgccaacatccgccagtcacgccggctggaacgcgcaggcgcacatgtcgtctatgggtttctcgatctcaagacccacgcaaaaatctcgaccgtggtgcgccgcgagggcgatcaactggtcacctatacccactatggcaccggcaactatcacccgatcaccgcacgcatttataccgatctgtcgctgttcacctgtgaccagaagctgggccgcgacgcgaccaaagtgttcaactacctgtccggctacgcgcaacccgacacgctggacaacctcgccatctcgcccatctcgttgaagccgcgcctgctggcgatgatcgccgccgaggccgaccatgccgccgctggcaaaccggcagagatctgggccaagatgaactccatcgtggatgcggatgtgatcgacgcgctttacgccgcgagccaggcaggggtgaagatcagcctggtgatccgcggcatctgcgggttgcgccccggtatcaaggggctatcggaaaacatccgcgtaaaatccatcgtcgggcgctttctggagcattcacgcatcgtctgctttggcaatggctacgggctgccgcataagaaatcgcgggtcttcatgtcctccgccgactggatgggccgcaacctgacccgccgcgtcgaaaccctggtcgagatcgagaaccccaccgtcaaggcgcaaatcaccagtcaggtcatggcggccaatcttgcggatgtggcgcaaagctgggtcatgtcccccgatggcagctttgcccgccccgagattgcagaaggcaccttcgccttcaactgccaccgcttcttcatggagaacccctctctctccgggcgtggcacggcgggcgcatccgacgtcccgaaactgacccataccgaagactaa

SEQ ID NO: 6741 - protein, 731 aa, Sulfitobacter sp. EE-36
MQRHKAVMTNADFLESAFVPPQDMPDLDITGPGRFYNRELSWLGFNWRVLEEAKNPRVPLLERLRFLSISAGNLDEFYTVRVAGLRELAQAGNTTPASDGLTPAQQLVLINEDARKLMTEQQRVLVDLMSEMDDQNIMLERAADLDEADLAYLDDVFLHRVFAVLTPLAIDPAHPFPFIPNTGYALALQLERTSDKRPLQALLPIPAQIDRFVALPAAEGSLRFLPLEDLLVLKVPGLFPGYKLKAHFEFRVLRDSDLEVEEEAEDLVREFEVALKRRRRGEVVRLTHSAGAPEKLKSVVMAELGVRPQDVIELDGMIGINDLSELVTDSRPDLLWPQFTPRIPERVTDHEGDMFAAIRSKDMLLHHPYETFDMVVRFLAQAARDPDVVAIKQTLYRTSRDSPIVEALCEAAEDGKSVTALVELKARFDEAANIRQSRRLERAGAHVVYGFLDLKTHAKISTVVRREGDQLVTYTHYGTGNYHPITARIYTDLSLFTCDQKLGRDATKVFNYLSGYAQPDTLDNLAISPISLKPRLLAMIAAEADHAAAGKPAEIWAKMNSIVDADVIDALYAASQAGVKISLVIRGICGLRPGIKGLSENIRVKSIVGRFLEHSRIVCFGNGYGLPHKKSRVFMSSADWMGRNLTRRVETLVEIENPTVKAQITSQVMAANLADVAQSWVMSPDGSFARPEIAEGTFAFNCHRFFMENPSLSGRGTAGASDVPKLTHTED

SEQ ID NO: 6742 - DNA, 2193 bp, Roseovarius nubinhibens ISM
  CDS (1)..(2193): transl_table=11
atgcggtacaaggcggccatgacctacgcagactttctcaaatccccgtttccgcccgcccaggagcttcccgagcttgacctctccggacccggccgtttcttcaatcgtgaactgagctggctcggcttcaactggcgggtcctcgaagaggcgcgcaaccccaaggtgccgcttctggaacggctgcgctttctgtcgatctcggccaccaacctggacgagttctacaacgtgcgcgtcgcgggtctgcgcgaactggcccaggctggcaacaccacccccgccgccgatgggctgacgcccgccgaacagttggtgctcatcgacgaagacgcccgcaacctgatgaacgaacagcatcagacctatgaggcgctgcaaaaggaaatggaagccgaggacatccatatcctcaacagctcgatgctcgacgccgaggacaaggcctatctcgacgaggtctttctcaatcaggtcttcccggtgctgtcgccgctggccatcgatccggcgcatcccttccccttcattcccaaccttggcttttcgctggccctgcaattgcgccgccgcgccgacaagaaagagctcaaggcgctgctgccgatcccgcagcagatcgaccgctttgtcgccctcgcgccgcgcaatggtgcggtgcgcttcctgccgctcgaagagctggtgctggtccatctcgacagcctcttcccgggctatgcctatagcggccactgcgcctttcaggtgctgcgcgacagcgatctcgaggtcgaggaagaggccgaggatctggtgcgcgaattcgaagtggcgctcaaacgccgtcgccgtggcgaggtggtgcggctcaagatttccaccgacgcccccgacgatctgcgcaagctcgtgatgaacgagctgcacgtcaatgccgatgaactggtcgcggtgaacgggcttcttggcctcgccgatctcaaggagctggtgctcgacaaccgccccgacctgctctggccgcccttcaccccgcgcgtgccggaacgggtgcaggaccacgacggcgacatgttcgccgcgatccgccaaaaggacatgctgctccaccacccctacgagaccttcgatatggtggtgcgctttctcgcgcaggcggcgcgcgatccgaacgtggtcgcgatcaaacagacgctctaccgcacctcgaacgacagccccatcgtgagcgcgctctgcgaggccgcggaaaacggcaaatccgtcaccgccctggtcgagctcaaggcgcggttcgacgaggccgccaacatccgtcagtcgcgccgtctcgaacgtgcgggcgcgcatgtggtctatgggttcctcaacctcaagacccacgccaagatcagcaccgtggtccgccgcgagggcgatcagctggtgacctatacccattacggcaccggcaattaccacccgatcaccgcccgcatctataccgacctgtcgtttttcacctgcgacacggtgctgggccgcgacgcgaccaagctcttcaactacctctcgggctatgcccagcccgaaaagctcgagaacctcgccatctcgccgatctcgctcaagccccggctgctcgagatgatcaaggccgagatcgcccatgccgaggccgggaaacccgccgaaatctgggccaagatgaactcgctgatcgaacccgatgtgatcgacgcgctctatgaggcgagccaggctggcgtgaaaatcagcctcgtcgtgcgcggcatctgcgggctgcgccccggcgtcaccggcatgagcgagaacatccgggtgaaatccatcgtcgggcgtttcctcgaacactcgcgcatcgtctgtttcggcaatggccatggcctgccgcacaagaaatcgcgcgtctatatcagctcggccgactggatgggccgcaacctcaaccggcgggtggaaaccctcgtcgagatcgagaaccccaccgtcaaggcccagatcgtcagccaggtgatggccgccaatatggccgatgtggcgcagagctgggtcatggccccggacggaagctttgcccgcgccgaaaccaccgagggcgagttcgctttcaactgccaccgtttcttcatggaaaacccgtcgctctctggtagagggtcggctggggcgtcggatgtgccgaaactgacccacacagaagattga

SEQ ID NO: 6743 - protein, 730 aa, Roseovarius nubinhibens ISM
MRYKAAMTYADFLKSPFPPAQELPELDLSGPGRFFNRELSWLGFNWRVLEEARNPKVPLLERLRFLSISATNLDEFYNVRVAGLRELAQAGNTTPAADGLTPAEQLVLIDEDARNLMNEQHQTYEALQKEMEAEDIHILNSSMLDAEDKAYLDEVFLNQVFPVLSPLAIDPAHPFPFIPNLGFSLALQLRRRADKKELKALLPIPQQIDRFVALAPRNGAVRFLPLEELVLVHLDSLFPGYAYSGHCAFQVLRDSDLEVEEEAEDLVREFEVALKRRRRGEVVRLKISTDAPDDLRKLVMNELHVNADELVAVNGLLGLADLKELVLDNRPDLLWPPFTPRVPERVQDHDGDMFAAIRQKDMLLHHPYETFDMVVRFLAQAARDPNVVAIKQTLYRTSNDSPIVSALCEAAENGKSVTALVELKARFDEAANIRQSRRLERAGAHVVYGFLNLKTHAKISTVVRREGDQLVTYTHYGTGNYHPITARIYTDLSFFTCDTVLGRDATKLFNYLSGYAQPEKLENLAISPISLKPRLLEMIKAEIAHAEAGKPAEIWAKMNSLIEPDVIDALYEASQAGVKISLVVRGICGLRPGVTGMSENIRVKSIVGRFLEHSRIVCFGNGHGLPHKKSRVYISSADWMGRNLNRRVETLVEIENPTVKAQIVSQVMAANMADVAQSWVMAPDGSFARAETTEGEFAFNCHRFFMENPSLSGRGSAGASDVPKLTHTED

SEQ ID NO: 6744 - DNA, 2175 bp, Oceanicola batsensis HTCC2597
  CDS (1)..(2175): transl_table=11
atgatcagtgccgattttctcaagtcagacctgccagaaccgcaagatcccggcgggcgcgatctggcgggccccgcgcggttcgtaaaccgcgaactcagctggctcggcttcaactggcgggtgctggaagaggccgagaaccccaaggtgccgcttctggaacggctgcgcttcctgtcgatcagcgccacgaacctggacgaattctacaccgtccgggtcgccggcctgcgcgagctgtaccgcgagggacacaagacgccggcggcggacgggctgacgcccgaggaacagcttgacctgatagacgcggatgcccggcggctgatggggcggcagcaggtgatcctggaaagcctccagcacgagatgcgcgagaacggcgttttcgtgctcaggcgggacgagctgaccgaggccgaccgcaccttcctgggcgaggtcttcctgcacagggtctttccggtgctctcgccgctggccgtcgatccggcgcacccgttcccgttcatcccgaacatgggcctgtcgctcgcgctcatgctcgagcggcggcgcgacggccggtcgctgatggccctcctgcccattccgcagcagatcgaccgcttcgtcgcccttcccagcgagcccgggctcacccgtttcctgccgctcgaagagcttctgttgctgaacatcgaccagctgtttcccggctaccggacgcagggttcctgcaccttccgcgtgctgcgcgacagcgatcttgaggtcgaggaagaggccgaggacctcgtgcgcgaattcgagaccgcgctcaagcgccgccgccggggcgaggtggtacggatgaagatctcctccgaagcgcccgaggcgctgaagtcggtcatcatgcgcgagctgcacgtgacttcgcaggaggtgatcgaggtcaccgggctgatcggaatctcggatctcagggaactggtgatcgacacccgcgccgatctgctgtggccctcattcaccccgcgcatccccgagcgggtgcaggatcacgacggcgacatgttcgccgcgatccggcagaaggacatgctgctgcatcacccctacgagacattcgacatggtggtgcgctttctccagcaggccgcgcaggacccggatgtcgtcgcgatcaagcagacgctctatcgcacctccaaggactcgcccatcgtgcaggcgctctgcgatgccgccgaagaaggcaagtcggtgacggcgctggtggagctcaaggcccggttcgacgaggcggcgaacatccggcagtcgcggcggctggaacggtcgggcgcgcatgtggtctacggcttcgtcgactggaagacccatgccaagatctcgaccgtggtccgccgcgaaggggatcacctggtcacctacacgcattacggcaccggcaactaccacccgatcacggcgcgcatctacaccgatctgagcttcttcacctgcgaccccgcgctcggccgggacgcgaccaaggtcttcaactatctctcgggctatgcccagccggagacgctcgagaacctgaagatctcgccgcaccggatgaaggatttccttctggagcagttcgaggccgaggccgagcacgcccgcgcgggacggcccgcccagatctgggccaagatgaattcgctgatcgaaccggatgtgatcgacggcctctatcgggcaagccaggcgggggtgaagatcgacctggtgatccgcggcatctgcggcatccggccgggcgtgaaggggctctccgagaacatccgcgtgaaatccatcgtcggccggttcctcgaacacagccggatcgtctgtttcggcaacggccacggactgccctccaagggatcgcgcgtcttcatctcgtcggccgactggatggggcggaacctgaaccgccgggtcgagacactggtcgagacgacgaacgcgacggtcaaggcgcagatcgtcagccagatcatggccgcgaacctggccgatcaggcgcagagctgggtcatgcggccggacggtcacttcgaacgcgccacgctttcccccggagaattcgccttcaactgccaccggttcttcatggaaaacccctcgctctcggggcgcggctcggccggggccggggacgtgccggtgctgacccacgaggcggactga

SEQ ID NO: 6745 - protein, 724 aa, Oceanicola batsensis HTCC2597
MISADFLKSDLPEPQDPGGRDLAGPARFVNRELSWLGFNWRVLEEAENPKVPLLERLRFLSISATNLDEFYTVRVAGLRELYREGHKTPAADGLTPEEQLDLIDADARRLMGRQQVILESLQHEMRENGVFVLRRDELTEADRTFLGEVFLHRVFPVLSPLAVDPAHPFPFIPNMGLSLALMLERRRDGRSLMALLPIPQQIDRFVALPSEPGLTRFLPLEELLLLNIDQLFPGYRTQGSCTFRVLRDSDLEVEEEAEDLVREFETALKRRRRGEVVRMKISSEAPEALKSVIMRELHVTSQEVIEVTGLIGISDLRELVIDTRADLLWPSFTPRIPERVQDHDGDMFAAIRQKDMLLHHPYETFDMVVRFLQQAAQDPDVVAIKQTLYRTSKDSPIVQALCDAAEEGKSVTALVELKARFDEAANIRQSRRLERSGAHVVYGFVDWKTHAKISTVVRREGDHLVTYTHYGTGNYHPITARIYTDLSFFTCDPALGRDATKVFNYLSGYAQPETLENLKISPHRMKDFLLEQFEAEAEHARAGRPAQIWAKMNSLIEPDVIDGLYRASQAGVKIDLVIRGICGIRPGVKGLSENIRVKSIVGRFLEHSRIVCFGNGHGLPSKGSRVFISSADWMGRNLNRRVETLVETTNATVKAQIVSQIMAANLADQAQSWVMRPDGHFERATLSPGEFAFNCHRFFMENPSLSGRGSAGAGDVPVLTHEAD

SEQ ID NO: 6746 - DNA, 2118 bp, Prochlorococcus marinus str. MIT 9211
  CDS (1)..(2118): transl_table=11
atgtcaaaaacaaagctaagtaaggataactatcttaatagagagttgagctggattggttttaatgaacgtgttctcgcgatagcattgaaccagaaaacacctttactagagcaagcaaaatttagtgcgatatttagtaataatctagatgagtttttcatggtaagagtcgcttctcttaagtcacaagttgaggctgggattaccaagcgaagcgaagacaatcaaacacctaaagaacagttaatcaatatcagaaaacatctagagcctcttttaaaaaaacaacaaagtcactacaaaaataatttaatcagttcctatatcaatgaaaaaatttttctacttgaatataaagacttaaatgatcgccagagaacttgggttgataactatttccaaacagctattttcccagttcttactccattagcagttgaccctgcacatccattcccgttcgtaagtaatctaagccttaacattgcggcactgattagagacccagagactggtaaagaacaatttgcacgagtaaaggtgccaggaagaaccatggataggttcataactattccaaatgatttaagtggaatagaccctaaccctatctataacgcaataccaatagagcaaatagttgcttttaatttgcacatgctctttcctggcatgaaagtagagcagcactcattttttagggttacacgagatgctgacttagaactacgagatttagaagctgatgatttaatgattgcgctcgaagagggactccgcaaacgtcgaataggaggagaagtagtgcggcttgaagtctcgaaagatataccagtcacgatattagagttactgatggaaggcatggcagttgaggaagcagatttatatcacattgatggactactaggccttgatgatcttcaggcattgctaaaaatcgatatgccagttctcaaatatccgcaacaaagagggcaaacacataagttactcaaaagtagtcaaagaggattactagaagatgggtcaattaagcaagaggagttcaagagcattttttcaattatcaaaaaacaggatttgctactccaccacccattcgacctcttctccacttctgtagaagagtttattaatcaatctgctgaagatcctcaagttatggggattaaaatgactctttatcgagtatcaaaagattcaaaaataatcgaagcgctaattagggcagctgaaaatggcaagcaggttatggcattggttgagcttaaagcccgttttgatgaagacaataatattcaatgggcaaaacaactggagaaatctggggtgcatgttgtatatggcgttctgggattaaaaacacatacaaagattgccttagttattagaaaagaaaaagagcgcttacggagttactttcatatcggtacaggtaactacaattcaaaaacatccaaactgtatacagatttaggactgctctcggtaaatcctgagcttggtcaagatttaatcgaactgtttaactatttaactggcttctctaaacaacaaacctttagaaaattattagttgcaccagttactctgaggaaaggaatggaagcattaatacgtcgagaaatcaaatttgcaaagaatggtaaaacagggaaaatacgtgcaaaaatgaattcacttgtcgatcccaacattattaatttactctacgaagcatctgaagccggagtccaaattgaactaattattcgaggaatgtgttgtttatatcctcagcgaaatgggttgagtgaaaacataaaagtaattagtgtgatcggaagatatctagaacattcaagagttttttggttccataacgatggtaattcagaagtttttataggtagtgcagattggatgcgtcgaaatttagacagaagagtagaggctgttactcccatagaggacaaaaatctaaaagaggaactatcacaactgctagatatttatctgaatgacaactgcaattcatgggaaatgaataaagatggaatattcattcaacaaaagtctcaagataaagagaagtctgctcaaaaccttttaatccatacaaataaaaagtaa

SEQ ID NO: 6747 - protein, 705 aa, Prochlorococcus marinus str. MIT 9211
MSKTKLSKDNYLNRELSWIGFNERVLAIALNQKTPLLEQAKFSAIFSNNLDEFFMVRVASLKSQVEAGITKRSEDNQTPKEQLINIRKHLEPLLKKQQSHYKNNLISSYINEKIFLLEYKDLNDRQRTWVDNYFQTAIFPVLTPLAVDPAHPFPFVSNLSLNIAALIRDPETGKEQFARVKVPGRTMDRFITIPNDLSGIDPNPIYNAIPIEQIVAFNLHMLFPGMKVEQHSFFRVTRDADLELRDLEADDLMIALEEGLRKRRIGGEVVRLEVSKDIPVTILELLMEGMAVEEADLYHIDGLLGLDDLQALLKIDMPVLKYPQQRGQTHKLLKSSQRGLLEDGSIKQEEFKSIFSIIKKQDLLLHHPFDLFSTSVEEFINQSAEDPQVMGIKMTLYRVSKDSKIIEALIRAAENGKQVMALVELKARFDEDNNIQWAKQLEKSGVHVVYGVLGLKTHTKIALVIRKEKERLRSYFHIGTGNYNSKTSKLYTDLGLLSVNPELGQDLIELFNYLTGFSKQQTFRKLLVAPVTLRKGMEALIRREIKFAKNGKTGKIRAKMNSLVDPNIINLLYEASEAGVQIELIIRGMCCLYPQRNGLSENIKVISVIGRYLEHSRVFWFHNDGNSEVFIGSADWMRRNLDRRVEAVTPIEDKNLKEELSQLLDIYLNDNCNSWEMNKDGIFIQQKSQDKEKSAQNLLIHTNKK

SEQ ID NO: 6748 - DNA, 2235 bp, Bifidobacterium adolescentis
  CDS (1)..(2235)
atggcacagatttttgacgcaccctcaaaggcgatcctgcgcagccagatagctgagcatatcgctgagaccgataagaacgataagcgcgagcttcaggcaggcgaggaaccgctgccgaatgaccgtttcttcgaccgtgagctgagctggttgaagttcaacaagcgcgtcctcgagcttgcacaggatgaggacctgccggtcatcgaacgcgcgagcttcgccgcgatcttcgcgaacaacctcgacgagttcttcatggtccgcgtggccggcctgaagcgccgcatcgacaccggcatcgccgtgacggccgcttccggactgagcccgaggcagcagctgcgcgccatcagcgagcaggcccaccgcctgcaggacgagcacgcgcactacatcatcgaccacatcctccccgacctggcgaaggaacagatcgtgctgctgagctgggacaagctcaccgcggccgagcaggagcgcctgtcgcgctactaccgccagcaggtgttcccggttctgactccgcttgccgtggatccggcccacccgttcccgtacatttccggcggttccctcaacctcgccgtgctggtggagaatccggcatccggcaagtcgcacttcgcccgcgtgaaggttcctgacaacctgaaccgtctcgtgccggtcgacgacctgaccgaagacgagaacaccaacgtgcgctatggcttcatcaccatggagaacctgatcatcgcccacctggaatccctgttcccgggcatgatcatcaaggaggcacgctccttccgcgtcacccgtaacgaggacatcgacgtggaagaggatgacgccgagaacctgctcaacgccatggagaaggagctgctgcgccgtcgtttcggaccgccgatccgtttggagatctccgacgagaccagcccgttcctgtcccagctgctcgccgaccagctgcgcgtgagcgccgacgaggtctaccgcctgccggcgccgcttgacgcgaccgtgctgttcgagctcggcggcatcgaccgtccggatctcaagtaccgtccgttcattccgaccaccaatcgtcagatcgccgaagtcgaatcgtcccgtgcgcaggacattttcgccgccatccgcgagcgcgacatcctgctgcaccacccgtacgattccttctcgacgtccgtgcaggcgttcctggcgcaggccgcggccgatccgaaggtgctggccatcaagcagacgctgtaccgtacgtccagcaattcgccgatcatcgacgcgctgatcgacgccgcgcatgccggcaagcaggtgctggcgctggtcgagatcaaggcgcgtttcgacgaggacgccaacatcgcgtgggcccgcaagctggaacgcgcgggcgtgcacgtggtgtacggcatcgtcggcctgaagacccactgcaagctgagccttgtggtgcgtcaggaagccgacggcctgcgtcgttactgccacgtgggcaccggtaattacaatccgaagaccgcacgtatctacaccgacctgggcctgctgacctgcgatccggtggtcggccaggatatgacccgcctgttcaaccagctgtccggctacgcgccgaagtcgagcttccaccgtctgctggtggcgccgcgcaccgtgcgttccggcttgattcagcgcatccgccgcgaggaggacgccgcacgcgccggcaaggaagcgtggatcaagatcaaggtcaactccatcgttgacgaaaagaccatcgacgcgctgtaccgtgcaagccaggccggcgtgaagatcgacatcgtcgaacgtggcatctgcgcgctcaagccgggcgttccgggactttccgagaacatccgcgtgcgttcgatcctcggccgtttccttgagcacagccgtatttacgcgttcgccaactccgatggcccgcagatcggcgaaggccctgcggccggtccggaagtgtggattggttccgccgatctgatgcaccgcaacctcgaccgtcgagtcgaagcgctggtccgcatcgtggctccggagcagatcgacgagctcatcaagtacgtcgatctgcagatggccgattccaccgcgtcttggcatatgcaggccgatggcacctatgtgcgccattgcaaggatgaggaaggtcgaccgctggtcgacagccaggaatacctcatcaagaaacacacgcgtcgaccggtaaggcactga

SEQ ID NO: 6749 - protein, 744 aa, Bifidobacterium adolescentis
MAQIFDAPSKAILRSQIAEHIAETDKNDKRELQAGEEPLPNDRFFDRELSWLKFNKRVLELAQDEDLPVIERASFAAIFANNLDEFFMVRVAGLKRRIDTGIAVTAASGLSPRQQLRAISEQAHRLQDEHAHYIIDHILPDLAKEQIVLLSWDKLTAAEQERLSRYYRQQVFPVLTPLAVDPAHPFPYISGGSLNLAVLVENPASGKSHFARVKVPDNLNRLVPVDDLTEDENTNVRYGFITMENLIIAHLESLFPGMIIKEARSFRVTRNEDIDVEEDDAENLLNAMEKELLRRRFGPPIRLEISDETSPFLSQLLADQLRVSADEVYRLPAPLDATVLFELGGIDRPDLKYRPFIPTTNRQIAEVESSRAQDIFAAIRERDILLHHPYDSFSTSVQAFLAQAAADPKVLAIKQTLYRTSSNSPIIDALIDAAHAGKQVLALVEIKARFDEDANIAWARKLERAGVHVVYGIVGLKTHCKLSLVVRQEADGLRRYCHVGTGNYNPKTARIYTDLGLLTCDPVVGQDMTRLFNQLSGYAPKSSFHRLLVAPRTVRSGLIQRIRREEDAARAGKEAWIKIKVNSIVDEKTIDALYRASQAGVKIDIVERGICALKPGVPGLSENIRVRSILGRFLEHSRIYAFANSDGPQIGEGPAAGPEVWIGSADLMHRNLDRRVEALVRIVAPEQIDELIKYVDLQMADSTASWHMQADGTYVRHCKDEEGRPLVDSQEYLIKKHTRRPVRH

SEQ ID NO: 6750 - DNA, 2202 bp, Erythrobacter sp. NAP1
  CDS (1)..(2202): transl_table=11
atgagcagccagcctattaccagcgatcaaatcgtttcggcggcgtctccgccgtcggcacctcctgcgtccatcgcgcccggtggcgaggcttacttcaaccgcgaattgtcatggctggccttcaacgagagagtcctcgcagaggcatgtaacgagcgttatccgctgcttgagcggctgcggttcctgtcgatctctggcagcaaccttgatgaattcatgatgatccgcgtggcgggcctggtcggtcaggcgcagcgcgggatcgacaaaccagccatcgatggtcgcactccgacccagcaactcagcgccatacgcgaaaagctggccgaattgtccgcgcgccaacaggatatctggcgcaacctgcatgcgctgcttgccgaagccgacattcatatcgccgacgaacagcgagtgaagcccgccgctcacaagtggctcgaggcgttcttccttgaagagattcttcccgtgatcacgccgcaggcgctcgatccggcgcacccatttcctttcgtgcacaacgaaggaatgggcctgctgttcacgctgagccgcgatgcggacaaggaacagatcatggagatgatcctgatcccgaccgccttgccgcgttttgtccgggtgccgggtgacatcgccggggcaggggaggcggtctacatctcgatagcaagcctcatccagcgctacgcaaagaagctcttcccgggcttcacaatcgagggcgacggacttttccgcgtgctgcgcgacagcgatatcgagatcgaggaagaagccgaagacctcgtgcgcaccttccgcagcgccatccagcgccgtcggcgcgggcaagtgatccagcttgagctggaagaggacttcgatccgcagggcgaggaaatcctactccagcagcttggcgtgcacgaggccgccgtcatcaagaccgacgggatgatcggtatcgacggccttgccgagattgtcgatgaagaccggcccgatctcaagttcgacgcctattcaccgcgctatccagagcgcattcgcgaacatgatggagatgccttctccgccattcgcgagaaagacatcgtcattcaccacccctacgaaagcttcgaagtggtggtcgatttcattcggcaggcggctgccgatccggatgtcgtcgcgatcaagcagacgctttaccgtgcagggtctcagtccgccgtcatcagcgcgctgatcgaggcggcggagaacggcaagtcggtaactgcggtggtcgaactgaaagcccgcttcgatgaggaacagaacctcaaatgggcgactaagctggagcgtgccggggtgcaggtcatctatggcttcaccgactggaaaacccacgccaaggttgcgatggtggtgcggcgcgaggagagcggttttcgcacatactgccactttgggaccgggaattatcacccgatcacggccaaaatctacaccgacatgagcttcttcaccgccgatcccaaactgggtcgcgatgcggcgaagatgatgaatttcgtcactggttatgtcgaaccgcatggccttgaaatgatctcgatcgcgccgctcgacttgcgcgaagagatctacgagcgcatcgacgccgagatcgctaacgctcgcaagggcaagccagccgcgatctggatgaagtgcaaccagatcacggacgaaggcatgatcgaccgcctctacgccgccagcaatgcaggagttcgcgtggaactggtggtgcgcggcatttgctgcctgcgcccgggagtcgagggcctttcggagaacatcagggtcaaatcgatcatcggacgctttcttgagcattcgcgcatctacgcctttgcgaacggccgcgcgatgccggggccaaatgcacgagtttacatctcttcggccgatctgatgggccgcaacctcgatcgccgtgtagaatcgcttattccgattaccaaccggaccgtacatgaccagattctacagcaggtgctgctcgccaacatgctcgacaccgagcaaagctggtggctccatgccgatggcagctattcgcgggttgagaccgacgggaagccgttcaattgccaccgctactttatgaccaacccctctctgtcagggcgcgggggcgccttggaggcgggagcggtgcctaagctcagcttgcgccggggacgtgctggatga

SEQ ID NO: 6751 - protein, 733 aa, Erythrobacter sp. NAP1
MSSQPITSDQIVSAASPPSAPPASIAPGGEAYFNRELSWLAFNERVLAEACNERYPLLERLRFLSISGSNLDEFMMIRVAGLVGQAQRGIDKPAIDGRTPTQQLSAIREKLAELSARQQDIWRNLHALLAEADIHIADEQRVKPAAHKWLEAFFLEEILPVITPQALDPAHPFPFVHNEGMGLLFTLSRDADKEQIMEMILIPTALPRFVRVPGDIAGAGEAVYISIASLIQRYAKKLFPGFTIEGDGLFRVLRDSDIEIEEEAEDLVRTFRSAIQRRRRGQVIQLELEEDFDPQGEEILLQQLGVHEAAVIKTDGMIGIDGLAEIVDEDRPDLKFDAYSPRYPERIREHDGDAFSAIREKDIVIHHPYESFEVVVDFIRQAAADPDVVAIKQTLYRAGSQSAVISALIEAAENGKSVTAVVELKARFDEEQNLKWATKLERAGVQVIYGFTDWKTHAKVAMVVRREESGFRTYCHFGTGNYHPITAKIYTDMSFFTADPKLGRDAAKMMNFVTGYVEPHGLEMISIAPLDLREEIYERIDAEIANARKGKPAAIWMKCNQITDEGMIDRLYAASNAGVRVELVVRGICCLRPGVEGLSENIRVKSIIGRFLEHSRIYAFANGRAMPGPNARVYISSADLMGRNLDRRVESLIPITNRTVHDQILQQVLLANMLDTEQSWWLHADGSYSRVETDGKPFNCHRYFMTNPSLSGRGGALEAGAVPKLSLRRGRAG

SEQ ID NO: 6752 - DNA, 2136 bp, Synechococcus sp. RS9917
  CDS (1)..(2136): transl_table=11
atgtctgcgcaccacctggccccggagctctacatcaatcgggagctgagttggatcgcgttcaatgaacgggttctggagctggcgctcgacccacgcaccccgttgctggaacaggccaaattcagcgccatcttcagcaacaaccttgatgaattcttcatggtgagggtcgcctcgctgaagagtcaggtggaggcgggcatcagccgcctcagcgaagacgggctgacacccatggagcaactgcatgcgatccgcgatcggttgaccccggtgctggaacagcagcaggagcactaccggaaccggctgaaattccagctgcttgatcacggcgcccacctgctcgactacgagcaactgaacgagaaacagcgcctctggatcgacaactacttccagaccgcaatcttccccgttctcacccccctggcggtagacccggcccacccgtttccgttcgtcagcaacctcagcctcaacgtcgctgctctgatcctcgacccgcagaccgggcagcgccagctggcacgggtgaaggttccccagaagatcctgccccgttttgtgacgatccccaccgatctgagtggcatggacagcgagccgctctacaccgcagtacccctggagcaggtggtggccttcaacctcagcctgctcttcccgggcatgaagatcgaagggcattatttcttccgcgtcacccgcgacgccgacctggaactgcgcgatctcgaagctgacgatctgatgatcgcgatcgagcaggggctgcgcaaacgccgcatgggcggtgaggtggtgcgtctggaggtggccgacgaaatgcctcaggacgtgatcgagatgctgatggaaggcatgtcggtggaagaagaggatctctatcgaatcggcgggcccctgggcctcgatgatctcttcggcctgctggcgattcctctgccccagctcaaggatccgagccataacgggcagaccccggctctgctggcccgagcccagcgcagcatgctggaggacggctcgatcaaagaagaggaattcgaaagcatcttctcggtgattcgccgacgggatgtgttgttgcaccatccctacgacctgttctccacctcggtggaggaattcatcaaccaggcagccgacgatcccctggtgatggggatcaagatgaccctctatcgcacctcaaaggattcaccgatcatcgccgccctgattcgagctgcagaaaacggcaagcaggtgatggcactggtggaactgaaggcccgcttcgatgaagacaacaacatccagtgggccaagcacctggaacggtccggggtgcacgtggtgtatggcgtactcggcctgaagacccacacgaaaatcgtgctggtggtgcgcagagagaaagagcggctgcgcagctatgtgcacatcggcaccggcaattacaactcaaaaacctcgcggctctacaccgacgtggggctcctctcagcccgccctgaactcgggcaggacctggtggaattgttcaactacctcaccgggttctccaagcagcagagtttccgacggcttctggtggcacccgtgtcgctgcgcaagggaatggaacaactgatccgccgcgagattcagcacgcccaggaaggtcgtggtggccacatccgcgccaagatgaattctttggtggaccccggcatcgtcgccctgctctacgaggcctcccaggcaggcgtgacgatcgagctgatcattcgaggcatgtgctgtctctatccgggacgcaaaggactcagtgagaccatcagcgtggtgagcattctggggcggtttctggagcactcccggatcttctggttcgccaacgccggccagccggaggtgttcatcggcagtgccgactggatgccccgcaacctcgaccgccgggtggaggccgtcactccagtggatgaaccggccctgcgtcagcaactggaacggctgctggagctctaccttgccgatgatgcggggtcctgggacatgcagagcgacggcagcttccgccgccgctgcagcgagggtgaaccacgcagctcccaattgcagctgatcgacctgtggcggaacggcatcaccgagcaaaactga

SEQ ID NO: 6753 - protein, 711 aa, Synechococcus sp. RS9917
MSAHHLAPELYINRELSWIAFNERVLELALDPRTPLLEQAKFSAIFSNNLDEFFMVRVASLKSQVEAGISRLSEDGLTPMEQLHAIRDRLTPVLEQQQEHYRNRLKFQLLDHGAHLLDYEQLNEKQRLWIDNYFQTAIFPVLTPLAVDPAHPFPFVSNLSLNVAALILDPQTGQRQLARVKVPQKILPRFVTIPTDLSGMDSEPLYTAVPLEQVVAFNLSLLFPGMKIEGHYFFRVTRDADLELRDLEADDLMIAIEQGLRKRRMGGEVVRLEVADEMPQDVIEMLMEGMSVEEEDLYRIGGPLGLDDLFGLLAIPLPQLKDPSHNGQTPALLARAQRSMLEDGSIKEEEFESIFSVIRRRDVLLHHPYDLFSTSVEEFINQAADDPLVMGIKMTLYRTSKDSPIIAALIRAAENGKQVMALVELKARFDEDNNIQWAKHLERSGVHVVYGVLGLKTHTKIVLVVRREKERLRSYVHIGTGNYNSKTSRLYTDVGLLSARPELGQDLVELFNYLTGFSKQQSFRRLLVAPVSLRKGMEQLIRREIQHAQEGRGGHIRAKMNSLVDPGIVALLYEASQAGVTIELIIRGMCCLYPGRKGLSETISVVSILGRFLEHSRIFWFANAGQPEVFIGSADWMPRNLDRRVEAVTPVDEPALRQQLERLLELYLADDAGSWDMQSDGSFRRRCSEGEPRSSQLQLIDLWRNGITEQN

SEQ ID NO: 6754 - DNA, 2148 bp, Synechococcus sp. WH 5701
  CDS (1)..(2148): transl_table=11
atggatcaggtgatgaatgaacccgtcgtggcaccggagctctacatcaaccgcgagctgagctggatcgcgttcaacagccgcgtgctggctcaggccctcgaccccaccacaccattgctggagcaggcgaaattcagcgccatcttcagcaacaacctcgatgagttcttcatggtcagggtggcgtccctgaagtcgcagctggaggcgggcctctccaccctcagcgacgacggactcacccccaggcagcagctggaggcgatccagcagaaactgcgtccgctgctggagcaacagcaggcccactaccgccatcacctcaaacaggagcttttcaatcagggcgttcagctgatcgactaccaacgcctgaacaagcagcagaagacctgggtcaacacctacttccagaccgccatcttcccggtgctcacccccctggcggtggacccggcccatccctttccgttcatgagcaacctcagcttgaacgtggcagccctgatccgcgatcccgacaccgggcagcagcagttcgccagggtgaaggtgcccaccaagaccctgccgcgcttcgtcgagattcccaccgagctctgcacccgcgagccctctcccgtgtacacggtggtgcccctggaacaggtggtggccttcaacctgcagctcctcttccccggcatgacgatcgaggggcattacttcttccgcatcacccgcgacgccgacctggagctgcgcgacctggaggccgacgacctgatggaggccctgcaggagggcctgcgcaaacgccgccgcggtggcgaggtggtgcggctcgaggtggccaacgagatgccggatgaggtggtggatctgctgatggagggcaccgatgtggatccggcggacctctaccggatcaatgggccccttgggcttgacgacctgatgcgcctgctggcaatccccctgccccagctcaaggacaagccccaccagggccgcacggccacagccctggcccgggcgcagaagagccgcctgggggatggctcgatcaaggcggaggagttcgaaagcatcttcgcggcgatccgccgcagcgatgtgttgctccaacacccctacgacctcttctccacctcggtggaggagttcatcaaccaggccgccgacgacccctcggtgctggccatcaagatgaccctttaccgcacctcaaaggattcgccgatcatcgcggcgctgatccgcgccgccgagaacggcaagcaggtgatggccctggtggaactcaaagcgcgcttcgacgaggacaacaacatccagtgggcccgccagctggagcactccggcgttcacgtggtctatggcgtgctgggcctcaagacccacaccaagatcatgctggtggtgcgcaaggaaaaagaacggctgcgcagctacgtgcacatcggcaccggcaactacaactccaaaacctccagcctctacaccgacattggcctgctctcagcccagccggagctggggcaggatctggtggagctgttcaactacctcaccggcttctcgaaacagcagagcttccgcagtctgctggtggcgccggtcaccctgcgcaagggaatggaagctctgatccagcgggaaatcagccatgcccgcgagggcaagggcggacacatccgcgcgaagatgaatgccctggtggatccagcgatcatcgccctgctctatgaagcctcccaggccggggtggtgatcgagctggtgatccgtggcatgtgctgcctgagacccggggtgcctggtgtgagcgaaacgatccaggtgatcagcatcatcggccgctttctcgagcactcccggatgttctggttcgccaatgccggtgcggcggagatgtacatcggcagcgccgattggatgccacgcaacctcgaccgccgcgtcgaagcggtgacgccgatcaagaatccccagctgcgcggccagctggagcgcctcctggacacctaccagaacgacaactgcgcggcctgggacatgcagagcgacggcagcttcatccagcgacgacccagtggtgagccgcgctgcgcccagctcgatctgatcaagcagtggcgcacgggtctgacagcccaggcctga

SEQ ID NO: 6755 - protein, 715 aa, Synechococcus sp. WH 5701
MDQVMNEPVVAPELYINRELSWIAFNSRVLAQALDPTTPLLEQAKFSAIFSNNLDEFFMVRVASLKSQLEAGLSTLSDDGLTPRQQLEAIQQKLRPLLEQQQAHYRHHLKQELFNQGVQLIDYQRLNKQQKTWVNTYFQTAIFPVLTPLAVDPAHPFPFMSNLSLNVAALIRDPDTGQQQFARVKVPTKTLPRFVEIPTELCTREPSPVYTVVPLEQVVAFNLQLLFPGMTIEGHYFFRITRDADLELRDLEADDLMEALQEGLRKRRRGGEVVRLEVANEMPDEVVDLLMEGTDVDPADLYRINGPLGLDDLMRLLAIPLPQLKDKPHQGRTATALARAQKSRLGDGSIKAEEFESIFAAIRRSDVLLQHPYDLFSTSVEEFINQAADDPSVLAIKMTLYRTSKDSPIIAALIRAAENGKQVMALVELKARFDEDNNIQWARQLEHSGVHVVYGVLGLKTHTKIMLVVRKEKERLRSYVHIGTGNYNSKTSSLYTDIGLLSAQPELGQDLVELFNYLTGFSKQQSFRSLLVAPVTLRKGMEALIQREISHAREGKGGHIRAKMNALVDPAIIALLYEASQAGVVIELVIRGMCCLRPGVPGVSETIQVISIIGRFLEHSRMFWFANAGAAEMYIGSADWMPRNLDRRVEAVTPIKNPQLRGQLERLLDTYQNDNCAAWDMQSDGSFIQRRPSGEPRCAQLDLIKQWRTGLTAQA

SEQ ID NO: 6756 - DNA, 2139 bp, Synechococcus sp. WH 7805
  CDS (1)..(2139): transl_table=11
atgagtgacaaagtgctttcccccgatctctacatcaaccgggagctcagctggatcgcgttcaacgaaagggttctcgttcaggcattggacgagcggacaccgctgctggaacaagcgaaattcagcgccattttcagcaacaacctcgatgaattcttcatggtgagggtggcctccctgaaggcccaggttgaagcaggcatcgaaaaactcagcgaagacggacacacacccatcgagcagctccacgcgatccgcgagcacctcaccccactgctgcacaaacaacaggagcattaccgctcccgcctgaagatccagcttctcgagcatggtgcccatctgctggattacgaacagctcaacgaacgtcaacggctctgggttgacaactacttccagacagcgatctttcctgtcctcacccccctggccgttgatccggctcatcccttcccgttcgtgagcaatctgagcctgaatgtggcagctctgatccacgacccccaaagcggtcaacgtcagctcgcccgggtcaaggtgcctcagaagatcctgccccgcttcgtcaccattcccgccgatctcgccagcggtgactgtgaaccgcttcacaccgccgtgccgctggagcaggtggtggcgttcaacctgagcttgctcttccctggcatgtccatcgaaggacactatttcttccgagtcacccgcgatgcggacttggaattgagggatctcgaggccgatgacctcatgatcgccattgagcagggcttgcgcaaacgccgaatgggcggcgaggtcgtgcgcctggaggttgccgatgaaatgccccaggacgtggtcgagatgctgatggagggaatgtccgttgaggaggaggacctctacagaattgatggcccccttggcctggatgacctcttcgccctgatggcgattcctcttccgcaactcaaggatgaaagccactcaggactgactcccgccatcctcgggcgtgcccagcgaagcatgttggaggacggctccctcaaagaagaggagttcgaaagcattttttcggtggtgcgacgccgcgacgttctgctgcaccatccctacgacctgttttccacatccgtggaggaattcatcaaccaggcggccgacgatccactggtgatgggcatcaagatgaccctctatcgcacctccaaggattcaccgatcatcgccgcattgattcgtgccgccgagaacggaaaacaggtcatggccctggtggaactcaaggcccgcttcgatgaagacaacaacattcaatgggcgaagcacctggaacgttccggcgttcatgttgtttatggagttctgggtctcaagacccacaccaaaatcgttctggtggtccgtaaggagaaagaacgactgcggagttacgtgcatattggaacaggaaattacaactccaaaacctcacggctctatacagacctcggtcttctctccgcgcgacctgagctgggccaagacctcgtggagctgttcaattacctcactggtttctccaaacaacaagggttccgcaagcttcttgtcgctcccgtttccctgcgtaagggaatggagaatctgatccgcagagagatcgaacatgcccagcagggtcggggaggccacatccgagccaaaatgaactccctagtggatcctggaatcattgccctgctgtatgaagcctcacaagcaggcgtcacgatcgaattgatcatccgcggaatgtgctgcctctaccctggccgcaaaggactcagtgaatccatccacgtggtcagcatcatcggccgcttcctggaacactcacgcatcttctggtttgggaacggcggtagccctgaggtcttcatcggcagtgctgactggatgccccgcaacctggaccgacgtgtggaagcggtcaccccgatcgaagagccggcattgcgcgaacaactcgaacgactgctacaggtgtatctcgatgacaaccgcggagcttttgatatgcaaagcaacggtgatttcacgcaacgacatcccgaggacatcgagagaaattcccaacttcaactcatcgaaacctggaagaaaggcgttcccgcctcggatgactga

SEQ ID NO: 6757 - protein, 712 aa, Synechococcus sp. WH 7805
MSDKVLSPDLYINRELSWIAFNERVLVQALDERTPLLEQAKFSAIFSNNLDEFFMVRVASLKAQVEAGIEKLSEDGHTPIEQLHAIREHLTPLLHKQQEHYRSRLKIQLLEHGAHLLDYEQLNERQRLWVDNYFQTAIFPVLTPLAVDPAHPFPFVSNLSLNVAALIHDPQSGQRQLARVKVPQKILPRFVTIPADLASGDCEPLHTAVPLEQVVAFNLSLLFPGMSIEGHYFFRVTRDADLELRDLEADDLMIAIEQGLRKRRMGGEVVRLEVADEMPQDVVEMLMEGMSVEEEDLYRIDGPLGLDDLFALMAIPLPQLKDESHSGLTPAILGRAQRSMLEDGSLKEEEFESIFSVVRRRDVLLHHPYDLFSTSVEEFINQAADDPLVMGIKMTLYRTSKDSPIIAALIRAAENGKQVMALVELKARFDEDNNIQWAKHLERSGVHVVYGVLGLKTHTKIVLVVRKEKERLRSYVHIGTGNYNSKTSRLYTDLGLLSARPELGQDLVELFNYLTGFSKQQGFRKLLVAPVSLRKGMENLIRREIEHAQQGRGGHIRAKMNSLVDPGIIALLYEASQAGVTIELIIRGMCCLYPGRKGLSESIHVVSIIGRFLEHSRIFWFGNGGSPEVFIGSADWMPRNLDRRVEAVTPIEEPALREQLERLLQVYLDDNRGAFDMQSNGDFTQRHPEDIERNSQLQLIETWKKGVPASDD

SEQ ID NO: 6758 - DNA, 2181 bp, Xanthobacter autotrophicus Py2
  CDS (1)..(2181): transl_table=11
atgaacgaggctgcagctctcgcggaggtcgagatcccggctggcgcagcggaggtgctggcgctggcgcaatcgccgcagcgcttcatcaaccgcgagatttcctggctgcacttcaaccggcgggtgctggaggaggcggagaaccgcaaccaccccctgctggagcagctgcgcttcctctccatctcggccaacaacctcgacgagttcttcatggtccgcgtggcgggcctgaaggagcaggtgcgcgagggcgtgcagaccccgagccccgacggccttaccccctcggagcagctggccaccatcctcgccagcgccgcccagctcatctccgaccagcagggccgctggctggagctgcggcacgacctcgccggcgtcggcatcgtgctggtggatggcgtcgaggtcacggccgaagacctggtggtgctggaccggcatttcctcaaccacgtcttcccggtgctgaccccgctggccatcgacccggcgcaccccttccccttcatccccaatctcggcttctcgcttgcgctccagctggtgcggcaagcggacgggcggggcatgaacgcgctgatccgcatccccgccaaggtggagcgtttcatccgcctgccggacctcggcaccggggccctgcgcttcatcaccctggaacagatgatcggcctgttcatctcccgcctcttccccggctacgcagtgaagggccagggcgtgttccgagtggtccgcgacagcgaccttgaaatcgaggaggaggcggaggatctcgtccgcctgtttgagaccgcgctgaaacagcgccgctacggcgaggtgatccgcatggaggcggatgccgccatgccggcggagctgcgcaatttcgtcgcccgcgagctgggcgtgaacgacgacgagatcttcgtggtgggcggcgtgctcgccctgaacgaattctcccagctggtctcggtggaccggccggacctgaagtttcaggcctacaacgcccgatttcccgaacgcatccgcgaccacggcggagactgctttctcgctattcgcgagaaggacatattggttcaccacccttatgaatcctttgacgtggtggttcagtttctccgccaggccgcccgcgaccccaacgtcgtcgccatcaagcagaccctctaccgcacctcctccgacagccccatcgtgaaggccctggccgaggcggcggaggccggcaaatcggtgaccgcgctggtggagctgaaggcccgcttcgacgaggaagccaacatccgctgggcccgcgacctggagcgtgccggcgtgcaggtggtgttcggcttcatcgagctgaagacccacggcaagctctccatggcggtgcggcgcgagggcgcgcagctggccacctacgtccatgtgggcaccggcaactaccaccccattaccgcccggatctatacggacctcagcttcttcaccgccgatccggtgatcgcccaggacgtggcccgcatcttcaacttcatcaccggctatgccacccccggcgagctggacgccatggcggtctcgcccacgggcctgaagccccggctgctcaaccacatcgccgacgagatcgagttcgccaaggccggccgcccggccgccatatggctgaagtgcaactcgctggtggatccggagatcatcgacgcgctgtacgaggcgagcgccgccggcgtgcaggtggactgcatcatccgcggcatctgctgcctgcgccccggcattcccggactctccgagaacatccgggtgaagtccatcgtcgggcgcttcctggagcactcgcgcgtgtattgcttcggcgccggccacggcctgccgagccccaatgcggtggtctacatctcctcggcggacctgatgccgcgtaacctcgaccgccgggtcgagaccctgtgccccatcaccaatcccacggtgcacgagcaggtgctcgaccagatcatggtcgccaaccttatcgacaaccagcagagctggcgtgtcttgcccgacggctcctccgaacgcatagtccccgcgccgggcgaagagccgttcaacgcccatcaatatttcatgaccaacccgagcttgtccggacgtggaaagtctctcaaagattcttcgccgcgtagcctcttcgtccgtcgctga

SEQ ID NO: 6759 - protein, 726 aa, Xanthobacter autotrophicus Py2
MNEAAALAEVEIPAGAAEVLALAQSPQRFINREISWLHFNRRVLEEAENRNHPLLEQLRFLSISANNLDEFFMVRVAGLKEQVREGVQTPSPDGLTPSEQLATILASAAQLISDQQGRWLELRHDLAGVGIVLVDGVEVTAEDLVVLDRHFLNHVFPVLTPLAIDPAHPFPFIPNLGFSLALQLVRQADGRGMNALIRIPAKVERFIRLPDLGTGALRFITLEQMIGLFISRLFPGYAVKGQGVFRVVRDSDLEIEEEAEDLVRLFETALKQRRYGEVIRMEADAAMPAELRNFVARELGVNDDEIFVVGGVLALNEFSQLVSVDRPDLKFQAYNARFPERIRDHGGDCFLAIREKDILVHHPYESFDVVVQFLRQAARDPNVVAIKQTLYRTSSDSPIVKALAEAAEAGKSVTALVELKARFDEEANIRWARDLERAGVQVVFGFIELKTHGKLSMAVRREGAQLATYVHVGTGNYHPITARIYTDLSFFTADPVIAQDVARIFNFITGYATPGELDAMAVSPTGLKPRLLNHIADEIEFAKAGRPAAIWLKCNSLVDPEIIDALYEASAAGVQVDCIIRGICCLRPGIPGLSENIRVKSIVGRFLEHSRVYCFGAGHGLPSPNAVVYISSADLMPRNLDRRVETLCPITNPTVHEQVLDQIMVANLIDNQQSWRVLPDGSSERIVPAPGEEPFNAHQYFMTNPSLSGRGKSLKDSSPRSLFVRR

SEQ ID NO: 6760 - DNA, 2148 bp, Desulfitobacterium hafniense DCB-2
  CDS (1)..(2148): transl_table=11
atgatgaaaactatctacgacaccacggggaattttatcaatcgcgaattaagctggctggagtttaatcagcgggttttggagggggctctggatgccgctaaccctctgtttgaacggcttaatttcctggccattgtcagctccaatctggatgagttttttgcggtgagagtcgcatccttgggggaccaaatcctggctggtctggagaaacgtgatccctccggtttgcttccccaggaatgtatggcgcaaattgtggagcgtgcccatgggatagtagagggtcagtaccggtgttacaggaactctctgcttaaaaaactcaggaaggaaaacatcaatattgtcaaccctaaatccttaaccaaggaccaaaagaaatttgtgaaagattattacctgcataaagtttttccggtgctcacccccttggtggtggatcagggccggccttttcctttgctgcgcagcagagagctgtatattgccttattgattaaaggagtggagactcatcttttcgctacggttcaagttccgaaagtcctgccccgctttgtggaagttccctcggcgaccaaagacagggaatttatcatgttggaggatctgatcaccttaaaattgccggatctttttcaagggcataagctggcagccgcaggctttttccgcattacccgcaatgccgacctggatttcgacgaagagggggcggaagatttattagaagccattgaattatccatacgtcagcgcaaatggggttcggtgatccgtctggaggtgggcaaagggtttcataaagatcttctggccatccttaaggaagaattggaaatcactgaggacaagatttatgaagtacggggacccattgatctgacgtttctctcggacttcattaagcttaagggatgtgagcatttacgctatctcccttttcaacctcaggatgtcccggaactgatcagggaaaaggacatcttcaaggctattcaggagcaggatattctgcttcatcacccctaccaatccttccaaccggtggttgagttagtgaaaacggcggccagagatcctcaggttctggcgattaagcaaaccctttaccgcgtcagcggcaattcgccgattattgccgccctggcccaggcggcggagcttggcaaacaggttacggttcttgtggagcttaaggcccgctttgacgaggagaagaacattcattgggccaagcatctggaggaggccggctgccatgtcatctatggtttagtggggctgaaaacccactgtaaggtcctcttgattgtgcgccgggaagaggatggcatcaagcgctatgttcatatgagcacgggcaactataatgatgtgactgccaaaatctatacagatatcgggctgatgacagtgaatccccagtttggggctgatgcctcagcattattcaatatgctttccggactttcccaaccggtcaatcttaataaattcaccttggcacctgctgggatgagagagaaattcctccagcttattgaggatgaagcacataacgcccaaaagggaatgaaggcggtcatcgtcgtcaaggttaattctctgcttgataagcaaatcattctcgctttatatcatgcttccagccagggtgtggaaatcaagctgattgtgcggggggtctgctgcctccggcccggtttgccgggagtcagcgaaaccattgctgtccgcagtattgtgggaagatttctggagcatagccgtatcttttatttctatcatggcggagaagagctggtgtatttgtccagcgccgactggatgccaagaaacctggatcgccgggttgaactactgtttcctgtcgaaaatcccgatgccaaggaagaagtaaaggccatactggacatagcctggcaggatacggtaaaggcccgcatattaaatgccaaaggtatctataaaaaggtggataaacggcggaaaaaatcagttgaaagccaggacgccctctgtgaacgagcggtagctcaaagcaccagggaaaaagccaggttgcaggaaagactggaggggagttttcatcccgtgactgccggggcggaaatgcaggggtttaccggaatgaaatag

SEQ ID NO: 6761 - protein, 715 aa, Desulfitobacterium hafniense DCB-2
MMKTIYDTTGNFINRELSWLEFNQRVLEGALDAANPLFERLNFLAIVSSNLDEFFAVRVASLGDQILAGLEKRDPSGLLPQECMAQIVERAHGIVEGQYRCYRNSLLKKLRKENINIVNPKSLTKDQKKFVKDYYLHKVFPVLTPLVVDQGRPFPLLRSRELYIALLIKGVETHLFATVQVPKVLPRFVEVPSATKDREFIMLEDLITLKLPDLFQGHKLAAAGFFRITRNADLDFDEEGAEDLLEAIELSIRQRKWGSVIRLEVGKGFHKDLLAILKEELEITEDKIYEVRGPIDLTFLSDFIKLKGCEHLRYLPFQPQDVPELIREKDIFKAIQEQDILLHHPYQSFQPVVELVKTAARDPQVLAIKQTLYRVSGNSPIIAALAQAAELGKQVTVLVELKARFDEEKNIHWAKHLEEAGCHVIYGLVGLKTHCKVLLIVRREEDGIKRYVHMSTGNYNDVTAKIYTDIGLMTVNPQFGADASALFNMLSGLSQPVNLNKFTLAPAGMREKFLQLIEDEAHNAQKGMKAVIVVKVNSLLDKQIILALYHASSQGVEIKLIVRGVCCLRPGLPGVSETIAVRSIVGRFLEHSRIFYFYHGGEELVYLSSADWMPRNLDRRVELLFPVENPDAKEEVKAILDIAWQDTVKARILNAKGIYKKVDKRRKKSVESQDALCERAVAQSTREKARLQERLEGSFHPVTAGAEMQGFTGMK

SEQ ID NO: 6762 - DNA, 2217 bp, Pseudomonas chlororaphis
  CDS (1)..(2217): transl_table=11
atgaataccgaaggactcactgaagttgccgtaaaagaagctcaacccgtggtcgagcaggttgttgaaacaccgcgggactggagccccgccggtgcaagcggacgcgccgcatgtggcgatgccgaccctggtcatcccggcctggatgacagcagcctgtatatccatcgcgagctgtcgcaactgcagttcaacatccgcgtgctggaacaggcgctggacgagtcctacccgttgctggagcgcctgaagttcctgctgatcttctccagcaacctggacgagttcttcgagatccgcgtcgccggcctgaagaagcagattaccttcgcccgtgaacaggccggtgccgatggcctgcaaccgcaccaggccctggcgcgcatcagcgacctggtgcacggtcacgtcgaccgccagtacgcgatcctcaacgacattctgttgccggagctggagaaacatcaggtccgcttcatccgtcgccgttactggaccaccaagctcaagacctgggtccgtcgctacttccgcgacgagatcgcgccgatcatcaccccgatcggcctcgacccgacccacccgttcccgctgctggtgaacaagagcctgaacttcatcgtcgaactcgaagggatcgacgccttcggccgcgattccggcctggcgatcatcccggcgccgcgcctgctgccgcggatcatcaaggtgccggaagaagtcggcggccctggcgacaactatgtattcctctcgtcgatgatccacgcccacgccgatgacctgttccagggcatgaaggtaaagggctgctatcagttccgcctgacccgcaacgccgacctggcggtggacaccgaggacgtcgaagacctggcccgcgccctgcgcggcgatctgttctcccgtcgttacggcgatgcggtgcgtctggaagtggccgacacctgcccgaaacatctgtccgactacctgctcaagcagttcaacctgagcgagaccgagctgtaccaggtcaacggtccggtgaacctgacgcgcctgttcagcatcaccggcctggacagccatccggagctgcaatacacgccgttcaccccgcagattcccaagctgctgcagaacagcgagaacatcttcagcgtgatcagcaagcaggacatcctgctgctgcacccgttcgagtccttcactccggtggtcgacctgctgcgccaggcggccaaggacccgcacgtgctggcggtgcgccagaccctgtaccgcagcggcgccaactcggaaatcgtcgatgcgctggtggacgcggcgcgtaacggcaaggaagtcaccgcggtgatcgagctgcgcgcgcgtttcgacgaagagtccaacctgcaactggccagccgcctgcaagcggccggcgcggtggtgatctacggcgtggtcggcttcaagacccacgccaagatgatgctgatcctgcgtcgcgaatccggtgagatcgtgcgctatgcccatctgggcaccggcaactaccacgccggcaacgcccgcctgtacaccgactacagcctgctgacctccgacgatgccttgtgcgaagacgtcggcaagctcttaagccagttgatcggcatgggcaagaccctgcgcatgaagaagctgctgcatgcgcccttcaccctgaagaagggcatgctcgacatgatcgcccgggagacccagttcgccctggacggcaagccggcgcacatcatcgccaagttcaactcgctgaccgatccgaagatcatccgcgcgctgtacaaggccagccagtcgggcgtgcgtatcgacctggtggtgcggggcatgtgctgcctgcgtccggggatcgccggcgtgtcgcacaacatccatgtgcgttcgatcatcggtcgcttcctggagcacacccgggtgttctatttcctcaatggcggcgaggagcagatgttcctgtccagcgccgactggatggagcgcaacctcgacaagcgtgtcgagacctgcttcccggtcgagggcaagaagctgatcctgcgggtcaagaaggagctggaaagttatctcaccgataacacccacagctggagcctgcagtcggacggccgctacatccgcaacacgccgaccggcaaccagaacccgcgcagcgcccaggccacattgctggagcgcctgagcaacccggtgctggcggtgcgctga

SEQ ID NO: 6763 - protein, 738 aa, Pseudomonas chlororaphis
MNTEGLTEVAVKEAQPVVEQVVETPRDWSPAGASGRAACGDADPGHPGLDDSSLYIHRELSQLQFNIRVLEQALDESYPLLERLKFLLIFSSNLDEFFEIRVAGLKKQITFAREQAGADGLQPHQALARISDLVHGHVDRQYAILNDILLPELEKHQVRFIRRRYWTTKLKTWVRRYFRDEIAPIITPIGLDPTHPFPLLVNKSLNFIVELEGIDAFGRDSGLAIIPAPRLLPRIIKVPEEVGGPGDNYVFLSSMIHAHADDLFQGMKVKGCYQFRLTRNADLAVDTEDVEDLARALRGDLFSRRYGDAVRLEVADTCPKHLSDYLLKQFNLSETELYQVNGPVNLTRLFSITGLDSHPELQYTPFTPQIPKLLQNSENIFSVISKQDILLLHPFESFTPVVDLLRQAAKDPHVLAVRQTLYRSGANSEIVDALVDAARNGKEVTAVIELRARFDEESNLQLASRLQAAGAVVIYGVVGFKTHAKMMLILRRESGEIVRYAHLGTGNYHAGNARLYTDYSLLTSDDALCEDVGKLLSQLIGMGKTLRMKKLLHAPFTLKKGMLDMIARETQFALDGKPAHIIAKFNSLTDPKIIRALYKASQSGVRIDLVVRGMCCLRPGIAGVSHNIHVRSIIGRFLEHTRVFYFLNGGEEQMFLSSADWMERNLDKRVETCFPVEGKKLILRVKKELESYLTDNTHSWSLQSDGRYIRNTPTGNQNPRSAQATLLERLSNPVLAVR

SEQ ID NO: 6764 - DNA, 2922 bp, Physcomitrella patens subsp
  CDS (1)..(2922)
atggagggtgcagccgctgggttgggctcaacatctgtggggcggagctcgcaacccggcaggtcgtacctcttctgccatattgaatcgaacgcgagaagcagcgccttgcttgccggctcaacagccatggcatgtggaatcaagtgccatcattggcagaatcgtgtgacatcctccgaagttatttctgtggcgtccggggttcgttcgattgctcgtaaaatgcagcaaaggtgttttaagaaaggtgcagctggggaggcattctcgaatatttcttcccaactggggtgtggacgggagagtttggagcgcccgaggagccagactactaggttggccaagaagaagcagaatgcttggagcagaggaggcgtccgggtccgggcagatgccgtggtccagcagtccgcaggatccgatgagactactggcaacaggcttgtagagaacggagttgcaacgttagtgaccctgaaagctgtaattgatgaaaagagcggtgccctcctcttaaaagaagagctgaccaaggaaaagaatgacacaacacacgcgtcgaaatcaaagctgcggaaactgaagccgtccaaaatagatgatcttcccgtcgagctacgtcagcctcccatgaatgggaacgtggttatgccaccgcagaaacaagaaggactagaagctgatgttgcagggattggagtagatacgctggttgcagctgattcggtttacaacaaagagctaagttggcttgctttcaactggcgggtccttcacatggcgcttgatgttcgcacaccgctccttgagcgattgcggttcttggctatttctgcacgcaatttagacgagtttttctgtaagcgtattggagcactgaagaggcaagaagctgctggtgttgagaatctgatcaacgtccaatcacgaatggcctggactccgcaacaacagctgaaacatgttgccaaagaagttcggttgatggtggacacgcagattgcttgcctgactgaggaagttttgccagctctcaaaaagaatgggtttaatctggttgattatgaagagcttcatttacatgagaaggaccagcttagactctacttcaaatcatccttagagcccatcctgacgccgctggcagtagatccgggacacccatttccctatattggtaacttgacatcaagcattgctgtggtgctcagagatccttacgatgatgcagtgcaatttgcgatagtttctgtgccttctggattggagcggtggaagagcttggcattttctaaaaatgacgaatacaacatgaatacatttgtgtcacttgaagacatcatcataaacaacttggatcttctttttggtggaatggagatcatgtctgcacatgtgttccggacaacgcgaaatgcagatgttgctcggaacgaggaagaagctgaggaccttctagagatgataactgatgagatgagagagcttaggtttgctccttttgtacgactggaagtggactgcaagatgcctctagaagttgtgcaacgattgaccatggagctgggtcttagtgataaagatgatgtctacgctatctgtgggccaatggcactgggagagttggattcattagtaggcaaatgtaatttgacttcaccacttgtttacactctatggacttcgaagacccatcctcgattacaaggggctgatgtttttgaagttattaagaaaggggatatcttgctccatcatccttaccacagctttgtaacaagtacgcaacattttgtagaagcagctgcaaacgacccaaaggtggcagccatcaaggccactctatatcgtactaataacgacagtcccgtgatctctgctctagcgaaagccgctgaagctggaaagcaggtggcggtgttggtggagttaaaagctcgatttgatgaagttcgaaatatgggattcgctcaaaaattggaggatgctggttgtaacgttgcttatgggttagtgggactcaaaacacactgtaaatgtattatggtagtgcgcaaggaggacgatggactcagaacatatgtccatatagggacggggaattacaatcctcgcactgcatcagtatatacagacttcggcctgctcagctgcgatcctgatctggggatggacgttgcagatctcttcaagtacttgactggttatcacagacaggtggcgtatcggaagttattagttgcaccaggaacgatgcgaaatgagttcatttggctgatagagagagagatcgctaacgcacaagctggaaagcctgcaagcatcatcgttaaatgcaacggccttgatgatcaggtgatggtgacaaaattgtatgaagcctctaaggcaggtgtaaatattgactgtattgtccggggcatgtgccgcatccgcactggaattccaaatgtcagtgataatatacgcgtcgtcagcattcttggtagattcttggagcatcatcgaatttttcgttttgaaaatggaggggatgcggagtactatatgggctcggccgattggatgactcgcaatctcacacgtagagttgaagttgtgactcctgttgaggatgaagctcttcagaaggaattacaggaaatgttggatgcctgtttgtgtgatcggcgaaaagcatgggagatgagacccgatggacgttaccagcttcttggggttgggaacatgaaggacccgccacgaaagcatattcctcaggttgcatctccgaaattgattgcagcagtagaaagcatgggtttacatgagggccttatggagattgttgcgaagcgctgccggaaagctaaaaaggtgaacctgagaaaacaagatggaaccgctatgaaacctaggcgtcagcatgatagcagctaa

SEQ ID NO: 6765 - protein, 973 aa, Physcomitrella patens subsp
MEGAAAGLGSTSVGRSSQPGRSYLFCHIESNARSSALLAGSTAMACGIKCHHWQNRVTSSEVISVASGVRSIARKMQQRCFKKGAAGEAFSNISSQLGCGRESLERPRSQTTRLAKKKQNAWSRGGVRVRADAVVQQSAGSDETTGNRLVENGVATLVTLKAVIDEKSGALLLKEELTKEKNDTTHASKSKLRKLKPSKIDDLPVELRQPPMNGNVVMPPQKQEGLEADVAGIGVDTLVAADSVYNKELSWLAFNWRVLHMALDVRTPLLERLRFLAISARNLDEFFCKRIGALKRQEAAGVENLINVQSRMAWTPQQQLKHVAKEVRLMVDTQIACLTEEVLPALKKNGFNLVDYEELHLHEKDQLRLYFKSSLEPILTPLAVDPGHPFPYIGNLTSSIAVVLRDPYDDAVQFAIVSVPSGLERWKSLAFSKNDEYNMNTFVSLEDIIINNLDLLFGGMEIMSAHVFRTTRNADVARNEEEAEDLLEMITDEMRELRFAPFVRLEVDCKMPLEVVQRLTMELGLSDKDDVYAICGPMALGELDSLVGKCNLTSPLVYTLWTSKTHPRLQGADVFEVIKKGDILLHHPYHSFVTSTQHFVEAAANDPKVAAIKATLYRTNNDSPVISALAKAAEAGKQVAVLVELKARFDEVRNMGFAQKLEDAGCNVAYGLVGLKTHCKCIMVVRKEDDGLRTYVHIGTGNYNPRTASVYTDFGLLSCDPDLGMDVADLFKYLTGYHRQVAYRKLLVAPGTMRNEFIWLIEREIANAQAGKPASIIVKCNGLDDQVMVTKLYEASKAGVNIDCIVRGMCRIRTGIPNVSDNIRVVSILGRFLEHHRIFRFENGGDAEYYMGSADWMTRNLTRRVEVVTPVEDEALQKELQEMLDACLCDRRKAWEMRPDGRYQLLGVGNMKDPPRKHIPQVASPKLIAAVESMGLHEGLMEIVAKRCRKAKKVNLRKQDGTAMKPRRQHDSS

SEQ ID NO: 6766 - DNA, 2118 bp, Xanthomonas oryzae pv
  CDS (1)..(2118): transl_table=11
ttgatgatcgattccatgggccacgccaaagaactgcacgacatcacacccggcgacgacatcgccaccgatccgttgcgtgatacggcgctgtacatcaaccgcgagttgtcgcagctggacttcaacttccgggtgctggcgcaggcgctcgatgagcaggtgccattgctggagcggctgcgcttcctgtgcatctcgtgtaccaatctggacgagtttttcgagatccgcgcggccaccgtgcggcatgcgcaggagttcgggctgccgccggcaccggacgggctgagcccaaccgccatcctcaacgcagtgcacgatcgcgccgccaagttggtcgagcagcaataccacgcctggaatgaagtgctgcgcccggcgatggaagacgccggcgttgccgtgctcagcccctcggcatggacctcgcgccagaaacgctggctgcgtgcctacttccgcaacgagatcatgccggtgctgtcgccactggggctggacccggcgcacccgttcccgaagatcctcaacaagaccttgaacatcgtggtggtgctggaaggccaggacgcgttcggccgcgccgggcatctggccatcgtgcgcgcaccgcgttcgctgccgcgcatcatccagctgccggccagcctgtcgccggagggcgcgcagagtttcgtgttcctgtcgtcggtgttgtccgaattcgtcgacgaactgttcccgggcatgcaggtcatgggctcgtatcagttccgtgtcacccgcaattccgaactggtggtggacgaggaagaagtcgaaaacctggcgctggccttgcgcgacgagttggtcacgcgcggctaccggccggcggtgcggctggagatcgcgcacgactgcccggcgcccatcctgcgcaccttgctgcaaaatttcggactgaacgagaacgcggtgtaccgcatcatcgggccggtcaacctgagccgcgtcacgcaggtctatgacctggtgcagcgccccgagctcaagtaccactcgttcaatccgcgcaccttgcgcgacaccgagggcattttcgagatcgtcaaaaaaaacgatgtattgctgcatcaccccttcgatgccttcacagcggtgctggatgtcatccgccaagctgcggtcgacccgaacgtgctggcgatcaagcagacgctgtatcgcaccggaaaggattcgctgattgtcgatgcactgattctggccgcacgcaacggcaaggacgtcaccgtggtggtggagttgcgtgcgcgcttcgacgaagaagccaacctgggcctggccgacaagctgcaggaagccggcgtgcaggtggtctacggcgtggtcggcttcaagacccacgccaagatgctgctgatcgtgcgacgcgagggtcgcaagctcaaacgctacgtgcacctgggcaccggcaattaccacagcggcaccgcgcgcctgtataccgacatcagcctgatcaccgccgatgccgagatcggcaatgacgtgcacatgctgtttcagcagttgtccgggcttgcgccgcgcatgaagctggagcagttgctgcagtcgccgtttacgctgcatgccggtgtgctgaagcggatcgatcgcgaaacgcggctggcccgcaagggtcgcccgggccgcatcatcgccaagatgaatgccctcaacgaaccgcaggtggtgcgtgcgttgtacacggcatcgcaggccggcgtgcagatcgatctgatcgtgcgcggggcctgcacgctgcgccccggcgtgccgggcgtgtcggacaacatccgcgtgcgctcgatcgtggggcgctttctggaacacagccgcgtgtactggttcggcaacgacggcgccgccgagttgtattgcgccagcgccgactggctggaacgcaacctgctgcggcgggtggagacctgcttcccgatcctggaaccggaccttgccaagcgcgtctaccgcgaagtgctgcagaactatctggacgacaacgtcagcgcctgggaactggacgcagagggcgtgtaccacaagcgcacgcctgccccgggcgagccaccgcattcggcgcagatgaccttgctcgatcggatctga

SEQ ID NO: 6767 - protein, 705 aa, Xanthomonas oryzae pv
MMIDSMGHAKELHDITPGDDIATDPLRDTALYINRELSQLDFNFRVLAQALDEQVPLLERLRFLCISCTNLDEFFEIRAATVRHAQEFGLPPAPDGLSPTAILNAVHDRAAKLVEQQYHAWNEVLRPAMEDAGVAVLSPSAWTSRQKRWLRAYFRNEIMPVLSPLGLDPAHPFPKILNKTLNIVVVLEGQDAFGRAGHLAIVRAPRSLPRIIQLPASLSPEGAQSFVFLSSVLSEFVDELFPGMQVMGSYQFRVTRNSELVVDEEEVENLALALRDELVTRGYRPAVRLEIAHDCPAPILRTLLQNFGLNENAVYRIIGPVNLSRVTQVYDLVQRPELKYHSFNPRTLRDTEGIFEIVKKNDVLLHHPFDAFTAVLDVIRQAAVDPNVLAIKQTLYRTGKDSLIVDALILAARNGKDVTVVVELRARFDEEANLGLADKLQEAGVQVVYGVVGFKTHAKMLLIVRREGRKLKRYVHLGTGNYHSGTARLYTDISLITADAEIGNDVHMLFQQLSGLAPRMKLEQLLQSPFTLHAGVLKRIDRETRLARKGRPGRIIAKMNALNEPQVVRALYTASQAGVQIDLIVRGACTLRPGVPGVSDNIRVRSIVGRFLEHSRVYWFGNDGAAELYCASADWLERNLLRRVETCFPILEPDLAKRVYREVLQNYLDDNVSAWELDAEGVYHKRTPAPGEPPHSAQMTLLDRI

SEQ ID NO: 6768 - DNA, 2121 bp, uncultured bacterium
  CDS (1)..(2121): transl_table=11
atgaacaccgccgccacacccaccgaagcccctctcaacaaggccactgacggttttccgtcggactacttccagaatcgcgagatggggctgcttgctttcaatcggcgcgtgctgtggcaagccaagaaccccaagaccccactgctcgaacgcttgcgcttcctgtgcatcgtgagcagcaatctcgacgagttcttcgaaatccgggtggccggagtcaaggagcaactcaaactcggatcggtcgcgctcaccaccgacggcaagaccgcgcgcgaagtctaccgcctggtctgcgacgaaacgcacgccctggtcaaggaacagtacgccctgctgaatgaggagatcctgccgctgctcgccagcgaaggcatacgtttcctcaaacgcgccgactggagcccggcgcagcgcgaatggatcagcgccttctttttccgcgaagcgatgccggtgatcaccccgatcggcctcgatccctcgcaccccttcccgcgggtgctcaacaagagtctcaacttcgccgtcgaactcgaaggccgcgatgcttttgggcgcagctcggatgcggccatcgtgcaggcaccccgtgtcctgccgcgagtcatccagctgccccgcgaactcggtgacagcgagtattgcttcgtcttcctgtcgtcgatcctgcacgaattcgtgcacgagctgttcgccggcatgaaagtcctcggctgctaccagttccgcgtcacgcgcaacagcaacctgttcgtggacgaagaagcggtcaagaacctgcgcaccaagatccagggcgaattgccacagcggcactttggtgacgccgtccgcctcgaagtcgccaacaactgctcggaagcgatgaccgagttcctgctcggtcagttcaacctcaccgagcgcgacctctatcgcgtcgccggcccggtcaatctggtgcgcctgatgcaggtccccgactgggtgatgcgcgacaatctcaaattcaagcccttcaagcccggcacaccaaaggcgctggagaaaagcggcaacgttttcgaggccatccgcggcggcgacatcctgctgcaccatccctaccagagcttcaatccgatcattgaactgctcgagcagtcggcaaccgacccgcaggtggtggccatcaagatgaccgtttaccgtaccggcacggattcggtgctcatgcaatcgctgctgcgcgcggcgcagaacggcaaggaagtcacggtggtcgtcgaactcatggcgcgctttgacgaggaagcgaacatcggctgggcgaccaagctcgaagaggttggcgcacacgtcatctacggcgtcgtcggctacaaggtgcacgccaagatgctgatgatcgtccgccgcgaggaaggcaaggcgggcggcagcgtcctgcggcgctacgtgcacctgggtaccggcaactaccacccgaagaccgcccgtctgtactccgacttcggtctgctcaccagcaacgaagagatcggcgccgataccaacgaggtcttcaagcagcttaccggcctcgggcgtgcgcagaccctgaagcacctctggcaagcccccttctccctgcagccgaatgtcgtcgccgggatccgggccgaggccgaagccgcgcgtgccggcaagcggtcacgaatcatcgccaagatgaattcgctgctcgaaccggagaccatcgccgcgctctacgaggcgtcacaggccggcgtcaagatcgacctcatcgtgcgcggcgtttgcggcctgcgtgccggcgtcaaaggcttgtcggacaacatcagcgtctggtcgatcatcggtcggcagctcgaacatcatcgggtgttctatttctttgccgacggggaagagagggtctatctgtcgagcgccgactggatggaccgcaacttcttccgccgcatcgaactcgctttcccgatcctcgaccgcaagctgaagcgccgggtgatcgccgaaggactgcagatctatctcaccgacaatacgttgtcctgggaactgggacctgacggcagctatcatcagcggcgcggctcgcggaccagcccgcactcgtcgcaggccgagctgatcgaactgctgaaggactga

SEQ ID NO: 6769 - protein, 706 aa, uncultured bacterium
MNTAATPTEAPLNKATDGFPSDYFQNREMGLLAFNRRVLWQAKNPKTPLLERLRFLCIVSSNLDEFFEIRVAGVKEQLKLGSVALTTDGKTAREVYRLVCDETHALVKEQYALLNEEILPLLASEGIRFLKRADWSPAQREWISAFFFREAMPVITPIGLDPSHPFPRVLNKSLNFAVELEGRDAFGRSSDAAIVQAPRVLPRVIQLPRELGDSEYCFVFLSSILHEFVHELFAGMKVLGCYQFRVTRNSNLFVDEEAVKNLRTKIQGELPQRHFGDAVRLEVANNCSEAMTEFLLGQFNLTERDLYRVAGPVNLVRLMQVPDWVMRDNLKFKPFKPGTPKALEKSGNVFEAIRGGDILLHHPYQSFNPIIELLEQSATDPQVVAIKMTVYRTGTDSVLMQSLLRAAQNGKEVTVVVELMARFDEEANIGWATKLEEVGAHVIYGVVGYKVHAKMLMIVRREEGKAGGSVLRRYVHLGTGNYHPKTARLYSDFGLLTSNEEIGADTNEVFKQLTGLGRAQTLKHLWQAPFSLQPNVVAGIRAEAEAARAGKRSRIIAKMNSLLEPETIAALYEASQAGVKIDLIVRGVCGLRAGVKGLSDNISVWSIIGRQLEHHRVFYFFADGEERVYLSSADWMDRNFFRRIELAFPILDRKLKRRVIAEGLQIYLTDNTLSWELGPDGSYHQRRGSRTSPHSSQAELIELLKD

SEQ ID NO: 6770 - DNA, 2247 bp, Arthrobacter sp
  CDS (1)..(2247): transl_table=11
atgaacccggaaccttccggagcagtcacgtcccaggacgtcgcagtgccggtccgcgcccgcttcggctcctcggaagttcccgcctcgcgcgccacccaggaccgcatcgacatcccggagtttgcgccgaacctgcagccggagggcgacatccgcccggaccggttcctggaccgcgaactgagctggctcagcttcaactcccgtgtcctggaactggcggaggaccccacgctgcacctgctggagcgcgtcagcttcctgtcgatctttgcttcgaacctggacgagttcttcatggtccgggtggcaggcctgaaacggcgcatcgccacgggcctcgcagttccctcccccgcgggcctgagccctgttgaggtgctggagaggatcagcggcgaagcacaccggctccagcagcgtcatgcgcaggtctgggccgagcagatccgtccggcgctggcctacgaacacatccacctcatgcactgggacgagctggacgacgcggcgcaggaacagctgagcgtgatcttccgcgagaaggtgttccccatcctcacgcccctggcggtggacccggcgcaccccttcccctacatttccggcctctcgctgaaccttgccgtggtggtgcgcaaccctgtgagcgacaaggagctctttgcccgcgtcaaggtgccggaccagctgccgcgcctgatgtccatagacggtccgcgcgccggcgcggtggccggacgcgtggcgcgctttattgcgcttgaggaagtcatcgcggtccacttggacaagctgttccccgggatggaggtcctggagcaccacagcttccgcgtcacccggaacgaggacgtgaaggtggaagaggacgacgccgaaaacctcctccaagccctcgagaaggaactcctgcggcgccgtttcggcccgcccgtccggcttgaggtcaccaacgacatcaacccgaacatccgcgcgctgctgatccgcgagctcggcgtcgaggaatccgaggtctattccgtcccggcccccctggacctcaggggactctccgtgatggccggcatcgaccgcgccgaccttcactacccaaagcacgttccgcacacgtcgcggtacctgaacgagtctgagacgtccaaggccgccaacgtgttcgccgccatgcgccgccgggacatcctgctccaccatccctatgactcgttttccacgtcggtccaggcgttcctggaacaggccgccgccgatcccaaggtgcaggccatcaagcagaccctgtaccgcacctccggcgactcccccatcgtcgacgcccttatcgacgcagccgaggccggcaagcaggtcctggccctggtggagatcaaggcccggttcgacgagcaggcgaacatctcctgggcccggaagctggaacaggccggcgtgcacgtggtgtacggcattgttggcctcaagacgcactgcaagctctcgctcgtggtgcgccaggaggttgacgggctgcggcggtactgccacatcggcaccggtaactaccatccccgcaccgcccgctactacgaggacctgggcctcctgaccgccaacgagcaggtgggcgaggacctgtccaagctcttcaaccagctctccggttacgcccccaagtccacgttcaagagactgctggtggctccgcgttccgtccgttcagggctgatcgaccggattgagaccgaaatccgcaatgcccgcgcgggaatccccggccgtgtgcagatcaaggtcaactccatggtggatgaggccatcatcgattccctctaccgcgcgtcgcaggcgggagtaaaggttgacgtggtggtccggggtatctgctcgctacgccccggggtgcccgggctcagcgacaacatcaccgtccggtccatcctgggcaggttcggacactcccgggtgttcgccttcgccaacggtggggatcccgtggtgtacatcggctcggcggacatgatgcaccgcaaccttgaccgcagggtggaggccctggtccagctgtccagcaccgacgacatcacctacgtccttgacctgctgcggcgctacatggccccggaaacctccagttggcacctggacaatgagggcgtctggacccggcaccacctcgccgacgacggcaaaccccttgaggatgtccagtcctggctgctggcatcgcgcccccggcagcgcagcctgagccggcgttaa

SEQ ID NO: 6771 - protein, 748 aa, Arthrobacter sp
MNPEPSGAVTSQDVAVPVRARFGSSEVPASRATQDRIDIPEFAPNLQPEGDIRPDRFLDRELSWLSFNSRVLELAEDPTLHLLERVSFLSIFASNLDEFFMVRVAGLKRRIATGLAVPSPAGLSPVEVLERISGEAHRLQQRHAQVWAEQIRPALAYEHIHLMHWDELDDAAQEQLSVIFREKVFPILTPLAVDPAHPFPYISGLSLNLAVVVRNPVSDKELFARVKVPDQLPRLMSIDGPRAGAVAGRVARFIALEEVIAVHLDKLFPGMEVLEHHSFRVTRNEDVKVEEDDAENLLQALEKELLRRRFGPPVRLEVTNDINPNIRALLIRELGVEESEVYSVPAPLDLRGLSVMAGIDRADLHYPKHVPHTSRYLNESETSKAANVFAAMRRRDILLHHPYDSFSTSVQAFLEQAAADPKVQAIKQTLYRTSGDSPIVDALIDAAEAGKQVLALVEIKARFDEQANISWARKLEQAGVHVVYGIVGLKTHCKLSLVVRQEVDGLRRYCHIGTGNYHPRTARYYEDLGLLTANEQVGEDLSKLFNQLSGYAPKSTFKRLLVAPRSVRSGLIDRIETEIRNARAGIPGRVQIKVNSMVDEAIIDSLYRASQAGVKVDVVVRGICSLRPGVPGLSDNITVRSILGRFGHSRVFAFANGGDPVVYIGSADMMHRNLDRRVEALVQLSSTDDITYVLDLLRRYMAPETSSWHLDNEGVWTRHHLADDGKPLEDVQSWLLASRPRQRSLSRR

SEQ ID NO: 6772 - DNA, 2106 bp, Thiobacillus ferrooxidans
  CDS (1)..(2106): transl_table=11
atgtctgaggtgcctgcgccggaaaaagcccgttccgcgccgcctctcgacagccctgagctgtacttcaaccgagacctcagcatcctcgccttcaaccagcgggtactggccctggctgacgaccagcgcgtaccgctgctggaacgtttacgctacctgaccatcgtttccagcaatctggacgaattttttgaagtgcgcatggccggactgttgcagcggcttaaattcggcgccggccccttgggaccggacatgcttgggccccaacgcgaaatcgaggcagtagcgaaaaaggcccatgaaatcatttccgaacaataccgatgcctgaatcagcgcctgctgcccgctctggctaaggaaggtattcgcttgttgcgccgccgcgaatggcgggcagcgcagaaacgttggatcagcaattatttccagacggaggtgctgcctctgctcactcccctgagcctcgaccccgcccacccctttcccaaggtacagaacaaagggctgaatttcgctatcgttctggaaggccaggatgcttacgggcgacacagccccatcgccatcgtacaggcgccacgcattctcccccgcatcatctggattccgcaacatctggcgggtccgaatgatttcgtgtttctctcctccgtcatccacgaacatgtgcaggcgctctttccgggtctgaccatccagggtttttatcagtttcgggtgacgcgcaacagtgaactctttgtggatgaggaagaggtggacaatctcctcgacgcgctggccgatgaattaccgctacgcccctttggcgaggcggtacggctggaggtcgctaacaattgtccgcgggaagtggtggaatatcttctgaaacattttgaactgagcgagagcaacctgtattcattgcagggtcccgtgaatctgtcacggttggcggccatcatcgaaatggtcccccgccccgacttgctttatccgcccttcataccggggctgccagcggtttgttcacaccccgagaacatattcgcgcatctacgggaggcgcccatcctgctccatcacccataccagagcttcaacccggttctggatttcctccgccaggcggtcagcgatccaaaagtcatcggcatcaagcagacgctgtaccgtaccacccccgactccccggtcatcgacgcgttgatagaagcggccatggccgggaaacaggtcacggcagtggtcgaactcaaggcccgctttgacgaagccaataacatccggatggccgagcgtctggaagaagtgggtgtgcaggtggtatacggcgtggtcaatcacaaggtgcatgccaagatgattctcatcctgcgccgggaggaggacgggatccgcctctacgggcacttgggtacgggcaattatcatccccgcaatgcgcggatttacactgatctcagcctgctcacggcaaatcccgacatcacggcggacatgaatgacctgttcatgcatatcactggcatgggcaaggcaccacaattgcgctgtctgctgcagagtccctttacgatgttccagggcatacaggaagccatcgatacggagatccgtcacggaagcaaaggtcgcatcatcgtgcgggtgaacgcgctggtcgaacccgatctgattcgcgccctgtaccgggcctcccaggccggggtggaaatcgacctggtggtgcgcggcgcctgtgccctgcgccccggcatcccaggtgtctccgatcatatccgggtacgttccattgtcggccgtttcctcgaacacagtcgcgtctattacttcggaaacaacgggcatccccgtctctggatatcgagcgccgactggatgggacgcaatcttttccgccgtctggaagtcgcagtacccattaccgaccccgacttgcgcgcccgcatactcacggaaacccttcagctatacttggaagacgactgtaacgcttgggcgatgcgtgcggatggtgattatgaatttttacgcaaccccctggatgccaactgcaaatccgcacaggaccgtctgctggaacactacaacaggagcagtcattatgggtga

SEQ ID NO: 6773 - protein, 701 aa, Thiobacillus ferrooxidans
MSEVPAPEKARSAPPLDSPELYFNRDLSILAFNQRVLALADDQRVPLLERLRYLTIVSSNLDEFFEVRMAGLLQRLKFGAGPLGPDMLGPQREIEAVAKKAHEIISEQYRCLNQRLLPALAKEGIRLLRRREWRAAQKRWISNYFQTEVLPLLTPLSLDPAHPFPKVQNKGLNFAIVLEGQDAYGRHSPIAIVQAPRILPRIIWIPQHLAGPNDFVFLSSVIHEHVQALFPGLTIQGFYQFRVTRNSELFVDEEEVDNLLDALADELPLRPFGEAVRLEVANNCPREVVEYLLKHFELSESNLYSLQGPVNLSRLAAIIEMVPRPDLLYPPFIPGLPAVCSHPENIFAHLREAPILLHHPYQSFNPVLDFLRQAVSDPKVIGIKQTLYRTTPDSPVIDALIEAAMAGKQVTAVVELKARFDEANNIRMAERLEEVGVQVVYGVVNHKVHAKMILILRREEDGIRLYGHLGTGNYHPRNARIYTDLSLLTANPDITADMNDLFMHITGMGKAPQLRCLLQSPFTMFQGIQEAIDTEIRHGSKGRIIVRVNALVEPDLIRALYRASQAGVEIDLVVRGACALRPGIPGVSDHIRVRSIVGRFLEHSRVYYFGNNGHPRLWISSADWMGRNLFRRLEVAVPITDPDLRARILTETLQLYLEDDCNAWAMRADGDYEFLRNPLDANCKSAQDRLLEHYNRSSHYG

SEQ ID NO: 6774 - DNA, 2097 bp, Chlorobium tepidum
  CDS (1)..(2097): transl_table=11
ttgagcgatccgtcgctctacatcaatcgtgagctgagctggctgcacttcaaccgccgtgtactcgacgaagcgattcgccaggatcagcacccgctgatcgaacgggtcaaattcattgccatcttcagctccaacctcgacgaatttttcatgatccgcgtggccggtatcgaaaagcaggtcgaggccggtatccgcaaaaagaccatcgacggcctcaccccatccgagcagctcgaacgaatcagagcggaggtaatcgagcagctcaagctgcgcaatacctgtctgtacggcgacatcctgccggcgctcgccgcggaaggcatcaccttcgtccatttcgccgatctgccagaaaaagagcaggcggtgctgaacgcctggttccgcaaggagatctacccggtactcacgccgctggcgttcgataccggccaccctttccccttcatgtcgaacctgtcgctgaacctggccatcgaactcgacgaggtcgagcacggcaacctgaagttcgcccgcgtcaaggtgccgagcgtgctgccgcgcctattgaaactcaacgacatcgagggtctgggcaacgatccctcctgtatgaggtttctctggatcgaggagttgatccagcagaacctcggcctgctgttcccaacgatgaagatcgtgcagtcgcaccagttccgcattatccgtaacgccgacatcgagatcgaggaggacgaggcgggcgacctgctacaaaccatcgaaaaaggtgtcaggtcaaggcgatacggcaacgtcgtgcggcttgacatcagtcccgaaatgcccgattttgtgcgacagttgctgataaacaacctcgaaatcgaggaaaaaaacgtttacgaaatcgacggtgcgctcggcatgagctgcctgatggagctgctcgacatcgaccggccatcactgaaggacgagccgttcatcccgttcaacatgttcgaggagcagcgaaacggtgacattttcagtgccatcagttcgggtgacctgctcttttaccatccttacgactcgttcaaaccggtggtcgatttcatcgaccgggcggccagcgaccccgatgtactctccatcaagcagaccctctaccgggtcggcagcaactcccccatcgtcaaggcactgatgaaggccgccgaatcgggcaagcaggtggcggtgctggtggaactgaaggcgagattcgacgaagaaaacaacatcgggtgggcgcgtgcgctcgaagatgtcggcgcgcacgtcatctacggcttgcccggcctgaaaacccacgccaaactcacactcgtggtgcgccgtgaaccgcagggactcaagcgctatctgcacctcggcacagggaactacaacccgtcaaccggaaagctctacaccgactacagcttttttactgatgatgaactgctcgccggagaggtctcggagctgttcaacgcgctgaccggctacttccggtacaccggctaccgctttctgcttgtctcgccgatcaatacgagaaagcggatcatcgagatgatcgagcgcgaaatcgccctggcaagaaaaagcagcggcggcagaatcataatgaagatgaactcgctggtcgatccggccaccatccaggcactctaccgggcatcacgtgcgggagtgcagatagaccttgtggtcagaggaatctgctgcctcaagccgggtattccgggcgtcagcgagaatattcgcgtcatcagcatcatcggacgctacctcgaacacagccgcgcctactacttcgccaatggaggctcgcccgagctgtacctcggcagcgccgacatcatgccgcgcaacctcgacgaccgcgtcgaaacgctcttcccggttttcgacccctcactggtggagcgggtcagaaacgatctcgagctccagcttagcgacaacctcaaggcctggaaaatcgggccggacggcaattggacccttgtgcgcaacgacgcaccgaaagtcaacagtcaggagcgcttcatgaaacgccgcacgcagaagaaaaaaacaaccggcatcaagggacgcctgggtctgaactga

SEQ ID NO: 6775 - protein, 698 aa, Chlorobium tepidum
MSDPSLYINRELSWLHFNRRVLDEAIRQDQHPLIERVKFIAIFSSNLDEFFMIRVAGIEKQVEAGIRKKTIDGLTPSEQLERIRAEVIEQLKLRNTCLYGDILPALAAEGITFVHFADLPEKEQAVLNAWFRKEIYPVLTPLAFDTGHPFPFMSNLSLNLAIELDEVEHGNLKFARVKVPSVLPRLLKLNDIEGLGNDPSCMRFLWIEELIQQNLGLLFPTMKIVQSHQFRIIRNADIEIEEDEAGDLLQTIEKGVRSRRYGNVVRLDISPEMPDFVRQLLINNLEIEEKNVYEIDGALGMSCLMELLDIDRPSLKDEPFIPFNMFEEQRNGDIFSAISSGDLLFYHPYDSFKPVVDFIDRAASDPDVLSIKQTLYRVGSNSPIVKALMKAAESGKQVAVLVELKARFDEENNIGWARALEDVGAHVIYGLPGLKTHAKLTLVVRREPQGLKRYLHLGTGNYNPSTGKLYTDYSFFTDDELLAGEVSELFNALTGYFRYTGYRFLLVSPINTRKRIIEMIEREIALARKSSGGRIIMKMNSLVDPATIQALYRASRAGVQIDLVVRGICCLKPGIPGVSENIRVISIIGRYLEHSRAYYFANGGSPELYLGSADIMPRNLDDRVETLFPVFDPSLVERVRNDLELQLSDNLKAWKIGPDGNWTLVRNDAPKVNSQERFMKRRTQKKKTTGIKGRLGLN

SEQ ID NO: 6776 - DNA, 2145 bp, Chlorobium tepidum
  CDS (1)..(2145): transl_table=11
atgacagattcggaaaacgggacattggttccggcggctatagccgagccggatctgcgcgatcccttgctctacgtgaaccgtgagctgagctggatcgatttcaaccagcgagtgctcgaagaggcactcgattccgccgcgcatccgttgttggagcgcgtcaagttcctctcgattttcagctccaacctcgacgagtttttcatgatccgcgtggcgggacttgatgaccagtgcgctgcgggcatcaacgagcgctcggtcgatggcctcacgcctatcgagatgctcgagcggattcgcgagcgcgtcatcggccagctccggcagcgcaacgcctgttttttcgatgatattctgcctgcgctcaaaaggaaagggatcgaattcgtcagtgtctcttcgctttccgtcgagcagcagcaacttcttcagcactatttcagaaaggaggtttttccggttctgacgccgctcgctttcgatacgggccatccctttccgttcatgtccaacctctcgctgaatcttgcaatcgagcttgaggacgaggagagcggagcgatcaagtttgctcgcgtcaaggtgcccggcattttgtcgagaatcatccgactcgaccagatcgagggtctcggcttcgacgacggacggatacgcctactgtggctcgaagaccttgtagagcacaacctcgatcagctctttccgaagatgcgcattttgcagtgccacccattcaggatcatccgtgacgcggatatcgagatcgaggaggacgaggcgggcgatttgctcgaaagcatcgaacagggggtgcgctcgcgccgctatggcaaggtggtacgtctcgatatcaatcccgacatgccgcactccatccggagcctcctcgtcaagaaccttgaaacttacgagcggaacgtttacgaaattggcggcgtgctcggcatgagcgcgctgatggagctgcttaaaatcgaccggcctgatctgaaagacgagcttttcgtgccgaacaatccgcttgatgacaagcggactgctgacatatttgctgaaatgcgttccggcgatatgctgctgcatcacccatacgactcgttcaagccagtggttgatctcatctggcaggcggcgcgcgatcccgatgtgctctctatcaagcagacgctctaccgggtaggcagcaactcgccggtggtcaaggcgctgatgttcgccgccgagcagcgcaagcaggtggcggtgctggtcgagctcaaggcaaggtttgacgaggagaacaacatcctctgggcgcgttcgctcgaagatgctggagcgcatgtggtttacggcctgcccggcctgaagactcacgccaagctcacgatgatcgtacggcgtgagcaggagggacttcgccactacctgcatctcggcaccggcaactataacaccgtgaccgcgagaatctataccgattatagctatctgacgaccgacccggtgcttgctgacgacgtcaccgagctgttcaactcactgaccggctactcgaagcatcgcgaatatcgctcgctgatcgtttctccgcttaatatgcggcgctggatcatggagatgatccgtcacgaagtcgaccaccaaaagcataccggcaacggcagaatcgtcatgaagatgaatgcactggtcgatgaggagatcatccgagcgctctaccgcgcctcgatggccggcgtgaagatcgatctggccatccggggtatctgctgtctcaagcctggtattcccggcatcagcgaaaacatccgggttgtcagcgtgatcggtagatttctcgaacacagccgggtttattattttaacaatggagatcatgcccggatttttctgggcagtgctgacatcatgccgcgtaacctcgacaagcgggtcgagacgctttttcccgttattgagccgcgcctggttgaatcgatcaaatccgatcttgaactgaccctgagcgataaccgcaaatcgtgggagatgcagccggacggaacctacatcagaaaacggggcgggcggccagcagtcgacagccagaggctgtttatgcggcgctctctccggaggaagaaaaacatcaaaaaaaaggttaaaggattatga

SEQ ID NO: 6777 - protein, 714 aa, Chlorobium tepidum
MTDSENGTLVPAAIAEPDLRDPLLYVNRELSWIDFNQRVLEEALDSAAHPLLERVKFLSIFSSNLDEFFMIRVAGLDDQCAAGINERSVDGLTPIEMLERIRERVIGQLRQRNACFFDDILPALKRKGIEFVSVSSLSVEQQQLLQHYFRKEVFPVLTPLAFDTGHPFPFMSNLSLNLAIELEDEESGAIKFARVKVPGILSRIIRLDQIEGLGFDDGRIRLLWLEDLVEHNLDQLFPKMRILQCHPFRIIRDADIEIEEDEAGDLLESIEQGVRSRRYGKVVRLDINPDMPHSIRSLLVKNLETYERNVYEIGGVLGMSALMELLKIDRPDLKDELFVPNNPLDDKRTADIFAEMRSGDMLLHHPYDSFKPVVDLIWQAARDPDVLSIKQTLYRVGSNSPVVKALMFAAEQRKQVAVLVELKARFDEENNILWARSLEDAGAHVVYGLPGLKTHAKLTMIVRREQEGLRHYLHLGTGNYNTVTARIYTDYSYLTTDPVLADDVTELFNSLTGYSKHREYRSLIVSPLNMRRWIMEMIRHEVDHQKHTGNGRIVMKMNALVDEEIIRALYRASMAGVKIDLAIRGICCLKPGIPGISENIRVVSVIGRFLEHSRVYYFNNGDHARIFLGSADIMPRNLDKRVETLFPVIEPRLVESIKSDLELTLSDNRKSWEMQPDGTYIRKRGGRPAVDSQRLFMRRSLRRKKNIKKKVKGL

SEQ ID NO: 6778 - DNA, 2109 bp, Bacillus anthracis
  CDS (1)..(2109): transl_table=11
atggaattatcgaaggggaatatagtaaatttaaatgatacagcttattacaacaatcgagagttaagttggttggcatttaatgaacgtgtactacaagaggcacaagatgaaacgaatccactcttagaaagattgaagtttattagcatttttagctcaaatttagatgaattctttatggtacgcgtggcaggattgaaggatcaagtaagtgctggttttaaccaaccagaaaataaggccggtttaacaccaaaaaagcaattaaataaaattgcgataaaagcacatgaattaatgacagtacaatatggtacgtttaaaaattatgtgttgccagcgcttgagttagaagggattgagcgtttaacatttcatgatttgacgaaagaacagagagaatttatagaagagtattttgatgaacaaattttcccagtcttaacacctgtggctatcgatgcatatcgtccatttccgatgttattaaataaaagtttaaatttagctactcttttatatgatgagaaacaagtagaagaagaaaatcgcacgaagttaggaattgtacaagttccttcactacttgaacgtttcatatttttaccgagtgaagggcaaaagcataaatttattttattagaagacgtaattagtagttttactcataaattatttacaggatataaagtatcatctgttactcgtttccgtattacacgcaacgcggatttaacaattcacgaagaaggtgcgagagatttattaaaggtaattgaaaaagaattaaaaaaacgtaagtggggagctgctgtacgtttagaagttggcaaagagcatattgatgaaagagtattagcattgttatatgaggtgttggaagtaaaggatgaagatgtatatataatggatggaccattagatttaacatgtctattttctttatataaaaaactagctcctttatatgaacatctagtatatccggctcttattccgcaacggcctcaagacttaggggatgcagaagatgtatttgaaaaagcgattgagcatgatattttattacatcatccttttgaatcgtttcagccagtagttgattttgtccgtgatgcggcagacgatccgaatgtacttgcaattaaacaaacattatatcgagtaagtggggattcgccgatcattcaggcgctaaagatagcggctgaaaaaggaaagcaagtgacagtattagttgaattaaaggcaaggtttgatgaggaaaataatgtgcattgggctaaagaattagaacaggctggatgtcatgttatttacggtgtaagtcatttaaaaacacatagtaaaattacactagttgtaagaagaaaaaacggaaaaattgaaaggttcgtacatcttggaaccggaaattataatgatgcaactgcaaagctatatactgattttggctatattacatcacgaaaagactttggtgtcgatgcaacaaatttctttaattatttgagtggttatacaacaaaaccgcattttcatcatttatcggttgcgccatttgatataagagagcaatttatggatttaatagatgaggaaatccgttatcatagacaatatggaaatggttatattatcgctaagatgaattcattaactgataaaccactcattaaaaaaatgtatgaagcatcacaagctggagtaaaggtggaactcatcgttcgaggaacatgttgcctacgacctggtattccaaatgtaagtgaaaatattcgggtagttagtgttgttgggagatatttagaacatagtcgaatttattatttccatcataatggggaagagaaaatatacttatcttcagctgactggatgacgcggaatatggagaagcgagtagaaatatctttcccgatattagatattgaaatgaaggcgagaattaaggcgattttacagcttactttagctgataatgtgaaaacgcgcgaacaaaataaagacggtgactattattatgttattaatagcggtgcagaagagattgatagtcaagtgaagttgtttaagatggcgtatcaaaacacagatgctgaataa

SEQ ID NO: 6779 - protein, 702 aa, Bacillus anthracis
MELSKGNIVNLNDTAYYNNRELSWLAFNERVLQEAQDETNPLLERLKFISIFSSNLDEFFMVRVAGLKDQVSAGFNQPENKAGLTPKKQLNKIAIKAHELMTVQYGTFKNYVLPALELEGIERLTFHDLTKEQREFIEEYFDEQIFPVLTPVAIDAYRPFPMLLNKSLNLATLLYDEKQVEEENRTKLGIVQVPSLLERFIFLPSEGQKHKFILLEDVISSFTHKLFTGYKVSSVTRFRITRNADLTIHEEGARDLLKVIEKELKKRKWGAAVRLEVGKEHIDERVLALLYEVLEVKDEDVYIMDGPLDLTCLFSLYKKLAPLYEHLVYPALIPQRPQDLGDAEDVFEKAIEHDILLHHPFESFQPVVDFVRDAADDPNVLAIKQTLYRVSGDSPIIQALKIAAEKGKQVTVLVELKARFDEENNVHWAKELEQAGCHVIYGVSHLKTHSKITLVVRRKNGKIERFVHLGTGNYNDATAKLYTDFGYITSRKDFGVDATNFFNYLSGYTTKPHFHHLSVAPFDIREQFMDLIDEEIRYHRQYGNGYIIAKMNSLTDKPLIKKMYEASQAGVKVELIVRGTCCLRPGIPNVSENIRVVSVVGRYLEHSRIYYFHHNGEEKIYLSSADWMTRNMEKRVEISFPILDIEMKARIKAILQLTLADNVKTREQNKDGDYYYVINSGAEEIDSQVKLFKMAYQNTDAE

SEQ ID NO: 6780 - DNA, 2109 bp, Bacillus cereus
  CDS (1)..(2109): transl_table=11
atggaattattgaaggggaatgcagtaaatttaaatgatacagcttattacaataatcgagagttaagttggttagcatttaatgaacgtgtcttacaagaagcgcaagatgcaaataatccacttttggaaagattgaaatttattagtatttttagttcgaatttagatgaattttttatggtacgtgtagcgggattaaaggatcaagtgagtgctggatttaatcaaccagaaaataaagctggcttaacaccgaaaaagcaattaaataaaattgcgataaaagcccatgcactaatgacagtacaatatgatacatttaaaaattatgtattaccagcgcttgagttagagggaattgaacgtttaacattcaatgatttgacgaaagagcagcgagaatttatagaagagtattttgacgagcaaatttttccggtgttaactcctgtagctattgatgcatatcgcccatttccaatgttattaaacaaaagtttgaatttggctactcttttatatgatgagaagcaagcagaagaagaaaacaggacgaagttagggattgtgcaagttccttcattacttgagcgcttcataattttaccgagtgaagggcaaaagcataaatttattttattagaagacgtaattagtagctttactcataaattatttacgggatatacagtatcatctgttactcgtttccgtattacacgcaatgcagatttaacgattcatgaagaaggtgcgagagatttattaaaggtaattgaaaaagaattaaaaaagcgtaagtggggggctgctgtacgtttagaagttgggaaagaacacattgatgaaagagtattagcattattatatgaggttctggaagtaaaagatgaagatgtatatataatggatggcccattagatttaacatgtttgttttctttatataaaaaactagctcctttatatgaacatcttgtatatccagctcttattccgcaaccgcctcaagatttaggtgatgaagaagatgtatttgaaaaagcaattgagcatgatattttattacatcatccttttgaatcatttcagccggtagttgattttgtccgtgatgcggcagacgatccgaatgtacttgcgattaaacaaacgttatatcgtgtaagtggtgattcaccgattattcaggcgttaaagatagcggctgaaaagggaaaacaagtgacggtattagttgaattaaaggcaaggtttgatgaagaaaacaatgttcactgggctaaagaattggaacaggcaggctgtcatgttatttacggtgtcagtcacttgaaaacacatagtaaaattacgctagttgtaaggagaaaaaacggaaaaatcgaaaggttcgtacatctcggaacggggaactataatgatgcaacagcgaagttatatactgattttggatatattacatcaagaaaagattttggggtcgatgcaaccaatttctttaattatttaagtggttatacaacaaagccacattttcatcatttatcggttgctccatttgatataagagagcaatttatggatttaatagatgaagaaatccgttatcataggcaatatggaaatggatatattatcgctaagatgaattcattaacagataaaccgttaataaaaaaaatgtacgaagcatcacaagctggagtaaaggtagagctcattgttcgaggaacatgttgcctacgacctggtattccaaatgtaagtgaaaatattcgtgtagttagtgttgttggaagatatttagaacatagccgtatttattatttccatcataatggggaggagaaaatatatttatcttcagctgatttgatgacgcgaaatatggagaagcgagtggaaatatctttcccgatattagatattgaaatgaaggcacgaattaaggcgattttacagcttatattagctgataatgtgaaaacacgtgaacaaaataaagatggtgattactattatgttattaatggtagtacagaagaaattgatagccaagtgaagttgtttaagatggcgtatcaaaatacagacgctgaataa

SEQ ID NO: 6781 - protein, 702 aa, Bacillus cereus
MELLKGNAVNLNDTAYYNNRELSWLAFNERVLQEAQDANNPLLERLKFISIFSSNLDEFFMVRVAGLKDQVSAGFNQPENKAGLTPKKQLNKIAIKAHALMTVQYDTFKNYVLPALELEGIERLTFNDLTKEQREFIEEYFDEQIFPVLTPVAIDAYRPFPMLLNKSLNLATLLYDEKQAEEENRTKLGIVQVPSLLERFIILPSEGQKHKFILLEDVISSFTHKLFTGYTVSSVTRFRITRNADLTIHEEGARDLLKVIEKELKKRKWGAAVRLEVGKEHIDERVLALLYEVLEVKDEDVYIMDGPLDLTCLFSLYKKLAPLYEHLVYPALIPQPPQDLGDEEDVFEKAIEHDILLHHPFESFQPVVDFVRDAADDPNVLAIKQTLYRVSGDSPIIQALKIAAEKGKQVTVLVELKARFDEENNVHWAKELEQAGCHVIYGVSHLKTHSKITLVVRRKNGKIERFVHLGTGNYNDATAKLYTDFGYITSRKDFGVDATNFFNYLSGYTTKPHFHHLSVAPFDIREQFMDLIDEEIRYHRQYGNGYIIAKMNSLTDKPLIKKMYEASQAGVKVELIVRGTCCLRPGIPNVSENIRVVSVVGRYLEHSRIYYFHHNGEEKIYLSSADLMTRNMEKRVEISFPILDIEMKARIKAILQLILADNVKTREQNKDGDYYYVINGSTEEIDSQVKLFKMAYQNTDAE

SEQ ID NO: 6782 - DNA, 2118 bp, Bacillus halodurans
  CDS (1)..(2118): transl_table=11
atggggactgaggagaaaatgacaagatcagacatcgatttaaatgaaccagccttctataacaatcgtgaacttagttggctcgcttttaacgagcgtgtactagaagaagcgattgatgaacgaaaccctttgctggagcggctaaaattcttagccattttcagttcaaacctagacgagttttttatggttcgggttgcagggttaaaggatcaagtaaaagctggtttcaacaagccagaaaataaagcaggtcttacgcctaaacagcaattacggcaaatttcagaacgaaaccatcagctcgtccaactccaagatcgtgtctacacggaaacgattatacccatgctttcacagcacggtattcaatttttaacgttcgatgagctttcagacaagcagcgatctttcctagaaaaacggtttgatcattatatttttcctgttcttactcccatggccgtagacgcctatcggccatttccaatgttacttaataaaagtctgaatttagccgtcgtcattaagaataaagagtctgatagccgagagcaactcgcgattgttcaagtaccttccgttcttaaccgcttcatcttgttaccttgtgaagatggaaagaatcaatttattctgcttgaaaatgtcattagctattttatcgaaaaactttttaagggatatacagtcaaatctgtctctccgtttcgaattacgcgtaacgccgacttgcccattcacgaagaaggggctagagatctgttacgtgaaatcgaaaaagaattaaagaaacgaaaatggggagctgctgtacgactcgaaatgcaagaagggcttatggatcccaatgtactaaagctccttcttgacgtattggaaattcataaaaatgacgtttattcactgcaaggtcctctcgatttaacgtttttatttaagctatacaatagactcatcgtcgattacgagcatttaacgaatgagacattaattccacagccaccagaagatttaattggggaaacgaatatttttgatgcgattttaaaacgagatatttttttgcaccatccgtacgaatcgtttcaaccggtcatcgactttatcgcaaccgctgcggaagaccctcaagtgttagcaatcaaacagacgttgtatcgagtaagcggtgattctccaattatcaatgcattggcaagagctgcggaaaacggcaaacaagtaaccgtgcttgtggaattaaaggctcgcttcgacgaggaaaataacattcagtgggcaaaaaagttggaaaagtcaggggttcacgtcatttacgggattaccggcttgaaaacacatagtaaaatcacgttggtcgttcgccaccataacgatgaaattcaacgttttgtccatttagggaccggaaattataacgattctaccgcaaagttatataccgacatgggtctcttaacagcggacgaagaatttggcattgatgccacgaacttttttaatcatttgagcggttatagtgaaaagccgcagtggcaccatctgtcaaccgctccgtttgaaattcgggacaccttcttagatttaattgatcaagaaattgaatgtcacaaacaaaatggaaatggccacatcattgcgaaaatgaattcacttacagataaaccgattattttaaagctttatgaagcttcccgcgcaggtgtaagaatcgaactaatcgttcgcggcatttgctgcttacgccctggaataccaaatgtaagtgaacatattcgcgtctttagcatcgtcgatcgcttccttgaacatagccgaatcttttattttcatcatggcggcgacgacaaagtgttcctttcgtctgcagactggatgacaaggaatatggagaagcgaattgaaattttgttcccgatttatcaacaatccacgaagagacgaatcatcgaaattttaacgattaccctccttgataatatgaaagcacgggagcaaaatcagttcggtcaataccgatacgtgaagcggaatccgtctgagcaacccgttcagagtcaattaacgtttttcgatatggcttctcgattcagcgacagcgaagcggagtag

SEQ ID NO: 6783 - protein, 705 aa, Bacillus halodurans
MGTEEKMTRSDIDLNEPAFYNNRELSWLAFNERVLEEAIDERNPLLERLKFLAIFSSNLDEFFMVRVAGLKDQVKAGFNKPENKAGLTPKQQLRQISERNHQLVQLQDRVYTETIIPMLSQHGIQFLTFDELSDKQRSFLEKRFDHYIFPVLTPMAVDAYRPFPMLLNKSLNLAVVIKNKESDSREQLAIVQVPSVLNRFILLPCEDGKNQFILLENVISYFIEKLFKGYTVKSVSPFRITRNADLPIHEEGARDLLREIEKELKKRKWGAAVRLEMQEGLMDPNVLKLLLDVLEIHKNDVYSLQGPLDLTFLFKLYNRLIVDYEHLTNETLIPQPPEDLIGETNIFDAILKRDIFLHHPYESFQPVIDFIATAAEDPQVLAIKQTLYRVSGDSPIINALARAAENGKQVTVLVELKARFDEENNIQWAKKLEKSGVHVIYGITGLKTHSKITLVVRHHNDEIQRFVHLGTGNYNDSTAKLYTDMGLLTADEEFGIDATNFFNHLSGYSEKPQWHHLSTAPFEIRDTFLDLIDQEIECHKQNGNGHIIAKMNSLTDKPIILKLYEASRAGVRIELIVRGICCLRPGIPNVSEHIRVFSIVDRFLEHSRIFYFHHGGDDKVFLSSADWMTRNMEKRIEILFPIYQQSTKRRIIEILTITLLDNMKAREQNQFGQYRYVKRNPSEQPVQSQLTFFDMASRFSDSEAE

SEQ ID NO: 6784 - DNA, 2085 bp, Campylobacter coli
  CDS (1)..(2085): transl_table=11
atgcaaacaaatccgaatatgtttttaaatagagaactttcttggctacgctttaactcacgggtattagatcaatgttcgcgtccgttgcctttattagaacgccttaaatttgtagctatatattgtaccaatttggatgaattttatatgatacgcgttgccggattaaaacaacttttttcagctggagttaatataagcagtagtgatgagatgtctcctttgcagcaattaaaagctatacgcaaatatcttcacaaagaaaaagatcttttagagcattattttaatgaaattataagcgatcttgaaaaagaaaatctttttatcaaaaattatgaaaatttagacaacaacctcaaacaaaaagtgtacgaatattttttctctactatttttcctgttattgttccaatcgctgtggatgcgactcacccttttccgcacctaaataatctttcattttctttggcggttaatatttgtgataatacccatcctgagcttatcaaatttggaatgattcgaattccaagagttttacctcgtttttatgaagtgagtgccaatgtttatgttccaattgaaagtatagtagaaaaacatacagaagaaatttttccaggttacaaactccttacttcagctgcttttagggtaactagaaatgcagatatggtgatagaagaggaagaagctgatgattttatgatgatattagagcaaggcttaaaacttcgtagaaaaggtgcttttgtaagattacaaattcaaaagggtgcagatgaacaaatcgtagaatttcttaatactcatatgaaaattttccacaaggatgtttatgagtattctatcttgttaaatcttcctagcctttggcaaattgctggcaataaaacctttactcatcttttaagtcccctttatacacctaaaaccttaccgccttttgatgaaaatttatccatttttgatgcgatagataaagaagatatactcatcattcaaccttttgaaagctttgatcctgtttataagttcatcaaagaagcaagcaaagatcctgaggttatttctataagaatgactctttatagagtagaaaaaaactctaacatagtccaagccttaatcggtgccgcaagcgctgggatacaagttacagttatggtagagcttaaagctcgctttgatgaagaaaacaatcttcactgggcaaaagctttagaaaatgctggagctcatgtgatttatggaatcactggctttaaagttcatgccaaagtttctcaagttatacgcaaaaaaggcgataagcttaaattttatatgcatttaagcacgggaaactacaatgcaagcagtgctaaaatctacactgatgtgagttattttacaagcaaagttgaatttgcaagagatacaacaagcttttttcatatactttcaggttttagcaaaaatcgtcgccttcaaactctctctatgagtccaaatcaaatcaaagaaaaaattctagaaatgatagctttagaggcaagcaaaggaagcgaaggagttatcattgcaaagatgaattctcttgtagatagcgatatcataaaagctctttatgaagcaagtattaaaggaactcaaatcgatcttatcgtgcgtggaattttctgtttaaaacctaatgaagaattcagcaaaaacatactcgttagaagtattataggaaaatatttagaacatgctagggtgttttattttaaacacagtgagccaaattattttatatcaagtgcggactggatgccaagaaatttagagcgtcgtttagagcttatgactcctatatatgatgaaagaagtaaggcaaaattagcacaattcttgcgcttgcaactcagcgataatttacttgcttatgaacttcaaaatgatggagaatatgcaaaagttgctagcaatgaaaaagtgattgactcacaacaaattttagaagaatatgtcagtaaaatttataaaacacttaaaaaagatacagatcaaagtcgtgcaacgcacttagcttctaaacttttcaaagaaaactaa

SEQ ID NO: 6785 - protein, 694 aa, Campylobacter coli
MQTNPNMFLNRELSWLRFNSRVLDQCSRPLPLLERLKFVAIYCTNLDEFYMIRVAGLKQLFSAGVNISSSDEMSPLQQLKAIRKYLHKEKDLLEHYFNEIISDLEKENLFIKNYENLDNNLKQKVYEYFFSTIFPVIVPIAVDATHPFPHLNNLSFSLAVNICDNTHPELIKFGMIRIPRVLPRFYEVSANVYVPIESIVEKHTEEIFPGYKLLTSAAFRVTRNADMVIEEEEADDFMMILEQGLKLRRKGAFVRLQIQKGADEQIVEFLNTHMKIFHKDVYEYSILLNLPSLWQIAGNKTFTHLLSPLYTPKTLPPFDENLSIFDAIDKEDILIIQPFESFDPVYKFIKEASKDPEVISIRMTLYRVEKNSNIVQALIGAASAGIQVTVMVELKARFDEENNLHWAKALENAGAHVIYGITGFKVHAKVSQVIRKKGDKLKFYMHLSTGNYNASSAKIYTDVSYFTSKVEFARDTTSFFHILSGFSKNRRLQTLSMSPNQIKEKILEMIALEASKGSEGVIIAKMNSLVDSDIIKALYEASIKGTQIDLIVRGIFCLKPNEEFSKNILVRSIIGKYLEHARVFYFKHSEPNYFISSADWMPRNLERRLELMTPIYDERSKAKLAQFLRLQLSDNLLAYELQNDGEYAKVASNEKVIDSQQILEEYVSKIYKTLKKDTDQSRATHLASKLFKEN

SEQ ID NO: 6786 - DNA, 2157 bp, Lactobacillus plantarum
  CDS (1)..(2157): transl_table=11
atgaattattataaagaaagttattatacaaaccgtgaactcagctggcttgattttaactatcgtgtccttgatgaagcacgtgataaggataaccccttgctagaacgtgtccgttttctcgggatcacacagagtaatcttgacgaattcttcacggtccgggtcgcatcattacgtaaattgatgtcagtcaattacactaaaccggatcccgcgggactgaccgctgctgatcaagtcagtgcaatcagtgataaagcccacgagatggtcaagcgtcaatacaatacattaaaccgctcgcttttgccattgctggaacagcacgcgattcatctcttgtcgatggctgatctaaacgaggaacaacacgcctttgttaagaactactttgatgatgagctgtacccggctttaacaccgatggcagacgactcttcacgcccattcccgttcattgggaataatacactcaacatcgccttacggatttataaaaatggggataagaaggaccgcaagtttgccaccgttcaagtgccggacgtctttcctcgcgtggtcgttttgccaggcgcaccgaaccagtttattctgattgaggaaattatcaaagcctttgtcggctcactatttatcaactacacggtcaaggaaacgagctgttaccgcgtcatgcgggatttggacttagatgtcgccgaagaggatacctcggacttattaaaggaagttcaaaaacaattaaagatgcgtgaacgcggtaaggtcatgcgcttagaagtcgaaaagagtatgagcaagcatcaacgcacgcgactcgctaaagcccttgggattaacgaaagtgcgttatacgtcatcaacggtcccctcaacttgaccttcttatccaagctggtgaaagctgtgcagggccacgaagacttgaattatccaaaataccacgcctactatcccgcgaagtaccgcgaacgatccatctttgatcttatcaaggatcacgacattttaatgcaatatccgtacgatgatttcaaacccgtcgtggactttatccatgaagctgcggaagatgaggacgtgttagccattaagatgacgctgtatcgcgtatcagctgattcaccgattatcaagtatctcgggcaggctgcccaaaacggcaaacaagtaaccgttctcgttgaagttaaggcccgttttgatgaagaaaataacgttcactgggcgaaaaaacttgaagaaatgggttgtcacgtgatctacggcctgatcgggcttaagacacactgtaagcttgccctcgttgttcggcgagaaaatgaaggtatcaagcgctacatgcacatgggaactgggaattataacgatgtcaccgcccatttctacacggacatggggctcttcaccgctgatacagacatgggaatcgatgcttccaacatctttaacatgttatctggctattctgaaccaccgtatttccacaaattgcacatctcaccagatggcatccgcgactttatcaacgaaaagctagacgatgagattgccattgccaaagctggtcagcccgcagttgtcaaaatgaagatgaactcattatccgatccgcagattattagcaaactctacgaagcttctcacgccggtgttaagatccaactgatcattcggggaatttgttgtttacgaacaggcatcaaaggcatctcggataacatcgaggtccactcgatcattggtcgccttctggagcacagtcgtatatactactttagcaacgacggtgaaccacaaatttacttatccagtgcggatatgatgacccgtaacctaaatcgccgggtcgaattattgttcccactgctccaacctgaaatcagtcaccgtgcgatgacaatttttgaaacgatgtgggctgacacggtcaaaacgcgcattttgcaaccagataatacgtacgcccgtgtggatgggcgcggcttagaggttttggactcccaggccgaattcattcgcgaagccgagcaagcagtcaaggctgatcacggcgatactacgcccactagcaacgcgcaccagttcattccgatgatgagtcccaagaatgagccggatgcttcagatcttgatagagaggatgattag

SEQ ID NO: 6787 - protein, 718 aa, Lactobacillus plantarum
MNYYKESYYTNRELSWLDFNYRVLDEARDKDNPLLERVRFLGITQSNLDEFFTVRVASLRKLMSVNYTKPDPAGLTAADQVSAISDKAHEMVKRQYNTLNRSLLPLLEQHAIHLLSMADLNEEQHAFVKNYFDDELYPALTPMADDSSRPFPFIGNNTLNIALRIYKNGDKKDRKFATVQVPDVFPRVVVLPGAPNQFILIEEIIKAFVGSLFINYTVKETSCYRVMRDLDLDVAEEDTSDLLKEVQKQLKMRERGKVMRLEVEKSMSKHQRTRLAKALGINESALYVINGPLNLTFLSKLVKAVQGHEDLNYPKYHAYYPAKYRERSIFDLIKDHDILMQYPYDDFKPVVDFIHEAAEDEDVLAIKMTLYRVSADSPIIKYLGQAAQNGKQVTVLVEVKARFDEENNVHWAKKLEEMGCHVIYGLIGLKTHCKLALVVRRENEGIKRYMHMGTGNYNDVTAHFYTDMGLFTADTDMGIDASNIFNMLSGYSEPPYFHKLHISPDGIRDFINEKLDDEIAIAKAGQPAVVKMKMNSLSDPQIISKLYEASHAGVKIQLIIRGICCLRTGIKGISDNIEVHSIIGRLLEHSRIYYFSNDGEPQIYLSSADMMTRNLNRRVELLFPLLQPEISHRAMTIFETMWADTVKTRILQPDNTYARVDGRGLEVLDSQAEFIREAEQAVKADHGDTTPTSNAHQFIPMMSPKNEPDASDLDREDD

SEQ ID NO: 6788 - DNA, 2229 bp, Mycobacterium bovis
  CDS (1)..(2229): transl_table=11
atgatgagcaatgatcgcaaggtgaccgaaatcgaaaacagtcccgtcacagaggtgcggccagaggagcatgcgtggtatccagacgactcggcgctggcggcaccgcccgctgccacccccgccgcgattagcgaccagctaccctcggatcgctacctgaaccgggagctgagttggctggacttcaacgcgcgcgtgcttgccctggccgccgataagtcgatgccattgctcgagcgcgccaagtttctggcaatcttcgcgtccaatctcgacgagttctacatggtccgggtggccggcctcaaacgccgcgacgagatggggttgtcggtgcgctccgccgacggtctaacaccgcgcgaacaactaggccggatcggcgagcagactcaacagctcgccagccggcatgcccgggtgttcctcgattcggtgctacccgcgctcggcgaggaaggcatctacatcgtcacctgggccgatttggatcaggctgagcgcgaccgattgtcgacctatttcaacgaacaggtcttccccgtcctgaccccgctggccgtcgatcccgcccacccgttcccgtttgtcagcgggttgagcttgaacctggcggtcacggtacgccaacctgaagacggcacccagcatttcgcgagggtcaaggtgcccgacaacgtcgaccgcttcgtcgaactcgctgcacgtgaggccagcgaggaagctgcggggaccgaaggccggaccgcgctgcggttcctgccgatggaggagctgatcgcggccttccttccggtgcttttcccgggtatggaaatcgtcgagcaccacgcatttcgcatcactcgcaacgctgacttcgaggttgaagaggatcgcgacgaggacctactgcaggcgctcgagcgagaactggcccgccgccggttcggttcaccggtgcgactcgagatcgcagacgacatgaccgagagcatgctggagttgctgcttcgcgaactcgacgtgcatcccggtgatgtcatcgaagtgcccgggctgctcgacctatcgtcgttgtggcagatctacgccgtggaccgcccgacgcttaaggatcggacattcgtcccagctacccatcccgccttcgccgagcgggaaacacccaaaagcatcttcgcgacgctgcgcgaaggcgatgtgctggttcaccatccgtatgactcgttctccaccagcgtgcagcgattcatcgaacaggccgcggccgaccccaacgtgctggcgatcaaacagacgctgtaccgcacctccggcgactcgccgatcgtccgggcgctgatcgacgccgccgaagccggaaagcaagtggtggcactggtcgagatcaaggcacgcttcgacgaacaggccaacatcgcctgggcgcgcgcactagaacaagccggcgtgcatgtggcgtacgggctcgtcgggctcaagacgcactgcaagaccgccttggtggtgcgccgcgaaggtccgacaatccggcggtactgccatgtcggcaccggcaattacaacagcaagacagcacgactctacgaggacgtcggactgctgaccgctgcacccgatatcggcgccgacttgaccgacttgttcaattcgctcaccggctactcacgcaagttgtcctaccgcaacttgttggtggccccgcacggaatccgcgccggcatcattgaccgcgtcgagcgggaggtcgcggcgcaccgtgcagagggtgcccacaacggcaaaggccgcatccgactcaagatgaatgcccttgttgatgagcaggtcatcgatgcgctgtaccgcgcgtcgcgagccggtgtgcggatcgaggtggtggtacgcggcatctgcgcgctgcgtccaggtgcgcagggcatttcggaaaacatcatcgtgcgctcgattctcggccgcttcctcgagcactcgcggatcctccatttccgtgccatcgacgagttctggatcggcagcgccgacatgatgcaccgcaacctcgaccggcgagtcgaggttatggctcaagtcaaaaacccgaggctgaccgcgcagctggacgaattgttcgaatccgcactggacccgtgcacccggtgctgggagctcgggcccgacgggcagtggaccgcgtcgccgcaagaaggccatagcgtgcgcgaccatcaggaatcgctgatggaacggcaccgcagcccctga

SEQ ID NO: 6789 - protein, 742 aa, Mycobacterium bovis
MMSNDRKVTEIENSPVTEVRPEEHAWYPDDSALAAPPAATPAAISDQLPSDRYLNRELSWLDFNARVLALAADKSMPLLERAKFLAIFASNLDEFYMVRVAGLKRRDEMGLSVRSADGLTPREQLGRIGEQTQQLASRHARVFLDSVLPALGEEGIYIVTWADLDQAERDRLSTYFNEQVFPVLTPLAVDPAHPFPFVSGLSLNLAVTVRQPEDGTQHFARVKVPDNVDRFVELAAREASEEAAGTEGRTALRFLPMEELIAAFLPVLFPGMEIVEHHAFRITRNADFEVEEDRDEDLLQALERELARRRFGSPVRLEIADDMTESMLELLLRELDVHPGDVIEVPGLLDLSSLWQIYAVDRPTLKDRTFVPATHPAFAERETPKSIFATLREGDVLVHHPYDSFSTSVQRFIEQAAADPNVLAIKQTLYRTSGDSPIVRALIDAAEAGKQVVALVEIKARFDEQANIAWARALEQAGVHVAYGLVGLKTHCKTALVVRREGPTIRRYCHVGTGNYNSKTARLYEDVGLLTAAPDIGADLTDLFNSLTGYSRKLSYRNLLVAPHGIRAGIIDRVEREVAAHRAEGAHNGKGRIRLKMNALVDEQVIDALYRASRAGVRIEVVVRGICALRPGAQGISENIIVRSILGRFLEHSRILHFRAIDEFWIGSADMMHRNLDRRVEVMAQVKNPRLTAQLDELFESALDPCTRCWELGPDGQWTASPQEGHSVRDHQESLMERHRSP

SEQ ID NO: 6790 - DNA, 2220 bp, Mycobacterium leprae
  CDS (1)..(2220): transl_table=11
atgatgagcaatgatcttttggtgaccgacatcgaagctgaggcccgtaccgaagagaatatatggcattcagacaactccgccctcgcagcaccgcccgcggcgaccacctctgcgagtcaggaccagctgcccgacgaccgctacctcaaccgggaatcaagttggctggatttcaatgcgcgtgtgctcgcactagccgccgataactcgttgcctttgttggagcgagccaagtttctggctatcttcgcatccaatctcgacgagttctacatggttcgagtcgccggcctcaagcgccgcgacgagatggacttgtcggtgcgctctgctgacggtctcaccccacgtgagcaactgagccgcataggcgagcagacccaatggatcgccagccggcacgcgcgggtgttcctcgattcggtgttacccgcactcggtgaggagggtatctacattgtcacgtggacggatttagatcaggccgaacgtgaccagttatcgacctatttcaacgagcaggtcttccccgtcctgacaccactggctgtcgatcccgcccacccgtttccgtttgtcagcgggttaagtctgaacctggctgtcaccgtcaagcaacccgaagacggtacccagcatttcgcccgggtcaaagtgcctaacaacgtcgatcgattcgtagaactcgctaaccgcggggcggtcagagatacctctgccggagatgaaggtcagctcattcaccggttcctgcccatggaggagctgatcgcggcattccttccggtgctcttccctggcacggaaatcgtcgagcatcatgcattccgcattacccgcaacgctgacttcgaggttgaagaagaccgtgacgaagacctactacaggcgctggaacgagaattggcgcgtcgacggttcggttcgccggtgcgactcgagatcgccgacgacatgaccgagagcatgctggaactgctgttgcgggaactcgacgtgcatcccagcgacgtcatcgaagtgcccgggctgcttgacctgtcgtcgttgtggcaaatttacgggctggaccgacccgcactcaaagaccgcgcattcattcccgacactcatcccgctttcgccgaacgggaaactcccaagagcatcttcgcgacgctgcgcgaaggcgatgttctggtgcaccatccctatcactcgtttgccaccagcgtgcagagattcattgaacaggccaccgccgaccccgatgtgctggcgatcaaacaaacgctgtaccgcacctccggtgattcaccgatcgtgctggcgctcatcgaagctgccgaggcaggaaagcaagtggtggcactggtcgaaatcaaggctcgctttgacgagcaggccaacatccggtgggcgcgcgcgctggaacacgcaggcgtgcatgtggtgtacgggatcgttgggctcaagacacactgcaagacctgcctcgtggtgcgccgtgagggcccgacgatccggcggtactgccatatcggaaccggcaactacaacagcaagaccgctcgactgtacgaagatgtcggtctgttgaccgcagcacccgatatcggcgccgacttgactgacttgttcaactcgcttaccggctactcgcgtaagctggcttaccgcaaccttctggtggcaccgtatggaattcgccgaggcattatcgagcgggtcgagcgcgaggtggccgcccatcgcgaatccggcccccaaaccggtaagggcctgatccgactcaagatgaacgctctggtcgacgaacaagttatcgatgcgctgtatcgcgcgtcacaggcaggcgtgcgggtcgaggtggtggtgcgcggcatctgcgcactacgcccaggcaccgaaggtttttcggaaaacattttcgtccgctcgattctcggccgtttcctcgagcattcacggatcatccatttccgagccatcgatgagttctggatcggaagcgccgacatgatgcaccgcaacctagatcgacgagtcgaggtgctggcgcaagttaaagactcgaggctgaccgcgcagctagatgagttgttgaagtccgcgctggacccgttcacccggtgttgggaactgcgacccgacgggcagtggaccgcttcgccgcagaaaggccagcaggtgcgcgaccaccaagaatcgttgatggaacggcaccgcagccgctga

SEQ ID NO: 6791 - protein, 739 aa, Mycobacterium leprae
MMSNDLLVTDIEAEARTEENIWHSDNSALAAPPAATTSASQDQLPDDRYLNRESSWLDFNARVLALAADNSLPLLERAKFLAIFASNLDEFYMVRVAGLKRRDEMDLSVRSADGLTPREQLSRIGEQTQWIASRHARVFLDSVLPALGEEGIYIVTWTDLDQAERDQLSTYFNEQVFPVLTPLAVDPAHPFPFVSGLSLNLAVTVKQPEDGTQHFARVKVPNNVDRFVELANRGAVRDTSAGDEGQLIHRFLPMEELIAAFLPVLFPGTEIVEHHAFRITRNADFEVEEDRDEDLLQALERELARRRFGSPVRLEIADDMTESMLELLLRELDVHPSDVIEVPGLLDLSSLWQIYGLDRPALKDRAFIPDTHPAFAERETPKSIFATLREGDVLVHHPYHSFATSVQRFIEQATADPDVLAIKQTLYRTSGDSPIVLALIEAAEAGKQVVALVEIKARFDEQANIRWARALEHAGVHVVYGIVGLKTHCKTCLVVRREGPTIRRYCHIGTGNYNSKTARLYEDVGLLTAAPDIGADLTDLFNSLTGYSRKLAYRNLLVAPYGIRRGIIERVEREVAAHRESGPQTGKGLIRLKMNALVDEQVIDALYRASQAGVRVEVVVRGICALRPGTEGFSENIFVRSILGRFLEHSRIIHFRAIDEFWIGSADMMHRNLDRRVEVLAQVKDSRLTAQLDELLKSALDPFTRCWELRPDGQWTASPQKGQQVRDHQESLMERHRSR

SEQ ID NO: 6792 - DNA, 2058 bp, Neisseria meningitidis serogroup A
  CDS (1)..(2058): transl_table=11
atgcccgaacaaaaccgcatcctctgccgcgaactaagcctgctggcattcaaccgccgcgtgttggcacaggcggaagacaaaaacgtcccccttttggaacgcctgcgcttcctgtgcatcgtgtcgtccaatcttgacgagtttttcgaagtccgcatggcgtggctcaagcgtgaaaacaagctgcacccccggcgcaggctggacaacggcaaaatgccgtctgaaaccatcgccgacgttaccgaagcggcgcgctccctgatacggcaccagtacgacctgttcaacaacgtccttcagcccgagttggcgcgggaaagcatccatttttaccgccgccgcaactggacgggcgcgcagaaaaaatggatcgaagactatttcgaccgcgaactgctgccgatcctgacccccatcggactcgacccgtcccaccccttcccgcgaccgctgaacaaatcgctcaacttcgccgtcgaactcgacggcacggacgcattcggcaggccttcggggatggcgattgtgcaggcaccgcgcatcctgccgcgcgtcgttcccctgccgtccgaactgtgtggcggcggacacggcttcgtcttcctgtcgtccatcctccacgcccacgtcggcaaactcttcccgggcatgaacgtcaaaggctgccaccagttccgcctgacgcgcgacagcgacttgaccgttgacgaagaagacctgcaaaacctccgcgccgccatccaaaacgaactgcacgaccgcgaatacggcgacggcgtgcggctcgaagtcgccgacacctgtcccgcctacatccgcgactttctgctcgcgcaattcaaactgaccgccgccgaactctatcaggtcaaaggcccggtcaacctcgtgcgcctcaacgccgtccccgacctagtcaaccgccccgatttgaaatttcccacacacacgccgggcagactgaaagccttgggcaaaaccgcgtccatattcgatttggtgcgccaatcgcccatcctgctgcaccacccctaccaatcgttcgaccccgttgtcgaaatgatgcgcgaagctgccgccgaccccgacgtgcttgccgtcaaaatgacgatttaccgcaccggcacgcgttccgaactggtccgcgccctgatgaaggcggcactcgccggcaaacaagtaaccgtcgtcgtcgaactgatggcgcgttttgacgaagccaacaacgtcaactgggcgaagcagctcgaagaggcgggcgcgcacgtcgtgtacggcgtgttcggctacaaagtccacgccaaaatggcactggtcatccgccgcgaagacggcgtactcaagcgttacgcccacctcggcacgggtaactaccaccaaggcacatcgcgcatctacaccgacttcggcatcattaccgccgacgaacaaatcaccgccgatgtgaacacattgtttatggaaatcacaggcttgggcaaacccgggcggctgaacaaactctaccaaagcccgtttaccctgcacaaaatggttatcgaccgcatcgcacgcgaaaccgaacacgcaaaagccggcaaaccggcgcggattaccgccaagatgaattcgctcatcgaaccgaccgtcatcgaagccctgtatcgggcaagcgcggcaggcgtacaaatcgatttgattgtgcgcggtatgtgcaccttgcgcccgggtgtaaaaggcttgtccgaaaacatccgcgtccgctccatcatcggcaggcagctcgaacacgcgcgcgtgtattgcttccacaacaacggcgcggacgatacctttatctccagcgcggattggatggggcgcaacttcttccgccgcatcgaaaccgccgcgccgattaccgcgcccgaactcaaaaaacgcgtcatccgcgaaggtttggaaatggcattggcagacaatacgcacgcgtggctgatgcagcccgacggcggctatatccgcgccgcgcccgccgagggcgaatccgaagccgacctgcaaaacgatttgtggacactgctcggaggctga

SEQ ID NO: 6793 - protein, 685 aa, Neisseria meningitidis serogroup A
MPEQNRILCRELSLLAFNRRVLAQAEDKNVPLLERLRFLCIVSSNLDEFFEVRMAWLKRENKLHPRRRLDNGKMPSETIADVTEAARSLIRHQYDLFNNVLQPELARESIHFYRRRNWTGAQKKWIEDYFDRELLPILTPIGLDPSHPFPRPLNKSLNFAVELDGTDAFGRPSGMAIVQAPRILPRVVPLPSELCGGGHGFVFLSSILHAHVGKLFPGMNVKGCHQFRLTRDSDLTVDEEDLQNLRAAIQNELHDREYGDGVRLEVADTCPAYIRDFLLAQFKLTAAELYQVKGPVNLVRLNAVPDLVNRPDLKFPTHTPGRLKALGKTASIFDLVRQSPILLHHPYQSFDPVVEMMREAAADPDVLAVKMTIYRTGTRSELVRALMKAALAGKQVTVVVELMARFDEANNVNWAKQLEEAGAHVVYGVFGYKVHAKMALVIRREDGVLKRYAHLGTGNYHQGTSRIYTDFGIITADEQITADVNTLFMEITGLGKPGRLNKLYQSPFTLHKMVIDRIARETEHAKAGKPARITAKMNSLIEPTVIEALYRASAAGVQIDLIVRGMCTLRPGVKGLSENIRVRSIIGRQLEHARVYCFHNNGADDTFISSADWMGRNFFRRIETAAPITAPELKKRVIREGLEMALADNTHAWLMQPDGGYIRAAPAEGESEADLQNDLWTLLGG

SEQ ID NO: 6794 - DNA, 2073 bp, Pseudomonas aeruginosa
  CDS (1)..(2073): transl_table=11
gtggatgacagcagcctgtacattcatcgcgagctctcccagttgcagttcaacatccgcgtgctggaacaggcgctggacgagtcctacccgctcctggagcggctgaagttcctcctcatcttctcgagcaacctcgacgagttcttcgagatccgcatcgccggcctgaagaagcagatcaccttcgcccgcgagcaggccggcgccgacggcctgctgccgcaccaggccctggcgcggatcagcgagctggtccacgagcaggtatcgcggcagtaccggatcctcaacgagaccctgttgccggagctggccaagcaccagatccgcttcatccgccggcgtcactggacgctgaagatcaagacctgggtgcggcgcttcttccgcgacgagatcgcgccgatcatcaccccgatcggcctcgacccgacccacccgttcccgctgctggtgaacaagagcctcaacttcatcgtcgagctggaggggatggatgccttcggccgcgactccggcctggcgatcatcccggcgccgcgcctgctgccacggatcatcaggctgccggaagacgttggcggcgagggcgacaactacgtgttcctgtcgtcgatgatccacgcccacgccgacgacctgttccccggcatgaaggtgaagggctgctaccagttccgcctgacccgcaacgccgacctgtcggtggacaccgaggatgtcgaggacctggcccgcgcgctacgcggcgagctgttctcgcgtcgctacggggatgcggtacgcctggaggtggtggatacctgcccgcagaacctgaccaactacctgctcaagcagttcggcctgtccgaaagcgagttgtacaaggtcagcggcccggtcaacctgacccgcctgttcagcgtcaccggcctggaaagccatccggagctgcagtacccgcccttcaccccggcgatcccgcgtcttttgcagaagaaggaaaacctcttcaacgtcctcagcaagctcgacgtgttgctgatgcacccgttcgagtccttcactccggtgatcgacctgctgcgccaggccgccaaggatccgaacgtgctggcgatcaagcaaaccctgtaccgcagcggcgccaactctgagatcgtcgacgccctggtcgaggcggcacgcaacggcaaggaggtcaccgcggtgatcgagctgcgcgcccgcttcgacgaagagtccaacctgcaactggccagccgcctgcaacaggccggtgcggtagtgatctacggcgtggtcggcttcaagacccacgccaagatgatgctgatcctccgtcgcgaggacggcgaactgcgccgctacgcgcacctgggcaccggcaactaccatgccggcaacgctcgcctgtacaccgactacagcctgctgaccgccgacgtggcgctctgcgaggacctgcacaagctgttcaaccaactgatcgggatgggcaagacgctgcgcatgaagaagctgttacatgcgccgttcaccctgaagaagaacctgctggaaatgatcaaccgcgaggcggcccaggcggcgctcggccagcctgcgcacatcatggccaaggtcaactcgctgaccgatccgaaggtcatccgcgccctgtacaaggccagccaggccggggtcaggatcgacctggtggtgcgtggcatgtgctgcctgcggccaggcatcccgggggtctcgcacaatatccacgtgcgctcgatcatcggacgcttcctcgagcacagccgcatctactacttcctcaacggcggcgacgagaagctctatctctccagcgccgactggatggagcgcaacctcgacatgcgcgtcgagacctgcttcccggtggaaggcaagaagctggtgcagcgggtcaagaaggaactggaaacgtatctgaccgacaacacccaggcctgggtgttgcaggccgacggtagctaccagcggctcagccccaccggtaaccagaacccccgcaatacccaggcgaccctgctggagaagctggccgcgccggtgcttaccgcacgttga

SEQ ID NO: 6795 - protein, 690 aa, Pseudomonas aeruginosa
MDDSSLYIHRELSQLQFNIRVLEQALDESYPLLERLKFLLIFSSNLDEFFEIRIAGLKKQITFAREQAGADGLLPHQALARISELVHEQVSRQYRILNETLLPELAKHQIRFIRRRHWTLKIKTWVRRFFRDEIAPIITPIGLDPTHPFPLLVNKSLNFIVELEGMDAFGRDSGLAIIPAPRLLPRIIRLPEDVGGEGDNYVFLSSMIHAHADDLFPGMKVKGCYQFRLTRNADLSVDTEDVEDLARALRGELFSRRYGDAVRLEVVDTCPQNLTNYLLKQFGLSESELYKVSGPVNLTRLFSVTGLESHPELQYPPFTPAIPRLLQKKENLFNVLSKLDVLLMHPFESFTPVIDLLRQAAKDPNVLAIKQTLYRSGANSEIVDALVEAARNGKEVTAVIELRARFDEESNLQLASRLQQAGAVVIYGVVGFKTHAKMMLILRREDGELRRYAHLGTGNYHAGNARLYTDYSLLTADVALCEDLHKLFNQLIGMGKTLRMKKLLHAPFTLKKNLLEMINREAAQAALGQPAHIMAKVNSLTDPKVIRALYKASQAGVRIDLVVRGMCCLRPGIPGVSHNIHVRSIIGRFLEHSRIYYFLNGGDEKLYLSSADWMERNLDMRVETCFPVEGKKLVQRVKKELETYLTDNTQAWVLQADGSYQRLSPTGNQNPRNTQATLLEKLAAPVLTAR

SEQ ID NO: 6796 - DNA, 2184 bp, Pseudomonas putida
  CDS (1)..(2184): transl_table=11
atgctgcagaccccgccagacctgcctccggtggccgagcctgtagcggaacaggtggtcgaggctgtggctccggtgcccgcgccgtccccgaccatcgccgtccctggcctggacgacagcagcctgtacattcatcgcgaactctcgcaactgcagttcaatatccgggtgctggagcaggcactggacgagaactacccgctgctggaacgcctcaagttcctgttgatcttctccagcaacctcgacgagttctttgagattcgcgtcgccggcctgaagaagcagatcaacttcgcccgtgaacaggccggcgccgatggcctgcagccgcaccaggcgctagcgcgtatcagcgaactggtgcacatcgaggtagagcgccagtacgcgatcctcaacgacgtgctgctgcctgagctggaaaagcaccagatccgcttcatccgccgccgctactggacacccaagctcaagacctgggtacgccgctacttccgcgacgaaattgccccgatcattaccccgattggcctcgacccgactcacccgttcccgctgctggtgaacaagagcctcaacttcatagtcgagctcgagggggtggacgccttcggtcgcgactcgggcctggcgatcatcccggcaccacgcctgttgccgcgggttattcgcgtgccggaagaggtgggcggcccgggcgcaaactacgtgttcctgtcgtcgatgatccacgcgcatgccgacgacctgttccagggcatgaaggtgaagggctgctaccagttccgtctgacgcgcaacgccgacctggcgctggactctgaagaggtcgacgacctggcccgcgcgctgcgcggcgagctgttctcgcgccgctacggtgacgccgtgcgcctggaagtggccgacacctgcccgaaacacctgtcggactacctgttgaagcagttcagcctcagcgaaagcgagctgtaccaggtcaatggcccggtcaacctcacccgcctgttcagcatcaccggcctggacagccacccggaactgcaatacacaccgttcaccccggcgatccccaagctgctggcgaacgctgacaacattttcagtgtgatcagcaagcaggacatcctgctgatgcacccgttcgagtccttcacgccagtggtcgacctgctgcgccaggccgccaaggacccgcacgtgctcgccgtgcgccagaccctgtaccgctcgggggctaactcggaaatcgtcgacgccctggtggatgcggcgcgtaacggcaaggaggtcactgcggtgatcgagttgcgtgcgcgttttgacgaagagtccaacctgcagatggccagccgcctgcaagcggctggtgcggtagtgatctacggtgtggttggcttcaagacccacgccaagatgatgctgattctgcgccgcgagcagggcgagatcgtgcgttacgcgcatctgggcaccggcaactaccacgccggcaacgcccgcctgtacaccgactacagcctgctgacttctgacgatgcgctcaccgaagacgtcggcaagctgttcagccagctgatcggcatgggcaagaccctgcgcatgaagaagctgctgcatgcgccgttcacccttaaaaagggcatgctcgacatgatcgcgcgggaaacccagtttgcccttgaaggcaagccggcgcacatcatcgccaagttcaactcgctgaccgacgccaaagtcatcaaggcgttgtacaaggccagccagtcgggcgtgaaaatcgacttggtggtgcgtggcatgtgctgcctgcgcccgggcattccgggggtttcgcacaacatccaggtgcgctcgatcattggccgcttcctcgagcacacgcgggtgttctacttcctcaatggcggcgaagagcagatctacctgtccagcgccgactggatggagcgcaacctcgacaagcgtgtcgagacctgcttcccggtggaaggcaagaaactgttgctgcgggtgaagaaggagctggaaggctacctgaccgacaatacccacgcctggaccttgcagccagacgggcgctacgtgcgcagcaccccgaccggcaaccagaacccgcgcagcgttcaggcgaccctgctggagcgcctgagcaacccggtcctcaacgtacgctga

SEQ ID NO: 6797 - protein, 727 aa, Pseudomonas putida
MLQTPPDLPPVAEPVAEQVVEAVAPVPAPSPTIAVPGLDDSSLYIHRELSQLQFNIRVLEQALDENYPLLERLKFLLIFSSNLDEFFEIRVAGLKKQINFAREQAGADGLQPHQALARISELVHIEVERQYAILNDVLLPELEKHQIRFIRRRYWTPKLKTWVRRYFRDEIAPIITPIGLDPTHPFPLLVNKSLNFIVELEGVDAFGRDSGLAIIPAPRLLPRVIRVPEEVGGPGANYVFLSSMIHAHADDLFQGMKVKGCYQFRLTRNADLALDSEEVDDLARALRGELFSRRYGDAVRLEVADTCPKHLSDYLLKQFSLSESELYQVNGPVNLTRLFSITGLDSHPELQYTPFTPAIPKLLANADNIFSVISKQDILLMHPFESFTPVVDLLRQAAKDPHVLAVRQTLYRSGANSEIVDALVDAARNGKEVTAVIELRARFDEESNLQMASRLQAAGAVVIYGVVGFKTHAKMMLILRREQGEIVRYAHLGTGNYHAGNARLYTDYSLLTSDDALTEDVGKLFSQLIGMGKTLRMKKLLHAPFTLKKGMLDMIARETQFALEGKPAHIIAKFNSLTDAKVIKALYKASQSGVKIDLVVRGMCCLRPGIPGVSHNIQVRSIIGRFLEHTRVFYFLNGGEEQIYLSSADWMERNLDKRVETCFPVEGKKLLLRVKKELEGYLTDNTHAWTLQPDGRYVRSTPTGNQNPRSVQATLLERLSNPVLNVR

SEQ ID NO: 6798 - DNA, 2211 bp, Pseudomonas syringae pv
  CDS (1)..(2211): transl_table=11
atgaataccgaagcactcatcgaagccgctgttgaagtcgatgtccaggaggctgcaccggtggtcgagcctgatatcgaagtaatcccggccatcgaggcgcctgccgcttcgttgcccgccatcgtcgctccgaacctggacgacagcagcctgtatatccaccgcgaactgtcgcaattgcagttcaacatccgggtactggaacaggcgctcgatgagtcctacccgttgctggagcggctgaagtttctgctgatcttttccagcaacctcgatgagttcttcgagattcgtgttgcaggcctcaagaagcagatcacgtttgcccgcgagcaggcaggggccgacggtttgcagccgcatcaggcactggccaggatcagcgagctggtgcatggtcatgtcgatcggcaatacgcgatcctcaacgacattctgctgccggagcttgaaaagcatcaggtccgcttcatccgccgccgtcactggacggccaagctcaaggcctgggtacgtcgctatttccgtgacgagatcgcgccgatcatcaccccgatcggtctggacccgacgcacccgttcccgctgctggtcaacaagagcctgaacttcatcgtcgagctggaaggtatcgatgccttcggtcgcgattcgggccttgcgatcattccggccccgcgtctgctgccgcgtgtcatcaaggtgccggaagaggtgtgtggcccgggcgacaacttcgtgttcctgtcgtcgatgatccacgcccacgctgacgatctgttccagggcatgaaggtcaagggctgctaccagttccgcctgacccgaaacgccgatctggcgctggactcggaagacgtggaagatctggcgcgtgcgctgcgtggcgaactgttctcgcgtcgttacggcgatgcggtacgtctggaagtggccgatacctgccctaaacacctgtcggactacctgctcaagcagttcaacctgcacgagtccgagctgtatcaggtcaacggcccggtcaacctgacgcgcctgttcagcatcaccggcctggacagccaccccgaattgcaatacccgccgttcacgccagccatccccaagctgctgcagaacagcgaaaacgttttcagcgtggtcagcaagcaggacatcctgttgctgcatcctttcgagtcgttcacaccggtggtcgatctgttgcgtcaggctgccaaggacccgcacgtgctggcggtgcgccagacgctgtaccgcagtggcgcgaactcggaaatcgtcgacgcgctggttgatgccgcccgtaacggcaaggaagtcactgcggtgatcgagttgcgtgcccgatttgacgaagagtccaacctgcaactggccagccgcctgcaagccgcgggcgcggtggtgatctacggtgtggtcggcttcaagacccacgccaagatgatgctgatcctgcgtcgcgaggcgggcgagatcgtgcgttacgcgcaccttgggacgggtaactatcacgccggcaacgcacgtctttacaccgactacagcctgctgacctctgacgacgcgctgtgcgaagacgtcggcaaactgttcagccagttgatcggcatgggcaagaccctgcgcatgaagaaactgctgcatgcgccgttcacgctgaagaagggcatgctcgacatgattgcccgcgaaacgcagttcgcactcgacggcaagcctgcgcacatcatcgccaagttcaactcgctgaccgatccgaagatcatccgcgcgctgtacaaggccagccagtctggtgtacgtatcgatctggtggtgcgcggcatgtgctgcctgcgtccgggtattgccggggtctcgcacaacattcatgtgcgctcgatcatcggccgcttcctggagcacacgcgggtgttctacttcctcaacggcggcgacgagcagatgttcctgtcgagtgccgactggatggagcgcaacctcgacaagcgtgtcgagacctgcttcccggtggaaggcaagaagttgattctgcgcgtgaagaaggagctggaaagttacctgaccgacaacacccacagctggctgctgcagtcagacgggcgttacgtgcgcagcatgccgactggcaatcagaatgcccgaagcgcccaggcgaccctgctggagcgcctgagcaacccggttctcagcgtacgctga

SEQ ID NO: 6799 - protein, 736 aa, Pseudomonas syringae pv
MNTEALIEAAVEVDVQEAAPVVEPDIEVIPAIEAPAASLPAIVAPNLDDSSLYIHRELSQLQFNIRVLEQALDESYPLLERLKFLLIFSSNLDEFFEIRVAGLKKQITFAREQAGADGLQPHQALARISELVHGHVDRQYAILNDILLPELEKHQVRFIRRRHWTAKLKAWVRRYFRDEIAPIITPIGLDPTHPFPLLVNKSLNFIVELEGIDAFGRDSGLAIIPAPRLLPRVIKVPEEVCGPGDNFVFLSSMIHAHADDLFQGMKVKGCYQFRLTRNADLALDSEDVEDLARALRGELFSRRYGDAVRLEVADTCPKHLSDYLLKQFNLHESELYQVNGPVNLTRLFSITGLDSHPELQYPPFTPAIPKLLQNSENVFSVVSKQDILLLHPFESFTPVVDLLRQAAKDPHVLAVRQTLYRSGANSEIVDALVDAARNGKEVTAVIELRARFDEESNLQLASRLQAAGAVVIYGVVGFKTHAKMMLILRREAGEIVRYAHLGTGNYHAGNARLYTDYSLLTSDDALCEDVGKLFSQLIGMGKTLRMKKLLHAPFTLKKGMLDMIARETQFALDGKPAHIIAKFNSLTDPKIIRALYKASQSGVRIDLVVRGMCCLRPGIAGVSHNIHVRSIIGRFLEHTRVFYFLNGGDEQMFLSSADWMERNLDKRVETCFPVEGKKLILRVKKELESYLTDNTHSWLLQSDGRYVRSMPTGNQNARSAQATLLERLSNPVLSVR

SEQ ID NO: 6800 - DNA, 2559 bp, Rhodopirellula baltica
  CDS (1)..(2559): transl_table=11
ttggccaccggagtcagctcccgagacggctcaagagagcgaatccgaagaagagcagtcgcccgagatcaccctggatgcggtccccaccgactcgaccgtccgattggacacattcgctatccccatcgccattcaatctccttcagtcccttcgcgagtttgacgttgtcccacgatcctgccccctctcagtccgtcggcaaacgccctcagaaaagcaccaaaaccgcgtcgcgacgcaaagtggaaactgcggctgctgacgcacctcggttcatcaaccgcgagttggcatggctggaattcaacgctcgcgtattggatcaagcggatgatccgtcggtacgacttctggaaagagccaaattcctggcgattaccagttcgaacctcgatgagttcatgatggtccgcgtgggcagcttgaaactgcaagcagtcagcggaggtggtcgacgtgacccgtccggtcggaccgcgacggaacagttgcaggcgatttcgaaacgttgccaaggacacgttgaccggcaatacgaactgctccgaaacgaattgctgccgttgctgggcgaacacaaaatcaatcaagtcgatccggccgaatgcagcgaccgattgctcgcagctgccgaacgccattttcgtggtgatgtgctggcggtgctttcacctcaggcacttcacgatcgacgctttcccatgctgcctggtttgggaatccacttgtgcgtgcaattgcgtccgggcgatgaaatcggtccgcaacgaactccaccaccaagcgactctttggacaaccgagttccatcaaatttgaagcggaactctgacactgccaaccaacaacccaccccagccgaaaacatctcggcgccggaagacggtgcagaacaaaccgaacccgaaactcaattcgcggtcatcccgcttggccgcacgcttgggcgtgtgattccgctgccgatcgagaaaccgccaatcgaaaagggcgtggctcccaaagaaagcgacgacacgtcacccatcgagtcgggctactcgtacgcattgttggaagatctggtctcacacttcgttgacgagttcttccctggtcgcgaagtgattcagtgcaaaccatttcgtatcacccgcaatgccgacattgaacttcgcgaagacggcgcaggcgacttgctcggcggcatggaagaagtcctcgaaagccgacgtttgtccgatgttgttcggttggagatcgacgccaacgcgaattcagagattcgcgactacctgatcaagagcttcaacgttgaccctcaattcgtttttgacatcgacggtcccttggacctgacgtatctgtttgcactgcatgggctgaagggaatgaacacccttcgcgacgatgaatggcctccgcaacgcagcccgagaatcgaccccgccgaatccatgttcacatcgatctcggacggagacatcatgctgatgcatccgtatgagtcctttgatccggtcgtccgattgctggaagaagcctcagtcgaccccgatgtcttggccgtcaagcagatcctgtatcggaccagccgcaacagcccgattgttgccgcgctgatgcgtgcggctgagcgagggaagtacgtcaccgcgattgtggaactgaaagcccgattcgacgaagcccgcaacattgaatgggctcgcgaaatggaacaggccggcgtgcaggttatctacggcatccgcggtttgaaaacgcacgcgaaagtttgcatcatcgttcgtcgcgaaccacagggtttggtgcggtacgtccactttggaaccggtaactacaacgaagtcaccgccaatttgtacggtgacatttcggtgctgacgtgcgatgagatattggggaccgacgcgacgatgttcttcaacgccgtcaccggggccagccaaccgcaaccacttcaacaacttggcatggcgccgctgacactgcgtcggcaaatcctggatttaatccaaggtgagaccgaacgttcccggcagggtcagaaaggcgagatcatcgcgaagatgaacgcgttggtggacaccgaggtcatcgattctctgtacatggccagccaagcgggcgtgaaaattcgcttgaacgtccgtggcgtttgctgtttgcggccgggtgtgccgggaatgagcgaaacgattgaggtcgtttccattgtcgacaggttcttggaacacgcacgaacattctatttccgtcacggtggcgaccacgagatgttcatcagcagtgcggactggatgcctcgtaacttggaccgccgagtcgaattgcttgttcccgtgatcgatcccgccgcccgaaaacgccttcgagaaacgctgcagctgtatttccgcgacaaccaaaacgcgtggcgaatgcaacctgacggaagttaccagcgtttaaagccgcgaaagaacgaagcccccatgcgggttcaagagacactgtatcatcaggtggtcgagaatcgaaaagcgggcaagcacgccccgcaatcgactttcgaaactcatcgtcctgattga

SEQ ID NO: 6801 - protein, 852 aa, Rhodopirellula baltica
MATGVSSRDGSRERIRRRAVARDHPGCGPHRLDRPIGHIRYPHRHSISFSPFASLTLSHDPAPSQSVGKRPQKSTKTASRRKVETAAADAPRFINRELAWLEFNARVLDQADDPSVRLLERAKFLAITSSNLDEFMMVRVGSLKLQAVSGGGRRDPSGRTATEQLQAISKRCQGHVDRQYELLRNELLPLLGEHKINQVDPAECSDRLLAAAERHFRGDVLAVLSPQALHDRRFPMLPGLGIHLCVQLRPGDEIGPQRTPPPSDSLDNRVPSNLKRNSDTANQQPTPAENISAPEDGAEQTEPETQFAVIPLGRTLGRVIPLPIEKPPIEKGVAPKESDDTSPIESGYSYALLEDLVSHFVDEFFPGREVIQCKPFRITRNADIELREDGAGDLLGGMEEVLESRRLSDVVRLEIDANANSEIRDYLIKSFNVDPQFVFDIDGPLDLTYLFALHGLKGMNTLRDDEWPPQRSPRIDPAESMFTSISDGDIMLMHPYESFDPVVRLLEEASVDPDVLAVKQILYRTSRNSPIVAALMRAAERGKYVTAIVELKARFDEARNIEWAREMEQAGVQVIYGIRGLKTHAKVCIIVRREPQGLVRYVHFGTGNYNEVTANLYGDISVLTCDEILGTDATMFFNAVTGASQPQPLQQLGMAPLTLRRQILDLIQGETERSRQGQKGEIIAKMNALVDTEVIDSLYMASQAGVKIRLNVRGVCCLRPGVPGMSETIEVVSIVDRFLEHARTFYFRHGGDHEMFISSADWMPRNLDRRVELLVPVIDPAARKRLRETLQLYFRDNQNAWRMQPDGSYQRLKPRKNEAPMRVQETLYHQVVENRKAGKHAPQSTFETHRPD

SEQ ID NO: 6802 - DNA, 2166 bp, Staphylococcus epidermidis
  CDS (1)..(2166): transl_table=11
atgcaaactcgattgggagaaaaagatattaatttaccgcagtattacaacaatagggagttaagttggctagattttaactatagggtattacaagaatcatatgataaaaataatccgttgcttgaaaaacttaattttatttctatcttcagttcaaatttagatgaattctttatggttcgagtggctgggttaaaagaccaagtcaaaatgggatatgacaaacctgaaaataaagcacaaatgacgcctcaagaacaacttgatgctattaaaattaaaaatacagactatgtgaacactcaatatcaacgttataacgaattaattaaagaattagccaattacgatattgagatggtaaaacctgaagacttatcagatgcattgatagaaaaattagaacaagagttcaagttaagtgtcttgccgacactcactccgttaggtattgatgcgtatcatccatttccaaagttaaataataaaagtttaaatatttttgttgatatcgatacggaagatgccattaattcagctatcgttcaaattccttcattaattccacgctttttaactttaaatgagggtacaaaacaatacgttgtcatggtagaagatgtgattacgtatttcatcaattatttatttacaggatacgaagtactaaatacttttactttccgaatcacacgtaatgcagatttaaccattcatgaagatggcgctgaggacttgcttatagaaattgaacgtttcttaaaagaacgtaagagtggttcggctgtacgtttagaattagattgtcgcacttctgaaaaagagaatgtagaatggttaatcaatcaattagaaattgaagataatgatatttattatttagatggtccacttgatttaacattcttatttggattggttgatcatctatctcataagctcaaatatttaacgtatgagaaatatactcctcaaccacctagatcattaggcaacaagaatatctatcaattatcattagaaagagatatattcttccaccatccgtatgaatcatttgaaccaatagttgactttattcgacaagcagcagatgacccaaatacaatcgctatcaaacaaaccttgtatcgagtgagtaaggattcgccgattattaacagcttaaaagaagctgctgaaaacggcaagcaagtaacggtgctcgtagaattaaaagcacgctttgatgaagaaaataacgtacattgggcacgtatgctagaagatgctggctgtcacgttatttatggtatgacacatctaaaaacgcatagtaaaattgcgctagtcgttaaacgcatcaacaatgaacttacgtcatttgttcatttaggcacaggtaactataatgataaaactgctaaattatacacagatatgggtatcattacgacaaataaagatatcgctgaggatgcaattaacttctttaattacttgagtggttactcaacaaaaccagaatacaataaattgattgtagcaccatacgatattcgagacgtcttcattgatcgtatcgataaagagatacgtagtcatttacaacatggtaatggtaaaattatgatgaaaatgaactctttaaccgataaaacgattatcgaaaagctcttcgaagcatcccaagcaggcgttaaaatacaactcatcattcgtggtatatgttgtcttaaaccaggcattccaggtattagcgaaaatatagaggttgttagtatagtgggtcgtttgcttgaacattcacgtatttactacttccataataatagtgaggcgcatatttatttatcttcagctgacgttatgacacgtaatatgattaaacgtgtcgaaatattgttccctgttgaagataaatcaataggacaacgattagttaactatatgaatttacaattatctgacaaccaaaaaggtcgttaccaagatgcacaaggcctttatcattatgtcgaaaacaattcatctcctttaaactctcaatcttacttgatgcaagaagcaattaagtatggagaagaactaaaaaaacaatcggtacaaccttctggacaacctgttcattctagacgtggcggtagttggatgcgaaaattaaaaaacacatttaaaagataa

SEQ ID NO: 6803 - protein, 721 aa, Staphylococcus epidermidis
MQTRLGEKDINLPQYYNNRELSWLDFNYRVLQESYDKNNPLLEKLNFISIFSSNLDEFFMVRVAGLKDQVKMGYDKPENKAQMTPQEQLDAIKIKNTDYVNTQYQRYNELIKELANYDIEMVKPEDLSDALIEKLEQEFKLSVLPTLTPLGIDAYHPFPKLNNKSLNIFVDIDTEDAINSAIVQIPSLIPRFLTLNEGTKQYVVMVEDVITYFINYLFTGYEVLNTFTFRITRNADLTIHEDGAEDLLIEIERFLKERKSGSAVRLELDCRTSEKENVEWLINQLEIEDNDIYYLDGPLDLTFLFGLVDHLSHKLKYLTYEKYTPQPPRSLGNKNIYQLSLERDIFFHHPYESFEPIVDFIRQAADDPNTIAIKQTLYRVSKDSPIINSLKEAAENGKQVTVLVELKARFDEENNVHWARMLEDAGCHVIYGMTHLKTHSKIALVVKRINNELTSFVHLGTGNYNDKTAKLYTDMGIITTNKDIAEDAINFFNYLSGYSTKPEYNKLIVAPYDIRDVFIDRIDKEIRSHLQHGNGKIMMKMNSLTDKTIIEKLFEASQAGVKIQLIIRGICCLKPGIPGISENIEVVSIVGRLLEHSRIYYFHNNSEAHIYLSSADVMTRNMIKRVEILFPVEDKSIGQRLVNYMNLQLSDNQKGRYQDAQGLYHYVENNSSPLNSQSYLMQEAIKYGEELKKQSVQPSGQPVHSRRGGSWMRKLKNTFKR

SEQ ID NO: 6804 - DNA, 2205 bp, Staphylococcus epidermidis
  CDS (1)..(2205): transl_table=11
gtgcataataaagataaattaatgaggtgtatgtatagtatgcaaactcgattgggagaaaaagatattaatttaccgcagtattacaacaatagggagttaagttggctagattttaactatagggtattacaagaatcatatgataaaaataatccgttgcttgaaaaacttaattttatttctatcttcagttcaaatttagatgaattctttatggttcgagtggctgggttaaaagaccaagtcaaaatgggatatgacaaacctgaaaataaagcacaaatgacgcctcaagaacaacttgatgctattaaaattaaaaatacagactatgtgaacactcaatatcaacgttataacgaattaattaaagaattagccaattacgatattgagatggtaaaacctgaagacttatcagatgcattgatagaaaaattagaacaagagttcaagttaagtgtcttgccgacactcactccgttaggtattgatgcgtatcatccatttccaaagttaaataataaaagtttaaatatttttgttgatatcgatacggaagatgccattaattcagctatcgttcaaattccttcattaattccacgctttttaactttaaatgagggtacaaaacaatacgttgtcatggtagaagatgtgattacgtatttcatcaattatttatttacaggatacgaagtactaaatacttttactttccgaatcacacgtaatgcagatttaaccattcatgaagatggcgctgaggacttgcttatagaaattgaacgtttcttaaaagaacgtaagagtggttcggctgtacgtttagaattagattgtcgcacttctgaaaaagagaatgtagaatggttaatcaatcaattagaaattgaagataatgatatttattatttagatggtccacttgatttaacattcttatttggattggttgatcatctatctcataagctcaaatatttaacgtatgagaaatatactcctcaaccacctagatcattaggcaacaagaatatctatcaattatcattagaaagagatatattcttccaccatccgtatgaatcatttgaaccaatagttgactttattcgacaagcagcagatgacccaaatacaatcgctatcaaacaaaccttgtatcgagtgagtaaggattcgccgattattaacagcttaaaagaagctgctgaaaacggcaagcaagtaacggtgctcgtagaattaaaagcacgctttgatgaagaaaataacgtacattgggcacgtatgctagaagatgctggctgtcacgttatttatggtatgacacatctaaaaacgcatagtaaaattgcgctagtcgttaaacgcatcaacaatgaacttacgtcatttgttcatttaggcacaggtaactataatgataaaactgctaaattatacacagatatgggtatcattacgacaaataaagatatcgctgaggatgcaattaacttctttaattacttgagtggttactcaacaaaaccagaatacaataaattgattgtagcaccatacgatattcgagacgtcttcattgatcgtatcgataaagagatacgtagtcatttacaacatggtaatggtaaaattatgatgaaaatgaactctttaaccgataaaacgattatcgaaaagctcttcgaagcatcccaagcaggcgttaaaatacaactcatcattcgtggtatatgttgtcttaaaccaggcattccaggtattagcgaaaatatagaggttgttagtatagtgggtcgtttgcttgaacattcacgtatttactacttccataataatagtgaggcgcatatttatttatcttcagctgacgttatgacacgtaatatgattaaacgtgtcgaaatattgttccctgttgaagataaatcaataggacaacgattagttaactatatgaatttacaattatctgacaaccaaaaaggtcgttaccaagatgcacaaggcctttatcattatgtcgaaaacaattcatctcctttaaactctcaatcttacttgatgcaagaagcaattaagtatggagaagaactaaaaaaacaatcggtacaaccttctggacaacctgttcattctagacgtggcggtagttggatgcgaaaattaaaaaacacatttaaaagataa

SEQ ID NO: 6805 - protein, 734 aa, Staphylococcus epidermidis
MHNKDKLMRCMYSMQTRLGEKDINLPQYYNNRELSWLDFNYRVLQESYDKNNPLLEKLNFISIFSSNLDEFFMVRVAGLKDQVKMGYDKPENKAQMTPQEQLDAIKIKNTDYVNTQYQRYNELIKELANYDIEMVKPEDLSDALIEKLEQEFKLSVLPTLTPLGIDAYHPFPKLNNKSLNIFVDIDTEDAINSAIVQIPSLIPRFLTLNEGTKQYVVMVEDVITYFINYLFTGYEVLNTFTFRITRNADLTIHEDGAEDLLIEIERFLKERKSGSAVRLELDCRTSEKENVEWLINQLEIEDNDIYYLDGPLDLTFLFGLVDHLSHKLKYLTYEKYTPQPPRSLGNKNIYQLSLERDIFFHHPYESFEPIVDFIRQAADDPNTIAIKQTLYRVSKDSPIINSLKEAAENGKQVTVLVELKARFDEENNVHWARMLEDAGCHVIYGMTHLKTHSKIALVVKRINNELTSFVHLGTGNYNDKTAKLYTDMGIITTNKDIAEDAINFFNYLSGYSTKPEYNKLIVAPYDIRDVFIDRIDKEIRSHLQHGNGKIMMKMNSLTDKTIIEKLFEASQAGVKIQLIIRGICCLKPGIPGISENIEVVSIVGRLLEHSRIYYFHNNSEAHIYLSSADVMTRNMIKRVEILFPVEDKSIGQRLVNYMNLQLSDNQKGRYQDAQGLYHYVENNSSPLNSQSYLMQEAIKYGEELKKQSVQPSGQPVHSRRGGSWMRKLKNTFKR

SEQ ID NO: 6806 - DNA, 2139 bp, Synechococcus sp
  CDS (1)..(2139): transl_table=11
atgagctccgctgttctgagcccggaccgctacatcaaccgggaactgagctggatcgccttcaaccagagagtcctcgcccaggcgctggatcagcgcacccccctgctggaccaggccaagttcagcgccatcttcagcaacaaccttgatgagttcttcatggtgcgcgtggcgtccctgaagtctcaggtggaagctggcatcaccacccccagcgaagacggaaagacgccgctcgaacagctgctgaccattcgcgaacggctgatacccctgctgcagcaacagcaggaccactaccgcaaacaactgcgcaaaaaactgctcgaccacaacgtgcaactgctggattacagccagttgaacaagcatcaacagcaatgggtcagcgacaccttccgccattcggtgtttccagtgctgactccgcttgccgttgacccggcacatcccttccccttcgtcagcaacctcagcctcaacgttgctgctgtcattcacgacccggaatcaggccaacgtcaattcgcacgagtgaaggttccccagaagaacctgccacgcttcgtctccattcccaccgagctgagtgagagcgatcccaaacccatccacaccgccgtaccgctggaacaggtgatcgccttcaacctcgatctcctctttccggggatgagcgtgcaggggcattacttcttccgcgtgacccgcgatgccgacctggaactgcgggatctcgaagccgatgacctgatgcttgcccttgagcagggtctgcgcaaacggcgaatgggaggcgaagtggtgcgactcgaagtgcccaacgacatgcccgaggacgtcgttgaaatgttgatgaatggcctcgccgttgaggaagaagacctctacaggattgatggacccctgggtctggatgatctcttcggattgatggccctgcctcttccgaaactgaaggacaaacagcacagcggacagaccccaacggtactggccagaacccaacagcatctgattgacgaaggtgccatcaaacccgaggaattcgagagcatcttctcggtgatgcgtcagcaggacatcctcttgcatcacccctatgacctgttctccaccacggtggaggaattcatcaatcaggccgctgatgatccccaggtgatggggatcaagatgaccctctatcgaacctcgaaggattcaccgatcatcgcggcactgatccgtgccgctgaaaatggcaagcaggtgatggccctagtggaactcaaggccagatttgatgaagacaacaacatccagtgggcccggcaactggaacgctccggcgtccatgtggtgtatggcgttctgggcttgaaaacccacaccaagatcgttctggtggtccgcaaagagcaagagaagctgcgcagttacgtccacatcgggaccgggaattacaactcgaaaacctcgaagctctacaccgatctcggacttctctccacgcggccggagctgggccaggacctggtggaactgttcaactacctgaccgggttctcaaaacagcagagtttccgccgactgcttgtggctccggtgaccctgcgcaaagggatggaatccctgatccggcgcgaaatcgaacatgccagggaaggtcgagacggtcacatcagagccaagatgaattccttggtggatccggacatcatcgctttgttgtatgaagccgcagcagcgaatgtgcgggttgaactgatcatccgcggcatgtgcagcctctacccaggccgagaagggctgagtgaaagcatcagcgttgtgagcatcatcggccagttccttgaacactcgcggattttctggttcggaaacggcggctcacctgaggtgtatatcggaagcgcagactggatgagtcgcaaccttgaccgccgggtggaagctgtgacacccgtggaagatcccaaccttcgaggccgactggagcgcttgctggagctctacctgaaggacaaccggggcgcctgggacatgcaaagcgatggcagctttatccaacggcaaccagaggacggagaggacgttcgcaactctcaagttcaactgatcaagcaatggagtcaaggcgtgccgcaatcgtga

SEQ ID NO: 6807 - protein, 712 aa, Synechococcus sp
MSSAVLSPDRYINRELSWIAFNQRVLAQALDQRTPLLDQAKFSAIFSNNLDEFFMVRVASLKSQVEAGITTPSEDGKTPLEQLLTIRERLIPLLQQQQDHYRKQLRKKLLDHNVQLLDYSQLNKHQQQWVSDTFRHSVFPVLTPLAVDPAHPFPFVSNLSLNVAAVIHDPESGQRQFARVKVPQKNLPRFVSIPTELSESDPKPIHTAVPLEQVIAFNLDLLFPGMSVQGHYFFRVTRDADLELRDLEADDLMLALEQGLRKRRMGGEVVRLEVPNDMPEDVVEMLMNGLAVEEEDLYRIDGPLGLDDLFGLMALPLPKLKDKQHSGQTPTVLARTQQHLIDEGAIKPEEFESIFSVMRQQDILLHHPYDLFSTTVEEFINQAADDPQVMGIKMTLYRTSKDSPIIAALIRAAENGKQVMALVELKARFDEDNNIQWARQLERSGVHVVYGVLGLKTHTKIVLVVRKEQEKLRSYVHIGTGNYNSKTSKLYTDLGLLSTRPELGQDLVELFNYLTGFSKQQSFRRLLVAPVTLRKGMESLIRREIEHAREGRDGHIRAKMNSLVDPDIIALLYEAAAANVRVELIIRGMCSLYPGREGLSESISVVSIIGQFLEHSRIFWFGNGGSPEVYIGSADWMSRNLDRRVEAVTPVEDPNLRGRLERLLELYLKDNRGAWDMQSDGSFIQRQPEDGEDVRNSQVQLIKQWSQGVPQS

SEQ ID NO: 6808 - DNA, 2097 bp, Xylella fastidiosa
  CDS (1)..(2097): transl_table=11
atgtctaaatcttctcccattgaacctgtttcagcatctgatgtcagccagcagttccgtgatcctggactgtatttgaacagggagctatcacagctcgacttcaatttccgagtgttggcacaggcattggatgagcaggtgccgttgttagagcggctgcgcttcctgtgtatttcttgcaccaatctggatgagttctttgaaatccgtgtggctaccgtgcgccatgcacaggaatttggtttgccgccagcgcctgatgggatgaggccgacggtaatcctcaacgctgttcacgacctaacgaccaaactcgtccatgatcagtacaactgctggaaccaagtgctgtgcccggcactcgccgcccttggagtgggtgtactgagtcataacagttggaacgcgcgtcagaaacgttggttacgtggttactttcgcaacgaaatcatgccggtgttatcgccacttggtttagatcctgcgcatccatttccgaaaatattcaataaaaccttaaatattgtggtggtgcttaacggtattgatgcctttggtcgtgctggtcatttggctatcgtgcgtgccccgcgttccttgccgcgcattattgagttgccccaacatctgtccagggatggttctcaaaacttcgtcttcttgtcctcagtactgtctgcttttgtcggtgagttatttcctggcatggtggtcaggggggcttatcaatttcgggtcactcgtaattctgaattggtggtggatgaggatgaagtcgagaatctggcgctggcgttgcgtaatgagttggtgacccgcggttatcgtcttgcagtcaggctggagatcgctgaagactgcccaaccccgattgtgcgtacattactgcagaattttgggttgcaagaaaacgctgtgtatcggattaacggtcctgtcaatctgagccgagtgagtcaggtctatgacatggtgttgcgtccggaactgaagtatcccccgttcaatccacgcactttgcgtaacagtgatcacattttcgagatcattgccaagggggatgtgctgttgtaccacccctacgatgcttttaccgcagtccttgatttgctacgtcaggcggcggctgaccctgatgtactggcgatcaaacaaaccctataccgcactggcaaagattcgaccatcgtcgatgcactgattcaagccgcacgcagtggcaaggatgtcaccgtggtggttgagctgcgcgcgcgttttgacgaggaggccaacctcggtttggcagataagctgcaggaggctggggtacaagtggtctatggtgtggtcggttacaagacccacgccaagatgttgctgatcgtacgccgtgagggtcgaaaattacgtcgctacgtgcatttgggcactggcaactaccatagtggtacggcacggatatataccgatttgagcttgatgactgctaacgcagcgatcggtaaagatgtgcatcaactatttctgcaattgtctgggttagcacccaagatgaagctggagtgcttattgcagtccccattcaccctgcatgctggcgtgttgttccgcatcgaacgtgagaccaagttcgcacggaaggggcgccctgcccgcatcgttgccaagatgaatgcgctgaatgagccacaggtcgtacgcgcactgtacgtcgcctcgcaggcgggtgtgcaaattgatctgattgtgcgtggggcttgcacgttgcggcctggcgtgcaggatatatccgaaaacatccgcgtgcgttcaatcgtcggccgctttttggagcacagccgggtgtattggtttgccaataacggtacgcctgaactgttctgcgccagcgccgattggttggagcgcaatttgctacgtcgggtcgagatctgtttcccgatcttgaatccggatttggcgaaacgtatttattctgatgttttacagagttacttggatgacaacctcaatgcttgggaattggggagtgatggcgtttaccggaaactgcttcccgagacagatcatgcgccatactcggcccaggtggctctactggagtctttatag

SEQ ID NO: 6809 - protein, 698 aa, Xylella fastidiosa
MSKSSPIEPVSASDVSQQFRDPGLYLNRELSQLDFNFRVLAQALDEQVPLLERLRFLCISCTNLDEFFEIRVATVRHAQEFGLPPAPDGMRPTVILNAVHDLTTKLVHDQYNCWNQVLCPALAALGVGVLSHNSWNARQKRWLRGYFRNEIMPVLSPLGLDPAHPFPKIFNKTLNIVVVLNGIDAFGRAGHLAIVRAPRSLPRIIELPQHLSRDGSQNFVFLSSVLSAFVGELFPGMVVRGAYQFRVTRNSELVVDEDEVENLALALRNELVTRGYRLAVRLEIAEDCPTPIVRTLLQNFGLQENAVYRINGPVNLSRVSQVYDMVLRPELKYPPFNPRTLRNSDHIFEIIAKGDVLLYHPYDAFTAVLDLLRQAAADPDVLAIKQTLYRTGKDSTIVDALIQAARSGKDVTVVVELRARFDEEANLGLADKLQEAGVQVVYGVVGYKTHAKMLLIVRREGRKLRRYVHLGTGNYHSGTARIYTDLSLMTANAAIGKDVHQLFLQLSGLAPKMKLECLLQSPFTLHAGVLFRIERETKFARKGRPARIVAKMNALNEPQVVRALYVASQAGVQIDLIVRGACTLRPGVQDISENIRVRSIVGRFLEHSRVYWFANNGTPELFCASADWLERNLLRRVEICFPILNPDLAKRIYSDVLQSYLDDNLNAWELGSDGVYRKLLPETDHAPYSAQVALLESL

SEQ ID NO: 6810 - DNA, 2097 bp, Xylella fastidiosa
  CDS (1)..(2097): transl_table=11
atgtctaaatcttctcccattgaacctgtttcagcatctgatgtcagccagcagttccgtgatcctgggctgtatttgaacagggagctatcacagctcgacttcaattttcgagtgttggcacaggcattggatgagcaggtgccgttgttagagcggttgcgcttcctgtgtatttcttgcaccaatctggatgaattcttcgaaatccgtgttgctaccgtgcgccatgctcaggaattcggtttgccgccagcgcctgatgggatgagaccgacggtaatcctcaacgctgttcacgacctgacaaccaaactcgtccatgatcagtacaactgctggaaccaagtgctgtgtccggcacttgcctcccttggagtgggtgtactgagtcataacagttggaacgtgcgtcagaaacgttggctacgtggttactttcgcaacgaaatcatgccggtgttatcgccacttggtttagatcctgcgcatccatttccgaaaatattcaataaaaccttaaatattgtggtggtacttaacggtattgatgcttttggtcgtgctggtcatttggctatcgtgcgtgccccgcgttcgttgccgcgtattatcgagttgccccaacatctgtccagagatggctctcaaaacttcgtcttcttgtcctcagtactgtctgcttttgtcggtgagttgtttcctggcatggtggtcaagggggcttatcaatttcgggttactcgtaattctgaattggtggtggatgaggatgaagtcgagaatctggcgctggcgttgcgtaatgaattggtgacccgcggttatcgtcttgcagtcaggttagagatcgctgaggactgcccaatcccgattgtgcgtacattactgcagaattttgggttgcaagaaaacgctgtatatcggattaatggtcctgtcaatctgagccgagtgagtcaggtctatgacatggtgttgcgtccggaactgaaatatcccccgttcaatccacgcacggtgcgtaacagtgatcacattttcgagatcattgccaagggggatgtgttgttgtaccacccctacgatgcttttaccgcagtccttgatttgctgcgtcaggcggcggctgacccggatgtactggccatcaaacaaaccctctaccgtaccggcaaggattccaccatcgttgatgcgctgatccaagccgcacgtagtggcaaggatgtcactgtggtggttgagttgcgcgcgcgttttgacgaggaagccaacctcggtttggccgataagctgcaggaggctggggtacaagtggtctatggtgtggttggttacaagacccacgccaagatgttgctgattgtacgccgtgagggccgcaaactacgtcgctacgtgcatttgggcactggcaactaccatagtggtacggcacggatatataccgatttgagtttgatgacggctaatgcggcgatcggtaaagatgtgcatcaactatttctgcaattgtctggattagcacccaaaatgaagctggagtgcttattgcagtccccattcaccctgcatgcaggggtgttgttccggatcgaacgtgagaccacgttcgcccggaaggggtgccctgcccgcatcgttgccaagatgaatgcgctgaatgagccacaggtcgtacgcgcactgtacgtcgcctcgcaggcgggtgtgcaaattgatctgattgtgcgtggggcttgcacgttgcggcctggtgtgcagggtatatccgaaaacatccgcgtgcgttcaatcgtcggccgctttttggagcacagccgggtgtattggtttgctaataacggtacgcctgaactgttctgcgccagcgccgattggttggagcgcaatttgctacgtcgggtcgagatctgtttcccgatcttgaatccggatttggcgaaacgtatttattctgatgttttacagagttacttggatgacaacctcaatgcttgggaattggggagtgatggcgtttaccggaaactgctccccgagacagatcatgcgccatactcggcccaggcggctctactggagtctttatag

SEQ ID NO: 6811 - protein, 698 aa, Xylella fastidiosa
MSKSSPIEPVSASDVSQQFRDPGLYLNRELSQLDFNFRVLAQALDEQVPLLERLRFLCISCTNLDEFFEIRVATVRHAQEFGLPPAPDGMRPTVILNAVHDLTTKLVHDQYNCWNQVLCPALASLGVGVLSHNSWNVRQKRWLRGYFRNEIMPVLSPLGLDPAHPFPKIFNKTLNIVVVLNGIDAFGRAGHLAIVRAPRSLPRIIELPQHLSRDGSQNFVFLSSVLSAFVGELFPGMVVKGAYQFRVTRNSELVVDEDEVENLALALRNELVTRGYRLAVRLEIAEDCPIPIVRTLLQNFGLQENAVYRINGPVNLSRVSQVYDMVLRPELKYPPFNPRTVRNSDHIFEIIAKGDVLLYHPYDAFTAVLDLLRQAAADPDVLAIKQTLYRTGKDSTIVDALIQAARSGKDVTVVVELRARFDEEANLGLADKLQEAGVQVVYGVVGYKTHAKMLLIVRREGRKLRRYVHLGTGNYHSGTARIYTDLSLMTANAAIGKDVHQLFLQLSGLAPKMKLECLLQSPFTLHAGVLFRIERETTFARKGCPARIVAKMNALNEPQVVRALYVASQAGVQIDLIVRGACTLRPGVQGISENIRVRSIVGRFLEHSRVYWFANNGTPELFCASADWLERNLLRRVEICFPILNPDLAKRIYSDVLQSYLDDNLNAWELGSDGVYRKLLPETDHAPYSAQAALLESL

SEQ ID NO: 6812 - DNA, 22 bp, Artificial sequence
  primer
atgatccaagctatgccctctg

SEQ ID NO: 6813 - DNA, 21 bp, Artificial sequence
  primer
tcaaactgaacgtagttccgg

SEQ ID NO: 6814 - protein, 832 aa, Artificial sequence
  consensus sequence
  Variant (3)..(3): Xaa in position 3 is any amino acid
  Variant (5)..(5): Xaa in position 5 is any amino acid
  Variant (7)..(7): Xaa in position 7 is any amino acid
  Variant (10)..(10): Xaa in position 10 is any amino acid
  Variant (14)..(14): Xaa in position 14 is any amino acid
  Variant (15)..(15): Xaa in position 15 is any or no amino acid
  Variant (17)..(19): Xaa in position 17 to 19 is any amino acid
  Variant (20)..(22): Xaa in position 20 to 22 is any or no amino acid
  Variant (28)..(29): Xaa in position 28 to 29 is any amino acid
  Variant (31)..(32): Xaa in position 31 to 32 is any amino acid
  Variant (34)..(36): Xaa in position 34 to 36 is any amino acid
  Variant (43)..(44): Xaa in position 43 to 44 is any amino acid
  Variant (48)..(48): Xaa in position 48 is any amino acid
  Variant (50)..(62): Xaa in position 50 to 62 is any amino acid
  Variant (63)..(67): Xaa in position 63 to 67 is any or no amino acid
  Variant (69)..(69): Xaa in position 69 is any amino acid
  Variant (70)..(70): Xaa in position 70 is any or no amino acid
  Variant (72)..(74): Xaa in position 72 to 74 is any amino acid
  Variant (76)..(99): Xaa in position 76 to 99 is any amino acid
  Variant (100)..(100): Xaa in position 100 is any or no amino acid
  Variant (102)..(125): Xaa in position 102 to 125 is any amino acid
  Variant (126)..(127): Xaa in position 126 to 127 is any or no amino acid
  Variant (129)..(133): Xaa in position 129 to 133 is any amino acid
  Variant (135)..(135): Xaa in position 135 is any amino acid
  Variant (139)..(141): Xaa in position 139 to 141 is any amino acid
  Variant (143)..(144): Xaa in position 143 to 144 is any amino acid
  Variant (145)..(145): Xaa in position 145 is any or no amino acid
  Variant (150)..(152): Xaa in position 150 to 152 is any amino acid
  Variant (154)..(155): Xaa in position 154 to 155 is any amino acid
  Variant (157)..(180): Xaa in position 157 to 180 is any amino acid
  Variant (181)..(231): Xaa in position 181 to 231 is any or no amino acid
  Variant (233)..(254): Xaa in position 233 to 254 is any amino acid
  Variant (255)..(277): Xaa in position 255 to 277 is any or no amino acid
  Variant (280)..(280): Xaa in position 280 is any amino acid
  Variant (281)..(283): Xaa in position 281 to 283 is any or no amino acid
  Variant (285)..(292): Xaa in position 285 to 292 is any amino acid
  Variant (295)..(295): Xaa in position 295 is any amino acid
  Variant (298)..(299): Xaa in position 298 to 299 is any amino acid
  Variant (301)..(309): Xaa in position 301 to 309 is any amino acid
  Variant (310)..(311): Xaa in position 310 to 311 is any or no amino acid
  Variant (313)..(319): Xaa in position 313 to 319 is any amino acid
  Variant (321)..(322): Xaa in position 321 to 322 is any amino acid
  Variant (324)..(325): Xaa in position 324 to 325 is any amino acid
  Variant (327)..(328): Xaa in position 327 to 328 is any amino acid
  Variant (329)..(331): Xaa in position 329 to 331 is any or no amino acid
  Variant (335)..(346): Xaa in position 335 to 346 is any amino acid
  Variant (347)..(350): Xaa in position 347 to 350 is any or no amino acid
  Variant (352)..(366): Xaa in position 352 to 366 is any amino acid
  Variant (367)..(376): Xaa in position 367 to 376 is any or no amino acid
  Variant (378)..(380): Xaa in position 378 to 380 is any amino acid
  Variant (382)..(383): Xaa in position 382 to 383 is any amino acid
  Variant (385)..(392): Xaa in position 385 to 392 is any amino acid
  Variant (393)..(397): Xaa in position 393 to 397 is any or no amino acid
  Variant (399)..(414): Xaa in position 399 to 414 is any amino acid
  Variant (415)..(442): Xaa in position 415 to 442 is any or no amino acid
  Variant (444)..(449): Xaa in position 444 to 449 is any amino acid
  Variant (450)..(450): Xaa in position 450 is any or no amino acid
  Variant (452)..(452): Xaa in position 452 is any amino acid
  Variant (454)..(455): Xaa in position 454 to 455 is any amino acid
  Variant (458)..(459): Xaa in position 458 to 459 is any amino acid
  Variant (462)..(463): Xaa in position 462 to 463 is any amino acid
  Variant (464)..(464): Xaa in position 464 is any or no amino acid
  Variant (466)..(471): Xaa in position 466 to 471 is any amino acid
  Variant (474)..(474): Xaa in position 474 is any amino acid
  Variant (477)..(477): Xaa in position 477 is any amino acid
  Variant (479)..(479): Xaa in position 479 is any amino acid
  Variant (483)..(483): Xaa in position 483 is any amino acid
  Variant (488)..(491): Xaa in position 488 to 491 is any amino acid
  Variant (493)..(496): Xaa in position 493 to 496 is any amino acid
  Variant (499)..(500): Xaa in position 499 to 500 is any amino acid
  Variant (503)..(503): Xaa in position 503 is any amino acid
  Variant (504)..(504): Xaa in position 504 is any or no amino acid
  Variant (507)..(507): Xaa in position 507 is any amino acid
  Variant (509)..(511): Xaa in position 509 to 511 is any amino acid
  Variant (515)..(515): Xaa in position 515 is any amino acid
  Variant (521)..(522): Xaa in position 521 to 522 is any amino acid
  Variant (524)..(526): Xaa in position 524 to 526 is any amino acid
  Variant (528)..(529): Xaa in position 528 to 529 is any amino acid
  Variant (532)..(533): Xaa in position 532 to 533 is any amino acid
  Variant (535)..(536): Xaa in position 535 to 536 is any amino acid
  Variant (538)..(538): Xaa in position 538 is any amino acid
  Variant (541)..(544): Xaa in position 541 to 544 is any amino acid
  Variant (548)..(548): Xaa in position 548 is any amino acid
  Variant (550)..(553): Xaa in position 550 to 553 is any amino acid
  Variant (556)..(556): Xaa in position 556 is any amino acid
  Variant (558)..(563): Xaa in position 558 to 563 is any amino acid
  Variant (564)..(570): Xaa in position 564 to 570 is any or no amino acid
  Variant (572)..(572): Xaa in position 572 is any amino acid
  Variant (574)..(574): Xaa in position 574 is any amino acid
  Variant (580)..(582): Xaa in position 580 to 582 is any amino acid
  Variant (585)..(586): Xaa in position 585 to 586 is any amino acid
  Variant (590)..(593): Xaa in position 590 to 593 is any amino acid
  Variant (595)..(601): Xaa in position 595 to 601 is any amino acid
  Variant (603)..(606): Xaa in position 603 to 606 is any amino acid
  Variant (608)..(609): Xaa in position 608 to 609 is any amino acid
  Variant (611)..(611): Xaa in position 611 is any amino acid
  Variant (612)..(612): Xaa in position 612 is any or no amino acid
  Variant (614)..(621): Xaa in position 614 to 621 is any amino acid
  Variant (622)..(625): Xaa in position 622 to 625 is any or no amino acid
  Variant (627)..(629): Xaa in position 627 to 629 is any amino acid
  Variant (631)..(640): Xaa in position 631 to 640 is any amino acid
  Variant (642)..(643): Xaa in position 642 to 643 is any amino acid
  Variant (645)..(650): Xaa in position 645 to 650 is any amino acid
  Variant (652)..(652): Xaa in position 652 is any amino acid
  Variant (653)..(659): Xaa in position 653 to 659 is any or no amino acid
  Variant (661)..(662): Xaa in position 661 to 662 is any amino acid
  Variant (664)..(664): Xaa in position 664 is any amino acid
  Variant (666)..(666): Xaa in position 666 is any amino acid
  Variant (668)..(672): Xaa in position 668 to 672 is any amino acid
  Variant (674)..(675): Xaa in position 674 to 675 is any amino acid
  Variant (678)..(678): Xaa in position 678 is any amino acid
  Variant (681)..(681): Xaa in position 681 is any amino acid
  Variant (685)..(687): Xaa in position 685 to 687 is any amino acid
  Variant (689)..(690): Xaa in position 689 to 690 is any amino acid
  Variant (693)..(693): Xaa in position 693 is any amino acid
  Variant (695)..(695): Xaa in position 695 is any amino acid
  Variant (697)..(697): Xaa in position 697 is any amino acid
  Variant (700)..(701): Xaa in position 700 to 701 is any amino acid
  Variant (703)..(703): Xaa in position 703 is any amino acid
  Variant (705)..(705): Xaa in position 705 is any amino acid
  Variant (708)..(708): Xaa in position 708 is any amino acid
  Variant (710)..(710): Xaa in position 710 is any amino acid
  Variant (713)..(713): Xaa in position 713 is any amino acid
  Variant (720)..(720): Xaa in position 720 is any amino acid
  Variant (722)..(724): Xaa in position 722 to 724 is any amino acid
  Variant (726)..(733): Xaa in position 726 to 733 is any amino acid
  Variant (734)..(746): Xaa in position 734 to 746 is any or no amino acid
  Variant (750)..(750): Xaa in position 750 is any amino acid
  Variant (752)..(752): Xaa in position 752 is any amino acid
  Variant (756)..(757): Xaa in position 756 to 757 is any amino acid
  Variant (761)..(763): Xaa in position 761 to 763 is any amino acid
  Variant (765)..(783): Xaa in position 765 to 783 is any amino acid
  Variant (784)..(784): Xaa in position 784 is any or no amino acid
  Variant (786)..(794): Xaa in position 786 to 794 is any amino acid
  Variant (795)..(795): Xaa in position 795 is any or no amino acid
  Variant (797)..(808): Xaa in position 797 to 808 is any amino acid
  Variant (809)..(831): Xaa in position 809 to 831 is any or no amino acid
REXSXLXFNXRVLXXAXXXXXXPLLERXXFXXIXXXNLDEFFXXRVAXLXXXXXXXXXXXXXXXXXXGXXPXXXLXXXXXXXXXXXXXXXXXXXXXXXXXLXXXXXXXXXXXXXXXXXXXXXXXXXXFXXXXXPXLTPXXXDXXXHPFPXXXNXXLXXXXXXXXXXXXXXXXXXXXXXXXXXXXXXXXXXXXXXXXXXXXXXXXXXXXXXXXXXXXXXXXXXXXXXXXXXXRXXXXXXXXXXXXXXXXXXXXXXXXXXXXXXXXXXXXXXXXXXXXXLFXXXXGXXXXXXXXFRXTRXXDXXXXXXXXXXXLXXXXXXXLXXRXXGXXXXXRLEXXXXXXXXXXXXXXXXLXXXXXXXXXXXXXXXXXXXXXXXXXGXXXLXXLXXXXXXXXXXXXXLXXXXXXXXXXXXXXXXXXXXXXXXXXXXXXXXXXXXXXXXXXXXFXXXXXXXDXLXXHPXXSFXXXVXXXXXXAAXDPXVXAIKXTLYRXXXXSXXXXALXXAAXXGKXVXXXVELXARFDEXXNXXXAXXLEXXGXXVXYGXXXXKTHXKXXXXVRXEXXXXXXXXXXXXXYXHXGTGNYXXXTAXXYTDXXXXTXXXXXXXDXXXXFXXLXXGXXXXXXXXXXXXLXXXPXXXXXXXXXXIXXEXXXXXXGXXXXXXXXIXXKXNXLXXXXXIXXLYXASXAGVXXXLXXRGXCXLXPGXXGXSXNIXVXSIXGRFLEHXRXXXFXXXXXXXXXXXXXXXXXXXXXSADXMXRNLXXRVEXXXPXXXXXXXXXXXXXXXXXXXXDXXXXXXXXXXGXXXXXXXXXXXXXXXXXXXXXXXXXXXXXXXXXXXQ

SEQ ID NO: 6815 - protein, 37 aa, Artificial sequence
  protein pattern
  Variant (2)..(2): Xaa in position 2 is any amino acid
  Variant (4)..(4): Xaa in position 4 is Ala, Gly or Ser
  Variant (5)..(5): Xaa in position 5 is Phe, Ile, Leu, Met or Val
  Variant (6)..(6): Xaa in position 6 is any amino acid
  Variant (7)..(7): Xaa in position 7 is Asp or Glu
  Variant (8)..(10): Xaa in position 8 to 10 is any amino acid
  Variant (11)..(11): Xaa in position 11 is Ile, Leu or Val
  Variant (12)..(13): Xaa in position 12 to 13 is any amino acid
  Variant (16)..(16): Xaa in position 16 is any or no amino acid
  Variant (18)..(18): Xaa in position 18 is any or no amino acid
  Variant (20)..(21): Xaa in position 20 to 21 is any amino acid
  Variant (24)..(24): Xaa in position 24 is any amino acid
  Variant (25)..(25): Xaa in position 25 is Ile or Val
  Variant (26)..(29): Xaa in position 26 to 29 is any amino acid
  Variant (32)..(32): Xaa in position 32 is any amino acid
  Variant (34)..(34): Xaa in position 34 is Ala, Cys, Gly, Ser, Thr or Val
  Variant (36)..(36): Xaa in position 36 is any amino acid
  Variant (37)..(37): Xaa in position 37 is Ala, Pro, Ser or Thr
KXNXXXXXXXXXXLYXAXSXXGVXXXXXXRGXCXLXX

SEQ ID NO: 6816 - protein, 56 aa, Artificial sequence
  protein pattern
  Variant (2)..(2): Xaa in position 2 is any or no amino acid
  Variant (4)..(5): Xaa in position 4 to 5 is any or no amino acid
  Variant (8)..(8): Xaa in position 8 is Asp, Glu, Asn, Gln or Ser
  Variant (10)..(10): Xaa in position 10 is any amino acid
  Variant (11)..(11): Xaa in position 11 is Ala, Cys, Thr or Val
  Variant (12)..(12): Xaa in position 12 is Ile, Leu, Met or Val
  Variant (13)..(13): Xaa in position 13 is Ile, Leu or Val
  Variant (15)..(15): Xaa in position 15 is Ile, Leu or Val
  Variant (16)..(16): Xaa in position 16 is any amino acid
  Variant (22)..(23): Xaa in position 22 to 23 is any amino acid
  Variant (25)..(25): Xaa in position 25 is Ile, Leu, Met or Val
  Variant (26)..(27): Xaa in position 26 to 27 is any amino acid
  Variant (29)..(30): Xaa in position 29 to 30 is any amino acid
  Variant (32)..(34): Xaa in position 32 to 34 is any amino acid
  Variant (36)..(37): Xaa in position 36 to 37 is any amino acid
  Variant (39)..(39): Xaa in position 39 is any amino acid
  Variant (40)..(40): Xaa in position 40 is Phe or Tyr
  Variant (42)..(45): Xaa in position 42 to 45 is any amino acid
  Variant (47)..(47): Xaa in position 47 is any amino acid
  Variant (49)..(49): Xaa in position 49 is Ala, Cys, Gly, Ser or Thr
  Variant (51)..(53): Xaa in position 51 to 53 is any amino acid
  Variant (54)..(54): Xaa in position 54 is Ala, Ile, Leu or Val
  Variant (55)..(55): Xaa in position 55 is Ile, Leu or Val
  Variant (56)..(56): Xaa in position 56 is Lys or Arg
AXAXXGKXVXXXXEXXARFDEXXNXXXAXXLXXXGXXVXXGXXXXKXHXKXXXXXX

SEQ ID NO: 6817 - protein, 41 aa, Artificial sequence
  protein pattern
  Variant (2)..(2): Xaa in position 2 is any amino acid
  Variant (3)..(3): Xaa in position 3 is any or no amino acid
  Variant (5)..(5): Xaa in position 5 is any amino acid
  Variant (11)..(13): Xaa in position 11 to 13 is any amino acid
  Variant (14)..(14): Xaa in position 14 is Ala, Asn or Thr
  Variant (15)..(15): Xaa in position 15 is Ala, Gly, Ser or Thr
  Variant (16)..(17): Xaa in position 16 to 17 is any amino acid
  Variant (19)..(19): Xaa in position 19 is any amino acid
  Variant (21)..(21): Xaa in position 21 is any amino acid
  Variant (22)..(22): Xaa in position 22 is Gly or Ser
  Variant (23)..(23): Xaa in position 23 is any amino acid
  Variant (24)..(24): Xaa in position 24 is Phe, Ile, Leu or Met
  Variant (25)..(25): Xaa in position 25 is Ser or Thr
  Variant (26)..(30): Xaa in position 26 to 30 is any amino acid
  Variant (31)..(31): Xaa in position 31 is Ala, Cys, Gly, Ser, Thr or Val
  Variant (32)..(32): Xaa in position 32 is any amino acid
  Variant (34)..(37): Xaa in position 34 to 37 is any amino acid
  Variant (38)..(38): Xaa in position 38 is Phe, Leu or Met
  Variant (39)..(40): Xaa in position 39 to 40 is any amino acid
  Variant (41)..(41): Xaa in position 41 is Ile, Leu, Met or Val
YXXHXGTGNYXXXXXXXYXDXXXXXXXXXXXXDXXXXXXXX

SEQ ID NO: 6818 - protein, 29 aa, Artificial sequence
  protein pattern
  Variant (5)..(7): Xaa in position 5 to 7 is any amino acid
  Variant (9)..(10): Xaa in position 9 to 10 is any or no amino acid
  Variant (12)..(14): Xaa in position 12 to 14 is any amino acid
  Variant (15)..(16): Xaa in position 15 to 16 is any or no amino acid
  Variant (18)..(18): Xaa in position 18 is Leu or Met
  Variant (21)..(22): Xaa in position 21 to 22 is Phe or Tyr
  Variant (23)..(24): Xaa in position 23 to 24 is any amino acid
  Variant (26)..(26): Xaa in position 26 is any amino acid
  Variant (27)..(27): Xaa in position 27 is Ala, Gly or Ser
  Variant (28)..(28): Xaa in position 28 is any amino acid
  Variant (29)..(29): Xaa in position 29 is Ile, Leu or Val
PLLEXXXFXXIXXXXXNXDEXXXXRXXXX

SEQ ID NO: 6819 - protein, 27 aa, Artificial sequence
  protein pattern
  Variant (2)..(3): Xaa in position 2 to 3 is any or no amino acid
  Variant (6)..(6): Xaa in position 6 is any amino acid
  Variant (8)..(8): Xaa in position 8 is any amino acid
  Variant (9)..(9): Xaa in position 9 is Ala, Glu, Gly, Ser or Thr
  Variant (12)..(12): Xaa in position 12 is any amino acid
  Variant (13)..(13): Xaa in position 13 is Asn, Thr or Val
  Variant (14)..(14): Xaa in position 14 is Phe, Ile, Leu or Val
  Variant (17)..(17): Xaa in position 17 is Ala, Ser, Thr or Val
  Variant (18)..(18): Xaa in position 18 is Ala, Asp, Gly, Asn, Ser or Thr
  Variant (19)..(20): Xaa in position 19 to 20 is any amino acid
  Variant (22)..(22): Xaa in position 22 is any amino acid
  Variant (23)..(23): Xaa in position 23 is Phe, Ile, Leu or Val
  Variant (24)..(24): Xaa in position 24 is Ile, Met or Val
  Variant (25)..(26): Xaa in position 25 to 26 is any amino acid
  Variant (27)..(27): Xaa in position 27 is Leu or Met
AXXDPXVXXIKXXXYRXXXXSXXXXXX

SEQ ID NO: 6820 - protein, 32 aa, Artificial sequence
  protein pattern
  Variant (2)..(6): Xaa in position 2 to 6 is any amino acid
  Variant (7)..(7): Xaa in position 7 is any or no amino acid
  Variant (9)..(9): Xaa in position 9 is Ile, Leu or Val
  Variant (10)..(10): Xaa in position 10 is Ile or Leu
  Variant (11)..(11): Xaa in position 11 is Ser, Thr or Val
  Variant (13)..(13): Xaa in position 13 is any amino acid
  Variant (14)..(14): Xaa in position 14 is Ala, Gly, Ser or Val
  Variant (15)..(15): Xaa in position 15 is Phe, Ile, Leu or Val
  Variant (17)..(19): Xaa in position 17 to 19 is any or no amino acid
  Variant (23)..(25): Xaa in position 23 to 25 is any amino acid
  Variant (26)..(26): Xaa in position 26 is Gly, Asn or Ser
  Variant (27)..(27): Xaa in position 27 is any amino acid
  Variant (28)..(28): Xaa in position 28 is Ala, Gly, Ser or Thr
  Variant (29)..(29): Xaa in position 29 is any amino acid
  Variant (30)..(30): Xaa in position 30 is Ala, Gly, Asn, Ser or Thr
  Variant (31)..(31): Xaa in position 31 is Phe, Ile, Leu, Met or Val
  Variant (32)..(32): Xaa in position 32 is Ala, Gly, Ile, Leu or Val
FXXXXXXPXXXPXXXDXXXPFPXXXXXXXXXX

SEQ ID NO: 6821 - protein, 14 aa, Artificial sequence
  protein pattern
  Variant (4)..(4): Xaa in position 4 is any amino acid
  Variant (6)..(6): Xaa in position 6 is any amino acid
  Variant (9)..(9): Xaa in position 9 is Leu or Met
  Variant (10)..(11): Xaa in position 10 to 11 is any amino acid
  Variant (13)..(13): Xaa in position 13 is Ile or Val
SADXMXRNXXXRXE

SEQ ID NO: 6822 - protein, 18 aa, Artificial sequence
  protein pattern
  Variant (3)..(3): Xaa in position 3 is Phe, Ile or Leu
  Variant (4)..(4): Xaa in position 4 is Gly, Ser or Thr
  Variant (5)..(5): Xaa in position 5 is any amino acid
  Variant (6)..(6): Xaa in position 6 is Ile, Leu or Met
  Variant (7)..(7): Xaa in position 7 is any amino acid
  Variant (10)..(10): Xaa in position 10 is any amino acid
  Variant (14)..(15): Xaa in position 14 to 15 is any amino acid
  Variant (16)..(16): Xaa in position 16 is Ala, Cys, Gly, Ser, Thr or Val
  Variant (17)..(17): Xaa in position 17 is any amino acid
  Variant (18)..(18): Xaa in position 18 is Asp, Glu, Asn, Arg or Ser
REXXXXXFNXRVLXXXXX

SEQ ID NO: 6823 - DNA, 741 bp, Saccharomyces cerevisiae
  CDS (1)..(741)
atggcatctaatcaacctggcaagtgttgctttgaaggagtttgtcacgatggaacacccaagggtcgtcgtgaagaaatcttcggtttagatacttatgcagcaggctctacatctcccaaggaaaaagttatagttatcttgacagatgtgtatggcaataaattcaacaatgttttattaacggccgacaaatttgctagtgctgggtacatggtctttgttcccgatattttattcggcgatgctatctcatcggacaaaccaattgatcgtgatgcctggtttcaaagacattctcctgaagtcaccaagaaaattgttgatggattcatgaagttgttaaaacttgaatatgacccaaagtttattggcgttgtgggttactgttttggtgcaaagtttgccgtccaacacattagtggcgacgggggtcttgccaatgctgcagccattgcacatccatctttcgtcagcatcgaggaaattgaagcaattgatagcaagaaaccaatattgatttcagcagcggaagaggatcacatctttccggcaaacttaagacacttaacggaggaaaaattaaaggataatcacgctacttaccagttagacctcttcagtggtgtggctcacgggtttgcagcaagaggcgatatatccatacctgccgtaaaatatgcgaaggagaaagtcttgctcgaccaaatatactggttcaatcatttttcgaatgtttaa

SEQ ID NO: 6824 - protein, 246 aa, Saccharomyces cerevisiae
MASNQPGKCCFEGVCHDGTPKGRREEIFGLDTYAAGSTSPKEKVIVILTDVYGNKFNNVLLTADKFASAGYMVFVPDILFGDAISSDKPIDRDAWFQRHSPEVTKKIVDGFMKLLKLEYDPKFIGVVGYCFGAKFAVQHISGDGGLANAAAIAHPSFVSIEEIEAIDSKKPILISAAEEDHIFPANLRHLTEEKLKDNHATYQLDLFSGVAHGFAARGDISIPAVKYAKEKVLLDQIYWFNHFSNV

SEQ ID NO: 6825 - DNA, 771 bp, Neurospora crassa
  CDS (1)..(771)
atggcctctaaccctccctccaagtgctgcgtcatgggcttccgccatgagggcgagccaaccggcaccatgaccaaggtcgccgacaagtgggacgcctacatcgcccagcccactggctcccagaagaccggcaaagccctcctcttccttcccgacatcatcggcatctggcaaaactccaagctgatggccgaccagctggccgcccagggctaccttaccatggttctcgacatcctcaacggcgacccgctcccgctcaaccgccccgacgacttcgacatcatgggctggctgaccaagggcagcaccggcgataacccgcataccaaggacttcgttgatcccattgtgcaggccggaatcaaggctttgaaggagcagtatggagcgaccaagatcggagcgttgggatactgctttggtgccaagtcccttgtccgcaacatgacggccaccgccccctacaccggcatcgacgtcggctttgtcgcccatccctccttcgtcgaggaggaagagctcgccgccatctccggccctttggccattgccgccgccgagactgactccatcttccctgccgagctgcgccacaagtccgaggagatcctcaaggagacgggtctgccctaccaggtcaccctgtactctggcgtctcccacggcttcgccatgcgcgccgatctcagcaagaagccggagaagtttgcgagggagcaggcgtttgcgcaggctgtcgcttggtttggagagtatttggagtaa

SEQ ID NO: 6826 - protein, 256 aa, Neurospora crassa
MASNPPSKCCVMGFRHEGEPTGTMTKVADKWDAYIAQPTGSQKTGKALLFLPDIIGIWQNSKLMADQLAAQGYLTMVLDILNGDPLPLNRPDDFDIMGWLTKGSTGDNPHTKDFVDPIVQAGIKALKEQYGATKIGALGYCFGAKSLVRNMTATAPYTGIDVGFVAHPSFVEEEELAAISGPLAIAAAETDSIFPAELRHKSEEILKETGLPYQVTLYSGVSHGFAMRADLSKKPEKFAREQAFAQAVAWFGEYLE

SEQ ID NO: 6827 - DNA, 705 bp, Eremothecium gossypii
  CDS (1)..(705)
atgtcgagctgctgtgtacaaggagcgcgccacgaaggcgacagcgcaggtagactgcgcgaagtgtacggattagagacatacgaggtgggtgcagggacacgggtgatcgtggtgctaacggatatatacgggcaccgctttaaaaacgtgcagttaatcgcggaccagctagccgaggcaggttaccgcgttcttgtaccggatatcctacagggcgatgcagtcgagcggttggatgggagcgtgaacttcggagagtggctggagaggcacggcccggcggtaacggggaagttagtagccgagtacatgcagcgggtgcgcgagggaggtgccagtttcgtcggcgtgacgggatactgtttcggtgcgaagtacgccgtgcaacaaattgggccggatgggcatgcggacgcatgtgcggtcgcgcacccgtcgtttcttgaactggaagaggtagcacgggtgcggaagccgatactgatctcggctgcggagaccgatcagcattttcctgcggagacgcggtgggcggcggagaaggagttggccgggatttgcgccacctatcagatcgacttgttcagcggcgttgtgcacggcttcgctgtgcgtggcgatctggctgacgaggccgtgcgttacgcgatgggcaaggttgtgggcgaccagatttgctggatggggcgcttcgctaagtga

SEQ ID NO: 6828 - protein, 234 aa, Eremothecium gossypii
MSSCCVQGARHEGDSAGRLREVYGLETYEVGAGTRVIVVLTDIYGHRFKNVQLIADQLAEAGYRVLVPDILQGDAVERLDGSVNFGEWLERHGPAVTGKLVAEYMQRVREGGASFVGVTGYCFGAKYAVQQIGPDGHADACAVAHPSFLELEEVARVRKPILISAAETDQHFPAETRWAAEKELAGICATYQIDLFSGVVHGFAVRGDLADEAVRYAMGKVVGDQICWMGRFAK

SEQ ID NO: 6829 - DNA, 702 bp, Magnaporthe grisea 70-15
  CDS (1)..(702)
atggtgatgatagagaacaagtgggatgcatatcttgcgctgccgccagagggcaaggcccacaaagacgtcgtgctcctctacctgcccgacgtccttggcatctggcagaacagcaagctgatggcagacgactttgctgcccaaggctacacaaccctggtggttgacactttcaacggcgacccggtgccgctcaacatctcacttacggccattgagaagtttgactttgtcggctggagggactttggcacgaacggtgacaacccccacacctatgaggctgttgaccccattatagaggcggccatcaaggtgctcaagagggaccacggcgccaagaggattggcgccgtcgggtattgcttcggagccaagtatgtcgtccgtcacttcaagaatggtataaacgtgggctttctcggtcacccttccgacgtgacccaggaggagctcgacaccatctcgggcccgttggccatcgccgcagccgagacggacagcatcttcacgactgaaaagcgccacctttccgaggagatcctcaagcgctcagggcagccttaccagatcaacctgtattctggtgtgcttcacgggtttgccgtccgcggcaacatgtccaacaaggttgagcggtacgccaaggagcaggcttttatccaggccgtcacttggttcaacacctggttgttgtga

SEQ ID NO: 6830 - protein, 233 aa, Magnaporthe grisea 70-15
MVMIENKWDAYLALPPEGKAHKDVVLLYLPDVLGIWQNSKLMADDFAAQGYTTLVVDTFNGDPVPLNISLTAIEKFDFVGWRDFGTNGDNPHTYEAVDPIIEAAIKVLKRDHGAKRIGAVGYCFGAKYVVRHFKNGINVGFLGHPSDVTQEELDTISGPLAIAAAETDSIFTTEKRHLSEEILKRSGQPYQINLYSGVLHGFAVRGNMSNKVERYAKEQAFIQAVTWFNTWLL

SEQ ID NO: 6831 - DNA, 774 bp, Gibberella zeae PH-1
  CDS (1)..(774)
atggaaaaagtactcgctaagcccgctgacctatgctgcctcaagggtggcttccacacaggagaagcaaccggttctatcacgcaaattgatggcattgatacctacgttgccaaacctcggccgggtacggagaatggaaatgttctcctcctattccctgatgctttcggattgcatgtcaacagttttctggtgatggatgcctttgccgagtgcggctatctgactctcggtgtcgactatttccttggtgatgctgtgacaaagcactcgttgactcccttgagtgacccaaactttgactttgagtcgtggaagaacaagcatcttcatgcttctgaggaagctgctgctagatgggtcaaggctgtcaaggcagagtacggcactagcgagagtgtcaagttcgcagccgttggatactgctggggtgctcgattcgtcactcaccaattgtcagccgagggtatctgttcagtcggagccattgcgcacccatccttcctcaatgagagcgatgtatttaagataaaggaacccatcttcctctccgtccctgccacagacaagctattcgagcctgagcagcgtagccgaactgttgaaatcttgagccaaggaagcggaagattcaacatgcagatcttctccaacgttggtcacggctttgcgtcccgagcgcgtctcactgatccatatgaaaaatgggccaaggagcaacatttcaaaagctttgttgactggtttgacttttggctcgcaaagaagtaa

SEQ ID NO: 6832 - protein, 257 aa, Gibberella zeae PH-1
MEKVLAKPADLCCLKGGFHTGEATGSITQIDGIDTYVAKPRPGTENGNVLLLFPDAFGLHVNSFLVMDAFAECGYLTLGVDYFLGDAVTKHSLTPLSDPNFDFESWKNKHLHASEEAAARWVKAVKAEYGTSESVKFAAVGYCWGARFVTHQLSAEGICSVGAIAHPSFLNESDVFKIKEPIFLSVPATDKLFEPEQRSRTVEILSQGSGRFNMQIFSNVGHGFASRARLTDPYEKWAKEQHFKSFVDWFDFWLAKK

SEQ ID NO: 6833 - DNA, 807 bp, Gibberella zeae PH-1
  CDS (1)..(807)
atgggacagtcttcttctacacaagcagagttcaagaacgagagcttcttagctaagcccagtggtgcctgctgtctcaaaggcacaattcatgagggcgagtccagaggcacatgggaaacaatcgctgatgtcgaaacttacataacaagacccccaaaagaaaaggcaaatgggaatattcttctctattttccagatgtatggggcatgttcccgaacggcctcttggtcatggacgcttttgccgatgcaggctatctagtcttaggcctggactactttcgaggagacccagtctggaagcatcgcaaggaccgccatgacaacaggaatccagattttgactatgaggcgtggaagcgcaagcacacagcgtttgccgacaaagcggtcccaaaatgggtcgacgctgtcaagaagagctacggaacaagtacatccaaatttgcctgcgttggctactgcttcggtgccccgtatgtctgtaacgaactcaagggtgacaccgtgacagtcggtgcttttgctcacccggcgtttctcaaggaacatcattttcaagatctgaaaaaaccgctattcctttcatgctctgaaattgatcacacattcgacgtcccatctagacgtcgcgcactggacatcttgcaaaccaacaaaaagacatttcattaccaggtgttctctggtgttgaacatgggttcgccttaagaggtgaccagaatgacccctatcaaagatgggtcaaggagcagagtcttgcgggtatagtgtcgtggttcgattattggttatcacaatga

SEQ ID NO: 6834 - protein, 268 aa, Gibberella zeae PH-1
MGQSSSTQAEFKNESFLAKPSGACCLKGTIHEGESRGTWETIADVETYITRPPKEKANGNILLYFPDVWGMFPNGLLVMDAFADAGYLVLGLDYFRGDPVWKHRKDRHDNRNPDFDYEAWKRKHTAFADKAVPKWVDAVKKSYGTSTSKFACVGYCFGAPYVCNELKGDTVTVGAFAHPAFLKEHHFQDLKKPLFLSCSEIDHTFDVPSRRRALDILQTNKKTFHYQVFSGVEHGFALRGDQNDPYQRWVKEQSLAGIVSWFDYWLSQ

SEQ ID NO: 6835 - DNA, 753 bp, Gibberella zeae PH-1
  CDS (1)..(753)
atggcttctaaccaacccgcaaagtgctgcacagagggtgtgcgccacgaaggcgagcccactggcaagatgatcaagcttcccagcggtatcgctgcttaccttgcgaccgctcccgagggcaaggctcaccagggcgctggtattgtctacgtcgcagatatctttggtatctggaacaacagcaaactcatggccgaccaattcgccgccaatggctacaccactattatccccgacctcttcaacggcgatgtgatgccctaccccccagtcgatatcgatatcatgagctggatcacaaagggtgccaacggcgacaacccccacactcccgctcaagtcgaccccattgttgtcgaggctatcaagtacctccaggaccagggtctctccaagattggatctgtcggatactgcttcggcgccaagtacgttatccgcaactacaaggccggtatcaaggtcggctacgtcgctcacccctctttcgtcgaggaggaagagctcaaggccatcgagggtcctctctccatcgctgccgcccaaaccgacagcatcttccccgccaacctgcgacaccgttccgaggagatcctcatcgagaccggcaagcccttccagatcaacctatactctcacgttgagcacggatttgctgtgcgcagcgatctctccaacaaggccaaggtgtttgctaaggagcaagctttcgtccaggctgttcagtggttcgatgagcacctgatctaa

SEQ ID NO: 6836 - protein, 250 aa, Gibberella zeae PH-1
MASNQPAKCCTEGVRHEGEPTGKMIKLPSGIAAYLATAPEGKAHQGAGIVYVADIFGIWNNSKLMADQFAANGYTTIIPDLFNGDVMPYPPVDIDIMSWITKGANGDNPHTPAQVDPIVVEAIKYLQDQGLSKIGSVGYCFGAKYVIRNYKAGIKVGYVAHPSFVEEEELKAIEGPLSIAAAQTDSIFPANLRHRSEEILIETGKPFQINLYSHVEHGFAVRSDLSNKAKVFAKEQAFVQAVQWFDEHLI

SEQ ID NO: 6837 - DNA, 750 bp, Gibberella zeae PH-1
  CDS (1)..(750)
atggcatctcatcctcctgctgcttgctgcacagttgcaagccttcatgaaggcgagccgacaggttccataatccagattgataacaagatcaatggctatctggccaagcctttgtccggtcaaactaacaaggcaattctgtatcttccagatatctttgggatatggcagaacagtaaactcatggcagatgcctttgctgcagagggttatatttgtcttgtacttgatacctttaatggtgaccctgtgccgttgcagatgcctgatggcttcgatatcatgaaatggctcaacgagggatctgacggcaagaatccacatactacgcaagcagtagacccaattgtcgtctctggtatcaattacctcaagaacatcggtcttgaacaaattgctgcggttgggtactgtcttggtgccaagcatttaattcgacactttaaaagtggcatcaacgtgggattcatcgcccatccgtcctttgtcgagtccgaagagctggcctccgtcaccggacctctttccatcgctgcagcagagctagatgacctatttaccgtagaaaagcgccatgagagcgagagtatcctgtcaaagtcaaagcaagactttcagattaatcttttctctggtgtacatcatggattcgcagtcaagggagatatgagtgacgagagacagttgtttgccaaggagcaagcttttcgtcaagctattgcttggttcaaaaggtctataaaataa

SEQ ID NO: 6838 - protein, 249 aa, Gibberella zeae PH-1
MASHPPAACCTVASLHEGEPTGSIIQIDNKINGYLAKPLSGQTNKAILYLPDIFGIWQNSKLMADAFAAEGYICLVLDTFNGDPVPLQMPDGFDIMKWLNEGSDGKNPHTTQAVDPIVVSGINYLKNIGLEQIAAVGYCLGAKHLIRHFKSGINVGFIAHPSFVESEELASVTGPLSIAAAELDDLFTVEKRHESESILSKSKQDFQINLFSGVHHGFAVKGDMSDERQLFAKEQAFRQAIAWFKRSIK

SEQ ID NO: 6839 - DNA, 744 bp, Candida glabrata CBS 138
  CDS (1)..(744)
atggcttcaaaaatgcttggtcaatgctgctttaaaggattctacagaaaaggtgaaaccaaaggtctgcataaggatatttttggtgttgatagctatgttgttggattggaaaatcccagtgataaagtagttgtcatcatgaccgatgtttatggtaatagactaaacaatgtacttttaaccgcagatcaaatcgcagaaagtggctaccaggtgtacgttcctgatattttatttaataaccccgcactagatctcaatgtcccactggatatacctgcttggatggcatctcatcctgttgacagggcgcacaatttagtgacaaaatacttatctgacctaagaaaacacgtgaaccccaagtttgttggtattattggctattgctacggagctaagttcgccattaagcaaattgattcagcttcaggtattgtcgacgcttgcgccatagcccacccatcactagtgactattgaggatgttgcggccatcgggaaaccattgctgatttcggccgccgaggaggatgccatttttccagaggagatgagacacatgacggaagccaaattgaaggaaattggtgctagatatgaaattgatctctttagcggtgttgaacatggatttgcatctaggggtgatgtttccaacccagttgtcaagtttgctatgaacaaggcgttggctgatcagctatactggtttgatcattttgcctcggggggtcagtaa

SEQ ID NO: 6840 - protein, 247 aa, Candida glabrata CBS 138
MASKMLGQCCFKGFYRKGETKGLHKDIFGVDSYVVGLENPSDKVVVIMTDVYGNRLNNVLLTADQIAESGYQVYVPDILFNNPALDLNVPLDIPAWMASHPVDRAHNLVTKYLSDLRKHVNPKFVGIIGYCYGAKFAIKQIDSASGIVDACAIAHPSLVTIEDVAAIGKPLLISAAEEDAIFPEEMRHMTEAKLKEIGARYEIDLFSGVEHGFASRGDVSNPVVKFAMNKALADQLYWFDHFASGGQ

SEQ ID NO: 6841 - DNA, 744 bp, Candida glabrata CBS 138
  CDS (1)..(744)
atggcttctaacccaccaggaaaatgttgttttgaaggcttttaccatgaaggtcaagccaagggtactcataaggatgtctgcggcgttgacacctatgttaccggtgctgagaactcttccgatagagttattgttattttgacagatatttacggtaacagattgaacaatgtccttttgactgctgatcaaatggcaactgattgttaccaagtctacattccagacatattgttcaatgaccctgttgtcgctcttgatggctctaccgacttcaacgcttggttggctgctcaccctgctgagaaagttcaagagctagttaccaaatacttgactgacttgagagctcaattgaagcctaagttcttggctgtcgtgggctactgttacggtgccaaatttgctattcagcaaattggtgctaacccattggctgattgttgtgccattgctcatccatctttcgtttcaattgaagaagtcgatgctatctcgaagccagttttgatttccgctgccgaagaagatcctatcttcccagaagaattgagacatcaaactgaagccaagctaaaggaaaataaggctagataccagttggatttgttcagcggtgtttctcatgggtttgctgctagaggtgatacttctaatccggttgtgaagtacgctaaggagaaggtattagtagaccaattgtactggtttaactatttctccggttgctgtcaaaaataa

SEQ ID NO: 6842 - protein, 247 aa, Candida glabrata CBS 138
MASNPPGKCCFEGFYHEGQAKGTHKDVCGVDTYVTGAENSSDRVIVILTDIYGNRLNNVLLTADQMATDCYQVYIPDILFNDPVVALDGSTDFNAWLAAHPAEKVQELVTKYLTDLRAQLKPKFLAVVGYCYGAKFAIQQIGANPLADCCAIAHPSFVSIEEVDAISKPVLISAAEEDPIFPEELRHQTEAKLKENKARYQLDLFSGVSHGFAARGDTSNPVVKYAKEKVLVDQLYWFNYFSGCCQK

SEQ ID NO: 6843 - DNA, 747 bp, Kluyveromyces lactis NRRL Y-1140
  CDS (1)..(747)
atggcttccaatcctccaggtaagtgctgcgctcaaggtttttatcatgaaggtaccccagctggtaccactactagtctttatgggttcgagacctatgtggctgggcccgaatccttgaagaatgaacatgttttggtcattgtaacagatatttacggtattaaggttaacaacgttttgctaatcgctgatcaattggctgcagctgggttcagagtctatgtaccagattttttgtttaacgatgaagtcgtagctttggacggctctttcgatttcaagtcttggctagaaaggcacagcgccgaaaagacccacggtctagtccaagatttcttgaccaagttgaaggaggacactaacccaaagaagattggtgttatcggtcactgtttcggtgccaaatacgctttattacaaatcaatgaaaaagtcggtttggctgatgcagctgcccttgctcacccatcattcgttgagatcgaagaagtggaagcagttggtaaaaagccagtgctgatttctgcagctgaaactgataacatcttccctgaagaattaagatataagaccgaagaagctttaaaaaaacaaggcagctactaccaaatcaatgtatttggcggtgtttcccatgggtttgctgtcagaggtgacttaagcattccagcagtgagatatgctcaagacaaaaccatcgaagaccaaatttcattcttcaaattcttcttcaattgcatctga

SEQ ID NO: 6844 - protein, 248 aa, Kluyveromyces lactis NRRL Y-1140
MASNPPGKCCAQGFYHEGTPAGTTTSLYGFETYVAGPESLKNEHVLVIVTDIYGIKVNNVLLIADQLAAAGFRVYVPDFLFNDEVVALDGSFDFKSWLERHSAEKTHGLVQDFLTKLKEDTNPKKIGVIGHCFGAKYALLQINEKVGLADAAALAHPSFVEIEEVEAVGKKPVLISAAETDNIFPEELRYKTEEALKKQGSYYQINVFGGVSHGFAVRGDLSIPAVRYAQDKTIEDQISFFKFFFNCI

SEQ ID NO: 6845 - DNA, 723 bp, Debaryomyces hansenii CBS767
  CDS (1)..(723)
atggcatcaaataaaccaggcgcatgctgcttaaaagttgtctaccatgaaggtgaagcaaaaggtcaatttaaagaaattgctggattagattcttaccaaacaggtgaaaagtttggtgatgaagagattattgttatcttaacagatatttatggatataaattacctaatgttgcattgcttgcagaccaattatcagaaatgagctgtcgtcaagtggtaattccagatatattaatgggtgaaccagttacatcgtatgccgacgaattcccaacatggatccagaaacattctcccgagatcaccagaccaattgtggacgggttcttggctcaattaactaaggaaaagtcaccaaaatcactttttggtgttggatactgttttggtgctaaatattgcatacaaaacttggctaaggacggatattttactgctgctgctgtggcacacccttcgttcgtcacgattgaagaagtcgaagctgttactaagccgatattgatttctgctgcagaaactgatccaattttcacagaagaattgagaaataagacaattgaaaccttggctgctaacaaggttacgtaccaatatgacttattcctgggtgtatctcacggtttcgccgtcaagggagatcttagtattccgcaagttaaatatgctaatgagaaggttcttatcgaccaggtatacttcttctctcaattctag

SEQ ID NO: 6846 - protein, 240 aa, Debaryomyces hansenii CBS767
MASNKPGACCLKVVYHEGEAKGQFKEIAGLDSYQTGEKFGDEEIIVILTDIYGYKLPNVALLADQLSEMSCRQVVIPDILMGEPVTSYADEFPTWIQKHSPEITRPIVDGFLAQLTKEKSPKSLFGVGYCFGAKYCIQNLAKDGYFTAAAVAHPSFVTIEEVEAVTKPILISAAETDPIFTEELRNKTIETLAANKVTYQYDLFLGVSHGFAVKGDLSIPQVKYANEKVLIDQVYFFSQF

SEQ ID NO: 6847 - DNA, 723 bp, Yarrowia lipolytica CLIB122
  CDS (1)..(723)
atggttctccttccctgctgcgctaccggtttcaagcacgacggagagatttccggtgagtttaaggactttcatggaacaaagacttactttgcaggtaagccctctgacaagattgtgctactgttgaccgacattctgggtctcgaatacaagggctccctgctcctggccgatcaatttgccgaggagggcttctttgttgtcgttcccgatctcttcaacaacgacccagtcgcactcaaccctcctgagagcttttcccttatgaacgattggttcccccgacacacatttgaaaccactatccccttcgccaaggaaatcgcacagcacattagggacgacttcaagccctcgtttgtgggaactgttggatactgctacggaggaaagcttgtcggagctctgggagccactgatctcgtcaacgctctggcttgggctcatccctctttcgtcactgtggaggatgccaaggctatcaagcaccctctgatcattgctgctgcagagactgataatatttacactcccgagctgcgagccaacgtcgaggctgctctcaaagagaccggaaagacctactacgccaccctcagctccaagactgtccacggttttgcatgccgaggcgaccctaatgaccctcctgtcaagttcgccaaggagaaggcattcgccgacttcacccagtggttcaagcttcatggcggtaaataa

SEQ ID NO: 6848 - protein, 240 aa, Yarrowia lipolytica CLIB122
MVLLPCCATGFKHDGEISGEFKDFHGTKTYFAGKPSDKIVLLLTDILGLEYKGSLLLADQFAEEGFFVVVPDLFNNDPVALNPPESFSLMNDWFPRHTFETTIPFAKEIAQHIRDDFKPSFVGTVGYCYGGKLVGALGATDLVNALAWAHPSFVTVEDAKAIKHPLIIAAAETDNIYTPELRANVEAALKETGKTYYATLSSKTVHGFACRGDPNDPPVKFAKEKAFADFTQWFKLHGGK

SEQ ID NO: 6849 - DNA, 738 bp, Aspergillus nidulans FGSC A4
  CDS (1)..(738)
atggcctctaacccacctggagcctgctgcgcctccggattccggcacgaaggcaaccccgtcggcgagatcaagaacgtcaacggcaccgatacttacatcgtctaccccaaggacaacaagagccccgaaaaggccatcatcatcctttctgacatcttcggcatctacgtcaacgctcagctcctcgccgacgagttcgccgagaatggatacctagccgttctccctgaccttttccgtggagacgcgatcaagctcagcgacatggagtccggcagggccaacctccctgaatggctacctaaacaccagaccccggtcgtcgaccctattgtcgaggctaccattaaatacgtccgcggggacctcggcgtcaagcgcgttgctggtgttggatactgcttcggtggaaagtacgtctgccgcttcttgaagcccggcaagctcgatgtcggctacaccgctcacccgtctttcgtcaccgaggaggagcttgcagccattgctggtcctctttccatctgtgcttctgaaatcgatcagatcttcaccacagagcttcgtcacaagtccgaggaaatcctcatcaagaccggccagaactggcagatcaacctgtacagcggtgtcactcacgggttcgccgttcgcgcggatctcagcaacaagcaccacaagttcgccaaggagcagacgttctgtcaggccgttaactggttcaaccagtacctctag

SEQ ID NO: 6850 - protein, 245 aa, Aspergillus nidulans FGSC A4
MASNPPGACCASGFRHEGNPVGEIKNVNGTDTYIVYPKDNKSPEKAIIILSDIFGIYVNAQLLADEFAENGYLAVLPDLFRGDAIKLSDMESGRANLPEWLPKHQTPVVDPIVEATIKYVRGDLGVKRVAGVGYCFGGKYVCRFLKPGKLDVGYTAHPSFVTEEELAAIAGPLSICASEIDQIFTTELRHKSEEILIKTGQNWQINLYSGVTHGFAVRADLSNKHHKFAKEQTFCQAVNWFNQYL

SEQ ID NO: 6851 - DNA, 732 bp, Candida albicans SC5314
  CDS (1)..(732): transl_table=12
atggcttccaatccaccaggcgcttgctgtgttcagactaattttcacgaaggtaccccattgggaacccataaagaaatttttggcttagatacttatactgtcggagaatcctccaaagttatagttattttaactgacatttatggtcacaaatacaacaatgttttattagttgctgatgccatttctaaggaaggctataaagtcttgattcctgacattttgaagggtgatccaattgtttcttttgacgagttacaagcttggttacctaaacatacacctgaaatcaccgcaccaattgtcaatggcttcttgaaaaaagtcaaggaagagttaaagccaacattcttgggcagtattggttattgttacggtgcaaaatacgttatccagaatttatcctcttccggatttttggatgctggagcagttgcacatccatcgtttgtctctattgaagaagttaaagaaattaaacgtccactcattatttctgctgctgaaactgattcaattttcccacctgaattgagacaccaaactgaggacgaattggctaaattaaatggtgtcagatatcaagttgatttatttagtggtgttacacatggttttgctgttagaggtgacatcaataacccaattgtcaagtacgctaaagaaaaagctttgcttgatcaattgactttcttcgatagtgttcaagtcttgaaatctaatttgtaa

SEQ ID NO: 6852 - protein, 243 aa, Candida albicans SC5314
MASNPPGACCVQTNFHEGTPLGTHKEIFGLDTYTVGESSKVIVILTDIYGHKYNNVLLVADAISKEGYKVLIPDILKGDPIVSFDELQAWLPKHTPEITAPIVNGFLKKVKEELKPTFLGSIGYCYGAKYVIQNLSSSGFLDAGAVAHPSFVSIEEVKEIKRPLIISAAETDSIFPPELRHQTEDELAKLNGVRYQVDLFSGVTHGFAVRGDINNPIVKYAKEKALLDQLTFFDSVQVLKSNL

SEQ ID NO: 6853 - DNA, 726 bp, Candida albicans SC5314
  CDS (1)..(726): transl_table=12
atggcttccaacccaccaagtgcttgttgtgctcaaactaatttccacgaaggtaccccattgggtacacaccaagaggtatttggagtcgatacttacattgttggagaatctagtaacatcttagttatcttaactgatatttttggtcataggtacaacaatgttttgttggttgcagacgctatttccaaatcaggatacaaagttttaattcctgatattttaaatggtgatccacttaaaccaggcgatgacttccaaccatggttacctaaacatacccctgaaattactgctcctatagttgataattttttaaaaagagtcaaagaagaattgaaaccaactttcttaggtggaattggttattgttttggtgcaaagtttgctgttcaaaatttgtctattaatgggtatttagatgctgcagctgttgcgcatccttcgtttgtttcgatggaagaagtgaaagcgataaagcgtccaatcattatttctgctgctgaaacagatcaagtgtttgctccagaattgagacatcaaactgaagatgaattggctaaattggaaggagttagataccaagttgatttattcagtggtgttacacatggattcgctgtaaggggtgacatcaaaaatccaattgtcagatatgccaaagaaaaggttttggccgatcaattggcatctttcaagagtgttcaagctttgggccattaa

SEQ ID NO: 6854 - protein, 241 aa, Candida albicans SC5314
MASNPPSACCAQTNFHEGTPLGTHQEVFGVDTYIVGESSNILVILTDIFGHRYNNVLLVADAISKSGYKVLIPDILNGDPLKPGDDFQPWLPKHTPEITAPIVDNFLKRVKEELKPTFLGGIGYCFGAKFAVQNLSINGYLDAAAVAHPSFVSMEEVKAIKRPIIISAAETDQVFAPELRHQTEDELAKLEGVRYQVDLFSGVTHGFAVRGDIKNPIVRYAKEKVLADQLASFKSVQALGH

SEQ ID NO: 6855 - DNA, 735 bp, Aspergillus oryzae
  CDS (1)..(735)
atggcttctaacccacctggaccttgctgcgccactggcttcaagcatgaaggtaacccagttggtgagatcaagaacgtcaacggcgtcgacacctacattgtctacccccaggataagagcaccgagaaggttgttgtcttcctgagcgatatcttcggtatctatgtcaacgcccagctcctcgctgacgagttcgccgccaatggatacacttgtgtcattcccgatcttttccagggagacgccatcaagctcagcgacatggaatctggaaaagccgacctccccgcctggctccccaaccaccagcctagccacgtcgaccccgtcgtcgagtctactgttaagtacgtccgcgaggaattgggcgctaagcgtgtcgccggtgttggatactgcttcggtgccaagtatgtctgccgccacatgaaggagggcaagatcgacgttggtttcaacgcccacccttccttcgtcacccacgaggagctcggcgctatcaccggtcctctgtccattgctgcctccgaaatcgatcagatcttcactacccagctccgccacgagtctgaggagactctgaagaagactggccagcactggcagatcaacctgtttagcggtgtttcccacggtttcgctgtccgcgcggacctgagcaataagcacttcaagttcgccaaggaacaggctttctgccaggccatcaactggttcaggcagtacctgtga

SEQ ID NO: 6856 - protein, 244 aa, Aspergillus oryzae
MASNPPGPCCATGFKHEGNPVGEIKNVNGVDTYIVYPQDKSTEKVVVFLSDIFGIYVNAQLLADEFAANGYTCVIPDLFQGDAIKLSDMESGKADLPAWLPNHQPSHVDPVVESTVKYVREELGAKRVAGVGYCFGAKYVCRHMKEGKIDVGFNAHPSFVTHEELGAITGPLSIAASEIDQIFTTQLRHESEETLKKTGQHWQINLFSGVSHGFAVRADLSNKHFKFAKEQAFCQAINWFRQYL

SEQ ID NO: 6857 - DNA, 867 bp, Aspergillus oryzae
  CDS (1)..(867)
atgagggcactcctgttggcgagtcattcaattcctcgagagaaaaatccactggcagatgcgctgcacaacgtacctcccgagctaacatctaacacacccttctcttctctagtcaacacctacatcacctaccccaaagacaacaagacccccgagaaggccatcgtcttcttgaccgacatcttcggcatcttccccaactctcaactcctcgctgacgagttcgccaaggctggatacttgactgtcatcccggatctgttccagggcgaccagatcaacgtcgctgatatggagtctggcaaggctgatctaccctcctggctgcccaagcaccagcccgccaacgtcgaccccgtcgttgaggcgtcagttaggtacatccgcgagactttgggtgcgaagagcgttggtgctgttggttactgctttggtgctaaggcttatctcactgggtatgaatatgggtttctaatgggccattctcagtacgttacccgccttctgatgaccaacaaagtcgatgttggcttcgccgcccacccctccttcatcacccacgaggaattaggcgctatccaaggccccttgtccattgctgctgccgaaatcgactccatcttcaccacccaactccgtcatgaatccgagaacaccctcattaaggccggtcacccctggcaaatcaacctgttcagcggcgtggcccacggctttgcaattcgcggcgatatgaacgtcaggattcagaggtgggctaaggagcaggcttttgtccaggccgtttcttggttcaatcagcacttacgtggagaaatttttgttgtgatccatcttgggattcatggatccgggcatacataa

SEQ ID NO: 6858 - protein, 288 aa, Aspergillus oryzae
MRALLLASHSIPREKNPLADALHNVPPELTSNTPFSSLVNTYITYPKDNKTPEKAIVFLTDIFGIFPNSQLLADEFAKAGYLTVIPDLFQGDQINVADMESGKADLPSWLPKHQPANVDPVVEASVRYIRETLGAKSVGAVGYCFGAKAYLTGYEYGFLMGHSQYVTRLLMTNKVDVGFAAHPSFITHEELGAIQGPLSIAAAEIDSIFTTQLRHESENTLIKAGHPWQINLFSGVAHGFAIRGDMNVRIQRWAKEQAFVQAVSWFNQHLRGEIFVVIHLGIHGSGHT

SEQ ID NO: 6859 - DNA, 756 bp, Aspergillus oryzae
  CDS (1)..(756)
atgtcattctcaaagtgctgcatccaaggcttctcatggcaaggcacaccgacggggcgcaccgataaactatccaacaacgatgtctacatcacgggcgacaaagccgacgtggcgatcctgttcatcgccgacctctttggctggacattccccaacgtccgcctcattgcagaccactatgcccgcgaagtcggcgcaacagtcttcgtgcccgacttcttcggcggggaggttctagatttcgatctcgttgccgcagagaaattcgatcagatcgatctgcccgggttcattgggcgcaatggtcgggatcagcgcgagtcggagattttcgactgtgcacgcgctctgaagcaggaactggggtataagaaagtcggggctgtaggatactgctacggcggatgggcatcatttcgcctcggcgcaaaggaacatgcatctgcgccgttggtggattgtatcgccgtcggtcatccgtctctgctcacgaagaaggacatcgatgaagtggctgttcccgtgcaaatgctggcgccggagattgatcaggcgtatccgttggagctgaagttgcatacctttgagacgctgcagcggttgaatgtgccgtttgattatcagcatttccccggcgtcgtgcatgcgtgctttgtgcgtggcgatgagaataagccaggtgagcgggcggcgatggagagagggaagaatgcggttgttgggtggctccgacagtttttgaaagacacctga

SEQ ID NO: 6860 - protein, 251 aa, Aspergillus oryzae
MSFSKCCIQGFSWQGTPTGRTDKLSNNDVYITGDKADVAILFIADLFGWTFPNVRLIADHYAREVGATVFVPDFFGGEVLDFDLVAAEKFDQIDLPGFIGRNGRDQRESEIFDCARALKQELGYKKVGAVGYCYGGWASFRLGAKEHASAPLVDCIAVGHPSLLTKKDIDEVAVPVQMLAPEIDQAYPLELKLHTFETLQRLNVPFDYQHFPGVVHACFVRGDENKPGERAAMERGKNAVVGWLRQFLKDT

SEQ ID NO: 6861 - DNA, 762 bp, Chaetomium globosum
  CDS (1)..(762)
atggcttcgaacccgcccggaaaatgttgcactgttggcgttaagcatgaaggtgacaccgtcggcaagacgattcaagtcgctagcaagcacgacgcctacctcgcaactccgccccccgacaaggcgcaccaaggcgtcggcattctactcatcccggacgtcatcggcatctggcagaatagcaagctgattgccgaccaatttgctgccaacggctacctgacactcatgctcgatgtgtacaacggtgacgcgctctccctcaccagccgccccgccgggttcaacctctttgactggatcgccaagggctccgacggcaagaacccgcacacaactgaggctattgacccaatggtggttgatgggatcaaggcgctgaaggaggaatacgggatccagaagatgggcggcgtgggctatggtttgggggctaagtacgtgatccggcactacaagaacggcatctccgccggctacgtcgcccacccgtccttggtagacgaggaggagctcgcggccatcgggggcccgctggccatctcggccgctgagaccgacagcatcttccccgccgagaagcgccaccggtccgaggtaatcctcaaggacgctggcaagccataccagatcaacctcttctcccaggtcgagcacgggttcgccgtccgctggcgacacgtccgtcaaggtccagaagtttccaaggagcaggctttcctgcaagccattaactggtttgacgagtatcttctgtga

SEQ ID NO: 6862 - protein, 253 aa, Chaetomium globosum
MASNPPGKCCTVGVKHEGDTVGKTIQVASKHDAYLATPPPDKAHQGVGILLIPDVIGIWQNSKLIADQFAANGYLTLMLDVYNGDALSLTSRPAGFNLFDWIAKGSDGKNPHTTEAIDPMVVDGIKALKEEYGIQKMGGVGYGLGAKYVIRHYKNGISAGYVAHPSLVDEEELAAIGGPLAISAAETDSIFPAEKRHRSEVILKDAGKPYQINLFSQVEHGFAVRWRHVRQGPEVSKEQAFLQAINWFDEYLL

SEQ ID NO: 6863 - DNA, 24 bp, Artificial sequence
  primer
atggcatctaatcaacctggcaag

SEQ ID NO: 6864 - DNA, 27 bp, Artificial sequence
  primer
ttaaacattcgaaaaatgattgaacca

SEQ ID NO: 6865 - protein, 271 aa, Artificial sequence
  consensus sequence
  Variant (3)..(7): Xaa in position 3 to 7 is any amino acid
  Variant (9)..(9): Xaa in position 9 is any amino acid
  Variant (11)..(13): Xaa in position 11 to 13 is any amino acid
  Variant (15)..(24): Xaa in position 15 to 24 is any amino acid
  Variant (25)..(25): Xaa in position 25 is any or no amino acid
  Variant (27)..(39): Xaa in position 27 to 39 is any amino acid
  Variant (40)..(45): Xaa in position 40 to 45 is any or no amino acid
  Variant (47)..(48): Xaa in position 47 to 48 is any amino acid
  Variant (50)..(52): Xaa in position 50 to 52 is any amino acid
  Variant (53)..(53): Xaa in position 53 is any or no amino acid
  Variant (55)..(56): Xaa in position 55 to 56 is any amino acid
  Variant (58)..(58): Xaa in position 58 is any amino acid
  Variant (61)..(62): Xaa in position 61 to 62 is any amino acid
  Variant (64)..(65): Xaa in position 64 to 65 is any amino acid
  Variant (68)..(72): Xaa in position 68 to 72 is any amino acid
  Variant (73)..(73): Xaa in position 73 is any or no amino acid
  Variant (75)..(77): Xaa in position 75 to 77 is any amino acid
  Variant (80)..(89): Xaa in position 80 to 89 is any amino acid
  Variant (90)..(100): Xaa in position 90 to 100 is any or no amino acid
  Variant (102)..(104): Xaa in position 102 to 104 is any amino acid
  Variant (105)..(111): Xaa in position 105 to 111 is any or no amino acid
  Variant (113)..(120): Xaa in position 113 to 120 is any amino acid
  Variant (122)..(139): Xaa in position 122 to 139 is any amino acid
  Variant (140)..(143): Xaa in position 140 to 143 is any or no amino acid
  Variant (147)..(147): Xaa in position 147 is any amino acid
  Variant (151)..(165): Xaa in position 151 to 165 is any amino acid
  Variant (166)..(182): Xaa in position 166 to 182 is any or no amino acid
  Variant (188)..(190): Xaa in position 188 to 190 is any amino acid
  Variant (192)..(198): Xaa in position 192 to 198 is any amino acid
  Variant (199)..(200): Xaa in position 199 to 200 is any or no amino acid
  Variant (202)..(203): Xaa in position 202 to 203 is any amino acid
  Variant (205)..(205): Xaa in position 205 is any amino acid
  Variant (207)..(207): Xaa in position 207 is any amino acid
  Variant (209)..(209): Xaa in position 209 is any amino acid
  Variant (211)..(212): Xaa in position 211 to 212 is any amino acid
  Variant (214)..(217): Xaa in position 214 to 217 is any amino acid
  Variant (219)..(221): Xaa in position 219 to 221 is any amino acid
  Variant (223)..(224): Xaa in position 223 to 224 is any amino acid
  Variant (226)..(235): Xaa in position 226 to 235 is any amino acid
  Variant (236)..(236): Xaa in position 236 is any or no amino acid
  Variant (238)..(238): Xaa in position 238 is any amino acid
  Variant (242)..(242): Xaa in position 242 is any amino acid
  Variant (247)..(247): Xaa in position 247 is any amino acid
  Variant (249)..(249): Xaa in position 249 is any amino acid
  Variant (251)..(258): Xaa in position 251 to 258 is any amino acid
  Variant (260)..(260): Xaa in position 260 is any amino acid
  Variant (262)..(269): Xaa in position 262 to 269 is any amino acid
CCXXXXXHXGXXXGXXXXXXXXXXXYXXXXXXXXXXXXXXXXXXXDXXGXXXXNXXLXADXXAXXGYXXXXXXDXXXGDXXXXXXXXXXXXXXXXXXXXXWXXXXXXXXXXHXXXXXXXXVXXXXXXXXXXXXXXXXXXXXXXGYCXGAKXXXXXXXXXXXXXXXXXXXXXXXXXXXXXXXXAHPSFXXXEXXXXXXXXXPXXIXAXEXDXXFXXXXRXXXEXXLXXXXXXXXXXXLXSGVXHGFAXRXDXXXXXXXXAXEXXXXXXXXWF

SEQ ID NO: 6866 - protein, 28 aa, Artificial sequence
  protein pattern
  Variant (2)..(2): Xaa in position 2 is Ala, Ile or Val
  Variant (3)..(3): Xaa in position 3 is any amino acid
  Variant (5)..(7): Xaa in position 5 to 7 is any amino acid
  Variant (9)..(9): Xaa in position 9 is any amino acid
  Variant (10)..(10): Xaa in position 10 is any or no amino acid
  Variant (12)..(13): Xaa in position 12 to 13 is any amino acid
  Variant (14)..(14): Xaa in position 14 is any or no amino acid
  Variant (16)..(16): Xaa in position 16 is any amino acid
  Variant (17)..(17): Xaa in position 17 is Phe, Ile, Leu or Met
  Variant (18)..(18): Xaa in position 18 is Ala or Ser
  Variant (19)..(20): Xaa in position 19 to 20 is any amino acid
  Variant (21)..(21): Xaa in position 21 is Cys or Gly
  Variant (22)..(22): Xaa in position 22 is Phe or Tyr
  Variant (23)..(23): Xaa in position 23 is any amino acid
  Variant (24)..(24): Xaa in position 24 is Ala, Cys, Thr or Val
  Variant (25)..(26): Xaa in position 25 to 26 is any amino acid
  Variant (27)..(27): Xaa in position 27 is Leu, Pro or Val
DXXGXXXNXXLXXXDXXXXXXXXXXXXD

SEQ ID NO: 6867 - protein, 15 aa, Artificial sequence
  protein pattern
  Variant (2)..(2): Xaa in position 2 is any or no amino acid
  Variant (6)..(6): Xaa in position 6 is Phe or Leu
  Variant (7)..(7): Xaa in position 7 is Ile, Leu or Val
  Variant (8)..(8): Xaa in position 8 is Asp, Glu, Ser or Thr
  Variant (9)..(9): Xaa in position 9 is any amino acid
  Variant (11)..(11): Xaa in position 11 is Asp or Glu
  Variant (12)..(12): Xaa in position 12 is Ala, Ile, Leu or Val
  Variant (13)..(14): Xaa in position 13 to 14 is any amino acid
  Variant (15)..(15): Xaa in position 15 is Ile or Val
AXHPSXXXXEXXXXX

SEQ ID NO: 6868 - protein, 25 aa, Artificial sequence
  protein pattern
  Variant (2)..(2): Xaa in position 2 is any or no amino acid
  Variant (4)..(4): Xaa in position 4 is Ala, Cys or Ser
  Variant (6)..(6): Xaa in position 6 is Ala or Ser
  Variant (7)..(7): Xaa in position 7 is Glu or Gln
  Variant (8)..(8): Xaa in position 8 is any amino acid
  Variant (10)..(11): Xaa in position 10 to 11 is any amino acid
  Variant (12)..(12): Xaa in position 12 is Phe or Tyr
  Variant (13)..(13): Xaa in position 13 is Pro or Thr
  Variant (14)..(14): Xaa in position 14 is any amino acid
  Variant (15)..(15): Xaa in position 15 is Glu, Asn or Gln
  Variant (16)..(16): Xaa in position 16 is any amino acid
  Variant (18)..(20): Xaa in position 18 to 20 is any amino acid
  Variant (21)..(21): Xaa in position 21 is any or no amino acid
  Variant (23)..(23): Xaa in position 23 is any amino acid
  Variant (24)..(24): Xaa in position 24 is any or no amino acid
LXIXAXXXDXXXXXXXRXXXXEXXL

SEQ ID NO: 6869 - protein, 12 aa, Artificial sequence
  protein pattern
  Variant (2)..(2): Xaa in position 2 is any amino acid
  Variant (4)..(4): Xaa in position 4 is any amino acid
  Variant (9)..(9): Xaa in position 9 is any amino acid
  Variant (10)..(10): Xaa in position 10 is Lys or Arg
  Variant (11)..(11): Xaa in position 11 is any amino acid
  Variant (12)..(12): Xaa in position 12 is Asp, Asn or Arg
SXVXHGFAXXXX

SEQ ID NO: 6870 - DNA, 777 bp, Saccharomyces cerevisiae
  CDS (1)..(777)
atggatgacgatcacgaacagttggtcgaagaactggaggccgtcgaggccatctatccggatcttctctccaagaagcaggaagacggaagcatcatcgttgtgaaagtgccgcagcatgaatacatgacactgcagatctccttcccgacacactacccctccgaggaggctcctaatgtcatcgaagttggtgtctgcacttctttggctaagcgcgatctctacgataccaagtaccttcagcatttgttccaggaagtgatggactctgttttccaccgcggatctgtctgtctatttgacttcctcacagaactcgacggtgtcttgtacgttgaaccagaggaggagacagaaccggtccagcagagtgacattcccacagaccccttcgagggctggaccgcgtcggaccccattactgatagaggctcgactttcatggcctttgcagcacatgttacctccgaggaacaagcgtttgccatgctagacctactgaagaccgactccaagatgcgtaaggcaaaccatgtcatgagtgcatggcgaatcaagcaggatggctctgcggcaacatatcaagattccgatgatgacggtgaaacggccgccggctccagaatgctgcacctcatcaccatcatggatgtgtggaacgtcatcgttgtggtggcccgttggttcggcggtgcccacataggtcccgaccggtttaaacacatcaattctacggcaagagaagctgttgtcagggccggcttcgactcgtaa

SEQ ID NO: 6871 - protein, 258 aa, Saccharomyces cerevisiae
MDDDHEQLVEELEAVEAIYPDLLSKKQEDGSIIVVKVPQHEYMTLQISFPTHYPSEEAPNVIEVGVCTSLAKRDLYDTKYLQHLFQEVMDSVFHRGSVCLFDFLTELDGVLYVEPEEETEPVQQSDIPTDPFEGWTASDPITDRGSTFMAFAAHVTSEEQAFAMLDLLKTDSKMRKANHVMSAWRIKQDGSAATYQDSDDDGETAAGSRMLHLITIMDVWNVIVVVARWFGGAHIGPDRFKHINSTAREAVVRAGFDS

SEQ ID NO: 6872 - DNA, 774 bp, Caenorhabditis elegans
  CDS (1)..(774)
atgagcgacgaggagcaaagaatagcagaaattgagtcattggcatcgatttttccggatttattagaagaaacaactgataaacagctggtttttaaattcgatagggatattggaatgacaattaatctgccagaggattatccttcgatatctccgccaattttcgaactaagtggtccatatctccgtcgggagcagaaagaggtgcttcacaacagtctaaatgacgtttatatcgaaaatatcggatttccagtgattttcaattggatatcccttgttcaagactttattcgggatcttcccgaagaagtagcggagcccagccatgtggccgatgacgtggtgacaccgatggccgaggaaatcgatgatatgaatattcgacacggagaagtgcttacagaccggaaaagtgcatttcaggctcatttggccgaggttcggagtaaggaagatgtggatcgagtgatgcgaatccttaaatcgaatacaaaaatctgccgggcaacacataatattacagcatatcgatatatgactgaaatcaatggaaaaccaattcatcatcatgattgtgtggatgatggggaatttggagcaagttcgaaaatgttagagctcatggatcgaatgaaagcggataatgtgatggtcgtcgtttcacgttggtacggtggaattcatcttggacccgatcgttttcgacatattaataatttaactcggcaaattttaagtgataataattatggaccgaagaagtcttaa

SEQ ID NO: 6873 - protein, 257 aa, Caenorhabditis elegans
MSDEEQRIAEIESLASIFPDLLEETTDKQLVFKFDRDIGMTINLPEDYPSISPPIFELSGPYLRREQKEVLHNSLNDVYIENIGFPVIFNWISLVQDFIRDLPEEVAEPSHVADDVVTPMAEEIDDMNIRHGEVLTDRKSAFQAHLAEVRSKEDVDRVMRILKSNTKICRATHNITAYRYMTEINGKPIHHHDCVDDGEFGASSKMLELMDRMKADNVMVVVSRWYGGIHLGPDRFRHINNLTRQILSDNNYGPKKS

SEQ ID NO: 6874 - DNA, 900 bp, Neurospora crassa
  CDS (1)..(900)
atgtccgaacaactagccgacgagctcgaggccatcaactccatctacggcgacggcactctctccccatccgacgacgactcacccgccacttacatcctgactctccccggcgacatcacctcatccaccctgcgtctgcagttccccccagcctaccccgatgaaccacccgtcgttctcggcacccactcctccggcgagcatgctaagcgcggcgccgctgctcgagacctggctctcttccgcgacgcagtcggcgaggtgtacgagccgggccaagtctgtctgtttgatgccattgagcaagtgaaggaactcatagccgcagtcaccacggcggagaaggaggatgaggaggaggaggaggacgtggaggaaggaaatggaaagagggtatcctcatatgacgcaacagcagcaactcatgatacacagacaggaggaggggggggaggagatctccttggccccgaacctccctggacgctctcccttcccatgatcgaactcaaatcgaccttcatcgcccgctgcgcgccagttacctctccgcaacaggcggcgcagtacctgcaacacctgctggcgtcggacaagcgggtccgggcggctacgcacaacatcacggcgtggcggatccgcgggccaaacggcacgtcgttccaggactgcgacgacgacggggagacggcggcgggcggcaggctgctacatttgatgcagctgatggacctgtgggacaccatggtcgtggtgacgcggtggtatggaggccaaaagttggggccgaggaggttcgcgctgattaacggcgcggcgagggatgcgtttgttagggcggggttggtggacgaggagaacaagcaggaagggaagaagaagaagggtgggaaatga

SEQ ID NO: 6875 - protein, 299 aa, Neurospora crassa
MSEQLADELEAINSIYGDGTLSPSDDDSPATYILTLPGDITSSTLRLQFPPAYPDEPPVVLGTHSSGEHAKRGAAARDLALFRDAVGEVYEPGQVCLFDAIEQVKELIAAVTTAEKEDEEEEEDVEEGNGKRVSSYDATAATHDTQTGGGGGGDLLGPEPPWTLSLPMIELKSTFIARCAPVTSPQQAAQYLQHLLASDKRVRAATHNITAWRIRGPNGTSFQDCDDDGETAAGGRLLHLMQLMDLWDTMVVVTRWYGGQKLGPRRFALINGAARDAFVRAGLVDEENKQEGKKKKGGK

SEQ ID NO: 6876 - DNA, 1011 bp, Aspergillus fumigatus
  CDS (1)..(1011)
atgacatcagttattaattcactttcggatactgacctcgccgaagagatcgaggctatcaatgcaatttacgaacccgacaccgtcactgtccacttctcagcaacatcagcgtcagcagccacagccaattcaacactaaacttgggcagctccggacccggcgactcattgaacactacggttaaactgcaaatccccgatcatcccaatctatccttcctccttggtttccatgcgtcatacccagatacccctccgaaaattcttgggacggcgtcgaccggtgcacgcggtgagggaaagatagctgtggatgtactggaggatattgtagggagaacataccagcccggcgctgtttgcctgttcgatgtcatcaatgaggcggtcgaggcgttccgagagctcagtttgggcggccacaacagcagcagcaacacgaaccaggacagcgagaagaggggagcggaagcagagacaagggcaacccctgcgcgggtcgcagcggacatcgctaccctctcactgcaagacgcatttgggctggacagtcctcccgaatgggtgctgtcggatgtggtaacggagaagaaatcggtgtttgtgggtcgggcggcgcatgttaccagcctggaacaggctcaggggtatctggaccatctcctggccacggataaaaaggttgctgctgcgacgcataatatcagcgcttggcgtattagacagcagaaaccggccaacggaaagggcgagtctgcagagatgattgtgcaggactgcgatgatgacggggagacggccgctggtgggcgattgctccatctcatgcaattaatggatgtgtgggatgtggttgtcgtagtatcgcgatggtacggtgggattctcctggggccggaccggtttcggatcatcaacgccgtcggtcgggatgcgttgatcaagggtggtttcgtcaaggagtctacaggggctgctgaaaagggtcgaaagaaagggaagagatga

SEQ ID NO: 6877 - protein, 336 aa, Aspergillus fumigatus
MTSVINSLSDTDLAEEIEAINAIYEPDTVTVHFSATSASAATANSTLNLGSSGPGDSLNTTVKLQIPDHPNLSFLLGFHASYPDTPPKILGTASTGARGEGKIAVDVLEDIVGRTYQPGAVCLFDVINEAVEAFRELSLGGHNSSSNTNQDSEKRGAEAETRATPARVAADIATLSLQDAFGLDSPPEWVLSDVVTEKKSVFVGRAAHVTSLEQAQGYLDHLLATDKKVAAATHNISAWRIRQQKPANGKGESAEMIVQDCDDDGETAAGGRLLHLMQLMDVWDVVVVVSRWYGGILLGPDRFRIINAVGRDALIKGGFVKESTGAAEKGRKKGKR

SEQ ID NO: 6878 - DNA, 843 bp, Schizosaccharomyces pombe 972h-
  CDS (1)..(843)
atggaaaataatgaagaatttcaagacgagctcttagctctagagagtatatatccttcttgtttactacctatatctgaacaaagcttcacttatactctgagtatcccagattcatctgtacgacttaacatccaattcccactcgactacccaaattcggctcctactgtcttagatgcttacgggatcgataaaacactggcagaggacgtcctcttgtctgttgcaacaggcgatgtatgtatattctcatatatggatttgctgaaagaattagtggatatagatgccgaacaagcagccgcagagagagaatccaaattgcaagaagaatcagacaaagaaacaccagtaatgctcaataaatctcattatgtagctaaaactccagaaattcaagacgaaccatggaaaccaaaattcgattggaaagagtcagaaccgatcacagatcgaaaaagcacctttatggctcatgcaacgcgtgtttattctacagaagaagttcgcgaagctctcgaagatttgtatatggataaaaaagttgcaaaggcgaatcataatatggtagcatatcggattatttccccaaacgggaacgttattcaggataatgatgatgacggagaatcagctgctggttctcgtatgagtcatttgctaactatgatgtctgccgaaaatgtttttgtttgcgtttcacgttggtttgggggcgttcacatcggaccagacagattcaaacatataaactcatcggctcgtgaagcagtattactcaccgacgctgctcctagtcagaaaaagggtacagaacatggcaaaaagaagaaaaaatag

SEQ ID NO: 6879 - protein, 280 aa, Schizosaccharomyces pombe 972h-
MENNEEFQDELLALESIYPSCLLPISEQSFTYTLSIPDSSVRLNIQFPLDYPNSAPTVLDAYGIDKTLAEDVLLSVATGDVCIFSYMDLLKELVDIDAEQAAAERESKLQEESDKETPVMLNKSHYVAKTPEIQDEPWKPKFDWKESEPITDRKSTFMAHATRVYSTEEVREALEDLYMDKKVAKANHNMVAYRIISPNGNVIQDNDDDGESAAGSRMSHLLTMMSAENVFVCVSRWFGGVHIGPDRFKHINSSAREAVLLTDAAPSQKKGTEHGKKKKK

SEQ ID NO: 6880 - DNA, 819 bp, Eremothecium gossypii
  CDS (1)..(819)
atggcactaaatgaggaggtagcagaggagatttctgccgtagatgccatctaccctgggaatctcagcaggttaagcgagaatagagtacttattaggattcctaactatgaagagatcgccatacaaatatcatttccctctaactatcctgcggaagagccgccccacatcctggagatatcgatcagccacgagaaagttcaaagatacgagcggagtgatttgcagccagtttgcgaggagctgatggcatccgtttactccaaaggctttgtatgccttttcgattttatcagcgagctgagcaatgtgctgtacgagagatttggcgcgcaggacgacgacacagaagacgatgaactggcggagaggatgggacacctgaacttggatccctttgacggatggatcgctagcgatccaattacggatcggagctccacctttatcgcatacgcggcgcacgtgaactccgaagaagacgcctgtctcaggatagatcaactgaagaccgacaacaagatctcaaaatgcgcgcatttaatgacagcatggcgtatacacggggagaacggagtagcgtacaaagactgcgatgatgatggcgaggcagcagccggcagcagaatgctacacctactgaataccatggacgcatgggatgtcgtcgtggcagtagcgcgatggtttggcggcgtacatattggcccggaccgcttcaagcacattaactcatgcacgcgtgacgcattgatcaagggggattttgtgtcccaagcgaaggcagggtcggcttcgaagaagaccaagaaataa

SEQ ID NO: 6881 - protein, 272 aa, Eremothecium gossypii
MALNEEVAEEISAVDAIYPGNLSRLSENRVLIRIPNYEEIAIQISFPSNYPAEEPPHILEISISHEKVQRYERSDLQPVCEELMASVYSKGFVCLFDFISELSNVLYERFGAQDDDTEDDELAERMGHLNLDPFDGWIASDPITDRSSTFIAYAAHVNSEEDACLRIDQLKTDNKISKCAHLMTAWRIHGENGVAYKDCDDDGEAAAGSRMLHLLNTMDAWDVVVAVARWFGGVHIGPDRFKHINSCTRDALIKGDFVSQAKAGSASKKTKK

SEQ ID NO: 6882 - DNA, 882 bp, Magnaporthe grisea 70-15
  CDS (1)..(882)
atgtctgaggagttaaaggacgaggtggaggccctcaattccatctacggggacgggacgctactggctgcatcgggcaatgacggcagcgataccgaggccgccggtgcctatattctcaaaattccaggcgagggggaaacatcttcgctgcgtcttcagttccctgccggctatccggatgagcccccgtctgttctaggcacccacagctcgggcggacagaaccggccgcgcggcgccgcagctcgcgaccttgaactattccgtgacgcgctcggccgggttttccagccgggcatcgtctgcctctttgatgcactggaagaactggcaagactggccgaggagctcgggatcaacgacactcagccatcagaagcggacgaagacggcgcagaagaggaaggcacctccacggcgccgcgcaaggtatccgccccggaggacgccttgggcccggagcccccttggatcatgtccgacgtctacgtggagatgaagtcgacgttcgtcgctcgttgcgcccacgtcacctcggcggcccaggccgagtcgtacgtcgcccatctgcttgcgacggacaagaaggtgcgcgcggcgacgcacaacatgacggcctggcggatccggggtgcggacggcaagacctcgttccaggactgcgacgacgacggtgagaccgctgccggcgggaggctgctgcatctgatgcaacttatggatctatgggatgtcatggtcgtcgtgacgaggtggtatggtggccagaagcttggacctaggaggtttgctgtcatcaaccaggttgccagagattcgttcgtcaaagctggattagtccctgaggcgtccggcaagaaaaaggggccaggcaagtga

SEQ ID NO: 6883 - protein, 293 aa, Magnaporthe grisea 70-15
MSEELKDEVEALNSIYGDGTLLAASGNDGSDTEAAGAYILKIPGEGETSSLRLQFPAGYPDEPPSVLGTHSSGGQNRPRGAAARDLELFRDALGRVFQPGIVCLFDALEELARLAEELGINDTQPSEADEDGAEEEGTSTAPRKVSAPEDALGPEPPWIMSDVYVEMKSTFVARCAHVTSAAQAESYVAHLLATDKKVRAATHNMTAWRIRGADGKTSFQDCDDDGETAAGGRLLHLMQLMDLWDVMVVVTRWYGGQKLGPRRFAVINQVARDSFVKAGLVPEASGKKKGPGK

SEQ ID NO: 6884 - DNA, 780 bp, Candida glabrata CBS 138
  CDS (1)..(780)
atggatgaactagttgtagaagaattggagtctctggaagctatctaccctgacttactgaagagagatgatgcagagaatatatttgccatgaaggtacctcaacatgagaagttcacggtcaagatctctttgcctgataagtatccagcaactgaaccgccccatgtcctcgaagtttctgtggctcaaggagattacgactcaaagtatctcacgacactgtttcaagaagtcatggattccatgtttcaccagggttctgtttgcctgttcgatttcttcactgaattggatggtgtgctatatgatgatgaagaggaatcgtctatggatgccgctgaagtagtagataattctgctttagttcccgtggatccatttgaaggctggactgcgtcggatcctatcagtgaccgtgggtcaacatttatggcgtttgcagctcatgtaaattccgaggaggaggcattccaaatgcttgatcatttgaagaccgattctaagatgaggagggctaaccatgccatgtgtgcctggagaattaagaaacaaacagatagtaacgatatcatctaccaggattgtgacgacgacggagaaaccgcagcaggatcccgaatgctacatttagtgactatcatggatgtgtggaatgttatcgttgtagtagctcgttggtttggtggtgtacatattggtccagataggttcaaacacatcaactcaacggcaagagaggcaatcctgcgggcaggctttacaccagccaaaaaataa

SEQ ID NO: 6885 - protein, 259 aa, Candida glabrata CBS 138
MDELVVEELESLEAIYPDLLKRDDAENIFAMKVPQHEKFTVKISLPDKYPATEPPHVLEVSVAQGDYDSKYLTTLFQEVMDSMFHQGSVCLFDFFTELDGVLYDDEEESSMDAAEVVDNSALVPVDPFEGWTASDPISDRGSTFMAFAAHVNSEEEAFQMLDHLKTDSKMRRANHAMCAWRIKKQTDSNDIIYQDCDDDGETAAGSRMLHLVTIMDVWNVIVVVARWFGGVHIGPDRFKHINSTAREAILRAGFTPAKK

SEQ ID NO: 6886 - DNA, 816 bp, Kluyveromyces lactis NRRL Y-1140
  CDS (1)..(816)
atggtactcaatgatgatgtaaatgacgaaatcgatgcgataaatgctatctacccagatcttctaacggtggttaataatgacagaataaaaattaaagttcctcaacacgaggatttcacattacatctatcgtttcccgagcactaccctgaaacagaaccgccacatctactagaagtgagtttatctgctaaaatatcagcactatatgatgtcaaatatttaaaccatcttttcactgaagtgttggaatctgtatttaaccctggacttgtttgtatattcgatttcttgacggagctcgatggtgtgctttatactgaggagggggaagaggcttctggttcagatgaggttgatatatctgataaatttgagaatttaaagattgatcccttcgaaggatggtacgtaagtgatcccatcactgacagaaagagcacgtttattgcgtttgctactaaagccaattctgaagaagaggcattcgataagcttgagctgttaagaaccgataataaaattgctcgtgctaatcatttaatggttgcatggagaatcaagggagagaacggtgtcagtttccaagactgcgatgacgatggagaaacagctgcaggaggacgaatgctacatttgatcacagtgatggatgcatggaatgtaattgttgccgttggaagatggttcggaggagttcatattggtccagatagattcaagcatataaattcaacaactagagaagtaatattgaaggggcatttcacagaagctgctacctctacttcaagtaagaagaggtcaaaatag

SEQ ID NO: 6887 - protein, 271 aa, Kluyveromyces lactis NRRL Y-1140
MVLNDDVNDEIDAINAIYPDLLTVVNNDRIKIKVPQHEDFTLHLSFPEHYPETEPPHLLEVSLSAKISALYDVKYLNHLFTEVLESVFNPGLVCIFDFLTELDGVLYTEEGEEASGSDEVDISDKFENLKIDPFEGWYVSDPITDRKSTFIAFATKANSEEEAFDKLELLRTDNKIARANHLMVAWRIKGENGVSFQDCDDDGETAAGGRMLHLITVMDAWNVIVAVGRWFGGVHIGPDRFKHINSTTREVILKGHFTEAATSTSSKKRSK

SEQ ID NO: 6888 - DNA, 903 bp, Debaryomyces hansenii CBS767
  CDS (1)..(903)
atgacagtagaagaattacacgacgaagttagtgccattgatgcgatattccccgattctacatcagaagttgcacctcaggtctataatttgaaaattccacagcacgatgatttggaaattcaaatgagcttcctggagaactaccccgatgaaatacccactgttatccagatccttaataacaatacaagaaagtatgcggataaaaactatttggaaactcaagttaaggagacgctttcgaggatattccataaaggggaagtctgcatttttgaaatgttcacagaattagaggatcttcttgagaaatacttaaataagaacgtaaaaaacgatatacagaaagatatggatgaactaaaaatcactggagatactacagaggagaaggagttagcaaataataagaccccaacgataaaatgtccttccgtgcaagcaaattctaagacagttgtcatagatcctttggaagggtggattcaatccgatccgataatagataggggatccaccttcattggatatgcgcgaagagtggattcagttgaggaagcagtagggtatttagatcttttggtcacggataagaagattgccaaatcggctcacaatataagtagttggagaatcaagaaagagaatggaactcaataccaagattgtgacgacgatggcgaaacagctgcaggaggaagggtactacatttattaacaatgatggatgcatggaatgtaatagtggtcgttagtaggtggtttggaggtacccacataggacccgatagattcaagcatattaacacagctgccagggatgcagttgttaaaggaggatttgtcaatcctaatgtacagagtaataatgcaaataatgtgaggaagaagaaaaaatga

SEQ ID NO: 6889 - protein, 300 aa, Debaryomyces hansenii CBS767
MTVEELHDEVSAIDAIFPDSTSEVAPQVYNLKIPQHDDLEIQMSFLENYPDEIPTVIQILNNNTRKYADKNYLETQVKETLSRIFHKGEVCIFEMFTELEDLLEKYLNKNVKNDIQKDMDELKITGDTTEEKELANNKTPTIKCPSVQANSKTVVIDPLEGWIQSDPIIDRGSTFIGYARRVDSVEEAVGYLDLLVTDKKIAKSAHNISSWRIKKENGTQYQDCDDDGETAAGGRVLHLLTMMDAWNVIVVVSRWFGGTHIGPDRFKHINTAARDAVVKGGFVNPNVQSNNANNVRKKKK

SEQ ID NO: 6890 - DNA, 738 bp, Yarrowia lipolytica CLIB122
  CDS (1)..(738)
atgtcgttagaagaagaggtggagaccatcgacgctattttcccagactctctcaaggagattgggcctcgcagatacaccctttcgattccagatcgaagagcgctggtgcagctatctttcccttcagcctacccagacatccttccagaggtgcagtcgactgagcacgtggacaaggggctggtggaagacattttggctcaggtctatatggagggcgaggttgtcttattctcactgatccaagaggtccaggaagtgactgaggagatctctgaggaagccgaggagccagaaacacatcaggatcacgacgagacaagcgcagaagccaaggctgccatttttgcgggctggaccttgtcggatccggtggtggatcgaaagtccatattcgtggctcatgcattcacagtccattcggcagccgaggctgaggccaagatcaaccatctgaaagaggacaagaagattgcccgtgccacccacaatatcacagcttaccgcattctgagggacgcagaaaagggtatctatgcgcaggactgtgatgacgatggagaggatgctgcaggaggcagattactgcatttgttgtctctcacgggggttgagaatgtggttgtggtggtcgctcgatggtatggaggcatcaaacttggtcctgaccgatttaaacacattaatgcggctgccagagatgccctcgaaaagggtggttatttgaaaaagtag

SEQ ID NO: 6891 - protein, 245 aa, Yarrowia lipolytica CLIB122
MSLEEEVETIDAIFPDSLKEIGPRRYTLSIPDRRALVQLSFPSAYPDILPEVQSTEHVDKGLVEDILAQVYMEGEVVLFSLIQEVQEVTEEISEEAEEPETHQDHDETSAEAKAAIFAGWTLSDPVVDRKSIFVAHAFTVHSAAEAEAKINHLKEDKKIARATHNITAYRILRDAEKGIYAQDCDDDGEDAAGGRLLHLLSLTGVENVVVVVARWYGGIKLGPDRFKHINAAARDALEKGGYLKK

SEQ ID NO: 6892 - DNA, 1026 bp, Aspergillus nidulans FGSC A4
  CDS (1)..(1026)
atgcccgacctccagctctccaacgcggaactcgccgacgaaattgaagctataaacgcaatatatgacccggagaccataacaatatcaaaaacatctacgtcttgcggcacctcaacgttagacttaggggcctcaagctcgagcgctccgacgacaggagagacagtcatcaaactccaagtaccaaaccacacgcatttgtccttccttcttgcctttgaatccgactatccggacacaccgccgaagattttggggaccgcatctacggccgctcgtggggaagggaaaattgccgtcgatgttctcaaggatatactaggacggatgtaccagcctggtgctgtgtgtcttttcgacgttattaatgaggcaatagaggcatttgaagaaccgaggattggaggaggtacaaatgacacgagtgcaagcacgacggacgcaaaaaccatcacggaggacccatctttcgacgctttggaaaatataaacgcaaacatgagctccctcgctctccacgagacctttggactttctgaacctccgccctgggttatgtcggaggtgattactgagaagaaatccgtgttcgtgggacgcgcagcgcacgttacgagtttggatcaggcaaaggcgtatttagattatctacttgcgagtgataaaaaggttgcgtctgcgacgcataatatcagtgcgtggcggatcaagcagcagagcaagccgcctgggaactccaactctaaagaaggaggaaaaggatcatcaaccgagatgataatacaagacagcgacgatgacggagagacggctgcgggcgggcgactgctccatctcatgcagctgatggatgtgtgggacgttgttgtcgttgtgacgagatggtatggtggtattctgttggggccagatcgctttcggattatcaatgctgctggcagggatgcgttggttaagggtgggtttgcgagggataaggagaatcaagctggtgagaagggaaagaagaaggggaagaaataa

SEQ ID NO: 6893 - protein, 341 aa, Aspergillus nidulans FGSC A4
MPDLQLSNAELADEIEAINAIYDPETITISKTSTSCGTSTLDLGASSSSAPTTGETVIKLQVPNHTHLSFLLAFESDYPDTPPKILGTASTAARGEGKIAVDVLKDILGRMYQPGAVCLFDVINEAIEAFEEPRIGGGTNDTSASTTDAKTITEDPSFDALENINANMSSLALHETFGLSEPPPWVMSEVITEKKSVFVGRAAHVTSLDQAKAYLDYLLASDKKVASATHNISAWRIKQQSKPPGNSNSKEGGKGSSTEMIIQDSDDDGETAAGGRLLHLMQLMDVWDVVVVVTRWYGGILLGPDRFRIINAAGRDALVKGGFARDKENQAGEKGKKKGKK

SEQ ID NO: 6894 - DNA, 744 bp, Candida albicans SC5314
  CDS (1)..(744): transl_table=12
atgacagttgaagaattaactgatgagataagtgctattgaagcaatttatcccgaatctgtaaccaatttaggtcctcaattatatacttttaaaataccaaatcatgaatcagttagtatccaattaaatttcccattgacatatcctgaagaaatccctcaattgttacaaattatagtagagaaaactactcaatcgtcatcatttactgatattgcatatttggaaaaacacgttgatgaaatattgcaaaaagtgtttgtgccggaacaagttgtattgtttgaattattgactgaattacaggagttttttgatcaatacgttgaagagcaccctgaaccagtgattgaaaagatagaggtaacgccaactaatgagaaacaatccaaacaagctacaccaattgagcagcatgatgatgtgcatcaagaattgaaagatccaacaattgattggattcagtctgatccaatagttgataggggttctacattcattgcatatgttagacaagtgaatactctacaagatgctcaagagtatttagatgatttattaacagataagaaaatagccaaggcgactcataatatatctagttggagaataaaaatggagaatggagttacattccaagattgtgatgatgatggagaaactgccgctggaggtagattactacatttgctacaagtatgtatcaataatgaaatattattacttcttattaatttctag

SEQ ID NO: 6895 - protein, 247 aa, Candida albicans SC5314
MTVEELTDEISAIEAIYPESVTNLGPQLYTFKIPNHESVSIQLNFPLTYPEEIPQLLQIIVEKTTQSSSFTDIAYLEKHVDEILQKVFVPEQVVLFELLTELQEFFDQYVEEHPEPVIEKIEVTPTNEKQSKQATPIEQHDDVHQELKDPTIDWIQSDPIVDRGSTFIAYVRQVNTLQDAQEYLDDLLTDKKIAKATHNISSWRIKMENGVTFQDCDDDGETAAGGRLLHLLQVCINNEILLLLINF

SEQ ID NO: 6896 - DNA, 957 bp, Mus musculus
  CDS (1)..(957)
atggctgaagaggaagtagggaacagccagaggcagagtgaagaaatcgaagcaatggcagccatttatggcgaggagtggtgtgtcattgatgaaaatgccaaaatattttgtattagagtcactgacttcatggatgaccccaaatggacactttgtttacaggtgatgttgccaagtgagtacccgggtacagcaccgccttcttatcagctgaacgctccctggctgaaagggcaagaacgcgcagacttatcgaacagccttgaggagatatatgtccacaacatgggtgaatctattctttaccagtgggtggagaaaataagagatgctctgatacagaaatctcagataaccgagccagacccagatgtcaagaagaaaactgaagaggttgaggttgagtccgaagaagaccctattctagagcacccgccggaaaatccagttaaaacattggacctcaaaatcagtgaagaaactcaaccagaaactgaagaattgcctccagttgctcatggcgttcctattactgaccgaaggagcacttttcaggctcatgtggcccctgtcgtctgtcctgagcaggtgaaactggttcttgccaagctgtacgagaataagaagattgccagcgccacccacaacatctatgcctacaggatattctgtgaggataaacagaccttcttgcaggactgtgaagatgatggagaaacagctgctgggggccgccttcttcacctcatggagattttgaatgtgaagaatgtcatggtggtggtgtcccgctggtatggagggattctgctgggacctgaccgtttcaaacacatcaacaactgtgccaggaacattctggtggagaagaacttcacgaacactcctgacgagtcaactaagaatttggggaaaaagaaggtgaagaaagacaagaagaagaatgatcattaa

SEQ ID NO: 6897 - protein, 318 aa, Mus musculus
MAEEEVGNSQRQSEEIEAMAAIYGEEWCVIDENAKIFCIRVTDFMDDPKWTLCLQVMLPSEYPGTAPPSYQLNAPWLKGQERADLSNSLEEIYVHNMGESILYQWVEKIRDALIQKSQITEPDPDVKKKTEEVEVESEEDPILEHPPENPVKTLDLKISEETQPETEELPPVAHGVPITDRRSTFQAHVAPVVCPEQVKLVLAKLYENKKIASATHNIYAYRIFCEDKQTFLQDCEDDGETAAGGRLLHLMEILNVKNVMVVVSRWYGGILLGPDRFKHINNCARNILVEKNFTNTPDESTKNLGKKKVKKDKKKNDH

SEQ ID NO: 6898 - DNA, 987 bp, Aspergillus oryzae
  CDS (1)..(987)
atgtcggcccaactcgagtccctcggcaacaatgaactggccgaagaaatagaagcgatcaatgccatttacgagcccgatactgttacgatcaacagcactgcggcttcgtcgtctacggtcagctctacgctcgatttgggcaattctggctcaacgggtccgctggccgcgacagtgaagctacagatccctgaacattcgcatctatcgtttatacttgggttcgatgcctcataccctgacacaccgcctaaggtcctcgggaccgcatctacggcgtcgcgcggggagggtaaaatcgctgtcgacgttttggaggatatactagggagaacgtaccagcctggggctgtttgcttgttcgacgtgattaatgaggcggtggaggctttccgggagttgaatatcgggggaagcagcaacaacgagaataacaaagagcaagaggaagagagggacaccccggacctgaaggctgaggatattgccagcttgtcgttgaaagagtcttttggactggacaatccacctgactggatcttgtcggatgtggtgacggagaaaaagtccgtctttgttgggcgcgcagcgcatgttactagtctcgagcaggctcaggcttatttggattatcttctggcgacagagaagaaggtggcagctgcaacgcataatatcagcgcttggcgcattaggcaacaaaaaccatcaaatggaaagggcgagtccgcggagatgattgtacaggattgcgacgatgatggggagacagccgccgggggccgattgcttcatctcatgcagctgatggacgtatgggatgtggtcgtggtggtcacacgatggtacggcggagtccaacttggccccgatcggtttcgcattatcaatgctgtcggccgcgatgcgctgatgaagggtgggttcgtcaaggagtcgacacctggaggtaacgagaagggaaagaagaaaggaaagaaatga

SEQ ID NO: 6899 - protein, 328 aa, Aspergillus oryzae
MSAQLESLGNNELAEEIEAINAIYEPDTVTINSTAASSSTVSSTLDLGNSGSTGPLAATVKLQIPEHSHLSFILGFDASYPDTPPKVLGTASTASRGEGKIAVDVLEDILGRTYQPGAVCLFDVINEAVEAFRELNIGGSSNNENNKEQEEERDTPDLKAEDIASLSLKESFGLDNPPDWILSDVVTEKKSVFVGRAAHVTSLEQAQAYLDYLLATEKKVAAATHNISAWRIRQQKPSNGKGESAEMIVQDCDDDGETAAGGRLLHLMQLMDVWDVVVVVTRWYGGVQLGPDRFRIINAVGRDALMKGGFVKESTPGGNEKGKKKGKK

SEQ ID NO: 6900 - DNA, 963 bp, Homo sapiens
  CDS (1)..(963)
atggctgagggggacgcagggagcgaccagaggcagaatgaggaaattgaagcaatggcagccatttatggcgaggagtggtgtgtcattgatgactgtgccaaaatattttgtattagaattagcgacgatatagatgaccccaaatggacactttgcttgcaggtgatgctgccgaatgaatacccaggtacagctccacctatctaccagttgaatgctccttggcttaaagggcaagaacgtgcggatttatcaaatagccttgaggaaatatatattcagaatatcggtgaaagtattctttacctgtgggtggagaaaataagagatgttcttatacaaaaatctcagatgacagaaccaggcccagatgtaaagaagaaaactgaagaggaagatgttgaatgtgaagatgatctcattttagcatgtcagccggaaagttcggttaaagcattggattttgatatcagtgaaactcggacagaagtagaagtagaagaattacctccgattgatcatggcattcctattacagaccgaagaagtacttttcaggcacacttggctccagtggtttgtcccaaacaggtgaaaatggttctttccaaattgtatgagaataagaaaatagctagtgccacccacaacatctatgcctacagaatatattgtgaggataaacagaccttcttacaggattgtgaggatgatggggaaacagcagctggtgggcgtcttcttcatctcatggagattttgaatgtgaagaatgtcatggtggtagtatcacgctggtatggagggattctgctaggaccagatcgctttaaacatatcaacaactgtgccagaaacatactagtggaaaagaactacacaaattcacctgaggagtcatctaaggctttgggaaagaacaaaaaagtaagaaaagacaagaagaggaatgaacattaa

SEQ ID NO: 6901 - protein, 320 aa, Homo sapiens
MAEGDAGSDQRQNEEIEAMAAIYGEEWCVIDDCAKIFCIRISDDIDDPKWTLCLQVMLPNEYPGTAPPIYQLNAPWLKGQERADLSNSLEEIYIQNIGESILYLWVEKIRDVLIQKSQMTEPGPDVKKKTEEEDVECEDDLILACQPESSVKALDFDISETRTEVEVEELPPIDHGIPITDRRSTFQAHLAPVVCPKQVKMVLSKLYENKKIASATHNIYAYRIYCEDKQTFLQDCEDDGETAAGGRLLHLMEILNVKNVMVVVSRWYGGILLGPDRFKHINNCARNILVEKNYTNSPEESSKALGKNKKVRKDKKRNEH

SEQ ID NO: 6902 - DNA, 24 bp, Artificial sequence
  primer
atggatgacgatcacgaacagttg

SEQ ID NO: 6903 - DNA, 21 bp, Artificial sequence
  primer
ttacgagtcgaagccggccct

SEQ ID NO: 6904 - protein, 315 aa, Artificial sequence
  consensus sequence
  Variant (2)..(3): Xaa in position 2 to 3 is any amino acid
  Variant (5)..(7): Xaa in position 5 to 7 is any amino acid
  Variant (10)..(38): Xaa in position 10 to 38 is any amino acid
  Variant (39)..(66): Xaa in position 39 to 66 is any or no amino acid
  Variant (69)..(71): Xaa in position 69 to 71 is any amino acid
  Variant (72)..(72): Xaa in position 72 is any or no amino acid
  Variant (74)..(95): Xaa in position 74 to 95 is any amino acid
  Variant (96)..(109): Xaa in position 96 to 109 is any or no amino acid
  Variant (111)..(111): Xaa in position 111 is any amino acid
  Variant (113)..(114): Xaa in position 113 to 114 is any amino acid
  Variant (116)..(148): Xaa in position 116 to 148 is any amino acid
  Variant (149)..(184): Xaa in position 149 to 184 is any or no amino acid
  Variant (186)..(187): Xaa in position 186 to 187 is any amino acid
  Variant (189)..(195): Xaa in position 189 to 195 is any amino acid
  Variant (197)..(197): Xaa in position 197 is any amino acid
  Variant (199)..(204): Xaa in position 199 to 204 is any amino acid
  Variant (206)..(206): Xaa in position 206 is any amino acid
  Variant (208)..(217): Xaa in position 208 to 217 is any amino acid
  Variant (219)..(222): Xaa in position 219 to 222 is any amino acid
  Variant (223)..(223): Xaa in position 223 is any or no amino acid
  Variant (225)..(227): Xaa in position 225 to 227 is any amino acid
  Variant (229)..(229): Xaa in position 229 is any amino acid
  Variant (231)..(233): Xaa in position 231 to 233 is any amino acid
  Variant (235)..(235): Xaa in position 235 is any amino acid
  Variant (238)..(245): Xaa in position 238 to 245 is any amino acid
  Variant (246)..(262): Xaa in position 246 to 262 is any or no amino acid
  Variant (271)..(271): Xaa in position 271 is any amino acid
  Variant (275)..(275): Xaa in position 275 is any amino acid
  Variant (277)..(277): Xaa in position 277 is any amino acid
  Variant (281)..(288): Xaa in position 281 to 288 is any amino acid
  Variant (290)..(290): Xaa in position 290 is any amino acid
  Variant (292)..(292): Xaa in position 292 is any amino acid
  Variant (294)..(294): Xaa in position 294 is any amino acid
  Variant (297)..(297): Xaa in position 297 is any amino acid
  Variant (300)..(302): Xaa in position 300 to 302 is any amino acid
  Variant (308)..(309): Xaa in position 308 to 309 is any amino acid
  Variant (312)..(314): Xaa in position 312 to 314 is any amino acid
EXXAXXXIYXXXXXXXXXXXXXXXXXXXXXXXXXXXXXXXXXXXXXXXXXXXXXXXXXXXXXXXXXYPXXXXPXXXXXXXXXXXXXXXXXXXXXXXXXXXXXXXXXXXXGXVXXFXXXXXXXXXXXXXXXXXXXXXXXXXXXXXXXXXXXXXXXXXXXXXXXXXXXXXXXXXXXXXXXXXXXXXWXXSXXXXXXXSXFXXXXXXVXSXXXXXXXXXXLXXXXXKXXXAXHXXXAXRIXXXXXXXXXXXXXXXXXXXXXXXXXQDCDDDGEXAAGXRXLHLXXXXXXXXVXVXVXRWXGGXXXGPDRFXXINXXXR

SEQ ID NO: 6905 - protein, 28 aa, Artificial sequence
  protein pattern
  Variant (2)..(2): Xaa in position 2 is Phe, Ile, Met or Val
  Variant (4)..(4): Xaa in position 4 is any or no amino acid
  Variant (6)..(6): Xaa in position 6 is any amino acid
  Variant (7)..(7): Xaa in position 7 is any or no amino acid
  Variant (10)..(10): Xaa in position 10 is Phe or Tyr
  Variant (13)..(14): Xaa in position 13 to 14 is any amino acid
  Variant (15)..(15): Xaa in position 15 is Ile or Leu
  Variant (21)..(21): Xaa in position 21 is Lys or Arg
  Variant (22)..(22): Xaa in position 22 is any amino acid
  Variant (25)..(25): Xaa in position 25 is Ala, Asn, Ser or Thr
  Variant (26)..(26): Xaa in position 26 is any amino acid
  Variant (27)..(27): Xaa in position 27 is Ala, Gly or Thr
VXVXVXXRWXGGXXXGPDRFXXINXXXR

SEQ ID NO: 6906 - protein, 23 aa, Artificial sequence
  protein pattern
  Variant (2)..(2): Xaa in position 2 is Cys or Ser
  Variant (3)..(3): Xaa in position 3 is Asp or Glu
  Variant (8)..(8): Xaa in position 8 is Ala, Asp or Thr
  Variant (12)..(12): Xaa in position 12 is Gly or Ser
  Variant (14)..(14): Xaa in position 14 is Leu, Met or Val
  Variant (18)..(18): Xaa in position 18 is Ile, Leu, Met or Val
  Variant (19)..(19): Xaa in position 19 is Glu, Asn, Gln, Ser or Thr
  Variant (20)..(21): Xaa in position 20 to 21 is any amino acid
  Variant (22)..(22): Xaa in position 22 is Asp, Gly or Asn
  Variant (23)..(23): Xaa in position 23 is Ala, Leu or Val
DXXDDGEXAAGXRXLHLXXXXXX

SEQ ID NO: 6907 - protein, 21 aa, Artificial sequence
  protein pattern
  Variant (2)..(3): Xaa in position 2 to 3 is any amino acid
  Variant (4)..(4): Xaa in position 4 is Asp, Glu or Asn
  Variant (5)..(5): Xaa in position 5 is any amino acid
  Variant (7)..(7): Xaa in position 7 is any amino acid
  Variant (8)..(9): Xaa in position 8 to 9 is any or no amino acid
  Variant (11)..(11): Xaa in position 11 is any amino acid
  Variant (12)..(13): Xaa in position 12 to 13 is any or no amino acid
  Variant (15)..(15): Xaa in position 15 is any amino acid
  Variant (16)..(16): Xaa in position 16 is Ile or Met
  Variant (17)..(17): Xaa in position 17 is any amino acid
  Variant (18)..(18): Xaa in position 18 is Ala or Ser
  Variant (19)..(19): Xaa in position 19 is Trp or Tyr
LXXXXKXXXAXXXHXXXXXRI

SEQ ID NO: 6908 - protein, 16 aa, Artificial sequence
  protein pattern
  Variant (2)..(2): Xaa in position 2 is Ala, Asp, Thr or Val
  Variant (4)..(4): Xaa in position 4 is any amino acid
  Variant (5)..(5): Xaa in position 5 is Ala or Gly
  Variant (6)..(9): Xaa in position 6 to 9 is any amino acid
  Variant (11)..(11): Xaa in position 11 is any amino acid
  Variant (12)..(12): Xaa in position 12 is Cys or Ser
  Variant (13)..(14): Xaa in position 13 to 14 is any amino acid
  Variant (15)..(15): Xaa in position 15 is Asp, Glu or Gln
  Variant (16)..(16): Xaa in position 16 is Ala or Val
SXFXXXXXXVXXXXXX

SEQ ID NO: 6909 - protein, 9 aa, Artificial sequence
  protein pattern
  Variant (2)..(2): Xaa in position 2 is Ile, Leu or Val
  Variant (3)..(3): Xaa in position 3 is any amino acid
  Variant (4)..(4): Xaa in position 4 is Ala or Ser
  Variant (5)..(5): Xaa in position 5 is Ile, Leu, Met or Val
  Variant (6)..(6): Xaa in position 6 is Ala, Asp, Glu or Asn
  Variant (7)..(7): Xaa in position 7 is Ala or Ser
EXXXXXXIY

SEQ ID NO: 6910 - DNA, 1113 bp, Saccharomyces cerevisiae; identical to SEQ ID NO: 1569
  CDS (1)..(1113)

SEQ ID NO: 6911 - protein, 370 aa, Saccharomyces cerevisiae; identical to SEQ ID NO: 1570

SEQ ID NO: 6912 - DNA, 1083 bp, Methylophilus methylotrophus; AS-1; identical to SEQ ID NO: 1509
  CDS (1)..(1083)

SEQ ID NO: 6913 - protein, 360 aa, Methylophilus methylotrophus; AS-1; identical to SEQ ID NO: 1510

SEQ ID NO: 6914 - DNA, 1769 bp, Escherichia coli
  CDS (479)..(1549)
aagcttttaccggaaagtcctcgggcataagtaaaatcggtctggcaagttttcttttgtccttcggcatatcctttaaggtatagaccgcgatccgcctgtgaatcgctaaatgcatcgtcatcttttatggcgctgcccgatatcgcatcttccataccgacatcataccagtcggtgctggtcaaggttggcgcgtgagtataaggatcaatctgacatccgctaaccagtaaagccaacaagggggcgataaactttttcatcatttctttctcctttttcaaagcatagcggattgttttcaaagggagtgtaaatttatctatacagaggtaagggttgaaagcgcgactaaattgcctgtgtaaataaaaatgtacgaaatatggattgaaaactttactttatgtgttatcgttacgtcatcctcgctgaggatcaactatcgcaaacgagcataaacaggatcgccatcatgcaaaaagacgcgctgaataacgtacatattaccgacgaacaggttttaatgactccggaacaactgaaggccgcttttccattgagcctgcaacaagaagcccagattgctgactcgcgtaaaagcatttcagatattatcgccgggcgcgatcctcgtctgctggtagtatgtggtccttgttccattcatgatccggaaactgctctggaatatgctcgtcgatttaaagcccttgccgcagaggtcagcgatagcctctatctggtaatgcgcgtctattttgaaaaaccccgtaccactgtcggctggaaagggttaattaacgatccccatatggatggctcttttgatgtagaagccgggctgcagatcgcgcgtaaattgctgcttgagctggtgaatatgggactgccactggcgacggaagcgttagatccgaatagcccgcaatacctgggcgatctgtttagctggtcagcaattggtgctcgtacaacggaatcgcaaactcaccgtgaaatggcctccgggctttccatgccggttggttttaaaaacggcaccgacggcagtctggcaacagcaattaacgctatgcgcgccgccgcccagccgcaccgttttgttggcattaaccaggcagggcaggttgcgttgctacaaactcaggggaatccggacggccatgtgatcctgcgcggtggtaaagcgccgaactatagccctgcggatgttgcgcaatgtgaaaaagagatggaacaggcgggactgcgcccgtctctgatggtagattgcagccacggtaattccaataaagattatcgccgtcagcctgcggtggcagaatccgtggttgctcaaatcaaagatggcaatcgctcaattattggtctgatgatcgaaagtaatatccacgagggcaatcagtcttccgagcaaccgcgcagtgaaatgaaatacggtgtatccgtaaccgatgcctgcattagctgggaaatgaccgatgccttgctgcgtgaaattcatcaggatctgaacgggcagctgacggctcgcgtggcttaagaggtttattatggttgctgaattgaccgcattacgcgatcaaattgatgaagtcgataaagcgctgctgaatttattagcgaagcgtctggaactggttgctgaagtgggcgaggtgaaaagccgctttggactgcctatttatgttccggcagcgcgaggcatctatgttggcctcgcgtcgtgcagaggcggaagctctgggtgtaccgccagatct

SEQ ID NO: 6915 - protein, 356 aa, Escherichia coli; identical to SEQ ID NO: 1544

SEQ ID NO: 6916 - DNA, 1071 bp, Bacillus licheniformis
  CDS (1)..(1071)
atgcaaaaagacgcgctgaataacgtacatattaccgacgaacaggttttaatgactccggaacaactgaaggccgcttttccattgagcctgcaacaagaagcccagattgctgactcgcgtaaaagcatttcagatattatcgccgggcgcgatcctcgtctgctggtagtatgtggtccttgttccattcatgatccggaaactgctctggaatatgctcgtcgatttaaagcccttgccgcagaggtcagcgatagcctctatctggtaatgcgcgtctattttgaaaaaccccgtaccactgtcggctggaaagggttaattaacgatccccatatggatggctcttttgatgtagaagccgggctgcagatcgcgcgtaaattgctgcttgagctggtgaatatgggactgccactggcgacggaagcgttagatccgaatagcccgcaatacctgggcgatctgtttagctggtcagcaattggtgctcgtacaacggaatcgcaaactcaccgtgaaatggcctccgggctttccatgccggttggttttaaaaacggcaccgacggcagtctggcaacagcaattaacgctatgcgcgccgccgcccagccgcaccgttttgttggcattaaccaggcagggcaggttgcgttgctacaaactcaggggaatccggacggccatgtgatcctgcgcggtggtaaagcgccgaactatagccctgcggatgttgcgcaatgtgaaaaagagatggaacacgcgggactgcgcccgtctctgatggtagattgcagccacggtaattccaataaagattatcgccgtcagcctgcggtggcagaatccgtggttgctcaaatcaaagatggcaatcgctcaattattggtctgatgatcgaaagtaatatccacgagggcaatcagtcttccgagcaaccgcgcagtgaaatgaaatacggtgtatccgtaaccgatgcctgcattagctgggaaatgaccgatgccttgctgcgtgaaattcatcaggatctgaacgggcagctgacggctcgcgtggcttaa

SEQ ID NO: 6917 - protein, 356 aa, Bacillus licheniformis
MQKDALNNVHITDEQVLMTPEQLKAAFPLSLQQEAQIADSRKSISDIIAGRDPRLLVVCGPCSIHDPETALEYARRFKALAAEVSDSLYLVMRVYFEKPRTTVGWKGLINDPHMDGSFDVEAGLQIARKLLLELVNMGLPLATEALDPNSPQYLGDLFSWSAIGARTTESQTHREMASGLSMPVGFKNGTDGSLATAINAMRAAAQPHRFVGINQAGQVALLQTQGNPDGHVILRGGKAPNYSPADVAQCEKEMEHAGLRPSLMVDCSHGNSNKDYRRQPAVAESVVAQIKDGNRSIIGLMIESNIHEGNQSSEQPRSEMKYGVSVTDACISWEMTDALLREIHQDLNGQLTARVA

SEQ ID NO: 6918 - DNA, 1089 bp, Pseudomonas aeruginosa
  CDS (1)..(1089)
ttgagtaccacgatggctgatttacagatcgacgaccttaacgttgcctccaacgagaccctgatcacgccggagcagctcaagcgtgaaattcccctgaccgacaaggccctgcagaccgtggcccatggtcgccaggtggtgcgcgacatcctggatggcaaggaccaccgtctgttcgtggtgatcggcccctgctccatccacgacatcaaggccgcccacgaatacgccgaccgcctcaaggcgctcgcggccgaagtggcggatacgctgttcctggtgatgcgcgtgtacttcgagaagccgcgtaccacggtgggctggaaaggcctgatcaacgatccgtacctggacgactcgttcaagatccaggatggcctgcacatcggtcgccaactgctccgcgacctcgccgagaaaggcttgcccaccgccaccgaagcgctcgacccgatttccccgcagtacctgcaggacctgatcagctggtcggcgatcggcgcccgtaccaccgaatcgcagacccaccgcgagatggcctccggcctgtcttccgcggtcggcttcaagaacggcaccgatggcagcctgaccgtggcgatcaatgccctgcagtcggtctccagcccgcatcgcttcctcggcatcaaccagcagggcggcgtatccatcgtcaccaccaagggcaaccgctatggtcacgtggtgttgcgcggcggcaacggcaagccgaactacgattcggtcagcgtcgcgctctgcgagcaggacctgaacaaggcgaaaatcccgctgaacatcatggtcgactgcagccacgccaactccaacaaggacccggccctgcaaccgctggtgatggacaacgtcagcaaccagatcgtcgaaggcaacaactcgatcgtcggcctgatggtggaaagccacctgggctggggcagccagccgattccgaaggatctcgaccaacttcagtacggcgtctccatcaccgatgcatgcatcgactgggcgaccaccgagaagagcatccgcagcatgcacgccaagctcaaggacgtgctgccgaaacgccagcgcggctga

SEQ ID NO: 6919 - protein, 362 aa, Pseudomonas aeruginosa
LSTTMADLQIDDLNVASNETLITPEQLKREIPLTDKALQTVAHGRQVVRDILDGKDHRLFVVIGPCSIHDIKAAHEYADRLKALAAEVADTLFLVMRVYFEKPRTTVGWKGLINDPYLDDSFKIQDGLHIGRQLLRDLAEKGLPTATEALDPISPQYLQDLISWSAIGARTTESQTHREMASGLSSAVGFKNGTDGSLTVAINALQSVSSPHRFLGINQQGGVSIVTTKGNRYGHVVLRGGNGKPNYDSVSVALCEQDLNKAKIPLNIMVDCSHANSNKDPALQPLVMDNVSNQIVEGNNSIVGLMVESHLGWGSQPIPKDLDQLQYGVSITDACIDWATTEKSIRSMHAKLKDVLPKRQRG

SEQ ID NO: 6920 - DNA, 1235 bp, Salmonella typhimurium; identical to SEQ ID NO: 1535
  CDS (165)..(1235)

SEQ ID NO: 6921 - protein, 356 aa, Salmonella typhimurium; identical to SEQ ID NO: 1536

SEQ ID NO: 6922 - DNA, 1086 bp, Deinococcus radiodurans; identical to SEQ ID NO: 1537
  CDS (1)..(1086)

SEQ ID NO: 6923 - protein, 361 aa, Deinococcus radiodurans; identical to SEQ ID NO: 1538

SEQ ID NO: 6924 - DNA, 1071 bp, Salmonella enterica subsp. enterica serovar Typhi; identical to SEQ ID NO: 1539
  CDS (1)..(1071)

SEQ ID NO: 6925 - protein, 356 aa, Salmonella enterica subsp. enterica serovar Typhi; identical to SEQ ID NO: 1540

SEQ ID NO: 6926 - DNA, 1071 bp, Yersinia pestis; identical to SEQ ID NO: 1541
  CDS (1)..(1071)

SEQ ID NO: 6927 - protein, 356 aa, Yersinia pestis; identical to SEQ ID NO: 1542

SEQ ID NO: 6928 - DNA, 1047 bp, Yersinia pestis; identical to SEQ ID NO: 1611
  CDS (1)..(1047)

SEQ ID NO: 6929 - protein, 348 aa, Yersinia pestis; identical to SEQ ID NO: 1612

SEQ ID NO: 6930 - DNA, 1047 bp, Salmonella enterica subsp. enterica serovar Typhi; identical to SEQ ID NO: 1935
  CDS (1)..(1047)

SEQ ID NO: 6931 - protein, 348 aa, Salmonella enterica subsp. enterica serovar Typhi; identical to SEQ ID NO: 1936

SEQ ID NO: 6932 - DNA, 1047 bp, Escherichia coli; identical to SEQ ID NO: 1507
  CDS (1)..(1047)

SEQ ID NO: 6933 - protein, 348 aa, Escherichia coli; identical to SEQ ID NO: 1508

SEQ ID NO: 6934 - DNA, 1131 bp, Nostoc sp. PCC 7120; identical to SEQ ID NO: 1545
  CDS (1)..(1131)

SEQ ID NO: 6935 - protein, 376 aa, Nostoc sp. PCC 7120; identical to SEQ ID NO: 1546

SEQ ID NO: 6936 - DNA, 1077 bp, Pseudomonas aeruginosa; identical to SEQ ID NO: 1547
  CDS (1)..(1077)

SEQ ID NO: 6937 - protein, 358 aa, Pseudomonas aeruginosa; identical to SEQ ID NO: 1548

SEQ ID NO: 6938 - DNA, 1047 bp, Buchnera sp; identical to SEQ ID NO: 1921
  CDS (1)..(1047)

SEQ ID NO: 6939 - protein, 348 aa, Buchnera sp; identical to SEQ ID NO: 1922

SEQ ID NO: 6940 - DNA, 1074 bp, Vibrio cholerae; identical to SEQ ID NO: 1551
  CDS (1)..(1074)

SEQ ID NO: 6941 - protein, 357 aa, Vibrio cholerae; identical to SEQ ID NO: 1552

SEQ ID NO: 6942 - DNA, 1038 bp, Lactococcus lactis subsp. lactis; identical to SEQ ID NO: 1553
  CDS (1)..(1038)

SEQ ID NO: 6943 - protein, 345 aa, Lactococcus lactis subsp. lactis; identical to SEQ ID NO: 1554

SEQ ID NO: 6944 - DNA, 1032 bp, Streptococcus pneumoniae; identical to SEQ ID NO: 1557
  CDS (1)..(1032)

SEQ ID NO: 6945 - protein, 343 aa, Streptococcus pneumoniae; identical to SEQ ID NO: 1558

SEQ ID NO: 6946 - DNA, 1056 bp, Neisseria meningitidis; identical to SEQ ID NO: 1585
  CDS (1)..(1056)

SEQ ID NO: 6947 - protein, 351 aa, Neisseria meningitidis; identical to SEQ ID NO: 1586

SEQ ID NO: 6948 - DNA, 1095 bp, Pseudomonas aeruginosa; identical to SEQ ID NO: 1559
  CDS (1)..(1095)

SEQ ID NO: 6949 - protein, 364 aa, Pseudomonas aeruginosa; identical to SEQ ID NO: 1560

SEQ ID NO: 6950 - DNA, 1110 bp, Caulobacter crescentus; identical to SEQ ID NO: 1593
  CDS (1)..(1110)

SEQ ID NO: 6951 - protein, 369 aa, Caulobacter crescentus; identical to SEQ ID NO: 1594

SEQ ID NO: 6952 - DNA, 1143 bp, Xylella fastidiosa
  CDS (1)..(1143)
atgtctcctccgcttggtctatgtctaaatgttctgagattacatcccatgccaccatttaccgacgacctccgtatccgcaaaattgaaccactgacacctcctaaccagctcctattgcaactaccatgcgatgagcaggcatcgctgactgttgcgacctcacgcaacgcactgcacgatatcctgcacggccacaacgaccgtttagccgtcgtgataggcccatgctcaatccatgatccaattgcagccattgattacgcgcaacgtctacacccattgcgtgagatgtacaaggatgcactagagatcgtgatgcgggtttactttcagaaaccgcgcaccaccattggttggaaaggattggtcaacgatccggatcttgatggcagcttccaaatcaataagggcctgcatatcgcgcgcaacctgctacgcgatatcaatcatctcggcttacccgctggtgtggaatttctagacacgatttcgccgcaatatctggctgacttagtcgcctggggtgccattggtgcacgcaccactgagagccaaatacaccgtgaaatggcttcaggtttatcgtgcccgattggctttaaaaacagtaccagtggtgatgtgaaaattgctgctgacgcgattaaagcagcttcgcatccgcaccatttcctttcagtgacaaagacaggtgttgccgcagtcgtcgccacccagggtaaccccgattgtcacgtgattctacgtggaggcagggtcccgaattacgacgcaatcaatgtcgaagctgccagccaaacattgcttaaatccaagctaccggtgcgactgatgattgatgcgagccatgccaatagcggcaaaaacccaaacaatcaacccaaggtgatcgagaacatcgtagaacagcttgaagccggtgaacgccgcatcgtcggtgtcatgattgaaagccacattgttggtggtcggcaagaattagtccttggaaacacacttacctatggacagagcattaccgatgcttgcatcgactgggatacctcggtcgcaatgttagagcagctcgctcaggccgtacgcgtcagacagactctaccaacgaccgctacaactaacaaaacatcaaaaacccaataa

SEQ ID NO: 6953 - protein, 380 aa, Xylella fastidiosa
MSPPLGLCLNVLRLHPMPPFTDDLRIRKIEPLTPPNQLLLQLPCDEQASLTVATSRNALHDILHGHNDRLAVVIGPCSIHDPIAAIDYAQRLHPLREMYKDALEIVMRVYFQKPRTTIGWKGLVNDPDLDGSFQINKGLHIARNLLRDINHLGLPAGVEFLDTISPQYLADLVAWGAIGARTTESQIHREMASGLSCPIGFKNSTSGDVKIAADAIKAASHPHHFLSVTKTGVAAVVATQGNPDCHVILRGGRVPNYDAINVEAASQTLLKSKLPVRLMIDASHANSGKNPNNQPKVIENIVEQLEAGERRIVGVMIESHIVGGRQELVLGNTLTYGQSITDACIDWDTSVAMLEQLAQAVRVRQTLPTTATTNKTSKTQ

SEQ ID NO: 6954 - DNA, 1047 bp, Buchnera aphidicola; identical to SEQ ID NO: 1563
  CDS (1)..(1047)

SEQ ID NO: 6955 - protein, 348 aa, Buchnera aphidicola; identical to SEQ ID NO: 1564

SEQ ID NO: 6956 - DNA, 1104 bp, Corynebacterium glutamicum; identical to SEQ ID NO: 1565
  CDS (1)..(1104)

SEQ ID NO: 6957 - protein, 367 aa, Corynebacterium glutamicum; identical to SEQ ID NO: 1566

SEQ ID NO: 6958 - DNA, 1089 bp, Haemophilus influenzae; identical to SEQ ID NO: 1919
  CDS (1)..(1089)

SEQ ID NO: 6959 - protein, 362 aa, Haemophilus influenzae; identical to SEQ ID NO: 1920

SEQ ID NO: 6960 - DNA, 1089 bp, Amycolatopsis orientalis; identical to SEQ ID NO: 1575
  CDS (1)..(1089)

SEQ ID NO: 6961 - protein, 362 aa, Amycolatopsis orientalis; identical to SEQ ID NO: 1576

SEQ ID NO: 6962 - DNA, 1188 bp, Vibrio cholerae O1 biovar eltor str. N16961; identical to SEQ ID NO: 1581
  CDS (1)..(1188): transl_table=11

SEQ ID NO: 6963 - protein, 395 aa, Vibrio cholerae O1 biovar eltor str. N16961; identical to SEQ ID NO: 1582

SEQ ID NO: 6964 - DNA, 1071 bp, Escherichia coli O157:H7; identical to SEQ ID NO: 1591
  CDS (1)..(1071): transl_table=11

SEQ ID NO: 6965 - protein, 356 aa, Escherichia coli O157:H7; identical to SEQ ID NO: 1592

SEQ ID NO: 6966 - DNA, 1053 bp, Salmonella enterica subsp. enterica serovar Typhi str. CT18; identical to SEQ ID NO: 1595
  CDS (1)..(1053): transl_table=11

SEQ ID NO: 6967 - protein, 350 aa, Salmonella enterica subsp. enterica serovar Typhi str. CT18; identical to SEQ ID NO: 1596

SEQ ID NO: 6968 - DNA, 1053 bp, Salmonella typhimurium LT2; identical to SEQ ID NO: 1597
  CDS (1)..(1053): transl_table=11

SEQ ID NO: 6969 - protein, 350 aa, Salmonella typhimurium LT2; identical to SEQ ID NO: 1598

SEQ ID NO: 6970 - DNA, 1179 bp, Ralstonia solanacearum GMI1000; identical to SEQ ID NO: 1599
  CDS (1)..(1179): transl_table=11

SEQ ID NO: 6971 - protein, 392 aa, Ralstonia solanacearum GMI1000; identical to SEQ ID NO: 1600

SEQ ID NO: 6972 - DNA, 1080 bp, Ralstonia solanacearum GMI1000; identical to SEQ ID NO: 1601
  CDS (1)..(1080): transl_table=11

SEQ ID NO: 6973 - protein, 359 aa, Ralstonia solanacearum GMI1000; identical to SEQ ID NO: 1602

SEQ ID NO: 6974 - DNA, 1119 bp, Schizosaccharomyces pombe 972h-; identical to SEQ ID NO: 1577
  CDS (1)..(1119)

SEQ ID NO: 6975 - protein, 372 aa, Schizosaccharomyces pombe 972h-; identical to SEQ ID NO: 1578

SEQ ID NO: 6976 - DNA, 1074 bp, Xanthomonas axonopodis pv. citri str. 306; identical to SEQ ID NO: 1605
  CDS (1)..(1074): transl_table=11

SEQ ID NO: 6977 - protein, 357 aa, Xanthomonas axonopodis pv. citri str. 306; identical to SEQ ID NO: 1606

SEQ ID NO: 6978 - DNA, 1077 bp, Yersinia pestis KIM; identical to SEQ ID NO: 1609
  CDS (1)..(1077): transl_table=11

SEQ ID NO: 6979 - protein, 358 aa, Yersinia pestis KIM; identical to SEQ ID NO: 1610

SEQ ID NO: 6980 - DNA, 1053 bp, Yersinia pestis KIM; identical to SEQ ID NO: 1613
  CDS (1)..(1053): transl_table=11

SEQ ID NO: 6981 - protein, 350 aa, Yersinia pestis KIM; identical to SEQ ID NO: 1614

SEQ ID NO: 6982 - DNA, 1134 bp, Bifidobacterium longum NCC2705; identical to SEQ ID NO: 1619
  CDS (1)..(1134): transl_table=11

SEQ ID NO: 6983 - protein, 377 aa, Bifidobacterium longum NCC2705; identical to SEQ ID NO: 1620

SEQ ID NO: 6984 - DNA, 1053 bp, Shigella flexneri 2a str. 301; identical to SEQ ID NO: 1621
  CDS (1)..(1053): transl_table=11

SEQ ID NO: 6985 - protein, 350 aa, Shigella flexneri 2a str. 301; identical to SEQ ID NO: 1622

SEQ ID NO: 6986 - DNA, 1071 bp, Shigella flexneri 2a str. 301; identical to SEQ ID NO: 1623
  CDS (1)..(1071): transl_table=11

SEQ ID NO: 6987 - protein, 356 aa, Shigella flexneri 2a str. 301; identical to SEQ ID NO: 1624

SEQ ID NO: 6988 - DNA, 1053 bp, Escherichia coli CFT073; identical to SEQ ID NO: 1631
  CDS (1)..(1053): transl_table=11

SEQ ID NO: 6989 - protein, 350 aa, Escherichia coli CFT073; identical to SEQ ID NO: 1632

SEQ ID NO: 6990 - DNA, 1077 bp, Escherichia coli CFT073; identical to SEQ ID NO: 1633
  CDS (1)..(1077): transl_table=11

SEQ ID NO: 6991 - protein, 358 aa, Escherichia coli CFT073; identical to SEQ ID NO: 1634

SEQ ID NO: 6992 - DNA, 1140 bp, Escherichia coli CFT073; identical to SEQ ID NO: 1635
  CDS (1)..(1140): transl_table=11

SEQ ID NO: 6993 - protein, 379 aa, Escherichia coli CFT073; identical to SEQ ID NO: 1636

SEQ ID NO: 6994 - DNA, 1071 bp, Vibrio vulnificus CMCP6; identical to SEQ ID NO: 1883
  CDS (1)..(1071): transl_table=11

SEQ ID NO: 6995 - protein, 356 aa, Vibrio vulnificus CMCP6; identical to SEQ ID NO: 1884

SEQ ID NO: 6996 - DNA, 1083 bp, Coxiella burnetii RSA 493; identical to SEQ ID NO: 1649
  CDS (1)..(1083): transl_table=11

SEQ ID NO: 6997 - protein, 360 aa, Coxiella burnetii RSA 493; identical to SEQ ID NO: 1650

SEQ ID NO: 6998 - DNA, 1179 bp, Nitrosomonas europaea ATCC 19718; identical to SEQ ID NO: 1651
  CDS (1)..(1179): transl_table=11

SEQ ID NO: 6999 - protein, 392 aa, Nitrosomonas europaea ATCC 19718; identical to SEQ ID NO: 1652

SEQ ID NO: 7000 - DNA, 1119 bp, Bordetella parapertussis 12822; identical to SEQ ID NO: 1657
  CDS (1)..(1119): transl_table=11

SEQ ID NO: 7001 - protein, 372 aa, Bordetella parapertussis 12822; identical to SEQ ID NO: 1658

SEQ ID NO: 7002 - DNA, 1074 bp, Bordetella parapertussis 12822; identical to SEQ ID NO: 1659
  CDS (1)..(1074): transl_table=11

SEQ ID NO: 7003 - protein, 357 aa, Bordetella parapertussis 12822; identical to SEQ ID NO: 1660

SEQ ID NO: 7004 - DNA, 1074 bp, Bordetella bronchiseptica RB50; identical to SEQ ID NO: 1661
  CDS (1)..(1074): transl_table=11

SEQ ID NO: 7005 - protein, 357 aa, Bordetella bronchiseptica RB50; identical to SEQ ID NO: 1662

SEQ ID NO: 7006 - DNA, 1119 bp, Bordetella bronchiseptica RB50; identical to SEQ ID NO: 1663
  CDS (1)..(1119): transl_table=11

SEQ ID NO: 7007 - protein, 372 aa, Bordetella bronchiseptica RB50; identical to SEQ ID NO: 1664

SEQ ID NO: 7008 - DNA, 1053 bp, Photorhabdus luminescens subsp. laumondii TTO1; identical to SEQ ID NO: 1517
  CDS (1)..(1053): transl_table=11

SEQ ID NO: 7009 - protein, 350 aa, Photorhabdus luminescens subsp. laumondii TTO1; identical to SEQ ID NO: 1674

SEQ ID NO: 7010 - DNA, 1245 bp, Vibrio vulnificus YJ016; identical to SEQ ID NO: 1677
  CDS (1)..(1245): transl_table=11

SEQ ID NO: 7011 - protein, 414 aa, Vibrio vulnificus YJ016; identical to SEQ ID NO: 1678

SEQ ID NO: 7012 - DNA, 1122 bp, Eremothecium gossypii; identical to SEQ ID NO: 1847
  CDS (1)..(1122)

SEQ ID NO: 7013 - protein, 373 aa, Eremothecium gossypii; identical to SEQ ID NO: 1848

SEQ ID NO: 7014 - DNA, 1095 bp, Eremothecium gossypii; identical to SEQ ID NO: 1845
  CDS (1)..(1095)

SEQ ID NO: 7015 - protein, 364 aa, Eremothecium gossypii; identical to SEQ ID NO: 1846

SEQ ID NO: 7016 - DNA, 1113 bp, Magnaporthe grisea 70-15
  CDS (1)..(1113)
atgtcgttcttcatcccaaacaagaatgttggcaacaaggaggaaagtgaagactggaggatccgtggatacaaccctctcacgtctcccgatctcctccaacatgagatcagtcagacccccgagtctaggcagacggtgatgcagggccgcgaggaggcagctgctgttgtcaacggcaacgaccccatgaacaggttgctcgtcatcgtcggcccgtgctccatccatgacccagaagccgcccttcagtactgcgacatgctggtcaaggagaaggagaagcacaaggacgagctgctcatcgtcatgcgagcctacctggaaaagccccggacgaccgtcggctggaagggtctcatcaacgacccggatatcgacaacagcttcaagattaacaagggtctcaagatgtcccgccagctgtttgtcgacctcaccagcaaggggatgccgatcgcttcggagatgcttgacaccatctcaccccagttcctcgccgatctcctttctgcaggcgcagtcggtgcccgcaccaccgagagccagcttcaccgcgagctggcctctggcctatcgttccccgtcggcttcaagaacggcaccgacggcacactgggcgtcgccatcgacgctatcggcgccgttaagcacccccaccacttcttgtcggtgaccaagccgggcgtggtggccatcgtgggcacagtcggcaacgaggactgcttcgtgatcctgcgcggcgggaaaaagggcaccaactatgacgccaagagcatcggcgaggccaaggaggctctggtcaaggccgggctcaggccgcgcctcatggtcgactgcagccatggcaactcgctcaaggaccaccgcaaccagcccaaggtctcccacgagctggccgaacagatcaaggcgggcgaggatgccatcatgggcgtcatgatcgagagcaacatcaatgagggcagccagaaggtgcccaaggagggcaaggctgggctgaagcacggcgtcagcatcacggatgcgtgcatctcatggcaggacaccgttacggtgcttgacgagctcgctgctgctgtcaagcagaggcgggaggctgcgcaaaagtaa

SEQ ID NO: 7017 - protein, 370 aa, Magnaporthe grisea 70-15
MSFFIPNKNVGNKEESEDWRIRGYNPLTSPDLLQHEISQTPESRQTVMQGREEAAAVVNGNDPMNRLLVIVGPCSIHDPEAALQYCDMLVKEKEKHKDELLIVMRAYLEKPRTTVGWKGLINDPDIDNSFKINKGLKMSRQLFVDLTSKGMPIASEMLDTISPQFLADLLSAGAVGARTTESQLHRELASGLSFPVGFKNGTDGTLGVAIDAIGAVKHPHHFLSVTKPGVVAIVGTVGNEDCFVILRGGKKGTNYDAKSIGEAKEALVKAGLRPRLMVDCSHGNSLKDHRNQPKVSHELAEQIKAGEDAIMGVMIESNINEGSQKVPKEGKAGLKHGVSITDACISWQDTVTVLDELAAAVKQRREAAQK

SEQ ID NO: 7018 - DNA, 1152 bp, Magnaporthe grisea 70-15
  CDS (1)..(1152)
atgtccaacggaacgaacatggtgccggcccaggtcgtctttgacgataccagagtcctgggtcaggaccctctgatccctccccagatcttgatggaggagatcccgatcaccaaagccgccctcgagacagtcgttcgcggtcgccaggaggccgtcgcttgcgtcattggccgtgacgaccgccttctcgttatcgttggaccctgctcgattcacgacccggcagcggccctcgaatactgccaacgcctcaaggccctggccgacaagctctcagatgacctctgcatcgttatgcgcgcctacctcgaaaagcccaggaccacggtgggctggaagggtctgatcaacgaccccgatatcgaccagaccttcaagatcaacaagggactgcgcatttcgcgacagatcttctgcgacctgacctcggccggtatgcccatcgccagcgagatgctcgataccatttctcctcagttcctggccgatctgatctcggttggtgctatcggcgcccgcacgaccgaaagccaattgcaccgagagttggcatctggtctttcgttccccgtgggattcaagaatggaacggacggtaacctcggtgtcgcgattgatgccatcggagctgccgcctcaaagcactcatttatgggtgtgacaaagcagggtctggctgccatcacccggacggcgggcaaccaacatggtttcgtcatcctgaggggtggtaccaagggtcccaactttgacaaggctagtgttcaggccgccaaggagacacttgtccagaagggccagaggcaggccattatgattgactgctcgcatggcaattccaacaaggaccaccgcaaccaacccaaggttgccaaggtcattggtgaccagctgcgcgagggtgagaggtccatcattggtgtcatgatcgagtccaacatcaacgagggcaaccagaaggtgccggctgaaggcccgtccggcctcaagaagggcgtcagcatcacggacgcctgtatcgactgggacagcacagtcgctgtcctagaggatctggctgatgcggtacgagcgcggaggagtctttaccccaatgaccgcaacgttgacagggaggagaggctcgcaactcctcttgaggaggactaa

SEQ ID NO: 7019 - protein, 383 aa, Magnaporthe grisea 70-15
MSNGTNMVPAQVVFDDTRVLGQDPLIPPQILMEEIPITKAALETVVRGRQEAVACVIGRDDRLLVIVGPCSIHDPAAALEYCQRLKALADKLSDDLCIVMRAYLEKPRTTVGWKGLINDPDIDQTFKINKGLRISRQIFCDLTSAGMPIASEMLDTISPQFLADLISVGAIGARTTESQLHRELASGLSFPVGFKNGTDGNLGVAIDAIGAAASKHSFMGVTKQGLAAITRTAGNQHGFVILRGGTKGPNFDKASVQAAKETLVQKGQRQAIMIDCSHGNSNKDHRNQPKVAKVIGDQLREGERSIIGVMIESNINEGNQKVPAEGPSGLKKGVSITDACIDWDSTVAVLEDLADAVRARRSLYPNDRNVDREERLATPLEED

SEQ ID NO: 7020 - DNA, 1128 bp, Gibberella zeae PH-1
  CDS (1)..(1128)
atgtcttcctctttctttatcccaaacaagaatgttggcaaccaagctgactctgaagattggagaatccgtggttacaaccctttgactcccccagacctgctccaacacgaaatctcccaatcccccgaatctaaaaagacggtcctcgaaggacgcaatgaaactgtcgctattgtcaatggcaccgacgagaagaaccgattgctcgttgtcattggcccatgttccatccacgaccccgcggctgcccttgcctactgcgacctcctcttgaaggagaaggagaagcataaggatgagcttcttatcgttatgcgatcctaccttgagaagccgcgcacaactgtcggctggaagggtttgatcaacgaccccgatattgatggcagctttaagatcaacaagggtctgcgcatctctcgacagctctttgttgacttgactgccaagggcatgcctatcgccagcgaaatgctggatactatctcaccccagttccttgctgatctactgtcagtcggtgccattggcgctcgtacaactgagagccagctccaccgtgaacttgccagtggcctgagtttccctgtgggtttcaagaacggcactgatggttctctgggcgtcgctattgatgccattggtgcggcccagcatcctcaccatttcctctcagtcaccaagcctggtgttgtcgccattgttggtaccgagggcaacaacgactgcttcgttatcctccgaggtggtaccaagggcaccaacttcgatgctgagaacattgctcttgccaaggaggcgcttcagaagaagggcgttcgacagagagttatgattgactgcagccacggaaactcttccaaggatcacaagaaccagcccaaggttgctgctgatatcgctggtcagatctccaagggcgaggatggcatcatgggagtcatgatcgagagcaacatcaacgagggtaaccaaaaggttcccgccgagggcaagtccgggcttaagtacggcgtcagcatcactgatgcctgtattagctgggaggacaccatctctacgctcaacactcttgcgcaggcagtaaaagaccgccgcaagcttgccagctcaaatggtgcctaa

SEQ ID NO: 7021 - protein, 375 aa, Gibberella zeae PH-1
MSSSFFIPNKNVGNQADSEDWRIRGYNPLTPPDLLQHEISQSPESKKTVLEGRNETVAIVNGTDEKNRLLVVIGPCSIHDPAAALAYCDLLLKEKEKHKDELLIVMRSYLEKPRTTVGWKGLINDPDIDGSFKINKGLRISRQLFVDLTAKGMPIASEMLDTISPQFLADLLSVGAIGARTTESQLHRELASGLSFPVGFKNGTDGSLGVAIDAIGAAQHPHHFLSVTKPGVVAIVGTEGNNDCFVILRGGTKGTNFDAENIALAKEALQKKGVRQRVMIDCSHGNSSKDHKNQPKVAADIAGQISKGEDGIMGVMIESNINEGNQKVPAEGKSGLKYGVSITDACISWEDTISTLNTLAQAVKDRRKLASSNGA

SEQ ID NO: 7022 - DNA, 1098 bp, Gibberella zeae PH-1
  CDS (1)..(1098)
atgccttcagctactatcgacatgtctaccatcgctgccgatgacaccagagtcctcggacaggatcccttgatccctcctgctctcctcacctccgaaatccctctccccgagaaggccacaaacaccgttgtcaagggccgtcaagatgctgccgacattgtccttggccagagcgacagacttctcgtcgttgtcggcccctgttccattcacgaccctgctaccgcccaggaatacgctgcccgactcaaggaggtctctgacagactcgacaaggatctctgcatcgtgatgcgcgcctacctcgagaagccccgaacaaccgttggctggaagggtcttatcaacgaccccgatatcgacaactccttcaagatcaacaagggtctccgtgtttcccgccagctgttcgtcgacctgaccacccagggtctgccaatcgccactgagatgcttgacaccatttctcctcagttccttgctgactgtatctctgttggcgctattggtgcccgtaccaccgagtcccagcttcaccgtgagcttgcctctggtctttctttccccgttggtttcaagaacggtacagacggtagccttaacgttgccattgacgctattggcgccgccgccgctcagcaccacttcatgggtgttaccaagcagggccttgctgctatcaccagaaccaagggtaacgagcactgcttcgttattctccgtggaggaaccaagggtaccaactttgacaaggacagcgtccagaatgccaagaaggtcctccaggacaagaagcagaaggaggctatcatgattgactgctcccacggaaactcttccaaggaccaccgaaaccaacccaaggttgccaaggtcgttggtgagcagctccgtgagggtgagaaggccattattggtgtcatgatcgagtccaacattggcgagggcaaccaaaaggtccccgccgagggccctgccgctctcaagcgcggtgtcagcatcactgatgcttgcattggctgggaggacaccgtcaccgtcctcgaggacctggctgatgctgtccgcactcgtcgcaagctcaacacagcctag

SEQ ID NO: 7023 - protein, 365 aa, Gibberella zeae PH-1
MPSATIDMSTIAADDTRVLGQDPLIPPALLTSEIPLPEKATNTVVKGRQDAADIVLGQSDRLLVVVGPCSIHDPATAQEYAARLKEVSDRLDKDLCIVMRAYLEKPRTTVGWKGLINDPDIDNSFKINKGLRVSRQLFVDLTTQGLPIATEMLDTISPQFLADCISVGAIGARTTESQLHRELASGLSFPVGFKNGTDGSLNVAIDAIGAAAAQHHFMGVTKQGLAAITRTKGNEHCFVILRGGTKGTNFDKDSVQNAKKVLQDKKQKEAIMIDCSHGNSSKDHRNQPKVAKVVGEQLREGEKAIIGVMIESNIGEGNQKVPAEGPAALKRGVSITDACIGWEDTVTVLEDLADAVRTRRKLNTA

SEQ ID NO: 7024 - DNA, 1071 bp, Candida glabrata CBS 138; identical to SEQ ID NO: 1827
  CDS (1)..(1071)

SEQ ID NO: 7025 - protein, 356 aa, Candida glabrata CBS 138; identical to SEQ ID NO: 1828

SEQ ID NO: 7026 - DNA, 1119 bp, Candida glabrata CBS 138; identical to SEQ ID NO: 1825
  CDS (1)..(1119)

SEQ ID NO: 7027 - protein, 372 aa, Candida glabrata CBS 138; identical to SEQ ID NO: 1826

SEQ ID NO: 7028 - DNA, 1095 bp, Kluyveromyces lactis NRRL Y-1140; identical to SEQ ID NO: 1819
  CDS (1)..(1095)

SEQ ID NO: 7029 - protein, 364 aa, Kluyveromyces lactis NRRL Y-1140; identical to SEQ ID NO: 1820

SEQ ID NO: 7030 - DNA, 1119 bp, Kluyveromyces lactis NRRL Y-1140; identical to SEQ ID NO: 1817
  CDS (1)..(1119)

SEQ ID NO: 7031 - protein, 372 aa, Kluyveromyces lactis NRRL Y-1140; identical to SEQ ID NO: 1818

SEQ ID NO: 7032 - DNA, 1107 bp, Debaryomyces hansenii CBS767; identical to SEQ ID NO: 1811
  CDS (1)..(1107)

SEQ ID NO: 7033 - protein, 368 aa, Debaryomyces hansenii CBS767; identical to SEQ ID NO: 1812

SEQ ID NO: 7034 - DNA, 1122 bp, Debaryomyces hansenii CBS767
  CDS (1)..(1122)
atgttcattactaacgaacacgtcggagatcgttctagattagaagattggagagtccgtggctacgacccattgactcctcctgatttattacaacacgaactcccattgcctcaaaaatcacaagataccatcttaaaaggtagagaggctgcttgtgatatattgaatgggaaggatgatcgtttgattattgtcattggtccttgttcaatccatgatcctaaagctgctcttgagtatgctggaaaattgtacgaagctgctcaaaaatattctggtgaattgcatatcgttatgagagcatacttagaaaaaccgagaactacagttggctggaaggggttaattaatgatccagaaatcgatggttcgttccaaattaacaaaggtttgagaattgccagaaaattattcgtagaattgacagacaaattgccgattgccggcgaaatgttggatacaatttcgccccaattcttgtccgatttattctctcttggtgccatcggtgcaagaactactgagtcacaattgcatcgtgagttatcttccggcttatccttcccagttggtttcaaaaatggtacagatggtactttaggtgtagcaatggatgcagttagagctgcttctcatcctcaccactttttgtcagttaccaagcctggtattgttgctattgttggaacagatggtaatcaagactgttttgttattttaagaggtggtaagaagggtacaaatttcgatgaacaatctgtaaaggagactaaggcagaattaatcaagaataagatcgttacggaagaaaagtcaggtccaaggattatggttgattgttcccatggtaactcaagcaaaaatcacagaaatcaaccgttggttgcggccgaaatttccagacaaatcagtaatggggaggatggtatttgtggtttgatgattgaatcaaatcttgtcgaaggtagacaagatgtaccacctgctgataaaggtggtaaggatgctttgaagtatggttgttctattaccgatgcttgcatcggttgggaagataccgaatctgttttagaaggtttatctaatgccgtgaagcaaagaagaaattcaagaaagtaa

SEQ ID NO: 7035 - protein, 373 aa, Debaryomyces hansenii CBS767
MFITNEHVGDRSRLEDWRVRGYDPLTPPDLLQHELPLPQKSQDTILKGREAACDILNGKDDRLIIVIGPCSIHDPKAALEYAGKLYEAAQKYSGELHIVMRAYLEKPRTTVGWKGLINDPEIDGSFQINKGLRIARKLFVELTDKLPIAGEMLDTISPQFLSDLFSLGAIGARTTESQLHRELSSGLSFPVGFKNGTDGTLGVAMDAVRAASHPHHFLSVTKPGIVAIVGTDGNQDCFVILRGGKKGTNFDEQSVKETKAELIKNKIVTEEKSGPRIMVDCSHGNSSKNHRNQPLVAAEISRQISNGEDGICGLMIESNLVEGRQDVPPADKGGKDALKYGCSITDACIGWEDTESVLEGLSNAVKQRRNSRK

SEQ ID NO: 7036 - DNA, 1089 bp, Yarrowia lipolytica CLIB122; identical to SEQ ID NO: 1815
  CDS (1)..(1089)

SEQ ID NO: 7037 - protein, 362 aa, Yarrowia lipolytica CLIB122; identical to SEQ ID NO: 1816

SEQ ID NO: 7038 - DNA, 1074 bp, Yarrowia lipolytica CLIB122; identical to SEQ ID NO: 1813
  CDS (1)..(1074)

SEQ ID NO: 7039 - protein, 357 aa, Yarrowia lipolytica CLIB122; identical to SEQ ID NO: 1814

SEQ ID NO: 7040 - DNA, 1143 bp, Aspergillus nidulans FGSC A4
  CDS (1)..(1143)
atgtcctccgaactcatcatatcgcagttcttccttccaaatcctaatttaggagatagcaatcaccttgaggattcaagaatccgcggatacaaccctctcacaccacccaacctcctgcaacatgagattgctctaacagagaaagcgcggcaaacggtccttcaaggccgagccgaggccattgccgtcgcccacggcacagacacagacaagcgccgcctcctcgtcgtcattggaccctgctcaattcacgaccccgaaatggccttagagtactgcgaccggctattgaaattgaaggagaaatacaaggatgagttgctaattgttatgcgctcttatctggagaagccccgaacgaccgtcggttggaagggcctcatcaacgacccggatatcgacaacagcttcaacatcaacaagggcctgcgcatctcgcgtcagctcttcgtcgacttgaccaacaagggaatgccaattgccagtgagatgctggacactatctccccgcagtttctggcggactgtctctccgtcggtgcggtcggcgcacggacaaccgaatcgcaggtccatcgtgaattggcctctgggctctcgttccccgttggcttcaagaacggtacagatggctcgttagacgtcgcggttgatgcgattggatccgtaaaacaccctcatcacttcctgtccgtcaccaagcctggtgttgtcgccattgtcggtaccgttggcaatcctgattgctttgttatcctccgcggcggcaagaaagggccgaactacgatgctgctagcatcaccgaagcaaaggagaagctcatagctaagggtctggcaccccgtctgatggtcgactgcagccacggcaactcacaaaaggatcacaagaaccagcctaaggtggcagctgttcttgcggagcagattgctgcaggcgaaaccgcaatcatgggcgtcatgatagagagtaatatcaacgagggcaaccaaaaggtcccacccgagggcaaggccggcctcaaatacggcgtcagtatcaccgacgcctgtatcaattgggaagacaccgagtcaacgctagagacccttgcaaaggctgttgcgactcggagagaaaagctcgcccccagttcatag

SEQ ID NO: 7041 - protein, 380 aa, Aspergillus nidulans FGSC A4
MSSELIISQFFLPNPNLGDSNHLEDSRIRGYNPLTPPNLLQHEIALTEKARQTVLQGRAEAIAVAHGTDTDKRRLLVVIGPCSIHDPEMALEYCDRLLKLKEKYKDELLIVMRSYLEKPRTTVGWKGLINDPDIDNSFNINKGLRISRQLFVDLTNKGMPIASEMLDTISPQFLADCLSVGAVGARTTESQVHRELASGLSFPVGFKNGTDGSLDVAVDAIGSVKHPHHFLSVTKPGVVAIVGTVGNPDCFVILRGGKKGPNYDAASITEAKEKLIAKGLAPRLMVDCSHGNSQKDHKNQPKVAAVLAEQIAAGETAIMGVMIESNINEGNQKVPPEGKAGLKYGVSITDACINWEDTESTLETLAKAVATRREKLAPSS

SEQ ID NO: 7042 - DNA, 1089 bp, Aspergillus nidulans FGSC A4; identical to SEQ ID NO: 1909
  CDS (1)..(1089)

SEQ ID NO: 7043 - protein, 362 aa, Aspergillus nidulans FGSC A4; identical to SEQ ID NO: 1910

SEQ ID NO: 7044 - DNA, 1182 bp, Ustilago maydis 521
  CDS (1)..(1182)
atgtcggctagcattgctgccaacacggccaatggccgatccgccgagcccctcgctcaagcgcttcctcaaaatggctccaaggacgagtacgcctacatcaacgacgtccgcgtcgctggctttgaaccactgatctcgccttcgcttttgctccacgagattcccgttcccaaggagtcgcaggccaccatcgcacgtgctcgaggccagtcgagtgccatcatcaacggacaggacgaccgccttctcgtcgtcgtcggtccatgctccattcacgatgtcgatcaggccaaggaatacgcaaagctgctcaaggctggtatcgacgagcgatggtccgagggtcttgtggttgtcatgcgtgcctactttgaaaagcctcgcaccacagttggctggaaaggtctcatcaacgatcccgacatcaatggcagcttccagatcaaccgtggtctcaaaattgcccgtaacttgctcgtcgatcttacggcacaaggagtccccgtcgcttgcgaggtgcttgataccatctcgcctcagtacacttcggacctctactcgtggggtgccatcggtgctcgtaccaccgagtcgcaattgcaccgtgagttggtctcgggtctttccatgccaatcggcttcaagaatggcaccgatggcggtctcggtgttgctgtcgacgccatccgcgcttcgtctcagcctcacgctttcatgggcgttaccgagcagggtcttgcagctatcgtccgaaccgtaggcaacgctgatctccacatcgtccaccgtggtggctccaagggaaccaactacgacgctacctcggtccagacctcgaaagcacagctcaagtcggcgctccctaaccgccacccttcgatcatgattgactgctcgcacggtaactcgaacaaggacttccgcaaccagcccaaggtcgtcgatgccatcgtagagcagctcgaacagggcgaagatgccatcactggtgtcatgatcgagtcgcatctgaacgagggcaagcagggcgagcccaagaatggacagatcgatcagctcaaatacggtgtctcgatcaccgacggatgtgtcggatgggagaccaccgtgcagatgctcgacaagctcaacgccgccgtcctcaagagaagacaggtacaggctcagaacaaggcttga

SEQ ID NO: 7045 - protein, 393 aa, Ustilago maydis 521
MSASIAANTANGRSAEPLAQALPQNGSKDEYAYINDVRVAGFEPLISPSLLLHEIPVPKESQATIARARGQSSAIINGQDDRLLVVVGPCSIHDVDQAKEYAKLLKAGIDERWSEGLVVVMRAYFEKPRTTVGWKGLINDPDINGSFQINRGLKIARNLLVDLTAQGVPVACEVLDTISPQYTSDLYSWGAIGARTTESQLHRELVSGLSMPIGFKNGTDGGLGVAVDAIRASSQPHAFMGVTEQGLAAIVRTVGNADLHIVHRGGSKGTNYDATSVQTSKAQLKSALPNRHPSIMIDCSHGNSNKDFRNQPKVVDAIVEQLEQGEDAITGVMIESHLNEGKQGEPKNGQIDQLKYGVSITDGCVGWETTVQMLDKLNAAVLKRRQVQAQNKA

SEQ ID NO: 7046 - DNA, 1560 bp, Ustilago maydis 521
  CDS (1)..(1560)
atgctaatatcacgaaatgaaaatcgtctcgggctgattggtcccccattcgcacattatgactcgatgctgcagcaaagccaaggccaagaggatggcaaggtccagaccttagccgctggctgctggctaggcccaacctcttcacgctttgtttttctcacgtcgagaagaattcgtggttgcaattacaagtgcgtggtgatttgtcttgagcgcgcattgacctactcggccaagggcgacacttgtgccaccactcacgacttggttcttacctttcacttgggaccctcactgaaagcggatctaccgttcaaaatgacgacgctcacctacaaggatgcgctcaacgagctcgacgatcgacgcatcaagtcaatcaagccgctgattcctccgcagatcctggtcgaggaatatccactgtcgctctccgcagcgcagactgtcgcttctggtcgcaaggctaccgaggaaatcgttaagcaggaagacgatcgcttgctcgtcgtcgtgggcccgtgttcgattcacgatgtgcgttccggtctcgagtacgcgcgcaaactcgccgcttacgcccaaactgccaaggacgatctgcacattgtgatgcgtgtctactttgaaaaacctcgcaccacggtcggctggaaaggtctcatcaacgaccccaacctgaatggttcgttccagatcaacaaaggactgcgtctcgcgcgcggcttcttgctcgaggtcaacaacctcggcttgcctgctggaacagagttcctcgacaccatctcgccgcagtacaccgccgacctgatcagctggggagctatcggcgcacgaaccaccgaatcgcaggttcaccgcgaactcagctcgggtctttcgatgccgatcggcttcaagaacggaaccgacggttcgatcagtatcgccgtggatgctatcaaggcagcttcgtccgaacacgtcttcttgtccgtcaccaagcagggcatctcggcgattgtcgagaccaacggaaacgatgcctgtcacgtcatcctgcgcggagctaacacaggacccaactactcggccgaacacgttggcgcggtatcgtcgaaactcaacgcggccggtttgccagcgagaatcatgatcgactgctcgcacggtaacagcgagaagaagcacgagaaccagatcaacgtcgtcaagtcgatcgcatcccaactcgcagccggcgactcgcaagcttgcaacatctttggcgtcatgatcgaatccaacctggtggccggtaaacagtcgatccctgcgcagggacccacggcactcaagtacggtcagagcatcaccgacgcttgcgtcgactgggacaccaccgttctcgctttggatctcttgcgagaaggcgtccgcaaaagaagatcatcccaccacgctagcaactggttcaaggccaaattgagcaggtccagcagctccgaaggcgtcaacgaccactttctctccaagcagtccgaacaccacaccggcttcaacgacgatgcgctcaccacactgggcaaatccaaataa

SEQ ID NO: 7047 - protein, 519 aa, Ustilago maydis 521
MLISRNENRLGLIGPPFAHYDSMLQQSQGQEDGKVQTLAAGCWLGPTSSRFVFLTSRRIRGCNYKCVVICLERALTYSAKGDTCATTHDLVLTFHLGPSLKADLPFKMTTLTYKDALNELDDRRIKSIKPLIPPQILVEEYPLSLSAAQTVASGRKATEEIVKQEDDRLLVVVGPCSIHDVRSGLEYARKLAAYAQTAKDDLHIVMRVYFEKPRTTVGWKGLINDPNLNGSFQINKGLRLARGFLLEVNNLGLPAGTEFLDTISPQYTADLISWGAIGARTTESQVHRELSSGLSMPIGFKNGTDGSISIAVDAIKAASSEHVFLSVTKQGISAIVETNGNDACHVILRGANTGPNYSAEHVGAVSSKLNAAGLPARIMIDCSHGNSEKKHENQINVVKSIASQLAAGDSQACNIFGVMIESNLVAGKQSIPAQGPTALKYGQSITDACVDWDTTVLALDLLREGVRKRRSSHHASNWFKAKLSRSSSSEGVNDHFLSKQSEHHTGFNDDALTTLGKSK

SEQ ID NO: 7048 - DNA, 1056 bp, Acinetobacter sp. ADP1; identical to SEQ ID NO: 1687
  CDS (1)..(1056): transl_table=11

SEQ ID NO: 7049 - protein, 351 aa, Acinetobacter sp. ADP1; identical to SEQ ID NO: 1688

SEQ ID NO: 7050 - DNA, 1056 bp, Erwinia carotovora subsp. atroseptica SCRI1043; identical to SEQ ID NO: 1689
  CDS (1)..(1056): transl_table=11

SEQ ID NO: 7051 - protein, 351 aa, Erwinia carotovora subsp. atroseptica SCRI1043; identical to SEQ ID NO: 1690

SEQ ID NO: 7052 - DNA, 1047 bp, Erwinia carotovora subsp. atroseptica SCRI1043; identical to SEQ ID NO: 1691
  CDS (1)..(1047): transl_table=11

SEQ ID NO: 7053 - protein, 348 aa, Erwinia carotovora subsp. atroseptica SCRI1043; identical to SEQ ID NO: 1692

SEQ ID NO: 7054 - DNA, 1056 bp, Mannheimia succiniciproducens MBEL55E; identical to SEQ ID NO: 1695
  CDS (1)..(1056): transl_table=11

SEQ ID NO: 7055 - protein, 351 aa, Mannheimia succiniciproducens MBEL55E; identical to SEQ ID NO: 1696

SEQ ID NO: 7056 - DNA, 1155 bp, Mannheimia succiniciproducens MBEL55E; identical to SEQ ID NO: 1697
  CDS (1)..(1155): transl_table=11

SEQ ID NO: 7057 - protein, 384 aa, Mannheimia succiniciproducens MBEL55E; identical to SEQ ID NO: 1698

SEQ ID NO: 7058 - DNA, 1044 bp, Legionella pneumophila subsp. pneumophila str. Philadelphia 1; identical to SEQ ID NO: 1699
  CDS (1)..(1044): transl_table=11

SEQ ID NO: 7059 - protein, 347 aa, Legionella pneumophila subsp. pneumophila str. Philadelphia 1; identical to SEQ ID NO: 1700

SEQ ID NO: 7060 - DNA, 1074 bp, Burkholderia mallei ATCC 23344; identical to SEQ ID NO: 1701
  CDS (1)..(1074): transl_table=11

SEQ ID NO: 7061 - protein, 357 aa, Burkholderia mallei ATCC 23344; identical to SEQ ID NO: 1702

SEQ ID NO: 7062 - DNA, 1119 bp, Burkholderia mallei ATCC 23344; identical to SEQ ID NO: 1703
  CDS (1)..(1119): transl_table=11

SEQ ID NO: 7063 - protein, 372 aa, Burkholderia mallei ATCC 23344; identical to SEQ ID NO: 1704

SEQ ID NO: 7064 - DNA, 1074 bp, Burkholderia pseudomallei K96243; identical to SEQ ID NO: 1705
  CDS (1)..(1074): transl_table=11

SEQ ID NO: 7065 - protein, 357 aa, Burkholderia pseudomallei K96243; identical to SEQ ID NO: 1706

SEQ ID NO: 7066 - DNA, 1092 bp, Methylococcus capsulatus str. Bath; identical to SEQ ID NO: 1707
  CDS (1)..(1092): transl_table=11

SEQ ID NO: 7067 - protein, 363 aa, Methylococcus capsulatus str. Bath; identical to SEQ ID NO: 1708

SEQ ID NO: 7068 - DNA, 1083 bp, Nocardia farcinica IFM 10152; identical to SEQ ID NO: 1709
  CDS (1)..(1083): transl_table=11

SEQ ID NO: 7069 - protein, 360 aa, Nocardia farcinica IFM 10152; identical to SEQ ID NO: 1710

SEQ ID NO: 7070 - DNA, 1044 bp, Legionella pneumophila str. Paris; identical to SEQ ID NO: 1711
  CDS (1)..(1044): transl_table=11

SEQ ID NO: 7071 - protein, 347 aa, Legionella pneumophila str. Paris; identical to SEQ ID NO: 1712

SEQ ID NO: 7072 - DNA, 1113 bp, Francisella tularensis subsp. tularensis SCHU S4; identical to SEQ ID NO: 1715
  CDS (1)..(1113): transl_table=11

SEQ ID NO: 7073 - protein, 370 aa, Francisella tularensis subsp. tularensis SCHU S4; identical to SEQ ID NO: 1716

SEQ ID NO: 7074 - DNA, 1080 bp, Ralstonia eutropha JMP134; identical to SEQ ID NO: 1731
  CDS (1)..(1080): transl_table=11

SEQ ID NO: 7075 - protein, 359 aa, Ralstonia eutropha JMP134; identical to SEQ ID NO: 1732

SEQ ID NO: 7076 - DNA, 1074 bp, Burkholderia sp. 383; identical to SEQ ID NO: 1737
  CDS (1)..(1074): transl_table=11

SEQ ID NO: 7077 - protein, 357 aa, Burkholderia sp. 383; identical to SEQ ID NO: 1738

SEQ ID NO: 7078 - DNA, 1131 bp, Burkholderia sp. 383; identical to SEQ ID NO: 1739
  CDS (1)..(1131): transl_table=11

SEQ ID NO: 7079 - protein, 376 aa, Burkholderia sp. 383; identical to SEQ ID NO: 1740

SEQ ID NO: 7080 - DNA, 1074 bp, Burkholderia thailandensis E264; identical to SEQ ID NO: 1747
  CDS (1)..(1074): transl_table=11

SEQ ID NO: 7081 - protein, 357 aa, Burkholderia thailandensis E264; identical to SEQ ID NO: 1748

SEQ ID NO: 7082 - DNA, 1074 bp, Burkholderia xenovorans LB400; identical to SEQ ID NO: 1755
  CDS (1)..(1074): transl_table=11

SEQ ID NO: 7083 - protein, 357 aa, Burkholderia xenovorans LB400; identical to SEQ ID NO: 1756

SEQ ID NO: 7084 - DNA, 1089 bp, Haemophilus influenzae R2866; identical to SEQ ID NO: 1771
  CDS (1)..(1089)

SEQ ID NO: 7085 - protein, 362 aa, Haemophilus influenzae R2866; identical to SEQ ID NO: 1772

SEQ ID NO: 7086 - DNA, 1131 bp, Burkholderia vietnamiensis G4; identical to SEQ ID NO: 1775
  CDS (1)..(1131): transl_table=11

SEQ ID NO: 7087 - protein, 376 aa, Burkholderia vietnamiensis G4; identical to SEQ ID NO: 1776

SEQ ID NO: 7088 - DNA, 1074 bp, Burkholderia vietnamiensis G4; identical to SEQ ID NO: 1777
  CDS (1)..(1074): transl_table=11

SEQ ID NO: 7089 - protein, 357 aa, Burkholderia vietnamiensis G4; identical to SEQ ID NO: 1778

SEQ ID NO: 7090 - DNA, 1053 bp, Oceanobacter sp. RED65; identical to SEQ ID NO: 1805
  CDS (1)..(1053): transl_table=11

SEQ ID NO: 7091 - protein, 350 aa, Oceanobacter sp. RED65; identical to SEQ ID NO: 1806

SEQ ID NO: 7092 - DNA, 1248 bp, Corynebacterium glutamicum; identical to SEQ ID NO: 1807
  CDS (101)..(1228)

SEQ ID NO: 7093 - protein, 375 aa, Corynebacterium glutamicum; identical to SEQ ID NO: 1808

SEQ ID NO: 7094 - DNA, 1182 bp, Ustilago hordei
  CDS (1)..(1182)
atgtcgtcgagcattgcaaacaacaccgccaacggacgatccgccgagcctctctcgcaggctatcctcaaaagcggcactaaagacgaatacgcctacgtcaacgatgttcgcgttgctggctttgagcccttgatctctccctcgctcctccttcacgagattcccgtccctaaggaatcacaaaccaccatcgctcgcgcacgtggtcagtccagcgctatcatcaacggccaggacgaccgtcttcttgtcgtcgtcggtccttgctccatccacgatgtggaccaggctaaagaatacgctaagctgctcaaggctggtattgacgagcgctggtctgaaggccttgtcgtcatcatgcgcgcctacttcgaaaagccacgtactactgttggctggaagggtttgatcaacgaccccgacatcaatggcagcttccaaatcaaccgaggtctcaaaatcgcacgtaacctgctcgtcgacttgaccgcccaaggtgtccccgtggcatgcgaggttcttgacaccatctctccccagtacacttccgacctctactcttggggagccattggtgctcgtaccactgaatcgcaattgcaccgagaattagtctccggtctctccatgcccatcggtttcaagaacggcactgacggaggtcttggtgttgccgtcgacgccatccgtgcctcttcccaacctcacgctttcatgggtgtgaccgaacaaggtctcgctgccatcgtccgtactgtcggtaatgccgatctccacattgtccaccgcggcggctcaaatggaaccaacttcgattccgagtcggtcaaatcttccaaagctcgacttcaaaaagctctcccagaccgtcacccttccatcatgatcgattgttcccacggtaattcgaacaaagacttccgcaaccagcccaaggtcgttgatgctatcgcagagcagctcgagcagggagaggatgcgatcacgggtgtaatgatcgagagtcacttgaacgagggtaaacagggtgagcccaagaacggtcagattgatcagttgaagtacggtgttagcattacagatggttgcgtgggttgggagactacggtggagatgttggataagttgaatgcttctgttctgaagaggaggagtttgagggctcagaacaaggcctaa

SEQ ID NO: 7095 - protein, 393 aa, Ustilago hordei
MSSSIANNTANGRSAEPLSQAILKSGTKDEYAYVNDVRVAGFEPLISPSLLLHEIPVPKESQTTIARARGQSSAIINGQDDRLLVVVGPCSIHDVDQAKEYAKLLKAGIDERWSEGLVVIMRAYFEKPRTTVGWKGLINDPDINGSFQINRGLKIARNLLVDLTAQGVPVACEVLDTISPQYTSDLYSWGAIGARTTESQLHRELVSGLSMPIGFKNGTDGGLGVAVDAIRASSQPHAFMGVTEQGLAAIVRTVGNADLHIVHRGGSNGTNFDSESVKSSKARLQKALPDRHPSIMIDCSHGNSNKDFRNQPKVVDAIAEQLEQGEDAITGVMIESHLNEGKQGEPKNGQIDQLKYGVSITDGCVGWETTVEMLDKLNASVLKRRSLRAQNKA

SEQ ID NO: 7096 - DNA, 1137 bp, Aspergillus oryzae
  CDS (1)..(1137)
atgttactcgattctagtaatttcttcatcgaaaatcccaatgtaggggacaccaaccatctggaggactcgagaattcgaggatataaccctctgacaccccccaaccttctccaacatgagattgctatgacagaaacttccagacagacggtcttgcaagcccgtcaggaggctagcgcagtcgttcatggcaccgacaccgacaagcgccgtctgctggtcgtagtgggaccctgctcgattcacgatcccgaaatggcccttgaatactgtgaccgtcttttaaaactgaaggagaaatacaaggatgagcttttgattgtcatgcgtgcctacctggagaagccacgtaccactgttggctggaagggtctcataaacgaccccgatatcgacaacagcttcaagatcaacaagggtctgcgcacatctcgccaacttttcgtcgatctgaccaacaagggcatgcccattgctagcgagatgctggacactatctccccgcagttcctggctgactgtctctccgttggtgcggttggcgcgcggacaaccgagtcccaggtccaccgtgagctggcttctggtctttccttccccgttggattcaagaacggcaccgatggctctttggatgttgcagtggatgccattggctcggtcaagcacccccatcacttcctctccgtcaccaagcctggtgttgtctccatcgtcggcaccgtgggtaaccccgactgtttcgtcatcctccgtggtggaaagaagggccccaactacgatgctcagagcatcgccgaggccaaggccaaactttctgcacagggcatggagccccgtctcatggtggactgcagccacggtaactcgcaaaagaaccacaagaaccagcccaaggtggctgctgtgctcgcggaacagatcgctgcgggtgagaccgcaatcatgggtgtcatgatcgagagtaacatcaacgagggtaaccagaaggtcccgcctgagggcaaggccggcctcaagtacggtgtcagtatcaccgatgcttgcattcactgggaagacacggaagctgttcttgagaacctcgcccaggccgttcgtactcggaaagagaaattggcggtcaacaactag

SEQ ID NO: 7097 - protein, 378 aa, Aspergillus oryzae
MLLDSSNFFIENPNVGDTNHLEDSRIRGYNPLTPPNLLQHEIAMTETSRQTVLQARQEASAVVHGTDTDKRRLLVVVGPCSIHDPEMALEYCDRLLKLKEKYKDELLIVMRAYLEKPRTTVGWKGLINDPDIDNSFKINKGLRTSRQLFVDLTNKGMPIASEMLDTISPQFLADCLSVGAVGARTTESQVHRELASGLSFPVGFKNGTDGSLDVAVDAIGSVKHPHHFLSVTKPGVVSIVGTVGNPDCFVILRGGKKGPNYDAQSIAEAKAKLSAQGMEPRLMVDCSHGNSQKNHKNQPKVAAVLAEQIAAGETAIMGVMIESNINEGNQKVPPEGKAGLKYGVSITDACIHWEDTEAVLENLAQAVRTRKEKLAVNN

SEQ ID NO: 7098 - DNA, 1095 bp, Aspergillus oryzae
  CDS (1)..(1095)
atgcccctcgttaacacaacagaggtcaatgaggacactcgtgtccttggatacgatccattgctgtcccctcagtaccttcagtccgagatcccagctcctgcagaagccactgccactgtccgctcgggccgtaaccaagccgttgagattattgagcagcgcgatgaccgtctgctggtgatggtcggcccctgctccatccatgaccctgccaccgctctggaatatgccacccgtctcaaggagctcgctgggaagctctcctccgacctttgcatcatcatgcgcgcttatttggagaagccccgcaccacagtgggatggaagggtctgattaacgacccggatattgacgaatcctacaacatcaacaagggtctgcgcatctcacgtaagctctacgccgatctgaccagcatgggcatgccaattgccagtgagatgctcgataccatctctccccagtaccttgcggatctcatctcactcggcgccatcggtgcccgtacgaccgagtcccaattgcaccgtgagctggcctccggtctgagtttccccattggctacaagaacggcacggacggcaacctcgtcgtcgccattgatgctattggtgctgccgctcacccccaccgtttcctcggtgtcactaagcagggtctcgcggccatcaccaagacctccggtaacgagcacggtttcgtgatcttgcgtggaggcagcaagggtaccaactatgaccgggagagcatccgtcaggctcgcgaagccctgcgtagcaagaagcagcgtgaggtgctcatggtcgactgctcccacggcaactccaacaagaaccaccgcaaccagcccctggtcgccaaggaagtcgccgaccagatgcgcgagggccaggatgctattgttggtgtcatgatcgagtccaacattcatgagggcaaccagaaggtccctgccgagggcccgaagggccttaagaagggtgtcagcatcacggatgcctgcattgactgggagaccaccgtcaccgtgttggaggatctcgccgatgccgtccgcgctagacgtgccgccaaggcatccagcgcctga

SEQ ID NO: 7099 - protein, 364 aa, Aspergillus oryzae
MPLVNTTEVNEDTRVLGYDPLLSPQYLQSEIPAPAEATATVRSGRNQAVEIIEQRDDRLLVMVGPCSIHDPATALEYATRLKELAGKLSSDLCIIMRAYLEKPRTTVGWKGLINDPDIDESYNINKGLRISRKLYADLTSMGMPIASEMLDTISPQYLADLISLGAIGARTTESQLHRELASGLSFPIGYKNGTDGNLVVAIDAIGAAAHPHRFLGVTKQGLAAITKTSGNEHGFVILRGGSKGTNYDRESIRQAREALRSKKQREVLMVDCSHGNSNKNHRNQPLVAKEVADQMREGQDAIVGVMIESNIHEGNQKVPAEGPKGLKKGVSITDACIDWETTVTVLEDLADAVRARRAAKASSA

SEQ ID NO: 7100 - DNA, 1173 bp, Paxillus involutus
  CDS (1)..(1173)
atgcagtcgtacaacgttactccagttcctgaggatgacaagcaacttctagagtacatgcaagacagacgtgtcctcgggtacgaccccctagtccagcctgctttgctcagacacgaagttactcctaccgaatactcgcgtctcattattgcctctgcccgctataactccgctcgcgtagttgccggacaagatgacagagttctcgtgatcgtcggtccttgctcaatccactccccagagcaagccatcgagtatgccaaactgctccaagctaaaattcccacttgggaaaacctagtcatcgttatgcgggcttacttcgaaaaaccaaggacaaccgtcggctggaaaggcttgattaatgaccctgacatcgatggatccttccacatcaacaagggtcttcgggtcgccagacagctcctttgtgacttaaccaaccttggtatcccagtcggctccgagttactcgataccatctccccacagtacatcgcagatcttatctcttggggtgccatcggtgcccgaacaacggaatcccaactccaccgagagcttgcttctggtgtctccttccccattgggttcaagaacggcactgatggaagtgtgtcggtcgccattgatgccatgcgctcgtcttccaatcctcatgctttcatgggtgtgaccgagcggggtctagccgctattgtcaagactcggggtaaccaggatgttcatgtcatcctccgtggagggaccaagggcccgaactacgcgtctgagcacgtcaagtcggccgcaaaagctatcgagaaggctcgaccacagagccacccaagtctcatgattgactgtagccacggtaactcgcaaaagaatcataacaatcagcccaaggttgtcgatgacatttgcacacagctcgctgctggtgaccgaaccatcacgggtgtcatgatcgagtcgcacatcaacgctggtcgtcaggacgttcctgcagaaggccctggtggactcaagtacggcgtcagtatcaccgacgcttgcgttgactgggaggttaccgttggtatgctcgacaggcttaatgaggcagttggccaacgccgcgcctacctcgttgaacagggtttccagagacctgctgggttccaacgagagacacctttgacgccttga

SEQ ID NO: 7101 - protein, 390 aa, Paxillus involutus
MQSYNVTPVPEDDKQLLEYMQDRRVLGYDPLVQPALLRHEVTPTEYSRLIIASARYNSARVVAGQDDRVLVIVGPCSIHSPEQAIEYAKLLQAKIPTWENLVIVMRAYFEKPRTTVGWKGLINDPDIDGSFHINKGLRVARQLLCDLTNLGIPVGSELLDTISPQYIADLISWGAIGARTTESQLHRELASGVSFPIGFKNGTDGSVSVAIDAMRSSSNPHAFMGVTERGLAAIVKTRGNQDVHVILRGGTKGPNYASEHVKSAAKAIEKARPQSHPSLMIDCSHGNSQKNHNNQPKVVDDICTQLAAGDRTITGVMIESHINAGRQDVPAEGPGGLKYGVSITDACVDWEVTVGMLDRLNEAVGQRRAYLVEQGFQRPAGFQRETPLTP

SEQ ID NO: 7102 - DNA, 1047 bp, Yersinia pseudotuberculosis IP 32953; identical to SEQ ID NO: 1693
  CDS (1)..(1047)

SEQ ID NO: 7103 - protein, 348 aa, Yersinia pseudotuberculosis IP 32953; identical to SEQ ID NO: 1694

SEQ ID NO: 7104 - DNA, 1074 bp, Erwinia carotovora subsp; identical to SEQ ID NO: 1821
  CDS (1)..(1074)

SEQ ID NO: 7105 - protein, 357 aa, Erwinia carotovora subsp; identical to SEQ ID NO: 1822

SEQ ID NO: 7106 - DNA, 1113 bp, Acinetobacter sp; identical to SEQ ID NO: 1823
  CDS (1)..(1113)

SEQ ID NO: 7107 - protein, 370 aa, Acinetobacter sp; identical to SEQ ID NO: 1824

SEQ ID NO: 7108 - DNA, 1035 bp, Escherichia coli; identical to SEQ ID NO: 1829
  CDS (1)..(1035): transl_table=11

SEQ ID NO: 7109 - protein, 344 aa, Escherichia coli; identical to SEQ ID NO: 1830

SEQ ID NO: 7110 - DNA, 1083 bp, Photobacterium profundum; identical to SEQ ID NO: 1831
  CDS (1)..(1083)

SEQ ID NO: 7111 - protein, 360 aa, Photobacterium profundum; identical to SEQ ID NO: 1832

SEQ ID NO: 7112 - DNA, 1053 bp, Photobacterium profundum; identical to SEQ ID NO: 1833
  CDS (1)..(1053)

SEQ ID NO: 7113 - protein, 350 aa, Photobacterium profundum; identical to SEQ ID NO: 1834

SEQ ID NO: 7114 - DNA, 1113 bp, Photobacterium profundum; identical to SEQ ID NO: 1835
  CDS (1)..(1113)

SEQ ID NO: 7115 - protein, 370 aa, Photobacterium profundum; identical to SEQ ID NO: 1836

SEQ ID NO: 7116 - DNA, 1056 bp, Photobacterium profundum; identical to SEQ ID NO: 1837
  CDS (1)..(1056)

SEQ ID NO: 7117 - protein, 351 aa, Photobacterium profundum; identical to SEQ ID NO: 1838

SEQ ID NO: 7118 - DNA, 1092 bp, Parachlamydia sp; identical to SEQ ID NO: 1839
  CDS (1)..(1092)

SEQ ID NO: 7119 - protein, 363 aa, Parachlamydia sp; identical to SEQ ID NO: 1840

SEQ ID NO: 7120 - DNA, 1095 bp, Rhodopseudomonas palustris
  CDS (1)..(1095)
atgttgaccaccacagacgaccttcgccttcagaaaatcaccgagctgagtacgcctgccgaggtgatgggcgagattccgcgcacactgaccgcaacgcgtaccgttgcggcgagccgcagcgcgattcatgccatcctgaacggagccgacgaccggctcctcgtcgtcgtcggcccctgttcgattcacgatccggccgcagccatggactatgccagccgtctggcggcgctgcgcgagaccctggccgaccggctcgagatcgtgatgcgggtgtatttcgaaaagccgcgcaccacggtgggttggaagggactgatcaacgaccccgatctcgatggcagcttccggatcgacaaggggctacggttggcgcgggaagtactctcggccgtgaacaatctcggcctgccagcggcgaccgaattcctcgatctgatcacgcctcaatacatcgcggatctcgtcgcctggggcgcgatcggcgcgcgcaccaccgagagccagatccaccgcgaactcgcgtcaggcctgtcatgcccaatcggcttcaagaatggcaccgacggcaatgtccggatcgccgcggaggcggtgaagtccgcggcgcagccgcatcatttcatggcggtgaccaagggcgggcgcaatgcgatcgcggccaccactggtaacagcgactgccacgtcatcctgcgcggcggcgtcacaccgaactacgatgccgcaagtgtggaagccgccgcagcggtcctcggcaagatcggcctgccgccgcgcctgatgatcgacgccagccacgccaacagcagcaagcagccggacaaccagccgaaggtaacggccgatatcgggcgtcagatggcggctggcgagagccgcatcatcggcgtgatgatcgagagcaatctggtcgccggtcggcaggatgtggcgccgggtcggccgctgcaatacggccagagcatcaccgacggctgtatcgactgggcgacgaccgagacggtgctgcacgagctagccgatgcggtcgagagccggcgagctgcgcggcacgccgcaagcgctcagcagaaaggtgctgcggcgtga

SEQ ID NO: 7121 - protein, 364 aa, Rhodopseudomonas palustris; identical to SEQ ID NO: 1684

SEQ ID NO: 7122 - DNA, 1100 bp, Amycolatopsis methanolica; identical to SEQ ID NO: 1841
  CDS (1)..(1086)

SEQ ID NO: 7123 - protein, 361 aa, Amycolatopsis methanolica; identical to SEQ ID NO: 1842

SEQ ID NO: 7124 - DNA, 1071 bp, Treponema denticola; identical to SEQ ID NO: 1843
  CDS (1)..(1071)

SEQ ID NO: 7125 - protein, 356 aa, Treponema denticola; identical to SEQ ID NO: 1844

SEQ ID NO: 7126 - DNA, 1068 bp, Geobacter sulfurreducens; identical to SEQ ID NO: 1685
  CDS (1)..(1068)

SEQ ID NO: 7127 - protein, 355 aa, Geobacter sulfurreducens; identical to SEQ ID NO: 1686

SEQ ID NO: 7128 - DNA, 1098 bp, Amycolatopsis balhimycina; identical to SEQ ID NO: 1849
  CDS (1)..(1098)

SEQ ID NO: 7129 - protein, 365 aa, Amycolatopsis balhimycina; identical to SEQ ID NO: 1850

SEQ ID NO: 7130 - DNA, 1071 bp, Vibrio vulnificus; identical to SEQ ID NO: 1851
  CDS (1)..(1071)

SEQ ID NO: 7131 - protein, 356 aa, Vibrio vulnificus; identical to SEQ ID NO: 1852

SEQ ID NO: 7132 - DNA, 1053 bp, Vibrio vulnificus; identical to SEQ ID NO: 1681
  CDS (1)..(1053)

SEQ ID NO: 7133 - protein, 350 aa, Vibrio vulnificus; identical to SEQ ID NO: 1682

SEQ ID NO: 7134 - DNA, 1053 bp, Vibrio vulnificus; identical to SEQ ID NO: 1679
  CDS (1)..(1053)

SEQ ID NO: 7135 - protein, 350 aa, Vibrio vulnificus; identical to SEQ ID NO: 1680

SEQ ID NO: 7136 - DNA, 1047 bp, Photorhabdus luminescens; identical to SEQ ID NO: 1675
  CDS (1)..(1047)

SEQ ID NO: 7137 - protein, 348 aa, Photorhabdus luminescens; identical to SEQ ID NO: 1676

SEQ ID NO: 7138 - DNA, 1119 bp, Gloeobacter violaceus
  CDS (1)..(1119)
atgcccggcggctctcgcgatgtcggcgagttcgcctttgagccgctcgacgatttgcggatcgtctcggtgagtgagattcctcctccagtgcaactgcgcgagcaattgcctctggatgcggctgcccagaatacagtgcgccggggccgctcgcagattcgcgctgtattgggcggctttgattcacgcctgttggtggtggtcggcccctgttcggtgcacgacgccgatgcggcgcgcgagtacgcccagaggctggccgagtgcgcccgccgctatgcggacgaactgctcatcgccatgcgcgtttacttcgagaaaccgcgcaccacggtcggctggaaaggactcatcaacgatcccggcctcgacggcagctgtcgtatcggtgagggactgaccaccgcccgcgcgttgctgctcgacattgcccggctcggactgccggcggccaccgaatttctcgacccgatcacccccgagtacatcgtcgatctgatcagttggggggcgattggggcgcgcacggtcgaaagtcaggtgcacaggcaagtggcttcggcgctttcctgtccggtgggttttaaaaacggctcctccggcgacatcgccgttgccgtcgaagcggtgctctcggcgcgcaacgcccatcagttcctttcgcacacccgcgagggtcgcacggctatcgtgctgaccagcggcaatcccgattgccatgtcgtgttgcgcggcggcaaaaacggccccaaccactcggctgaacatctcgcgcaggcagggcggttgttgcgcgaggcgggcttgccggagcgggtgatggtcgactgcagccacgccaacagctccaaagatcaccgccgccagggggaagtctgcaaacagttggcggcacggattgccgagggggatatgcggatgatgggcctgatgatcgaaagtcacctagtcgaagggcggcaggagttaggcgacggctgcaacttgcgccacggtcagagcatcaccgatgcgtgcatcggctgggaacagacagagcaattgcttaccggcctacacgaggcggccggcgctagacggtgtaagccggccgtccgcgccgagttgctggtttga

SEQ ID NO: 7139 - protein, 372 aa, Gloeobacter violaceus; identical to SEQ ID NO: 1672

SEQ ID NO: 7140 - DNA, 1107 bp, Chromobacterium violaceum; identical to SEQ ID NO: 1855
  CDS (1)..(1107)

SEQ ID NO: 7141 - protein, 368 aa, Chromobacterium violaceum; identical to SEQ ID NO: 1856

SEQ ID NO: 7142 - DNA, 1059 bp, Chromobacterium violaceum; identical to SEQ ID NO: 1669
  CDS (1)..(1059)

SEQ ID NO: 7143 - protein, 352 aa, Chromobacterium violaceum; identical to SEQ ID NO: 1670

SEQ ID NO: 7144 - DNA, 1140 bp, Neurospora crassa; identical to SEQ ID NO: 1857
  CDS (1)..(1140)

SEQ ID NO: 7145 - protein, 379 aa, Neurospora crassa; identical to SEQ ID NO: 1858

SEQ ID NO: 7146 - DNA, 1092 bp, Neurospora crassa; identical to SEQ ID NO: 1859
  CDS (1)..(1092)

SEQ ID NO: 7147 - protein, 363 aa, Neurospora crassa; identical to SEQ ID NO: 1860

SEQ ID NO: 7148 - DNA, 1068 bp, Synechococcus sp; identical to SEQ ID NO: 1667
  CDS (1)..(1068)

SEQ ID NO: 7149 - protein, 355 aa, Synechococcus sp; identical to SEQ ID NO: 1668

SEQ ID NO: 7150 - DNA, 1053 bp, Rhodopirellula baltica; identical to SEQ ID NO: 1653
  CDS (1)..(1053)

SEQ ID NO: 7151 - protein, 350 aa, Rhodopirellula baltica; identical to SEQ ID NO: 1654

SEQ ID NO: 7152 - DNA, 1068 bp, Prochlorococcus marinus subsp; identical to SEQ ID NO: 1861
  CDS (1)..(1068)

SEQ ID NO: 7153 - protein, 355 aa, Prochlorococcus marinus subsp; identical to SEQ ID NO: 1862

SEQ ID NO: 7154 - DNA, 1083 bp, Prochlorococcus marinus; identical to SEQ ID NO: 1665
  CDS (1)..(1083)

SEQ ID NO: 7155 - protein, 360 aa, Prochlorococcus marinus; identical to SEQ ID NO: 1666

SEQ ID NO: 7156 - DNA, 1074 bp, Prochlorococcus marinus; identical to SEQ ID NO: 1863
  CDS (1)..(1074)

SEQ ID NO: 7157 - protein, 357 aa, Prochlorococcus marinus; identical to SEQ ID NO: 1864

SEQ ID NO: 7158 - DNA, 1113 bp, Haemophilus ducreyi; identical to SEQ ID NO: 1655
  CDS (1)..(1113)

SEQ ID NO: 7159 - protein, 370 aa, Haemophilus ducreyi; identical to SEQ ID NO: 1656

SEQ ID NO: 7160 - DNA, 1080 bp, Haemophilus ducreyi; identical to SEQ ID NO: 1865
  CDS (1)..(1080)

SEQ ID NO: 7161 - protein, 359 aa, Haemophilus ducreyi; identical to SEQ ID NO: 1866

SEQ ID NO: 7162 - DNA, 1086 bp, Candidatus Blochmannia floridanus; identical to SEQ ID NO: 1867
  CDS (1)..(1086)

SEQ ID NO: 7163 - protein, 361 aa, Candidatus Blochmannia floridanus; identical to SEQ ID NO: 1868

SEQ ID NO: 7164 - DNA, 1143 bp, Xylella fastidiosa
  CDS (1)..(1143)
atgtctcctccgcttggtctatgtctaaatgttctgagattacatcccatgccaccatttaccgacgacctccgtatccgaaaaattgaaccactgacacctcctaacaagctcctcttacaactaccatgcgatgagcaggcatcgctgactgttgcgacctcacgcaacgcactgcacgatatcctgcacggccacaatgaccgtttagccgtcgtgataggcccatgctcaatccatgatccaattgcagccattgattactcgcaacgtctacgcccattgcgtgagatgtacaaggatgcactagaaatcgtgatgcgagtttactttcagaaaccgcgcaccactattggttggaaaggattggtcaacgatccggatcttgatggcagcttccagatcaataagggcttgcatatcgcgcgcaacctgctgcgcgatatcaatcatctcggcttacccgctggtgtggaatttctagacacgatttcgccgcaatatctggctgacttagtcgcctggggtgccattggtgctcgcaccactgaaagccaaatacaccgtgaaatggcttcaggtttatcgtgcccgattggctttaaaaacagtaccagtggtgatgtgaagattgctgctgacgcgattaaagcagcttcgcatccgcaccatttcctttcagtgacaaagacaggtgttgccgcagtcgtcgccacccagggtaaccccgattgtcacgtgattctgcgtggaggcaaggtcccgaattacgacgcaatcaatgtcgaagctgccagccaaacattgcttaaatccaagctaccggtgcgactgatgattgatgcgagccatgccaatagcggcaaaaatccaaacaatcaacctaaggtgatcgagaacatcgtagaacagcttaaagccggtgaacgccgcatcatcggtgtcatgattgaaagccacattgttggtggccggcaagaattagtccttggaaacacacttaactatggacagagcattaccgatgcttgcatcgactgggatacctcggttgcaatgttagaacagctcgctcaggccgtacgcgtcagacagactctaccaacgaccactacagctaacaaaacatcaaaaacccaataa

SEQ ID NO: 7165 - protein, 380 aa, Xylella fastidiosa; identical to SEQ ID NO: 1870

SEQ ID NO: 7166 - DNA, 1053 bp, Vibrio parahaemolyticus; identical to SEQ ID NO: 1647
  CDS (1)..(1053)

SEQ ID NO: 7167 - protein, 350 aa, Vibrio parahaemolyticus; identical to SEQ ID NO: 1648

SEQ ID NO: 7168 - DNA, 1053 bp, Vibrio parahaemolyticus; identical to SEQ ID NO: 1645
  CDS (1)..(1053)

SEQ ID NO: 7169 - protein, 350 aa, Vibrio parahaemolyticus; identical to SEQ ID NO: 1646

SEQ ID NO: 7170 - DNA, 1074 bp, Vibrio parahaemolyticus; identical to SEQ ID NO: 1871
  CDS (1)..(1074)

SEQ ID NO: 7171 - protein, 357 aa, Vibrio parahaemolyticus; identical to SEQ ID NO: 1872

SEQ ID NO: 7172 - DNA, 1083 bp, Pseudomonas syringae; identical to SEQ ID NO: 1873
  CDS (1)..(1083)

SEQ ID NO: 7173 - protein, 360 aa, Pseudomonas syringae; identical to SEQ ID NO: 1874

SEQ ID NO: 7174 - DNA, 1077 bp, Pseudomonas syringae; identical to SEQ ID NO: 1875
  CDS (1)..(1077)

SEQ ID NO: 7175 - protein, 358 aa, Pseudomonas syringae; identical to SEQ ID NO: 1876

SEQ ID NO: 7176 - DNA, 1062 bp, Pseudomonas putida; identical to SEQ ID NO: 1877
  CDS (1)..(1062)

SEQ ID NO: 7177 - protein, 353 aa, Pseudomonas putida; identical to SEQ ID NO: 1878

SEQ ID NO: 7178 - DNA, 1113 bp, Pseudomonas putida; identical to SEQ ID NO: 1879
  CDS (1)..(1113)

SEQ ID NO: 7179 - protein, 370 aa, Pseudomonas putida; identical to SEQ ID NO: 1880

SEQ ID NO: 7180 - DNA, 1086 bp, Bradyrhizobium japonicum
  CDS (1)..(1086)
atgctgagcacgactgacgatcttcgtatccgtgaactgaaagagctgagcacgccggatgaggtaatgcgggaggtcccgcgcacgctcaccgcaacgcgtgtggtgatggcggcgcgcaacgccatccatgccatcctcaccggccaggacgaccgcctgctggtggtggtcggcccgtgctcggtgcatgatccccgggccgcgctcgactacgctgagcgtctgacaaaactgcgcgaggacctcgccgaccagctcgagatcgtaatgcgggtctatttcgagaagccgcgcaccaccgtcggctggaagggcctgatcaacgaccccgatctcgacggcagcttcgacatcaacaagggcctgcggctggcgcgcaacgtgctgtcagcggtgaacaatctcggcctcccggccggcgccgaattcctggacatgacgacgccgcaatacatcgctgacctcgtgtcctgggccgcgatcggcgcgcgcacgaccgagagccagatccatcgcgagctggcctccgggctgtcctgcccggtcggcttcaagaacggcaccgatggcaatgtgcggatcgcggcggacgcagtgaagtcggcctcgcatccgcatcatttcatggcggtgaccaagctcggccgctcggcgatcgcctcgaccgcgggcaacgaggactgccacatcatcctgcgcggcggcagcacgccgaactacgatgcggcaagcgtcgcggcggcctgcaacgagctggcgaaatccggcgtcgcgccgctggtgatggtggatgcgagccacgccaattcgagcaagaagccggagaaccagccgctggtcatggccgacattgccggccagatttccggtggcgagagccgcatcatgggtgtgatgatcgagagcaatctcgtcgccggccgccaggacgtggttccgggcaagccgctcacctacggccagagcatcacggacggctgtatcgactgggcgaccacggcaactgtgctcgagcagctcgccgatgcggtcgaaatccggcgcaacgcccagcgcgcggggctgcacgagcgctcggcgtaa

SEQ ID NO: 7181 - protein, 361 aa, Bradyrhizobium japonicum; identical to SEQ ID NO: 1642

SEQ ID NO: 7182 - DNA, 1053 bp, Vibrio vulnificus; identical to SEQ ID NO: 1639
  CDS (1)..(1053)

SEQ ID NO: 7183 - protein, 350 aa, Vibrio vulnificus; identical to SEQ ID NO: 1640

SEQ ID NO: 7184 - DNA, 1053 bp, Vibrio vulnificus; identical to SEQ ID NO: 1637
  CDS (1)..(1053)

SEQ ID NO: 7185 - protein, 350 aa, Vibrio vulnificus; identical to SEQ ID NO: 1638

SEQ ID NO: 7186 - DNA, 1071 bp, Vibrio vulnificus; identical to SEQ ID NO: 1885
  CDS (1)..(1071)

SEQ ID NO: 7187 - protein, 356 aa, Vibrio vulnificus; identical to SEQ ID NO: 1886

SEQ ID NO: 7188 - DNA, 1062 bp, Synechococcus elongatus; identical to SEQ ID NO: 1615
  CDS (1)..(1062)

SEQ ID NO: 7189 - protein, 353 aa, Synechococcus elongatus; identical to SEQ ID NO: 1616

SEQ ID NO: 7190 - DNA, 1065 bp, Shewanella oneidensis; identical to SEQ ID NO: 1627
  CDS (1)..(1065)

SEQ ID NO: 7191 - protein, 354 aa, Shewanella oneidensis; identical to SEQ ID NO: 1628

SEQ ID NO: 7192 - DNA, 1092 bp, Shewanella oneidensis; identical to SEQ ID NO: 1891
  CDS (1)..(1092)

SEQ ID NO: 7193 - protein, 363 aa, Shewanella oneidensis; identical to SEQ ID NO: 1892

SEQ ID NO: 7194 - DNA, 1059 bp, Shewanella oneidensis; identical to SEQ ID NO: 1625
  CDS (1)..(1059)

SEQ ID NO: 7195 - protein, 352 aa, Shewanella oneidensis; identical to SEQ ID NO: 1626

SEQ ID NO: 7196 - DNA, 1170 bp, Corynebacterium efficiens; identical to SEQ ID NO: 1893
  CDS (1)..(1170)

SEQ ID NO: 7197 - protein, 389 aa, Corynebacterium efficiens; identical to SEQ ID NO: 1894

SEQ ID NO: 7198 - DNA, 1233 bp, Bifidobacterium longum; identical to SEQ ID NO: 1895
  CDS (1)..(1233)

SEQ ID NO: 7199 - protein, 410 aa, Bifidobacterium longum; identical to SEQ ID NO: 1896

SEQ ID NO: 7200 - DNA, 1221 bp, Phytophthora infestans; identical to SEQ ID NO: 1897
  CDS (20)..(1153)

SEQ ID NO: 7201 - protein, 377 aa, Phytophthora infestans; identical to SEQ ID NO: 1898

SEQ ID NO: 7202 - DNA, 1062 bp, Chlorobium tepidum; identical to SEQ ID NO: 1607
  CDS (1)..(1062)

SEQ ID NO: 7203 - protein, 353 aa, Chlorobium tepidum; identical to SEQ ID NO: 1608

SEQ ID NO: 7204 - DNA, 1074 bp, Xanthomonas campestris; identical to SEQ ID NO: 1603
  CDS (1)..(1074)

SEQ ID NO: 7205 - protein, 357 aa, Xanthomonas campestris; identical to SEQ ID NO: 1604

SEQ ID NO: 7206 - DNA, 1065 bp, Synechococcus sp; identical to SEQ ID NO: 1743
  CDS (1)..(1065)

SEQ ID NO: 7207 - protein, 354 aa, Synechococcus sp; identical to SEQ ID NO: 1744

SEQ ID NO: 7208 - DNA, 1035 bp, Escherichia coli; identical to SEQ ID NO: 1899
  CDS (1)..(1035)

SEQ ID NO: 7209 - protein, 344 aa, Escherichia coli; identical to SEQ ID NO: 1900

SEQ ID NO: 7210 - DNA, 1200 bp, Stigmatella aurantiaca; identical to SEQ ID NO: 1901
  CDS (62)..(1147)

SEQ ID NO: 7211 - protein, 361 aa, Stigmatella aurantiaca; identical to SEQ ID NO: 1902

SEQ ID NO: 7212 - DNA, 1092 bp, Rhizobium loti
  CDS (1)..(1092)
atgttgaccaccacagacgacctccgggtcaaggaaatccgagaactgagcacgccggaccaggtgatgcgggaaatcccgcgcacgctgacggcgacgcgcaccgtgagcgcctcacgcaatgcgatccacgctattctgaacggcaccgacgaccggctgcttgtcgtcgtcggtccctgttcgatccacgatccggtcgcggccgttgactatgccagccgtctggcggcgctgcgcgagaccctgtccgaccggcttgagatcgtgatgcgggtgtatttcgagaagccgcgcaccacggtcggctggaagggcctgatcaacgatcccgaccttgacggcagcttcaacatcgacaaggggctcaggatggcacgcaacgtgctttccgccgtcaacaatctcggcctgccggcggccaccgaattcctcgacatgaccacgccgcaatacattgccgacctcgtcgcctggggtgccatcggcgcgcgcaccaccgaaagccaaatccaccgtgagctggcctcgggcctgtcctgcccggtcggtttcaagaacggcaccgacggcaatctcaggatcgccggcgaggcggtgaaatcggccgcccagccgcatcatttcatggcggtgaccaagggcggacgcagcggcatcgccaccaccaccggcaatgaggactgccatgtcatcctgcgcggcggcgttcagcccaactacgacgcggcgagcgtcgaggcggcctcggtcgaactcgcccgcatcggtgtcgcgccgcggctgatgatcgatgtcagccacgccaactccgccaagaagcctgagaaccagccgaaggtggcggccgatgtggccggccaggtggcggcgggcgacgagcgcatcatcggcctgatgatcgagagcaatctcgtcgccggccggcaggacgtggtgcccggcaagccgctcgtctatggccagagcatcaccgatggctgcatcgactgggcgaccaccgagaccgtgctgcatggccttgccggtgccgtcgagtggcgccggtcggcacgccgcgccatgctggaaagccggcagggtgctgcctga

SEQ ID NO: 7213 - protein, 363 aa, Rhizobium loti; identical to SEQ ID NO: 1580

SEQ ID NO: 7214 - DNA, 1083 bp, Amycolatopsis mediterranei; identical to SEQ ID NO: 1903
  CDS (1)..(1083)

SEQ ID NO: 7215 - protein, 360 aa, Amycolatopsis mediterranei; identical to SEQ ID NO: 1904

SEQ ID NO: 7216 - DNA, 1053 bp, Pasteurella multocida; identical to SEQ ID NO: 1905
  CDS (1)..(1053)

SEQ ID NO: 7217 - protein, 350 aa, Pasteurella multocida; identical to SEQ ID NO: 1906

SEQ ID NO: 7218 - DNA, 1086 bp, Pasteurella multocida; identical to SEQ ID NO: 1583
  CDS (1)..(1086)

SEQ ID NO: 7219 - protein, 361 aa, Pasteurella multocida; identical to SEQ ID NO: 1584

SEQ ID NO: 7220 - DNA, 1125 bp, Emericella nidulans; identical to SEQ ID NO: 1907
  CDS (1)..(1125)

SEQ ID NO: 7221 - protein, 374 aa, Emericella nidulans; identical to SEQ ID NO: 1908

SEQ ID NO: 7222 - DNA, 1239 bp, Vibrio cholerae; identical to SEQ ID NO: 1911
  CDS (114)..(1175)

SEQ ID NO: 7223 - protein, 353 aa, Vibrio cholerae; identical to SEQ ID NO: 1912

SEQ ID NO: 7224 - DNA, 1107 bp, Candida albicans
  CDS (1)..(1107): transl_table=12
atgtttattacaaacgaacacgttggtgacagaagtcgtatggaagattggagaatccgtggttacgatccattaactcctccagatcttttacaacatgaatacccattaactcctgaatcacagaagattatcgttgaaggtagaaatgctgcttgtgatattttgaacggcaaagaccgaagattgattggaccttgttcgattcatgatcctcaagctgccttggattactgtgaaagattatatcaagcttctgaaaaacacaagggtgaattattgattgttatgagagcatacttggaaaaaccaagaaccacagttggttggaaaggtttaattaacgacccagatatcgatggtaccttccatataaataaggggttgagaattgctagaaagttgtttgttcaattaacttcaaaattaccaattgctggtgaaatgttggatacaatctcacctcaatttttatctgatttattctcagtgggggctattggtgcaagaaccaccgaatcgcaattgcacagagagttggcatctggttatcattcccagttggattcaaaaacggtaccgatggtactttgggtgttgccattgacgcctttgagagctgcttctcatccacatcatttcctttcagtcacaaaacctggtgttgttgctattgttgggactgatgggaaccaagactgttttgttatattaagaggtggtaagaagggtacaaactatgatgccaaatccgtacaagaaacacaagaagaattaatcaaatcaaaagttgttaccgaaatgaaacctggtccaagaattatggttgattgttctcatggtaattctaataaagatcatagaaaccaaccgaaagttgcccaagttgttgctgaacaagtggccggtggtgataaatccatatgtggattaatgattgagagtaatataaatgatggaagacaagatgttccaccaaaggaacaaggtggtaaagatgctttgaaatacggtgtttctattaccgatgcttgtattggttgggaaaccacagaagaagttttggaggttttagccaatgctgtcaaaaccagaagatctttatag

SEQ ID NO: 7225 - protein, 368 aa, Candida albicans; identical to SEQ ID NO: 1568

SEQ ID NO: 7226 - DNA, 1107 bp, Schizosaccharomyces pombe; identical to SEQ ID NO: 1573
  CDS (1)..(1107)

SEQ ID NO: 7227 - protein, 368 aa, Schizosaccharomyces pombe; identical to SEQ ID NO: 1574

SEQ ID NO: 7228 - DNA, 1113 bp, Candida albicans
  CDS (1)..(1113): transl_table=12
atgagtaaaactcctgttcctaccgaatacgacgacacaagaatattgggttacgatcctttagttccaccagccttattacaacacgaaataaaggcatctgccgaatcattggatgttgttataaaaggccgttacgattctgcccaaatccttaagggtaatgatgacagatgtattgtaattgttggtccatgttcaattcacgatcctccacaagccttagaatatggtaaacgtttgaagaaattggctgatgaattaaaagatgacttggtgattatcatgagagcttatttggaaaaaccaagaactaccgttggttggaaaggtttgatcaatgatcctgatgttgataattcttttgatattaaccgtgggttgaagatatctcgtcaattatattccgatttgactagtgttgttggattaccaattggatcagaaatgttagacaccatttctccacaatacttttccgatttcttgagttttggggccattggagctagaaccaccgaatcacaattacacagagaattagcttctggtttaagcttcccaattggatttaaaaatggtaccgatggtggtttagccgttgccttggatgccgtgcaagcttcttcaaaaggacatcacttcatgggtgtcaccaaaaacggtatggctgccattaccactactaaaggtaacgattgttgtttcattatattaagaggtggtaaaaaaatcaccaattacgatgttgaatcagttaaagctgctaaagaagctattgccaaatgtaccgatccaagtatcaagttgatggttgattgctctcacgacaactcaagaaaagactacagaaaccaacctcaagtattagacagtgttgctgaacaaataagtaatggtgaagactccattattggggttatgattgaatccaatattcatgaaggtaaacaaccaatgcccccagcaggtagtggtaaagaagcattgaaatacggtgtgtctatcaccgatggatgtgtttcttgggaaaccactgttgaaatgttgaccaaattgagtcaagcagtccaaactagaagaagtttaaagaaacaaaaagtttccaattaa

SEQ ID NO: 7229 - protein, 370 aa, Candida albicans; identical to SEQ ID NO: 1914

SEQ ID NO: 7230 - DNA, 1101 bp, Corynebacterium glutamicum; identical to SEQ ID NO: 1915
  CDS (1)..(1101): transl_table=11

SEQ ID NO: 7231 - protein, 366 aa, Corynebacterium glutamicum; identical to SEQ ID NO: 1916

SEQ ID NO: 7232 - DNA, 1053 bp, Escherichia coli O157; identical to SEQ ID NO: 1917
  CDS (1)..(1053): transl_table=11

SEQ ID NO: 7233 - protein, 350 aa, Escherichia coli O157; identical to SEQ ID NO: 1918

SEQ ID NO: 7234 - DNA, 1113 bp, Saccharomyces cerevisiae
  CDS (1)..(1113)
atgagtgaatctccaatgttcgctgccaacggcatgccaaaggtaaatcaaggtgctgaagaagatgtcagaattttaggttacgacccattagcttctccagctctccttcaagtgcaaatcccagccacaccaacttctttggaaactgccaagagaggtagaagagaagctatagatattattaccggtaaagacgacagagttcttgtcattgtcggtccttgttccatccatgatctagaagccgctcaagaatacgctttgagattaaagaaattgtcagatgaattaaaaggtgatttatccatcattatgagagcatacttggagaagccaagaacaaccgtcggctggaaaggtctaattaatgaccctgatgttaacaacactttcaacatcaacaagggtttgcaatccgctagacaattgtttgtcaacttgacaaatatcggtttgccaattggttctgaaatgcttgataccatttctcctcaatacttggctgatttggtctccttcggtgccattggtgccagaaccaccgaatctcaactgcacagagaattggcctccggtttgtctttcccagttggtttcaagaacggtaccgatggtaccttaaatgttgctgtggatgcttgtcaagccgctgctcattctcaccatttcatgggtgttactaagcatggtgttgctgctatcaccactactaagggtaacgaacactgcttcgttattctaagaggtggtaaaaagggtaccaactacgacgctaagtccgttgcagaagctaaggctcaattgcctgccggttccaacggtctaatgattgactactctcacggtaactccaataaggatttcagaaaccaaccaaaggtcaatgacgttgtttgtgagcaaatcgctaacggtgaaaacgccattaccggtgtcatgattgaatcaaacatcaacgaaggtaaccaaggcatcccagccgaaggtaaagccggcttgaaatatggtgtttccatcactgatgcttgtataggttgggaaactactgaagacgtcttgaggaaattggctgctgctgtcagacaaagaagagaagttaacaagaaatag

SEQ ID NO: 7235 - protein, 370 aa, Saccharomyces cerevisiae; identical to SEQ ID NO: 1572

SEQ ID NO: 7236 - DNA, 1047 bp, Buchnera aphidicola; identical to SEQ ID NO: 1923
  CDS (1)..(1047)

SEQ ID NO: 7237 - protein, 348 aa, Buchnera aphidicola; identical to SEQ ID NO: 1924

SEQ ID NO: 7238 - DNA, 1047 bp, Buchnera aphidicola; identical to SEQ ID NO: 1925
  CDS (1)..(1047)

SEQ ID NO: 7239 - protein, 348 aa, Buchnera aphidicola; identical to SEQ ID NO: 1926

SEQ ID NO: 7240 - DNA, 1047 bp, Escherichia coli O157; identical to SEQ ID NO: 1927
  CDS (1)..(1047): transl_table=11

SEQ ID NO: 7241 - protein, 348 aa, Escherichia coli O157; identical to SEQ ID NO: 1928

SEQ ID NO: 7242 - DNA, 1047 bp, Escherichia coli O6; identical to SEQ ID NO: 1929
  CDS (1)..(1047): transl_table=11

SEQ ID NO: 7243 - protein, 348 aa, Escherichia coli O6; identical to SEQ ID NO: 1930

SEQ ID NO: 7244 - DNA, 1047 bp, Erwinia herbicola; identical to SEQ ID NO: 1933
  CDS (1)..(1047)

SEQ ID NO: 7245 - protein, 348 aa, Erwinia herbicola; identical to SEQ ID NO: 1934

SEQ ID NO: 7246 - DNA, 1047 bp, Salmonella typhimurium; identical to SEQ ID NO: 1937
  CDS (1)..(1047)

SEQ ID NO: 7247 - protein, 348 aa, Salmonella typhimurium; identical to SEQ ID NO: 1938

SEQ ID NO: 7248 - DNA, 1047 bp, Shigella flexneri; identical to SEQ ID NO: 1939
  CDS (1)..(1047)

SEQ ID NO: 7249 - protein, 348 aa, Shigella flexneri; identical to SEQ ID NO: 1940

SEQ ID NO: 7250 - DNA, 25 bp, Artificial sequence
  primer
atgttcattaaaaacgatcacgccg

SEQ ID NO: 7251 - DNA, 25 bp, Artificial sequence
  primer
ctattttttcaaggcctttcttctg

SEQ ID NO: 7252 - protein, 357 aa, Artificial sequence
  consensus sequence
  Variant (2)..(3): Xaa in position 2 to 3 is any amino acid
  Variant (5)..(11): Xaa in position 5 to 11 is any amino acid
  Variant (13)..(24): Xaa in position 13 to 24 is any amino acid
  Variant (26)..(30): Xaa in position 26 to 30 is any amino acid
  Variant (32)..(33): Xaa in position 32 to 33 is any amino acid
  Variant (35)..(35): Xaa in position 35 is any amino acid
  Variant (37)..(37): Xaa in position 37 is any amino acid
  Variant (38)..(40): Xaa in position 38 to 40 is any or no amino acid
  Variant (43)..(43): Xaa in position 43 is any amino acid
  Variant (45)..(46): Xaa in position 45 to 46 is any amino acid
  Variant (54)..(56): Xaa in position 54 to 56 is any amino acid
  Variant (58)..(59): Xaa in position 58 to 59 is any amino acid
  Variant (62)..(63): Xaa in position 62 to 63 is any amino acid
  Variant (65)..(73): Xaa in position 65 to 73 is any amino acid
  Variant (74)..(76): Xaa in position 74 to 76 is any or no amino acid
  Variant (78)..(80): Xaa in position 78 to 80 is any amino acid
  Variant (83)..(83): Xaa in position 83 is any amino acid
  Variant (85)..(85): Xaa in position 85 is any amino acid
  Variant (91)..(91): Xaa in position 91 is any amino acid
  Variant (92)..(92): Xaa in position 92 is any or no amino acid
  Variant (100)..(100): Xaa in position 100 is any amino acid
  Variant (103)..(106): Xaa in position 103 to 106 is any amino acid
  Variant (108)..(112): Xaa in position 108 to 112 is any amino acid
  Variant (115)..(117): Xaa in position 115 to 117 is any amino acid
  Variant (119)..(119): Xaa in position 119 is any amino acid
  Variant (121)..(128): Xaa in position 121 to 128 is any amino acid
  Variant (129)..(130): Xaa in position 129 to 130 is any or no amino acid
  Variant (132)..(134): Xaa in position 132 to 134 is any amino acid
  Variant (136)..(136): Xaa in position 136 is any amino acid
  Variant (139)..(142): Xaa in position 139 to 142 is any amino acid
  Variant (144)..(146): Xaa in position 144 to 146 is any amino acid
  Variant (148)..(150): Xaa in position 148 to 150 is any amino acid
  Variant (152)..(152): Xaa in position 152 is any amino acid
  Variant (163)..(163): Xaa in position 163 is any amino acid
  Variant (166)..(166): Xaa in position 166 is any amino acid
  Variant (168)..(168): Xaa in position 168 is any amino acid
  Variant (171)..(171): Xaa in position 171 is any amino acid
  Variant (174)..(174): Xaa in position 174 is any amino acid
  Variant (176)..(176): Xaa in position 176 is any amino acid
  Variant (185)..(188): Xaa in position 185 to 188 is any amino acid
  Variant (190)..(191): Xaa in position 190 to 191 is any amino acid
  Variant (193)..(195): Xaa in position 193 to 195 is any amino acid
  Variant (197)..(199): Xaa in position 197 to 199 is any amino acid
  Variant (201)..(201): Xaa in position 201 is any amino acid
  Variant (203)..(206): Xaa in position 203 to 206 is any amino acid
  Variant (207)..(208): Xaa in position 207 to 208 is any or no amino acid
  Variant (210)..(213): Xaa in position 210 to 213 is any amino acid
  Variant (214)..(215): Xaa in position 214 to 215 is any or no amino acid
  Variant (217)..(217): Xaa in position 217 is any amino acid
  Variant (220)..(222): Xaa in position 220 to 222 is any amino acid
  Variant (224)..(224): Xaa in position 224 is any amino acid
  Variant (230)..(232): Xaa in position 230 to 232 is any amino acid
  Variant (233)..(238): Xaa in position 233 to 238 is any or no amino acid
  Variant (241)..(258): Xaa in position 241 to 258 is any amino acid
  Variant (259)..(269): Xaa in position 259 to 269 is any or no amino acid
  Variant (271)..(271): Xaa in position 271 is any amino acid
  Variant (274)..(274): Xaa in position 274 is any amino acid
  Variant (275)..(278): Xaa in position 275 to 278 is any or no amino acid
  Variant (281)..(281): Xaa in position 281 is any amino acid
  Variant (283)..(286): Xaa in position 283 to 286 is any amino acid
  Variant (288)..(289): Xaa in position 288 to 289 is any amino acid
  Variant (291)..(296): Xaa in position 291 to 296 is any amino acid
  Variant (298)..(300): Xaa in position 298 to 300 is any amino acid
  Variant (302)..(302): Xaa in position 302 is any amino acid
  Variant (303)..(307): Xaa in position 303 to 307 is any or no amino acid
  Variant (309)..(309): Xaa in position 309 is any amino acid
  Variant (311)..(311): Xaa in position 311 is any amino acid
  Variant (313)..(313): Xaa in position 313 is any amino acid
  Variant (316)..(316): Xaa in position 316 is any amino acid
  Variant (317)..(319): Xaa in position 317 to 319 is any or no amino acid
  Variant (321)..(321): Xaa in position 321 is any amino acid
  Variant (323)..(327): Xaa in position 323 to 327 is any amino acid
  Variant (328)..(338): Xaa in position 328 to 338 is any or no amino acid
  Variant (341)..(341): Xaa in position 341 is any amino acid
  Variant (343)..(343): Xaa in position 343 is any amino acid
  Variant (346)..(346): Xaa in position 346 is any amino acid
  Variant (348)..(349): Xaa in position 348 to 349 is any amino acid
  Variant (351)..(352): Xaa in position 351 to 352 is any amino acid
  Variant (354)..(356): Xaa in position 354 to 356 is any amino acid
LXXPXXXXXXXPXXXXXXXXXXXXRXXXXXIXXGXDXXXXRLXVXXGPCSIHDXXXAXXYAXXLXXXXXXXXXXXXLXXXMRXYXEKPRTXXVGWKGLIXDPXXXXSXXXXXGLXXXRXLXXXXXXXXXXPXXXEXLDXXXXQXXXDXXXWXAIGARTTESQXHRXEXASXLSXPXGFKNGTDGXXXXAXXAXXXAXXXHXFXXXXXXGXXXXXXTXGNXXXHXILRGGXXXXXXXXXNYXXXXXXXXXXXXXXXXXXXXXXXXXXXXXDXSHXXXXXNSXKXXXXQXXVXXXXXXQXXXGXXXXXXIXGXMXESXXXXGXQXXXXXXXXXXXXXXXXYGXSXTDXCXXWXXTXXXL

SEQ ID NO: 7253 - protein, 35 aa, Artificial sequence
  protein pattern
  Variant (2)..(2): Xaa in position 2 is any amino acid
  Variant (3)..(3): Xaa in position 3 is Ala, Gly or Ser
  Variant (4)..(4): Xaa in position 4 is Ala, Cys, Gly, Ser, Thr or Val
  Variant (6)..(6): Xaa in position 6 is any amino acid
  Variant (8)..(8): Xaa in position 8 is Asp, Glu, Asn, Gln or Ser
  Variant (9)..(13): Xaa in position 9 to 13 is any amino acid
  Variant (14)..(14): Xaa in position 14 is Phe or Tyr
  Variant (15)..(16): Xaa in position 15 to 16 is any amino acid
  Variant (17)..(17): Xaa in position 17 is Asp or Glu
  Variant (18)..(19): Xaa in position 18 to 19 is any amino acid
  Variant (20)..(20): Xaa in position 20 is Ala, Cys, Gly, Ser or Thr
  Variant (21)..(22): Xaa in position 21 to 22 is any amino acid
  Variant (29)..(29): Xaa in position 29 is any amino acid
  Variant (33)..(33): Xaa in position 33 is any amino acid
PXXXEXLXXXXXXXXXXXXXXXAIGARTXESQXHR

SEQ ID NO: 7254 - protein, 16 aa, Artificial sequence
  protein pattern
  Variant (3)..(3): Xaa in position 3 is Ala, Ser, Thr or Val
  Variant (5)..(5): Xaa in position 5 is Phe, Leu or Val
  Variant (11)..(11): Xaa in position 11 is any or no amino acid
  Variant (13)..(13): Xaa in position 13 is any or no amino acid
MRXYXEKPRTXVXGWK

SEQ ID NO: 7255 - protein, 27 aa, Artificial sequence
  protein pattern
  Variant (2)..(5): Xaa in position 2 to 5 is any or no amino acid
  Variant (10)..(10): Xaa in position 10 is Asp, Gly, Asn, Ser or Thr
  Variant (12)..(15): Xaa in position 12 to 15 is any amino acid
  Variant (17)..(17): Xaa in position 17 is any amino acid
  Variant (18)..(18): Xaa in position 18 is Asp, Glu or Asn
  Variant (20)..(21): Xaa in position 20 to 21 is any amino acid
  Variant (22)..(22): Xaa in position 22 is Ala or Ser
  Variant (23)..(23): Xaa in position 23 is Ala, Ser, Thr or Val
  Variant (24)..(26): Xaa in position 24 to 26 is any amino acid
FXXXXKNGTXGXXXXAXXAXXXXXXXH

SEQ ID NO: 7256 - protein, 19 aa, Artificial sequence
  protein pattern
  Variant (3)..(3): Xaa in position 3 is any amino acid
  Variant (5)..(5): Xaa in position 5 is Ile or Val
  Variant (8)..(8): Xaa in position 8 is any amino acid
  Variant (10)..(10): Xaa in position 10 is Ile, Leu or Val
  Variant (11)..(11): Xaa in position 11 is any amino acid
  Variant (13)..(14): Xaa in position 13 to 14 is any amino acid
  Variant (15)..(15): Xaa in position 15 is Ser or Thr
  Variant (16)..(18): Xaa in position 16 to 18 is any amino acid
  Variant (19)..(19): Xaa in position 19 is Ile, Leu or Val
YGXSXTDXCXXWXXXXXXX

SEQ ID NO: 7257 - protein, 14 aa, Artificial sequence
  protein pattern
  Variant (2)..(2): Xaa in position 2 is any amino acid
  Variant (5)..(5): Xaa in position 5 is Ala, Asp or Gly
  Variant (8)..(8): Xaa in position 8 is any amino acid
  Variant (10)..(13): Xaa in position 10 to 13 is any amino acid
DXSHXNSXKXXXXQ

SEQ ID NO: 7258 - protein, 28 aa, Artificial sequence
  protein pattern
  Variant (4)..(4): Xaa in position 4 is Asn, Ser or Thr
  Variant (7)..(7): Xaa in position 7 is any amino acid
  Variant (8)..(8): Xaa in position 8 is Ile, Leu, Met or Val
  Variant (9)..(9): Xaa in position 9 is Asp or Asn
  Variant (10)..(10): Xaa in position 10 is Asp, Glu, Gly, Asn or Gln
  Variant (11)..(16): Xaa in position 11 to 16 is any amino acid
  Variant (18)..(18): Xaa in position 18 is Ile, Leu, Met or Val
  Variant (19)..(20): Xaa in position 19 to 20 is any amino acid
  Variant (21)..(21): Xaa in position 21 is Ala, Gly or Ser
  Variant (23)..(27): Xaa in position 23 to 27 is any amino acid
  Variant (28)..(28): Xaa in position 28 is Ala, Ile, Leu or Val
GLIXDPXXXXXXXXXXGXXXXRXXXXXX

SEQ ID NO: 7259 - protein, 14 aa, Artificial sequence
  protein pattern
  Variant (2)..(2): Xaa in position 2 is any amino acid
  Variant (5)..(6): Xaa in position 5 to 6 is any amino acid
  Variant (7)..(7): Xaa in position 7 is Ala, Cys, Gly, Ser or Thr
  Variant (8)..(8): Xaa in position 8 is Phe or His
  Variant (9)..(9): Xaa in position 9 is Ile, Leu or Val
  Variant (10)..(10): Xaa in position 10 is Ile or Val
TXGNXXXXXXLRGG

SEQ ID NO: 7260 - protein, 11 aa, Artificial sequence
  protein pattern
  Variant (2)..(2): Xaa in position 2 is Ile, Leu or Val
  Variant (5)..(5): Xaa in position 5 is any amino acid
  Variant (6)..(6): Xaa in position 6 is Ile or Leu
  Variant (7)..(7): Xaa in position 7 is any amino acid
  Variant (8)..(8): Xaa in position 8 is Ala, Asp, Glu or Gly
  Variant (10)..(10): Xaa in position 10 is any amino acid
MXESXXXXGXQ

SEQ ID NO: 7261 - DNA, 849 bp, Saccharomyces cerevisiae
  CDS (1)..(849)
atggtagcagacttaactaaaggtatactgaaatggaaatcaagaatagaatttgatgccgttggaagcagttcctattacgaagagttaaagggcttacctccccttgcatcccataaaaaattaacacaggctgctatcttcaatagcacgaagtatgagttattacaagtaaaaaaagacattctgtccatctatgaagttgtaagtagggacattgacgaggaacgcaatcagatgcagcaaattgaacttcaacttaaaaagtcgttaaaaaaggtagaacatagttacaaaaacgtcttaaagcaaagggcttctactaattgtatcaatggaaatgatcgtctattggccaatgcggaaaaaaaaattggctcgttaaatgaagaactcgcatgtgtcaatgatattgtttcagatattgttaacaatttgaccgcattgaatgcaaacctcccgaagaaggcacaattattgaaagatgactcaataaatgtggcacattatccacttctttttgatttcctgcataaatcttgcccgaagagtattatcgctactagtgaagctagcattcacgaaaatgcctcgccctctcctcttttagaacacgatgaattaccagcagagagcataaatagtttttacggggagaacgagctacagagtgattctttagctccacttcaaactcatgacgataacatatctagttgcaaaaaaatactacccccaaaattcaacacaacaagtggcccttcaattgaaactaattttgaaaatattagcgcagatggcctcacatacaccaaatgttctttaaaaaactcaatatctttgacttaa

SEQ ID NO: 7262 - protein, 282 aa, Saccharomyces cerevisiae
MVADLTKGILKWKSRIEFDAVGSSSYYEELKGLPPLASHKKLTQAAIFNSTKYELLQVKKDILSIYEVVSRDIDEERNQMQQIELQLKKSLKKVEHSYKNVLKQRASTNCINGNDRLLANAEKKIGSLNEELACVNDIVSDIVNNLTALNANLPKKAQLLKDDSINVAHYPLLFDFLHKSCPKSIIATSEASIHENASPSPLLEHDELPAESINSFYGENELQSDSLAPLQTHDDNISSCKKILPPKFNTTSGPSIETNFENISADGLTYTKCSLKNSISLT

SEQ ID NO: 7263 - DNA, 25 bp, Artificial sequence
  primer
atggtagcagacttaactaaaggta

SEQ ID NO: 7264 - DNA, 29 bp, Artificial sequence
  primer
ttaagtcaaagatattgagttttttaaag

SEQ ID NO: 7265 - DNA, 564 bp, Saccharomyces cerevisiae
  CDS (1)..(564)
atgctacctttatatcttttaacaaatgcgaagggacaacaaatgcaaatagaattgaaaaacggtgaaattatacaagggatattgaccaacgtagataactggatgaaccttactttatctaatgtaaccgaatatagtgaagaaagcgcaattaattcagaagacaatgctgagagcagtaaagccgtaaaattgaacgaaatttatattagagggacttttatcaagtttatcaaattgcaagataatataattgacaaggtcaagcagcaaattaactccaacaataactctaatagtaacggccctgggcataaaagatactacaacaatagggattcaaacaacaatagaggtaactacaacagaagaaataataataacggcaacagcaaccgccgtccatactctcaaaaccgtcaatacaacaacagcaacagcagtaacattaacaacagtatcaacagtatcaatagcaacaaccaaaatatgaacaatggtttaggtgggtccgtccaacatcattttaacagctcttctccacaaaaggtcgaattttaa

SEQ ID NO: 7266 - protein, 187 aa, Saccharomyces cerevisiae
MLPLYLLTNAKGQQMQIELKNGEIIQGILTNVDNWMNLTLSNVTEYSEESAINSEDNAESSKAVKLNEIYIRGTFIKFIKLQDNIIDKVKQQINSNNNSNSNGPGHKRYYNNRDSNNNRGNYNRRNNNNGNSNRRPYSQNRQYNNSNSSNINNSINSINSNNQNMNNGLGGSVQHHFNSSSPQKVEF

SEQ ID NO: 7267 - DNA, 507 bp, Eremothecium gossypii
  CDS (1)..(507)
atgctgccgctatacctgttgacgaacgccaagggccagaagctctttatagagctcaagaacggcgagacgatcgagggggagcttgtgaatgttgataactggatgaacctgacactgcagagcgtggtgcatgcagggagcgaccaaacactgcaacttccggagatatatgtgcggggttcgttcatcaagtatatacggcttcaggacgacatcatcgagaaggtgaagcagcagctgaacagcggcaaagacggcagcggcagcaacggacagcagcgggaccgcgacggcagaaggtacaacggcagacgagaaggcaatgcgggcgggcgcttcggcaaccaggagcaccagcggaagcgcgggggaggctttcagcggcgcgacgggcagtacggcggcagcaggcgcgggcggtccggccaatcgggaggcgccggctttgtccagtaccaacagtctcagcagtggcagtcgtccgcatcgcaagtccagtcctga

SEQ ID NO: 7268 - protein, 168 aa, Eremothecium gossypii
MLPLYLLTNAKGQKLFIELKNGETIEGELVNVDNWMNLTLQSVVHAGSDQTLQLPEIYVRGSFIKYIRLQDDIIEKVKQQLNSGKDGSGSNGQQRDRDGRRYNGRREGNAGGRFGNQEHQRKRGGGFQRRDGQYGGSRRGRSGQSGGAGFVQYQQSQQWQSSASQVQS

SEQ ID NO: 7269 - DNA, 711 bp, Brassica napus
  CDS (116)..(505)
ctgaatccaacaaggtttctcctgtctttgtttagggttttgttctgtttctcttcctctattggttctcccgcacgggttctttaccgatctctaaatctactgattggagaagatgcttcctctttcgctactcaagactgctcaaggacatcccatgcttgtggagctcaagaatggagagacatacaatgggcatttagtaaattgcgatacgtggatgaacatccatctgcgtgaagttatctgcacatcaaaggatggagacaggttttggaggatgccggaatgttatatccgtggtaacactatcaagtaccttcgtgttccagatgaggtgattgataaagtacaggaggagaagacccgcacagataggaaaccaccaggggttggacgtggaagaggacgtggtatggatgatggaggggccagaggacgaggccgaggagctccaatggctaagatgagtggcaacagaggagcagggcgtgggcgtggttgatgattcaacaactttgaacgacaaaactctgtgttttctagctggctcctcttgctgctgctgctgttgttgcactagtttgattatattggaaggggataaaattgcttttacaatgtgatttgactgtttttttttcttcatgtatcgtttttcatgctatattccattcagtgattgttaaatctatccaaaaaaaaaaaaaa

SEQ ID NO: 7270 - protein, 129 aa, Brassica napus
MLPLSLLKTAQGHPMLVELKNGETYNGHLVNCDTWMNIHLREVICTSKDGDRFWRMPECYIRGNTIKYLRVPDEVIDKVQEEKTRTDRKPPGVGRGRGRGMDDGGARGRGRGAPMAKMSGNRGAGRGRG

SEQ ID NO: 7271 - DNA, 736 bp, Brassica napus
  CDS (138)..(527)
tttcgaaaattttcgccgcctccgtcgtcttcgatctctttctttagttgaagaggaagccaatcttctgatagcaagctttctctctttgcttcgatttgttctttacggatctctaaatcttttgattcgagaagatgcttcctctttcgctgctcaagactgctcaagggcatcccatgcttgtggagctcaagaatggcgagacatacaatgggcatttagtgaattgtgatacgtggatgaacattcatcttcgtgaagtcatctgcacatcaaaggacggagacaggttttggaggatgccggagtgttacatccgcggtaacacgatcaagtaccttcgagttccagatgaggtgattgataaagtacaggaggagaagacccgcacagataggaaaccaccaggggttggccgtgggagaggacgtggtatggatgatggaggggccagaggccgtggccgaggagctccaatggcgaagatgagtggcaacagaggagcaggtcgtgggcgtggttgatgcaacaacttatattaaaaaagacttatccaatctcttgctgctgctgcacactcgcattttaagagttctcttgtctgtttttgtttcgtctttgagctgaatatataaaactaatcacaatgagctgaatataaaaattcaagctgttctaagctttatctcttcccacttttagtttcttcgagttcttcgaaaaaaaaaaaaaa

SEQ ID NO: 7272 - protein, 129 aa, Brassica napus; identical to SEQ ID NO: 7270

SEQ ID NO: 7273 - DNA, 681 bp, Brassica napus
  CDS (131)..(520)
ggtaacccgatttcgaaaatatttcgccgcctccgtccgtcgtcttcgatctctttcttttgttgaagaggaagccaatcttctggtagcaaggttcttcacggatctctaaatcttttgattcgagaagatgcttcctctttcgctgctcaagactgctcaagggcatcccatgcttgtggagctcaagaatggagagacgtacaatgggcatttagtgaattgtgatacgtggatgaacattcatctgcgtgaagtcatctgcacatcaaaggacggagacaggttttggaggatgccggagtgttatatccgcggtaacactatcaagtaccttcgagttccagatgaggtgattgataaagtacaggaggagaagacccgcacagatagaaaaccaccaggggttggacgtgggagaggacgtggtgtggatgatggaggggccagaggccgtggtcgaggagctccaatggcgaagatgagtggcaacagaggagcaggtcgtggccgtggttgatgcaagaacttatataaagactgcctgctgctgcactcgcattttaagagttctcttgtttgtttaaatttcatctttgagctaatatataaaactaaacattgtgcgctgaatatataaaattcgagctgttataagcttttccctaaaaaaaaaaaaaa

SEQ ID NO: 7274 - protein, 129 aa, Brassica napus
MLPLSLLKTAQGHPMLVELKNGETYNGHLVNCDTWMNIHLREVICTSKDGDRFWRMPECYIRGNTIKYLRVPDEVIDKVQEEKTRTDRKPPGVGRGRGRGVDDGGARGRGRGAPMAKMSGNRGAGRGRG

SEQ ID NO: 7275 - DNA, 763 bp, Glycine max
  CDS (98)..(547)
ggaacacaagagaggtctgattaatactagttttctgtaaaatcgcaaagaaacacacagttagcaccgtcaacctctgcaaccaccgattccaaccatgcttcccctttcccttctcaagactgcccaaggccaccccatgctggtggaactgaaaaatggggagacttataacgggcacttggttaattgtgatacatggatgaacatccatctccgagaagtcatttgtacctctaaagatggagatagattttggcgtatgcctgagtgctacattcgtggcaataccattaagtaccttcgggttcctgatgaggttattgacaaagtccaggaagaaacaaagagccgtactgatcgcaaaccccctggtgtgggacgtggaaggggaagaggtagggatgatggtcctggtggacgtcaacctaaaggaattgggcgaggtattgatgagggtggagctaaaggacaaggaggacgaggccggggtggtccaggtggaaaacccagtggaaacagaggtgcagggcgaggtagaggttgatttgggtgctgatatggaactacagatgggccagttgctgcttttagaggcattggtgcccattcaaaacatttagtgtttgtgttatgtttcctgtgcattatttgattttaggtttccaattgttttcctgcatttatagtcacaaaaatggtgatattatggacctcataaaaaatcttctatgccaacatcgttttccaaaaaaaaaaaaaa

SEQ ID NO: 7276 - protein, 149 aa, Glycine max
MLPLSLLKTAQGHPMLVELKNGETYNGHLVNCDTWMNIHLREVICTSKDGDRFWRMPECYIRGNTIKYLRVPDEVIDKVQEETKSRTDRKPPGVGRGRGRGRDDGPGGRQPKGIGRGIDEGGAKGQGGRGRGGPGGKPSGNRGAGRGRG

SEQ ID NO: 7277 - DNA, 435 bp, Unknown
  Unidentified
  CDS (1)..(432)
atgcttcccctctcgctcctcaagaccgcccaggggcatcccatgctcgtggagctcaagaacggcgagacctacaatgggcacttggtgaactgcgacacgtggatgaacatccacctccgggaggttatttgcacctctaaggatggtgataagttttggaggatgccggagtgctatattcgtggtaacacgatcaagtatcttcgggttcctgatgaggtgattgacaaggttcaagaggaaacttctaagagtagatcagataggaagccaccaggtgttggtcgtggaagaggaagaggagatataggcactaaacctggaggcagaggcattggtcgtggccaagatgatggcaaaggcggtggccgtggaaggggcggaattggaagtaaaggtggcaacaaaggcggacgtggtcgtgggtaagac

SEQ ID NO: 7278 - protein, 143 aa, Unknown
  Unidentified
MLPLSLLKTAQGHPMLVELKNGETYNGHLVNCDTWMNIHLREVICTSKDGDKFWRMPECYIRGNTIKYLRVPDEVIDKVQEETSKSRSDRKPPGVGRGRGRGDIGTKPGGRGIGRGQDDGKGGGRGRGGIGSKGGNKGGRGRG

SEQ ID NO: 7279 - DNA, 838 bp, Glycine max
  CDS (54)..(500)
gttttctttgaaacgcacagcttcaatcaccgaccacaccacccatcaacgacatgcttcctctttcccttctcaagactgcccaaggccaccctatgttggtggaactgaaaaatggggagacatataacgggcatttggttaattgcgacacatggatgaacatccatctgcgagaagtcatttgtacatctaaagacggagatagattttggaggatgcctgaatgctacatacgaggcaatacaatcaagtaccttcgagtacctgatgaggttattgataaagttcaagaagaaaccaagagccgtgcagatcgcaaaccacctggtgttgggcgtggaaggggaagaggcagagaggaaggtcctggtgggcgcccaacaaaaggaattgggcgtggtcttgatgatggtggtgctaggggagctggaggaagccgaggcaggggtggtcccagtggaaagcctggtggaaacagagggcgtggtagaggttgattctaacaagtgacaggaactacttaatgtgtatcggtagcaacttcactgccagtgttacctgtgcatccttgccttggcttttagcttccagtgtttttcttgtgttatgagcacaaaaatgttagtgctattatattactcgaggaaagtttctctgccagactgcccccgtctcccttttaatattcccaacagcaaacttgccttttccctttctttccttccaatgaaaagtaatgatggcgcaatgcgtgaaatacttaactcaaccttgatatatttagagatgttaatttgacaattgtatatttggcaccaagcaaaaaaaaaaaaaa

SEQ ID NO: 7280 - protein, 148 aa, Glycine max
MLPLSLLKTAQGHPMLVELKNGETYNGHLVNCDTWMNIHLREVICTSKDGDRFWRMPECYIRGNTIKYLRVPDEVIDKVQEETKSRADRKPPGVGRGRGRGREEGPGGRPTKGIGRGLDDGGARGAGGSRGRGGPSGKPGGNRGRGRG

SEQ ID NO: 7281 - DNA, 435 bp, Unknown
  Unidentified
  CDS (1)..(432)
atgcttcccctctcgctcctcaagaccgcccaggggcatcccatgctcgtggagctcaagaacggcgagacctacaatgggcacttggtcaactgcgacacgtggatgaacatccacctccgggaggttatttgcacctctaaggatggtgataagttttggaggatgccggagtgctatattcgtggtaacacaatcaagtatcttcgggttcctgatgaggtgattgacaaggttcaagaggaaacttctaagagtagatcagataggaagccgccaggtgttggccgcggaagaggaagaggagatataggcactaaacctggaggcagaggcatcgggcgtggccaagatgatggcaaaggcggtggccgtggaaggggcggaattggaagtaaaggtggcaacaaaggtggacgtggccgtgggtgagag

SEQ ID NO: 7282 - protein, 143 aa, Unknown; identical to SEQ ID NO: 7278
  Unidentified

SEQ ID NO: 7283 - DNA, 447 bp, Glycine max
  CDS (1)..(447)
atgcttcctctttcccttctcaagactgcccaaggccaccctatgttggtggaactgaaaaatggggagacatataacgggcatttggttaattgcgacacatggatgaacatccatctgcgagaagtcatttgtacatctaaagacggagatagattttggaggatgcctgaatgctacatacgaggcaatacaatcaagtaccttcgagtacctgatgaggttattgataaagttcaagaagaaaccaagagccgtgcagatcgcaaaccacctggtgttgggcgtggaaggggaagaggcagagaggaaggtcctggtgggcgcccaacaaaaggaattgggcgtggtcttgatgatggtggtgctaggggagctggaggaagccgaggcaggggtggtcccagtggaaagcctggtggaaacagagggcgtggtagaggttga

SEQ ID NO: 7284 - protein, 148 aa, Glycine max; identical to SEQ ID NO: 7280

SEQ ID NO: 7285 - DNA, 450 bp, Glycine max
  CDS (1)..(450)
atgcttcccctttcccttctcaagactgcccaaggccaccccatgctggtggaactgaaaaatggggagacttataacgggcacttggttaattgtgatacatggatgaacatccatctccgagaagtcatttgtacctctaaagatggagatagattttggcgtatgcctgagtgctacattcgtggcaataccattaagtaccttcgggttcctgatgaggttattgacaaagtccaggaagaaacaaagagccgtactgatcgcaaaccccctggtgtgggacgtggaaggggaagaggtagggatgatggtcctggtggacgtcaacctaaaggaattgggcgaggtattgatgagggtggagctaaaggacaaggaggacgaggccggggtggtccaggtggaaaacccagtggaaacagaggtgcagggcgaggtagaggttga

SEQ ID NO: 7286 - protein, 149 aa, Glycine max; identical to SEQ ID NO: 7276

SEQ ID NO: 7287 - DNA, 450 bp, Glycine max
  CDS (1)..(450)
atgctgcccctttcccttctcaagactgcccaaggccaccctatgctagtggaactgaaaaatggggagacttataacgggcacttggttaattgtgatacatggatgaacattcatctccgagaagtcatttgtacctctaaagatggagatagattttggcgtatgcccgagtgctacattcgcggcaataccataaagtaccttcgggttcctgatgaggttattgacaaagtccaggaagaaacaaagagccgcactgatcgcaaaccccctggtgtgggacgtggaagaggaagaggtagggaggatggtcctggtggacgtcaaccaaaaggaattgggcgtggccttgatgaaggtggacctaaaggacaaggaggacgaggtaggggtggtcccggtggaaagcctggtggaaacagaggtggagggcgaggtagaggttga

SEQ ID NO: 7288 - protein, 149 aa, Glycine max
MLPLSLLKTAQGHPMLVELKNGETYNGHLVNCDTWMNIHLREVICTSKDGDRFWRMPECYIRGNTIKYLRVPDEVIDKVQEETKSRTDRKPPGVGRGRGRGREDGPGGRQPKGIGRGLDEGGPKGQGGRGRGGPGGKPGGNRGGGRGRG

SEQ ID NO: 7289 - DNA, 432 bp, Triticum aestivum
  CDS (1)..(432)
atgcttcccctctcgctcctcaagaccgcccaggggcatcccatgctcgtggagctcaagaacggcgagacctacaatgggcacttggtgaactgcgacacgtggatgaacatccacctccgggaggttatttgcacctctaaggatggtgataagttttggaggatgccggagtgctatattcgtggtaacacgatcaagtatcttcgggttcctgatgaggtgattgacaaggttcaagaggaaacttctaagagtagatcagataggaagccaccaggtgttggtcgtggaagaggaagaggagatataggcactaaacctggaggcagaggcattggtcgtggccaagatgatggcaaaggcggtggccgtggaaggggcggaattggaagtaaaggtggcaacaaaggcggacgtggtcgtgggtaa

SEQ ID NO: 7290 - protein, 143 aa, Triticum aestivum; identical to SEQ ID NO: 7278

SEQ ID NO: 7291 - DNA, 432 bp, Triticum aestivum
  CDS (1)..(432)
atgcttcccctctcgctcctcaagaccgcccaggggcatcccatgctcgtggagctcaaaaacggcgagacctacaatgggcacttggtgaactgcgacacgtggatgaacatccacctccgggaggttatttgcacctccaaggatggtgataagttttggaggatgccggagtgctatattcgtgggaacacaatcaagtatcttcgggttcctgatgaggtgattgacaaggttcaagaggaaacttctaagagtagatctgataggaagccaccaggtgttggccgcggaagaggaagaggagatataggcactaaacctgggggcagaggcatcggacgtggccaagatgatggcaaaggcggtggccgcggaaggggcggaattggaagtaaaggtggcaacaaaggcggacgtggtcgtgggtaa

SEQ ID NO: 7292 - protein, 143 aa, Triticum aestivum; identical to SEQ ID NO: 7278

SEQ ID NO: 7293 - DNA, 441 bp, Zea mays
  CDS (1)..(441)
atgcttcccctctcgctcctcaagaccgcccaggggcaccccatgctcgtggagctgaagaatggtgagacatacaacgggcatctggtcaattgcgacacgtggatgaacatccatcttagggaggttatttgcacctcaaaggacggtgacaagttttggaggatgccagagtgttacattcgcgggaacaccattaagtatcttcgagttcctgatgaggtgattgacaaggttcaggaggaaacttctaaaagccgatcagataggaagccaccaggtgttggccgtggaagaggaaggggggacgtcggtgctaaacctggaggcagaggcattggacgcggccaagatgatggaggtagaggcagtggtggccgtggaaggggtggagttggtgccaaaggtggtaacaaaggtgggggccgtggtcgtggctga

SEQ ID NO: 7294 - protein, 146 aa, Zea mays
MLPLSLLKTAQGHPMLVELKNGETYNGHLVNCDTWMNIHLREVICTSKDGDKFWRMPECYIRGNTIKYLRVPDEVIDKVQEETSKSRSDRKPPGVGRGRGRGDVGAKPGGRGIGRGQDDGGRGSGGRGRGGVGAKGGNKGGGRGRG

SEQ ID NO: 7295 - DNA, 441 bp, Zea mays
  CDS (1)..(441)
atgcttcccctctcgctcctcaagaccgcccaggggcacccaatgctcgtggagctgaagaatggtgagacgtacaacgggcatctggtcaattgcgacacgtggatgaacatccaccttagggaggttatttgcacctcaaaggatggtgacaagttttggaggatgccagagtgttacattcgtgggaacaccattaagtatcttcgagttcctgatgaggtgattgacaaggttcaggaggaaacttccaaaagccggtcagataggaagccaccaggtgttggccgcggaagaggaaggggggacgttggtgctaaacctggaggcagaggcatcggacgtggccaagatgatggaggtagaggcagtggtggccgaggaaggggtggagttggtgccaaaggtggtaacaaaggtgggggccgtggccgtggctaa

SEQ ID NO: 7296 - protein, 146 aa, Zea mays; identical to SEQ ID NO: 7294

SEQ ID NO: 7297 - DNA, 28 bp, Artificial sequence
  primer
atgctacctttatatcttttaacaaatg

SEQ ID NO: 7298 - DNA, 26 bp, Artificial sequence
  primer
ttaaaattcgaccttttgtggagaag

SEQ ID NO: 7299 - protein, 172 aa, Artificial sequence
  consensus sequence
  Variant (48)..(57): Xaa in position 48 to 57 is any amino acid
  Variant (62)..(62): Xaa in position 62 is any amino acid
  Variant (93)..(93): Xaa in position 93 is any amino acid
  Variant (94)..(94): Xaa in position 94 is any or no amino acid
  Variant (98)..(98): Xaa in position 98 is any amino acid
  Variant (113)..(124): Xaa in position 113 to 124 is any amino acid
  Variant (125)..(126): Xaa in position 125 to 126 is any or no amino acid
  Variant (128)..(128): Xaa in position 128 is any amino acid
  Variant (129)..(129): Xaa in position 129 is any or no amino acid
  Variant (131)..(131): Xaa in position 131 is any amino acid
  Variant (133)..(136): Xaa in position 133 to 136 is any amino acid
  Variant (137)..(140): Xaa in position 137 to 140 is any or no amino acid
  Variant (145)..(148): Xaa in position 145 to 148 is any amino acid
  Variant (150)..(150): Xaa in position 150 is any amino acid
  Variant (151)..(162): Xaa in position 151 to 162 is any or no amino acid
  Variant (165)..(165): Xaa in position 165 is any amino acid
  Variant (167)..(167): Xaa in position 167 is any amino acid
  Variant (168)..(168): Xaa in position 168 is any or no amino acid
  Variant (171)..(171): Xaa in position 171 is any amino acid
MLPLSLLKTAQGHPMLVELKNGETYNGHLVNCDTWMNIHLREVICTSXXXXXXXXXXKDGDXFWRMPECYIRGNTIKYLRVPDEVIDKVQEEXXKSRXDRKPPGVGRGRGRGXXXXXXXXXXXXXXRXXDXGXXXXXXXXRGRGXXXXKXXXXXXXXXXXXXGNXGXXRGXG

SEQ ID NO: 7300 - protein, 6 aa, Artificial sequence
  protein pattern
ELKNGE

SEQ ID NO: 7301 - DNA, 1017 bp, Saccharomyces cerevisiae
  CDS (1)..(1017)
atgaatagcgtaaaaagagtaaagctaaattcaaaaatgtccaaacaaatatgcacgcattccggatcttttcacgcggacgagtcgttggcggtatacatgttaaggctactacccgaatttaaagatgctaagttggttagatcaagaaatcccaaggactgggaggctagtgacattctagtggatgtaggagctcagtatgacggcgtgaaattttttgaccaccaccagcgtggatttttcgaaactttcaacgagaaatacaagactaagctctcaagtgctggtctgatcttcaaacactacggtcgtgacattatcaaaacaattttgaacaacaaggttagcagctctgatttagatctgctctatgacaaggtatacaaacaatttgtcgaggcactggatgcaaacgacaacggtattagcaagtacacgattcctaaggattccaacttggaaccgaatttcagggataacgccatcagcattcccgggattatttcaggtatgaatcctaactggaacgaagacacttccgatgagtcttttgacagatgctttgctcgcgcaagtgagtttatcggtggggtctttgtcacattggtaagaggctacggtcaatcgtggttgccagccaaggcccttgtggcgcaagccattgatgaaagaatggatgttgataagagtggcaaaatcattgtcttgccccaattctgtccatggaaggagcatctatacgagctggaaagagagaagaacattgaaaagcaaatcgagtttgttctcttcacagactcttctggtgcctggagggtatctactgtaccaatcaactccacctccttccagtttaggagaggtttgccggagccattaagaggcctcagagacgaagagctgagcaccaagagcggtgtgccaggatgtatcttcattcatgcagcaggtttcattggaggtgccaagtccaaagaggctgtatatgagctggctaagatgtctttggcctag

SEQ ID NO: 7302 - protein, 338 aa, Saccharomyces cerevisiae
MNSVKRVKLNSKMSKQICTHSGSFHADESLAVYMLRLLPEFKDAKLVRSRNPKDWEASDILVDVGAQYDGVKFFDHHQRGFFETFNEKYKTKLSSAGLIFKHYGRDIIKTILNNKVSSSDLDLLYDKVYKQFVEALDANDNGISKYTIPKDSNLEPNFRDNAISIPGIISGMNPNWNEDTSDESFDRCFARASEFIGGVFVTLVRGYGQSWLPAKALVAQAIDERMDVDKSGKIIVLPQFCPWKEHLYELEREKNIEKQIEFVLFTDSSGAWRVSTVPINSTSFQFRRGLPEPLRGLRDEELSTKSGVPGCIFIHAAGFIGGAKSKEAVYELAKMSLA

SEQ ID NO: 7303 - DNA, 1715 bp, Glycine max
  CDS (59)..(1168)
ttacggctgcgagaagacgacagaaggggaagaaagtgagggaaaaaagtagagtggtatgtgggttgctgcggcaacaaaaccattcatcaaattccaattccacagacacactacttctcttccgcttcttctgatggcaaaccaagcttcactctccttttcttcttccgtgtctcctgttcacgcgcctctcaagcgcgtgggcacgcacaacggaagctttcattgcgacgaggccctcggctgcttcatgattcgcctcacgaacaaattcaacagcgccgaaatcgttcgctcccgagaccctcaggtgttggaggttctcgatgctgttctcgatgttgggggagtgtatgaccctgcccgagatcggtatgatcatcatcaaaagggatttgaagaagtttttgggcatggtttttccactaaattgagtagtgctggtcttgtttataagcattttggaaaggagattatagccaaagaacttgaggtagatgaggaacaccgagatgtgcatcacatatatttggctgtttacaagagcttcatggaggcaattgatgctatagacaatgggatcaatcagtatgatacagaccagcctccaagatacgtgaataatactcatttatcctcaagagtaggaaggctaaatttggattggacagatcctgatcagtcacctgagaaagaaaatgaggcctttcaacgtgcaatggctcttgctggcagtgagtttctggatagtgttcgatttcatgtcaattcatggttaccagcaaggtcaattgtaatggagaccctagcggctagacatactgttgatcctagtggagaaattctagttttgactaaattttgtccttggaagcttcacttatttgagcttgagggagagttgaaaaatgaccctgctgtcaaatatgttctatatcaggatgaaagaagcaagcattggcgagtgcaggcagttgcagtatctcctgacagttttcagagccgaaaggctctaccctcacagtggcgggggttaagggatgaagaattgtcaaagaagtctggcattcctggatgtgtttttgtgcatatcagcggatttattggtggaaaccaaaactttgatggtgccttggccatggcaaaggctgctttgaagatgtagacgaggatcatatgaaccaagggctatcactgattttgcgcactcattcacagtacactttactgattgcgttgaagaatgcatatgaaccatggggactgggaacagtggcttaaagatggttctatatcaagttcattaactcatttgctgataggtggtctatcttatccaaattttctttcaatagtttaaccaatgtattagttaatgaatttcttgtgtctattatgttgataattgtcattgatcttattgttataagcatcttataacaaagaatttcttgtgtctatttggttcacttgagagagcattagaacttcagaaaaacgataaatcatttctaaaggtattccaaacagatagtcattctttcccgtcttactttttgtcaatttagctactagtttccttggctataagttataacaatatgtctagtagcaccacccctaccccaagcctaaccaaactactttagttgtgattgaatcttttggaaaccatttcaggtatgcaaatacgggaactgaattatttggtt

SEQ ID NO: 7304 - protein, 369 aa, Glycine max
MWVAAATKPFIKFQFHRHTTSLPLLLMANQASLSFSSSVSPVHAPLKRVGTHNGSFHCDEALGCFMIRLTNKFNSAEIVRSRDPQVLEVLDAVLDVGGVYDPARDRYDHHQKGFEEVFGHGFSTKLSSAGLVYKHFGKEIIAKELEVDEEHRDVHHIYLAVYKSFMEAIDAIDNGINQYDTDQPPRYVNNTHLSSRVGRLNLDWTDPDQSPEKENEAFQRAMALAGSEFLDSVRFHVNSWLPARSIVMETLAARHTVDPSGEILVLTKFCPWKLHLFELEGELKNDPAVKYVLYQDERSKHWRVQAVAVSPDSFQSRKALPSQWRGLRDEELSKKSGIPGCVFVHISGFIGGNQNFDGALAMAKAALKM

SEQ ID NO: 7305 - DNA, 1068 bp, Neurospora crassa
  CDS (1)..(1068)
atggccgaaaacgcagcgaagcgcatcaagaccgatggcggtgccctgaccatcggcacccacaacggccacttccacgccgacgaggctctggccgtccacatgcttcgccagcatgttcccaaatacaccggcgcccgcctggttcgcacccgcgaccctgcactacttgagacctgcgacatcgtcgtcgatgttggtggcgagtacgagcccgcccgtgaccgctacgaccaccaccagcgcaccttcaccaccaccttccccgaccaccagacaaagctcagcagcgccggtctcgtctacatgcactttggcaagggtatcatctcgcgcagcctgcccgacgcccctgcggaggacaacgacaaggttggcttgatctggaacaagttgtacgacagcttcgtcgaggccctcgacgctcacgacaacggcatcagcgtctacgattccgatgctctcaaggctgccggcatcgagaagcgcttctctaacggcggtttcaccctcggtgccatggtcggccgcttcaatggcaactggaacgataccgccccctcggaccctgtggctgcccaggcggaggaagatggcaggttcgagcaggccagtcagcgtatcggtgaggagttcgaccgcgctctcgactactacaccaaggcttggcttccggccagggatgtcgtcgagacggcctacaaggcccgcaaagagtacgatgcagagggtagaatccttgtcttgaagggtcagtcggccccttggaaggatcatctctacaccctggaagaggaagagggagagcgtgtccagaaggttctctatgtcctgtaccccgagaagcctacacccgacgccaagtggagagtgcagtgcgtgccggagactggcgactccttccagagccgcaagcccctgcccgaggcttggagaggcttccgcgatgagaagctcgatgagatcacgcaaatccagggcggcgttttcgttcatgcggcaggtttcattggaggcaacaagaccttcgatggtgccttggccatggcgaagaaggccttggagtag

SEQ ID NO: 7306 - protein, 355 aa, Neurospora crassa
MAENAAKRIKTDGGALTIGTHNGHFHADEALAVHMLRQHVPKYTGARLVRTRDPALLETCDIVVDVGGEYEPARDRYDHHQRTFTTTFPDHQTKLSSAGLVYMHFGKGIISRSLPDAPAEDNDKVGLIWNKLYDSFVEALDAHDNGISVYDSDALKAAGIEKRFSNGGFTLGAMVGRFNGNWNDTAPSDPVAAQAEEDGRFEQASQRIGEEFDRALDYYTKAWLPARDVVETAYKARKEYDAEGRILVLKGQSAPWKDHLYTLEEEEGERVQKVLYVLYPEKPTPDAKWRVQCVPETGDSFQSRKPLPEAWRGFRDEKLDEITQIQGGVFVHAAGFIGGNKTFDGALAMAKKALE

SEQ ID NO: 7307 - DNA, 1068 bp, Neurospora crassa; identical to SEQ ID NO: 7305
  CDS (1)..(1068)

SEQ ID NO: 7308 - protein, 355 aa, Neurospora crassa; identical to SEQ ID NO: 7306

SEQ ID NO: 7309 - DNA, 1450 bp, Glycine max
  CDS (61)..(1089)
ccattcgtccaattccaattccgcagacacactactacttctctccttccgattcttctgatggcaaaccaagcttcactctccttctcttcggggtctccagttcacgcgcctctgaagcgcgtgggcacgcacaacggaagcttccactgcgacgaggcccttggctgcttcatgattcgcctcacgaacaaattcaacagcgccgaaatcgttcgctcccgagaccctcaggtgttggaggatcttgatgctgttcttgatgttgggggagtgtatgaccctgctcgagatcggtatgatcatcatcaaaaaggatttgaagaagtttttgggcatggtttctccactaaattgagtagtgctggtcttgtttataagcattttggaaaggagattatagccaaagaacttaaggtagatgaggaacaccgagatgtgcattacatatatttggctgtttacaagagcttcatggaggcaattgatgctatagacaatggaatcaatcggtatgatacagaccaacctccaagatatgtgaataatactcatttatcctcaagagtaggaaggctaaatttagattggacagatcctgatcagtcacctgagaaagaaaatgaggcctttcaacgtgcaatggctcttgctggcagtgagtttctggatagtgttcgatttcatgtcaattcatggttaccagcaaggtcaattgtaatggagaccctagaggctagacatactgttgatcctagtggagaaattctagttttgactaaattgtgtccttggaagcttcacttatttgagcttgagggagagttgaaaaatgacccttctgtcaaatatgttctgtatcaggatgaaagaagcaaacaatggcgagtgcaggcagttgcagtatctcctgacagttttcagagccgaaaggctctaccctcacagtggcaagggttaagggatgaagaattgtcgaaggagtctggcattccaggatgtgtttttgtgcatatgagcggatttattggtggaaacaaaaactttgacggtgccttggccatggcgaaggctgctttgacaatgtagacgaggatcatatgaaccaagggctatcgtttttgcacgctcattcactgtacagtttactgattacattgaaaaatcaaatggagactgggaacagtggtttaaagatagttctatatcaagttctttaactcatttcctgacaggggagtctatcttatccaaattttctttcaatagtttaaccgtgtataagttaatgaatttgttgtgtctattatgttgttatcattgatcttattgttataaccatctgtttataacaatgaacttcttgtgtctatttggttcacttgagaattagaacttcagaaaaaatgacaaatcatttctaaaggtcttctaccaaaaaaaaaaaaaa

SEQ ID NO: 7310 - protein, 342 aa, Glycine max
MANQASLSFSSGSPVHAPLKRVGTHNGSFHCDEALGCFMIRLTNKFNSAEIVRSRDPQVLEDLDAVLDVGGVYDPARDRYDHHQKGFEEVFGHGFSTKLSSAGLVYKHFGKEIIAKELKVDEEHRDVHYIYLAVYKSFMEAIDAIDNGINRYDTDQPPRYVNNTHLSSRVGRLNLDWTDPDQSPEKENEAFQRAMALAGSEFLDSVRFHVNSWLPARSIVMETLEARHTVDPSGEILVLTKLCPWKLHLFELEGELKNDPSVKYVLYQDERSKQWRVQAVAVSPDSFQSRKALPSQWQGLRDEELSKESGIPGCVFVHMSGFIGGNKNFDGALAMAKAALTM

SEQ ID NO: 7311 - DNA, 1427 bp, Triticum aestivum
  CDS (40)..(1107)
cttccccgcgtgcgaccccaaatcctaaaccctttccccatggccgccgccgccggcgccacctcgcccaagcgcctgagggtctactcgtccgccgccggcgacgccgactcctccaacggcgcgggcaacggcaggcgcgtggggacccacaacggcagcttccactgcgacgaggcgctcggctgcttcctcatccgcctcacctcccagttcgcaggcgccgacgtcgtccgcacacgcgactcccagatccttgattcgctggaggccgtgcttgacgttggtggtgtctatgatcccagccggcatcgctatgatcatcaccagaagggcttcaacgaggtctttggacatggctttaacacgaaacttagcagtgctgggcttgtttacaagcattttggtaaggagataattgcaaaggagcttcagcttaatgaggagcatgaagatgttcaccgcgtgtatcttgccatatacaaaagctttgttgaggcacttgatgcaatcgataatggaatcaatcaatatgatacagagcaaacccccaagtatgtgaacaatacacacttgtcttcacgtgttgggcgccttaatccagactggactgatccagatcaatcacctgagaaggaaaatgctgcatttcaacaggcgatggctcttgccggaagtgagtttatggagagtgtccgctttcatgttaagtcgtggctacctgcaagatctattgtcatggagtgtttgctgtcaagaggaaatgttgatccaagtggagaaatcatggttttagatagattctgcccgtggaaacttcatctgtttgagctagagcaggagctgaagactgatcctctgaccaagtatgtgctgtatgaggatgagaggagcaaaggctggcgagtgcaggccgtctctgttgcacctgacagattcgagagccggaaggctcttccagagaagtggaggggcatgagagatgatgaactgtcgaaggaaaccggcatccctggctgtgtgttcatccatatgagtggcttcattggtgggaacaagacctacgaaggagcgctggaaatggcaagagccgccctcaaatgctaattcaaccaaagcaacaagcagtaaaacagtcttacccatgctacgactgattgaggttcatatgcagcgctgcacttgcaccaattttaccattgactagttggcatttgaatatgtacgttccgtggcataaaacatccacctgatagcagagattggttatcttatccgtatgaggctgaacaagtagagttatatttgatgaaagacgatgaaactcattaatttcttgcccttcaccagtgtttcattactgctacaagcataagcgactgaataactgtatcttaaaaaaaaaaaaaccgacacgcagcggccgc

SEQ ID NO: 7312 - protein, 355 aa, Triticum aestivum
MAAAAGATSPKRLRVYSSAAGDADSSNGAGNGRRVGTHNGSFHCDEALGCFLIRLTSQFAGADVVRTRDSQILDSLEAVLDVGGVYDPSRHRYDHHQKGFNEVFGHGFNTKLSSAGLVYKHFGKEIIAKELQLNEEHEDVHRVYLAIYKSFVEALDAIDNGINQYDTEQTPKYVNNTHLSSRVGRLNPDWTDPDQSPEKENAAFQQAMALAGSEFMESVRFHVKSWLPARSIVMECLLSRGNVDPSGEIMVLDRFCPWKLHLFELEQELKTDPLTKYVLYEDERSKGWRVQAVSVAPDRFESRKALPEKWRGMRDDELSKETGIPGCVFIHMSGFIGGNKTYEGALEMARAALKC

SEQ ID NO: 7313 - DNA, 1427 bp, Triticum aestivum; identical to SEQ ID NO: 7311
  CDS (40)..(1107)

SEQ ID NO: 7314 - protein, 355 aa, Triticum aestivum; identical to SEQ ID NO: 7312

SEQ ID NO: 7315 - DNA, 1023 bp, Caenorhabditis elegans
  CDS (1)..(1023)
atgacatcgctcattggtactcactccggaaaattccattgcgatgaggcttttgcttgtttcatgctgaaacaattgccacaattcaaggatcattcgattttaagaacccgtgacgctgctcaactggagaagtgtgatattatcgtcgatgtcggtggaatctttgatcattcaaaacaacgatacgatcatcatcaacgtggattcactgataccatgcgtactctagagaagcttaactttgatacaaaactaagctctgcaggattagtttacgctcactacgggagagaagtcatcaatcagatccttggtggaaatgtgtcatcctcgatgattgatctattctatcatcgtctctacgagcaattcgttgaatcaatcgacgccattgataacgggatttctcaatacgacggagttccaagatatcattcatcaggaaatctttcatcgcgtactggtcaattcaattcccattggaatgaacctgagaatgatgctgatgaacgattccaacaagcaatgcaattcatcggtgaagagttttcacgatcagtgaagtacttggcaaatgtttggtggccagctagagagatcatcgaagctgctgtggataaacgatttgaaattgatgcatctggaaggatcattcttatcgagaacggtggatgcccgtggaaagaacactttttcgacattgaagtagagaagaatattgccgacgataatatcacttacattctgttctcggattctaccaatgcttcgtggcgcgttcaagcaatcccagtcgacaaaatgtcatcattcgagaatcgcatgccacttccagctgcttggcgtggtctccgtgatgacgatctttcgaaggaaagtggaatcccaggcggagtctttgtccacatttccggattcattggaggaaatctgactcgtgaaggagcaattgccatggcacggaaagctctcgaaataggagaagagaatccagtgaaaaaagctaaattgggtaattag

SEQ ID NO: 7316 - protein, 340 aa, Caenorhabditis elegans
MTSLIGTHSGKFHCDEAFACFMLKQLPQFKDHSILRTRDAAQLEKCDIIVDVGGIFDHSKQRYDHHQRGFTDTMRTLEKLNFDTKLSSAGLVYAHYGREVINQILGGNVSSSMIDLFYHRLYEQFVESIDAIDNGISQYDGVPRYHSSGNLSSRTGQFNSHWNEPENDADERFQQAMQFIGEEFSRSVKYLANVWWPAREIIEAAVDKRFEIDASGRIILIENGGCPWKEHFFDIEVEKNIADDNITYILFSDSTNASWRVQAIPVDKMSSFENRMPLPAAWRGLRDDDLSKESGIPGGVFVHISGFIGGNLTREGAIAMARKALEIGEENPVKKAKLGN

SEQ ID NO: 7317 - DNA, 1065 bp, Arabidopsis thaliana
  CDS (1)..(1065)
atgtttgggtcaagaggtctctgttgcagcagaatctggaatcgttctctgtttctcaaacgttcttcaaacttccgagctagtttctctacgaaacgtgttgggacccataatggaacattccactgcgacgaagctttagcttgcttcatccttcgtcgttccaatagattctccgatgctcaaatcgtccgaaccagagatcatcaggttttggagaagcttgatgcggcacttgatgttggaggtgtgtatgatcctcagagtgaacgttatgaccatcaccagaaaggatttagtgaagtgtttggccttgggtttaatactaaactcagtagtgctgggcttgtctataagcattatggattggaaataatttccaaggagcttcaacttgagcagagacatcctgatgtgtttcgattgtttctagctgtgtacaaaaacttcattgaggcagtagatgctttagacaatggtatccatcaatatgatactgaccaacctccaagatatgtaaacaatactagcctggggcataggattggaagattgaacttagactggattgaacctgatcagtctagtgccaaagaagatgaagcctttcatcgggcaatggagcttgctggctctgagttcttggagtgtgttcattttcacgcgaaatcgtggttaccagctcggtcaattgttatggagtgtcttgcaaaacggtatgatatagactccagtggagaaattatgaagctcagtaaacaatgcccatggaaactccatatattcgagctcgaggaagaaatgaagattgatcctccaataaaatatgttctttaccaggatgatagaagcgaaaactggagaatacaagcagtttcggtttcaccagagaggtttgagagccgtaaagctttaccattagcatggagaggtttagaaaaggagaagctctcagaggaaagctcaattccacgctgtgtttttgtgcatatgagtggtttcattggtgcaaaccaaacctatgaaggtgccttagcaatggcaagagcttctttgatggcttag

SEQ ID NO: 7318 - protein, 354 aa, Arabidopsis thaliana
MFGSRGLCCSRIWNRSLFLKRSSNFRASFSTKRVGTHNGTFHCDEALACFILRRSNRFSDAQIVRTRDHQVLEKLDAALDVGGVYDPQSERYDHHQKGFSEVFGLGFNTKLSSAGLVYKHYGLEIISKELQLEQRHPDVFRLFLAVYKNFIEAVDALDNGIHQYDTDQPPRYVNNTSLGHRIGRLNLDWIEPDQSSAKEDEAFHRAMELAGSEFLECVHFHAKSWLPARSIVMECLAKRYDIDSSGEIMKLSKQCPWKLHIFELEEEMKIDPPIKYVLYQDDRSENWRIQAVSVSPERFESRKALPLAWRGLEKEKLSEESSIPRCVFVHMSGFIGANQTYEGALAMARASLMA

SEQ ID NO: 7319 - DNA, 1122 bp, Arabidopsis thaliana
  CDS (1)..(1122)
atgatgttttcggtaacgaaaggtttaatcagaaacttggccttgttccaagttcgtcttcctcctctcgtagcagcagtaatggctccttcaagcgtcgttagggtttactctaccgctacctctccttctccttctgaaatttccgtcaagaaagttggtactcataatggaagctttcactgcgacgaagctctcggctgtttcatgattcgcctcgtcgataaattctccggcgctgatatcgtccgttctcgtgaccctaagatattggcagaacttgatgcagtgcttgatgttggaggtgtttatgatccggagcatgaccgttatgatcatcaccagaaaggttttgaagaggtttttggacatggcttcaacactaagctcagtagtgctggtcttgtttacaagcattttggaaaggagatcatagctaaggaacttaatgtcgaacaagatcaccctgatgttcttcggttgtttttagctgtctacaagagcttcatggaggcaattgatgctgtggacaatggaataaaccggtatgatactgatcagcctccacgatatgtgaacaacacacatctgtctccaagggttggaagattaaatctggattggattgaccctgaccagtcacaagaaaaggagaatgaagctttccaacgtgcaatggctctagctggaaaagagttcctcgaaagtgttcagttccatgcaagatcgtggttaccggctcgatcaattgtgatgcagtgtcttgaagaaagattcaagacagaccccagcggtgagatcatgatattggatagattttgcccttggaagcttcatttgttcgagcttgagcaagaaatgaagatcgagcctctcatcaaatacgtcatttaccaggacgagagagcaaagcagtggagagttcaagcagtggcggtcgcaccagacaggtttgagaaccgaaagcctctccctgagaaatggagaggccttagggatgaggaactctcgaaagctgctgagattcccggttgtgtctttgtccacatgagtggctttatcggcggaaaccaatcctatgacggcgctctatccatggctcaaaccgcactcactctctga

SEQ ID NO: 7320 - protein, 373 aa, Arabidopsis thaliana
MMFSVTKGLIRNLALFQVRLPPLVAAVMAPSSVVRVYSTATSPSPSEISVKKVGTHNGSFHCDEALGCFMIRLVDKFSGADIVRSRDPKILAELDAVLDVGGVYDPEHDRYDHHQKGFEEVFGHGFNTKLSSAGLVYKHFGKEIIAKELNVEQDHPDVLRLFLAVYKSFMEAIDAVDNGINRYDTDQPPRYVNNTHLSPRVGRLNLDWIDPDQSQEKENEAFQRAMALAGKEFLESVQFHARSWLPARSIVMQCLEERFKTDPSGEIMILDRFCPWKLHLFELEQEMKIEPLIKYVIYQDERAKQWRVQAVAVAPDRFENRKPLPEKWRGLRDEELSKAAEIPGCVFVHMSGFIGGNQSYDGALSMAQTALTL

SEQ ID NO: 7321 - DNA, 948 bp, Agrobacterium tumefaciens str. C58
  CDS (1)..(948): transl_table=11
atgacccccgacttcctcgtcacccattccggcggctttcacgccgacgaactgctgtccagcgtcgtgttgacacggctttttccgcaggcccggctcgtccgcagcagagcccccgaatggataacgcctgatgcagaccgcatcatctacgacgtgggcggcgcttatgacgccgaaaaatgcattttcgatcaccatcagcgtggtgcgccgctgcgcgaggacggtcagccctatagttcgttcggcctgatctggaagcatttcggacgcgactaccttgccacatcaggcattcctgaagatcatgtcgaaactctgcacgcgtctttcgatgcaggatttgtattgccggtggatctggtcgataacggcgccctcagcccctccattgccggaccacttgccacgctcacgctgcccgtcctgctggagactttaaagcctgtcttcgatgacaccgatcccgaagcggacgatcgcggttttatagccgcgctggcagtcgcgcgcagcttcgtcgaggcgaaactggccacaggcgctgccaaattgcgcgccgaagcactggtgcagaaggcgatcgccgatactggcgaagggcatatccttgagctgccgatgggcatgccatttcggtccgccatcgtaaaagccggcgccgaccacctgctctttgtcgtccatccccgggacaacgactggtgccttaccggcatccgccgcgcggatgaaggttttgaactgcgagccgacctgccagcggcctgggccggcctgacgggcaaagagttggaagcggtttgtggcgtcgaaggcgcgagcttctgccacaatggccgctttatcgccgcagccaaaacccgcgaggcgattttgaccatggcggaactggcagtgaaagaggctctcgcctccgcgcaaacaacagcggcgaagcaataa

SEQ ID NO: 7322 - protein, 315 aa, Agrobacterium tumefaciens str. C58
MTPDFLVTHSGGFHADELLSSVVLTRLFPQARLVRSRAPEWITPDADRIIYDVGGAYDAEKCIFDHHQRGAPLREDGQPYSSFGLIWKHFGRDYLATSGIPEDHVETLHASFDAGFVLPVDLVDNGALSPSIAGPLATLTLPVLLETLKPVFDDTDPEADDRGFIAALAVARSFVEAKLATGAAKLRAEALVQKAIADTGEGHILELPMGMPFRSAIVKAGADHLLFVVHPRDNDWCLTGIRRADEGFELRADLPAAWAGLTGKELEAVCGVEGASFCHNGRFIAAAKTREAILTMAELAVKEALASAQTTAAKQ

SEQ ID NO: 7323 - DNA, 918 bp, Encephalitozoon cuniculi GB-M1
  CDS (1)..(918)
atgaagttgataacacacaatgaaagatttcactatgacgaagtccttgcatcttgcatacttctccggatatatccagatgccgagatagtgaggacaagggacaagaccctcatcgactcgggtgatattgtctacgatgttggtggagtgttcgatcctggactgggaaggtttgatcaccaccagaggacgttcttcgaaacgttttcgccgaagtacagcgtcaagctcagcagcagcggactcatcttcaaatactttcacaggaaactcttgtcgctgtacgggatagagagctccagtagaacatacgatcttgtggtggacaagatctactctgagtttttcttgtatgcggatgccatagacaatgggcaggatatatatggggagataaagcctcggagcattgcagacctagtcaatctgttcaatgtagatgggtctgggagagatgcagaaaccgaggggttctatgaggcactaaggattgtggataaggatcttgacaactacatgaagaggatcaagctgtggactgacaattacgaacacatggaaaataagataaaggaaacaagtgggccgattcttgtgctagacaagcactatagcacggacttggtcctggagattgaagcccagaatgggaaggacttcaagttcatggtgtttccccatagaggtgcatacagagtaattgctattccaaaacataagggaacattcgaaacaaaaaatcccctcagaaaggagtggcgtggacttgtgaacgaagagctggtggaggcgtctggaatagagggctgtacctttgtccactcctccgggtttatgggaattaacagtacactagagaatgcactgaaaatgtgcacagagtctcttccggatgatgaagatccacgccaataa

SEQ ID NO: 7324 - protein, 305 aa, Encephalitozoon cuniculi GB-M1
MKLITHNERFHYDEVLASCILLRIYPDAEIVRTRDKTLIDSGDIVYDVGGVFDPGLGRFDHHQRTFFETFSPKYSVKLSSSGLIFKYFHRKLLSLYGIESSSRTYDLVVDKIYSEFFLYADAIDNGQDIYGEIKPRSIADLVNLFNVDGSGRDAETEGFYEALRIVDKDLDNYMKRIKLWTDNYEHMENKIKETSGPILVLDKHYSTDLVLEIEAQNGKDFKFMVFPHRGAYRVIAIPKHKGTFETKNPLRKEWRGLVNEELVEASGIEGCTFVHSSGFMGINSTLENALKMCTESLPDDEDPRQ

SEQ ID NO: 7325 - DNA, 1233 bp, Eremothecium gossypii
  CDS (1)..(1233)
atgcggatgtcacgtggcgcgcacgcgttgctacttgggcgcatcgcaacaaccactactcccacaaaggtacagggggcatcgccgatgcagattggactggcccgaccggcaactgcagtcgcatggttcgctccacggacgaggatacgctcgttggtaaatcctggttttcttgcagaaaaatttgcgggccatcgcactgttagccatctccgactcctcgccacgatgtccaagaagctcaagatgaccccgttcaagcaaatctgtacgcactcgggctcgttccacgctgacgaggcgctcgcagtgtacatgctgcgcctactgcctgagggtaaagacgccaagctcgtgcggtcgcgcgacccggccaagtgggaggagtcctgtatcgtggtggacgtcagtggcaagtacgacggcgtcaagtacttcgaccaccaccagcgcgagttcttcgagacgttcagcgaccagtacaaaaccaagctctcgagcgccggcctggtgtacaagcactttggacggcagatcgtgcgcgcgctgtgccctgagatcagcgacgaggacaccgagctgctctacgagaaggtgtaccgcgacttcgtcgaggccctggatgccaacgacaacggcatcagcaactttgacgccgaggagctcggcgtgcgcccgcgcttccacgacaagaacatctccatcccgggcatcgtcgccaagatgaaccccgactggaacgaagagaccagcgacgcccgcttcgacgagtgcttccttaccgcctcggcctttgtcggcgactgcttcgcgcgcgtcgtgcgcggctatggccgcgcgtggctacccgccaaggacattgtccgcgccggcgtgcgcgaccgcgccgccgtcgaccccagcggccgcatcgtcgtcctcgagcgcttctgtccctggaaagagcacctctacgacgtcgagcgtgagctcggcctcgtcggcgaggtcctcttcgtgctgttcgccgactcctctggttcctggcgcgtctccaccgtcccgcagtcggctacctccttccgcttccgccacggtctgccagagccttggcgcggcctgcgtgacgatgccctctccgaggcgaccggcgtccccggctgcatcttcgtccacgccgcgggcttcatcggcggcgcgcgcacccgcgacgctgcccttgcgctcgcccggctgagcctccccgcctag

SEQ ID NO: 7326 - protein, 410 aa, Eremothecium gossypii
MRMSRGAHALLLGRIATTTTPTKVQGASPMQIGLARPATAVAWFAPRTRIRSLVNPGFLAEKFAGHRTVSHLRLLATMSKKLKMTPFKQICTHSGSFHADEALAVYMLRLLPEGKDAKLVRSRDPAKWEESCIVVDVSGKYDGVKYFDHHQREFFETFSDQYKTKLSSAGLVYKHFGRQIVRALCPEISDEDTELLYEKVYRDFVEALDANDNGISNFDAEELGVRPRFHDKNISIPGIVAKMNPDWNEETSDARFDECFLTASAFVGDCFARVVRGYGRAWLPAKDIVRAGVRDRAAVDPSGRIVVLERFCPWKEHLYDVERELGLVGEVLFVLFADSSGSWRVSTVPQSATSFRFRHGLPEPWRGLRDDALSEATGVPGCIFVHAAGFIGGARTRDAALALARLSLPA

SEQ ID NO: 7327 - DNA, 1101 bp, Magnaporthe grisea 70-15
  CDS (1)..(1101)
atggccgagagcgcagcaaaaagactcaagactgagggtgggtcgtctgagggccctgtcaccattggcacacacaatggtcacttccacgccgacgaggctctcgctgtgtatatgctgcggcagcacatccccacatacgcgggtgcctcccttgtgcggacccgcgacccggccgccctagcccgctgccatactgtcgtcgacgtcggcggcgagtacgacgcgtcgacgctgcgcttcgaccaccaccagcgcaccttttccaccaccttccccggcaggcaaaccaagctgtcgagcgcgggtcttgtgtacatgcactttggcaagcagatcatcgcccgccgtctcgccgatccggactgtgataacgaggcgaccgtcgacatgctctacgccaagctgtacgagaactttgtcgaggccctcgacgcccacgataacggcatctcagcctacgacccggccgtactggcgacggcgagcaacggccagccgctgcagaagcgcttctcggacggcggcttcacgctcggcgccgtcgtcggccgcctgaacccgaactggaacgacccgatcccggaggaccccgccgaggcccaggcggctgaggaccagcgctttgaggccgccagcgcccgaatcggtgaggagttcgaccgcgacttggactactacacacgctcctggctgccggcccgctctgttgtcgccgacgccttctcgcaccgggccgagcacgaccctgccggtaagggccgcatcctcgttttcaagggccagtccgttccgtggaaggaccacctttacaccctcgagcaggagaaccccagcgcgggtgaggtggtgtatgtcctgtacccggagaagcctacgcccgacgccaagtggaggatccaatgtgtgcccgtctccaaggactcgttccagagcaggctgcccctgcccgaggcctggaggggttttagggacgaggagcttgacaagattaccggtatcccgggttgcgtgtttgtccacgctgcgggcttcattggaggtaacaagactttcgagggcgccatggccatggcccagaaggcacttgaactggcatga

SEQ ID NO: 7328 - protein, 366 aa, Magnaporthe grisea 70-15
MAESAAKRLKTEGGSSEGPVTIGTHNGHFHADEALAVYMLRQHIPTYAGASLVRTRDPAALARCHTVVDVGGEYDASTLRFDHHQRTFSTTFPGRQTKLSSAGLVYMHFGKQIIARRLADPDCDNEATVDMLYAKLYENFVEALDAHDNGISAYDPAVLATASNGQPLQKRFSDGGFTLGAVVGRLNPNWNDPIPEDPAEAQAAEDQRFEAASARIGEEFDRDLDYYTRSWLPARSVVADAFSHRAEHDPAGKGRILVFKGQSVPWKDHLYTLEQENPSAGEVVYVLYPEKPTPDAKWRIQCVPVSKDSFQSRLPLPEAWRGFRDEELDKITGIPGCVFVHAAGFIGGNKTFEGAMAMAQKALELA

SEQ ID NO: 7329 - DNA, 1050 bp, Gibberella zeae PH-1
  CDS (1)..(1050)
atggccgaatcagcagctaagcgcgtcaagacctcgggcaacggccccctcattggtactcacagcggccacttccacgctgatgaggccctcgccgtccacatgctccgtcggcttcctacataccgcgacgccgacctcgtccgtacccgcgaccctgctgtcctagctacctgccacaccgtcgtcgatgtcggtggagagtatgatgctgagaagcgccgcttcgaccaccaccagcgaggcttcaacaccaccttccctggccgcccaacaaagctttctagtgcaggtctggtcttcctgcactttggccgtgccatcgttgctgagcgcctcggactgtctgaggattcccccgatgtcgatttgatctacaagaagctgtacgagaactttgttgaggcccttgatgcccacgacaacggtatctctgtctacgaccccgctgccattgccgctgctggcattgagaagcgtttcagcgagggtgccttcggtctcggtgccgttgtcggacgtctgaaccccaagtggaacgacccaactccctccgaccctgctgaggctcaggctgctgaggatgccaagttcaacgaggccagcagccgcattggtcaggagttcgaccgcgatctcgacaactatgccgcttcgtggctacctgcccgcaccattgtccaggaggcattcaacaagcgcaaacaatacgatgagcagggccgcatcctaattctcgaaggccagtctgtcccctggaaggaccacctgtacactctcgaggatggtaccccctccgtcatctacgttctgtacgccgagaagcctgagcctggtgccaagtggcgcatccagtgcgtgcccgagagcaaggactcctttacgagccgaaagccgctccctgaggcttggagaggcttcagggatgctgagcttgatggcatcagcggcattcctggctgcgtgtttgtccacgcggctggcttcatcggtggaaacaagacctttgagggtgccaaggagatggcgaccaaggcccttgagggttaa

SEQ ID NO: 7330 - protein, 349 aa, Gibberella zeae PH-1
MAESAAKRVKTSGNGPLIGTHSGHFHADEALAVHMLRRLPTYRDADLVRTRDPAVLATCHTVVDVGGEYDAEKRRFDHHQRGFNTTFPGRPTKLSSAGLVFLHFGRAIVAERLGLSEDSPDVDLIYKKLYENFVEALDAHDNGISVYDPAAIAAAGIEKRFSEGAFGLGAVVGRLNPKWNDPTPSDPAEAQAAEDAKFNEASSRIGQEFDRDLDNYAASWLPARTIVQEAFNKRKQYDEQGRILILEGQSVPWKDHLYTLEDGTPSVIYVLYAEKPEPGAKWRIQCVPESKDSFTSRKPLPEAWRGFRDAELDGISGIPGCVFVHAAGFIGGNKTFEGAKEMATKALEG

SEQ ID NO: 7331 - DNA, 1005 bp, Candida glabrata CBS 138
  CDS (1)..(1005)
atggataccaagcgccagaagttagaaatgttgcaaatctgtacccattccggtcctttccacgcggacgagtctcttgccgtgtacatgctaagactgttgccaaagtttaaggatgccaaggttgtgagatcgagaaaccctgaagactgggaggccagcgacattgttgttgatgttggtgccaagtacgatggtgtcaagttctttgaccaccaccaaagggaattctttgagactttcaatggtgagtatgccacaaagctttccagtgctggtttggtctacaagcacttcggccgtgagataatcactgccatcgttgagaataaaggtgcctccatctcctctggcgacttggatatcctttacgacaaggtttacaagcaattcatcgaggctttggacgctaacgataacggtatcgacaagtacgagaactctaaggaattgactccaaagttcaaggataacgctattagcatcccaggtgtcatttccggtatgaacccatcttggaatgctgacacttctgctgaggcatacgataccaactttcaaagagccagtaagttcattggtgagatttttgtcgacctggtcgaaggctacgctctatcatggattccagctaaatctttagtcatcgaggccgttaacagaagatccgaggtcgatgactctggcaagattattgtactaaatcaattctgtccatggaaagaacacttatatgaagttgaaaaagctaagggtattgaaggccaaattgaatttgtgctatttaaagacagctccaacacttggagggtatcaactgttccagtaagctccacctctttccaattcagaaagggtttaccagaacacctaagaggtctaagagaccaagagttgagcgacaagagtggtgtcccagactgtgttttcattcacgccgctggtttcatcggtggtgccaagacacaagactcagtctacaagcttgcaaagatgtccttgtaa

SEQ ID NO: 7332 - protein, 334 aa, Candida glabrata CBS 138
MDTKRQKLEMLQICTHSGPFHADESLAVYMLRLLPKFKDAKVVRSRNPEDWEASDIVVDVGAKYDGVKFFDHHQREFFETFNGEYATKLSSAGLVYKHFGREIITAIVENKGASISSGDLDILYDKVYKQFIEALDANDNGIDKYENSKELTPKFKDNAISIPGVISGMNPSWNADTSAEAYDTNFQRASKFIGEIFVDLVEGYALSWIPAKSLVIEAVNRRSEVDDSGKIIVLNQFCPWKEHLYEVEKAKGIEGQIEFVLFKDSSNTWRVSTVPVSSTSFQFRKGLPEHLRGLRDQELSDKSGVPDCVFIHAAGFIGGAKTQDSVYKLAKMSL

SEQ ID NO: 7333 - DNA, 1002 bp, Kluyveromyces lactis NRRL Y-1140
  CDS (1)..(1002)
atgagtgtctcacaaccattgaagaaagcaaaaatgtccttgaaacaaatttgtacccattctggttcattccatgctgatgaagcattggccgtgtacatgctacgtctgttaccacaatggaaagacagcaagatagtcagatctagaaacccagaagactgggaagctagcgatattgttgttgatgttggtggtaaatacgataacggtgtcaagtttttcgatcatcatcaaagaggcttctcggagactttcaatgacaagtataagaccaagctatccagtgcgggtttggtttataagcatttcggtaaggagataattaaagaacttggtcctgggttgaatgaagatcaagttgaattgctatacgatagagtctacagccagtttatcgaaagtttggatgccaacgataacggtatcgaccaattcgataccgatgttgagccaagattcagtgccaaggcaatcactttgccaagtatcatcagcagattcaatccagaatggaataaagagagttctgacgagacttactacaaccaatttttaaaggcttctggttacatcggtactgtgttctttgatcttgtcagtgggtacatcaactcgtggttgccagccaagactctagtcatcgatgctgtcaagaacagatttaacattgatgcaagtggtaagattattgaattggctgaattctgcccatggaaagaacatttattccaagtggaacgtgaaatgaatatcgaaaataccatagagttcgttattttcccagatacatctggttcttacagagtttctacggtcccaataacttcaacctccttcgatttccgtaagggtctaccagagccactacgtggcttaagagatgaagagctaagtgaaaagagtggcttatcaggctgtgtctttattcacgctgcaggattcattggtggtgctaaaccccgcgattctgctattggtttggcgaagatgtcattgtga

SEQ ID NO: 7334 - protein, 333 aa, Kluyveromyces lactis NRRL Y-1140
MSVSQPLKKAKMSLKQICTHSGSFHADEALAVYMLRLLPQWKDSKIVRSRNPEDWEASDIVVDVGGKYDNGVKFFDHHQRGFSETFNDKYKTKLSSAGLVYKHFGKEIIKELGPGLNEDQVELLYDRVYSQFIESLDANDNGIDQFDTDVEPRFSAKAITLPSIISRFNPEWNKESSDETYYNQFLKASGYIGTVFFDLVSGYINSWLPAKTLVIDAVKNRFNIDASGKIIELAEFCPWKEHLFQVEREMNIENTIEFVIFPDTSGSYRVSTVPITSTSFDFRKGLPEPLRGLRDEELSEKSGLSGCVFIHAAGFIGGAKPRDSAIGLAKMSL

SEQ ID NO: 7335 - DNA, 1008 bp, Debaryomyces hansenii CBS767
  CDS (1)..(1008)
atgtcagataccgacagtaataagaaaataaaattagattctaccatgttgaagatttgtacccattcaggctccttccacgccgatgaatcgttggccgtattcatgattaaattgttgccaaaataccaaaacagccagttgatcagatcaagaaacccatctgactgggaatcaagtgacgtagttattgatgttggtggtaagtacgatggtatcaagtggtttgatcaccatcaaagagaattcaacgaaactttctctgctgaatataaaactaaattatcatcggctggtttaatatataagcactttggtaaggaaatcatcagccatgtattgagcatcaatgacagcaacgtcgatttattatacaacaaagtctacaaggaatttatcgaagctttggatgccaacgacaatggtattaacaattactcaaaagacgtcgaattaaacaaaaaattcaacgacagaaacatcacgttgccatcgattgtctctagacttaacccttcatggaacaccgatcctactgacgccgactttgatgctgctttcagtacgagtagtcagttgatgggccaagtcttcgtaaatttattgacaggctacggaaaatcctggttacctgccaaacagattgttgagagagcattcaattctaggtttgacgttgacaaatcaggtgaaatcatcattttggataatttctgtccttggaaagagcatttatattccatcgaaaaagatgctagcaagcaaggtgaaattaagttcgtcttgttccaagactcgtcgagtaaatggagaatttctacagtctccgtaacttcaacttctttcgaattcagattaggcttacctgaaaaatggaggggtataagagacgaagaattatctgaattgactggtgttccaggttgtatcttcgtacatgcggctgggtttattggtggtgcaaataccaaagatgccgtattacaattagcaaaattatctctctaa

SEQ ID NO: 7336 - protein, 335 aa, Debaryomyces hansenii CBS767
MSDTDSNKKIKLDSTMLKICTHSGSFHADESLAVFMIKLLPKYQNSQLIRSRNPSDWESSDVVIDVGGKYDGIKWFDHHQREFNETFSAEYKTKLSSAGLIYKHFGKEIISHVLSINDSNVDLLYNKVYKEFIEALDANDNGINNYSKDVELNKKFNDRNITLPSIVSRLNPSWNTDPTDADFDAAFSTSSQLMGQVFVNLLTGYGKSWLPAKQIVERAFNSRFDVDKSGEIIILDNFCPWKEHLYSIEKDASKQGEIKFVLFQDSSSKWRISTVSVTSTSFEFRLGLPEKWRGIRDEELSELTGVPGCIFVHAAGFIGGANTKDAVLQLAKLSL

SEQ ID NO: 7337 - DNA, 1059 bp, Oryza sativa (japonica cultivar-group)
  CDS (1)..(1059)
atggccgccgccgcctcgcccaagcgcttgagggtctactcgtccgtctcgggcgacggccgctccgcgaacggcgcggggagcggcaagcgcgtggggacccacaacggcagcttccactgcgacgaggcgctcgggtgctacctcatccgcctcacctcccagttcgccggcgccgacgtcgtccgcacccgcgacccccagatcctcgatactctggatgctgtgcttgatgttggtggtgtctatgatcccagccggcatcgctacgatcatcaccagaagggctttaatgaggtctttggacatggctttaacacaaaacttagcagtgccgggcttgtttacaagcactttggtaaggagataattgcaaaggagcttgaagttagtgaagaccatgaagatgttcatcggttgtatcttgcaatatataaaagctttgttgaggcgcttgatgcagtcgacaacggaatcaatcaatatgacacagaccaacccccaaagtatgtgaacaacacacacttgtcttcacgcgttgggcgtcttaatccagactggaccgatccagaccagtcacctgagaaggaaaatgctgcatttcaacaggcaatgatgcttgctggaagtgaatttatggagagtgttcgctttcatgttaagtcatggttacctgcgagatctattgtcttggagtgtttgttgtcaagaggaaaggttgatccaagtgaagaaattatggttttggatagattctgcccatggaaacttcatctgtttgagcttgaagaggagctgaagattgatcccctcacgaagtatgtgttgtaccaggatgagaggagcaaaagttggagagtacaagctgttggcgttgctccggatagatttgagagccgaaagcctctgccggaaaagtggaggggcttgagagatgatgaactgtcaaacgatattggcattccaggatgtgtctttgttcatatgagcggcttcattggcggcaataagacgtatgagggagcgttggaaatggcaagagctgctatcaagtgttga

SEQ ID NO: 7338 - protein, 352 aa, Oryza sativa (japonica cultivar-group)
MAAAASPKRLRVYSSVSGDGRSANGAGSGKRVGTHNGSFHCDEALGCYLIRLTSQFAGADVVRTRDPQILDTLDAVLDVGGVYDPSRHRYDHHQKGFNEVFGHGFNTKLSSAGLVYKHFGKEIIAKELEVSEDHEDVHRLYLAIYKSFVEALDAVDNGINQYDTDQPPKYVNNTHLSSRVGRLNPDWTDPDQSPEKENAAFQQAMMLAGSEFMESVRFHVKSWLPARSIVLECLLSRGKVDPSEEIMVLDRFCPWKLHLFELEEELKIDPLTKYVLYQDERSKSWRVQAVGVAPDRFESRKPLPEKWRGLRDDELSNDIGIPGCVFVHMSGFIGGNKTYEGALEMARAAIKC

SEQ ID NO: 7339 - DNA, 975 bp, Yarrowia lipolytica CLIB122
  CDS (1)..(975)
atgaccaagaccatcggcacccacagcggtgctttccacgcggacgagtcgctcgccgtgttcatgctcaagcagctccccgagttcaaggacgccgatctggtgcgatcccgagacatggagaccctcgacaagtgcgacattgtggtcgacgtgagcggccagtatgacggcaccaaatactttgaccaccaccagcggggctttgaggagattttcgatctcgacggcgagtttgtcaccaagttgtcttctgccggactggtgtacaagcactttggcaaggacgtgatccgggctattctcaaggacgcctctgtgtcggatgccgacattgaccttctctaccgaaagatctacaaggactttgtggaggccattgacgccaacgacaacggcattgagccttactcggagcccattgccgagaagcccaagttcaagcagtttggcatcactcttcctgccctcgtgtccaccctcaacgggctcgtcaaggaggagtccgagcgagacgcccagttcaacgtggcgtcccagcttatgggcacggccttccacaacctggtctacaccgccggcactgtgtggctgcctgcccgagccaaggttcttatggcggttgaggctgcactgaagaatggagacgagcagcgatacctcgagtttgacgagtcttgccagtggaaggaccacctgttcacaattgaggaggagaagggcatcgagggccgattcctctacgttctctaccctactcccgattccgtgcgtgtccaggccgtcaacgagaaggactctgctttcaagtcccgaaagcctctgcccgaggagtggcgaggtctgcgagacgaggagctgtctgagaagtccggtatccccggcggtgtgtttgtgcatgctgctggtttcattggcggcaacaagactctggagggtgctctggaaatggccaagaagggtgctcttgcttag

SEQ ID NO: 7340 - protein, 324 aa, Yarrowia lipolytica CLIB122
MTKTIGTHSGAFHADESLAVFMLKQLPEFKDADLVRSRDMETLDKCDIVVDVSGQYDGTKYFDHHQRGFEEIFDLDGEFVTKLSSAGLVYKHFGKDVIRAILKDASVSDADIDLLYRKIYKDFVEAIDANDNGIEPYSEPIAEKPKFKQFGITLPALVSTLNGLVKEESERDAQFNVASQLMGTAFHNLVYTAGTVWLPARAKVLMAVEAALKNGDEQRYLEFDESCQWKDHLFTIEEEKGIEGRFLYVLYPTPDSVRVQAVNEKDSAFKSRKPLPEEWRGLRDEELSEKSGIPGGVFVHAAGFIGGNKTLEGALEMAKKGALA

SEQ ID NO: 7341 - DNA, 1080 bp, Aspergillus nidulans FGSC A4
  CDS (1)..(1080)
atggccaccgaatccgtttccaagaagccgcgtattgattctcccaccattgggacgcacaacggtcactttcacgccgacgaagccttggccgtgtatctcctccggctcctcccagcctactcacaatcgcccctcatccgcacgcgcgaccccgccctactccaaacctgccacaccgtcgtcgacgttggcggtgaatacgatgccgccacaaatcgctacgaccaccaccagcgcaccttcaactccacatttcccggatacaagacgaaactgtcctcggcgggacttgtgtatctgcacttcgggcagagcatcatcgcgaaccacgcttccctccccgcagaccacagcaacgtcagcctgatcttcaacaagctctatgcggacttcattgaggcgattgacgcaaatgataatggcattggcgtttacgatcccgagaagctctctgaggctggtatcgagaagaggtttaaggatgggggtgttacaattgcgagtatcgtcaatgacatgaatacgccttcccccgaggacgaggcggccggtatcgatgaagatgggctcttcaaccaggccagccagttcgtcgggtctgtcttcagccgtaagttgcggcatgccgtgaactcctggctccctgcgcgtgaaaccgtgcaagccgcctacaccgaccggaagaacgtgcacgccagcgggaagatcatggttctgcctcaaggcggcgtgccctggaaggagcacctgtacaactttgagaaggaggcaaaggcggctaatattaacggcaatgcggaggacgccgaggttgtgtatgtgctgtacccagagagcgcggccgaagggtccaagtggcgtgtgcaggctgtttccgtgaatgaggggagcttcgtctcgcgcaagcctttgcccgagaagtggcggggtgtcagggatgcagatctcgatggagttcttgctggtgaaggggcgggtatcccagagggggcggtgtttgtgcatgcgagtggattcatcggcggccataagaccagggagggggcatttgctatggctgctaaggctctggaatag

SEQ ID NO: 7342 - protein, 359 aa, Aspergillus nidulans FGSC A4
MATESVSKKPRIDSPTIGTHNGHFHADEALAVYLLRLLPAYSQSPLIRTRDPALLQTCHTVVDVGGEYDAATNRYDHHQRTFNSTFPGYKTKLSSAGLVYLHFGQSIIANHASLPADHSNVSLIFNKLYADFIEAIDANDNGIGVYDPEKLSEAGIEKRFKDGGVTIASIVNDMNTPSPEDEAAGIDEDGLFNQASQFVGSVFSRKLRHAVNSWLPARETVQAAYTDRKNVHASGKIMVLPQGGVPWKEHLYNFEKEAKAANINGNAEDAEVVYVLYPESAAEGSKWRVQAVSVNEGSFVSRKPLPEKWRGVRDADLDGVLAGEGAGIPEGAVFVHASGFIGGHKTREGAFAMAAKALE

SEQ ID NO: 7343 - DNA, 1065 bp, Candida albicans SC5314
  CDS (1)..(1065): transl_table=12
atgaaaatttcatccaatctcatctcactgattaataaacccattaggatagttccgttgatgtcagttaacaagaaaatcaagttagacaatatggctaaaatttgtactcattcaggttcatttcatgccgatgaatcccttgctgtttatttattaaaattattacctaaatattctcaagccgaattagttcgttcaagaaacccagaagattgggaatctagtgatattgttgttgatgtcagtggtaaatacgatggtgtcaaatattttgatcatcaccaacgtgaatttgataccactttcaacgaaaactacacaaccaaattatcctctgctgggttggtgtataaacattttggtaaagaaataatcaaaggagttttgaaattggaagatggcaatccaaatattgaattgttgtacgacaaaatatataaggaatttgttgaaagtttggatgctaatgataacggtatcagcaattaccctaaagatgtttcaccaaagttcaccgacaaaaacattacattaccttccattgtgtcacgattgaacccaagttggaatgaaagttgtactgatgctgactatgatcgtcaattcttgaagagcagtgaattgatgggtactgtatttgtgagtttattggaaggatacggtaaaagttggttacctgccaaatcaattgttgctaaggcatttgacaatagatttgaagttgacaaatctggtgaaatacttgtattggatcaattctgtccatggaaagagcatttgtataacattgaaaaagaaaacaatgctgaaggtttgatcaaatttgtgttattcaaagattcgagtggaaaatggagagtatcaacagtttccgtcacctcaacctcttttgaatttagattgggacttccacaagaattaagagggttaagggaccaagaattaagtgaaaaatcaggaattgatggttgtatatttattcatgctgctggatttattggaggagctaatactaaagaagccgttttggaattagccagattgtctttgaatacaaaatag

SEQ ID NO: 7344 - protein, 354 aa, Candida albicans SC5314
MKISSNLISSINKPIRIVPLMSVNKKIKLDNMAKICTHSGSFHADESLAVYLLKLLPKYSQAELVRSRNPEDWESSDIVVDVSGKYDGVKYFDHHQREFDTTFNENYTTKLSSAGLVYKHFGKEIIKGVLKLEDGNPNIELLYDKIYKEFVESLDANDNGISNYPKDVSPKFTDKNITLPSIVSRLNPSWNESCTDADYDRQFLKSSELMGTVFVSLLEGYGKSWLPAKSIVAKAFDNRFEVDKSGEILVLDQFCPWKEHLYNIEKENNAEGLIKFVLFKDSSGKWRVSTVSVTSTSFEFRLGLPQELRGLRDQELSEKSGIDGCIFIHAAGFIGGANTKEAVLELARLSLNTK

SEQ ID NO: 7345 - DNA, 1065 bp, Candida albicans SC5314
  CDS (1)..(1065): transl_table=12
atgaaaatttcatccaatctcatctcactgattaataaacccattaggatagttccgttgatgtcagttaacaagaaaatcaagttagacaatatggctaaaatttgtactcattcaggttcatttcatgccgatgaatcccttgctgtttatttattaaaattattacctaaatattctcaagccgaattagttcgttcaagaaacccagaagattgggaatctagtgatattgttgttgatgtcagtggtaaatacgatggtgtcaaatattttgatcatcaccaacgtgaatttgataccactttcaacgaaaactacacaaccaaattatcctctgctgggttggtgtataaacattttggtaaagaaataatcaaaggagttttgaaattggaagatggcaatccaaatattgaattgttgtacgacaaaatatataaggaatttgttgaaagtttggatgctaatgataacggtatcagcaattaccctaaagatgtttcaccaaagttcaccgacaaaaacattacattaccttccattgtgtcacgattgaacccaagttggaatgaaagttgtactgatgctgactatgatcgtcaattcttgaagagcagtgaattgatgggtactgtatttgtgagtttattggaaggatacggtaaaagttggttacctgccaaatcaattgttgctaaggcatttgacaatagatttgaagttgacaaatctggtgaaatacttgtattggatcaattctgtccatggaaagagcatttgtataacattgaaaaagaaaacaatgctgaaggtttgatcaaatttgtgttattcaaagattcgagtggaaaatggagagtatcaacagtttccgtcacctcaacctcttttgaatttagattgggacttccacaagaattaagagggttaagggaccaagaattaagtgaaaaatcaggaattgatagttgtatatttattcatgctgctggatttattggaggagctaatactaaagaagccgttttggaattagccagattgtctttgaatacaaaatag

SEQ ID NO: 7346 - protein, 354 aa, Candida albicans SC5314
MKISSNLISSINKPIRIVPLMSVNKKIKLDNMAKICTHSGSFHADESLAVYLLKLLPKYSQAELVRSRNPEDWESSDIVVDVSGKYDGVKYFDHHQREFDTTFNENYTTKLSSAGLVYKHFGKEIIKGVLKLEDGNPNIELLYDKIYKEFVESLDANDNGISNYPKDVSPKFTDKNITLPSIVSRLNPSWNESCTDADYDRQFLKSSELMGTVFVSLLEGYGKSWLPAKSIVAKAFDNRFEVDKSGEILVLDQFCPWKEHLYNIEKENNAEGLIKFVLFKDSSGKWRVSTVSVTSTSFEFRLGLPQELRGLRDQELSEKSGIDSCIFIHAAGFIGGANTKEAVLELARLSLNTK

SEQ ID NO: 7347 - DNA, 870 bp, Colwellia psychrerythraea 34H
  CDS (1)..(870): transl_table=11
atgactgataaagtaatagcaactcacaatggtaattttcatgcagatgatgttttcagtatcgctgcacttaagaatatttttccttcttttaagctcatacgtacgcgtgatttagaggttattggtaaggcagatattgtgatagatgtaggtggtgaatatgatgccgatgctggccgttttgatcatcatcaacgaggcggtgctggcgagcgcgaaaatggtattccttattcctcatttggtttaatttggcagaaatatggcctagcaatatgccaaggtaaccaagaagtagctaatagtgtggatgctggtctagtatcaacgattgatgctattgactgtggtcatgttgaaggtgttgctcaaggtatcagccttagccaaactatttcaatgtttaacccaacgtggcaagaagatagccactttgatacttgttttgatgaagccgttgattttgcatcacgcgtattaacacgattcatagcttctgctagtggcggcattaatgctaaagacattgtcgctaaagctattgataatgcagaagactcaagagtcatagtgttagaaaagtatactccgtggaaaagaacagttcatgcattatctgaagaggcgttatatatggtttacccatcaccttctggccaatggcgaattcaaaccgtacctgttgaacctggttcattcgaagacagaaaaccactacctaaacaatgggctggtttgtctgatgatgcgcttaaagaagttactggcattgatgacgctatgttttgccataatggtttatttattgcgggtgcagagtcatttgaaagcacaatgaaaatggcatctatcgcacttcaagcataa

SEQ ID NO: 7348 - protein, 289 aa, Colwellia psychrerythraea 34H
MTDKVIATHNGNFHADDVFSIAALKNIFPSFKLIRTRDLEVIGKADIVIDVGGEYDADAGRFDHHQRGGAGERENGIPYSSFGLIWQKYGLAICQGNQEVANSVDAGLVSTIDAIDCGHVEGVAQGISLSQTISMFNPTWQEDSHFDTCFDEAVDFASRVLTRFIASASGGINAKDIVAKAIDNAEDSRVIVLEKYTPWKRTVHALSEEALYMVYPSPSGQWRIQTVPVEPGSFEDRKPLPKQWAGLSDDALKEVTGIDDAMFCHNGLFIAGAESFESTMKMASIALQA

SEQ ID NO: 7349 - DNA, 918 bp, Roseovarius nubinhibens ISM
  CDS (1)..(918): transl_table=11
atgcagatcacccatctcgtcacccattccggcgggtttcatgccgatgagctcttgtcctcggtggtgctcagccggctctatcccgaggccacgatcgttcggtcgcgcgaggccgagtggatcacgccgggggcggggcggatcatctatgacgtggggcggggctatgacgccgcggcgcggctctttgatcatcatcagcggcccaacccgctgcgcgaggatggccagccctatagctctttcgggctgatctggcatcactacgggcgcgattatctgagggcgctggcggtgccggaggcggatatcgaagaggtccatgccgcctttgatcgcggctttgtgctacccgtcgatcttttggacaatggcgcgattgatccttcggaggccggggcgctggcggggatgaccctgcctgagctcttggagacgctgaagccggtgtttgacgaccggggcgaggcggcggatgaccgggcctttgccgaggcgctgccggtggcgcgggcctttgtcgaggcgggggtgcgggcgcgtgcggccaagcgccgggccgaggcgatggtcagcgaagcgatcgtcgcggcgggggcgtcgcgggtgctcgagctgccgatggggatgccgttccgctcggcggtcgagaaggcgggggcggatcatctgctgttcgtggtgcatccgcgcggcgaggattgggcgctcaccaccatccgcaaatcgggcggcagtttcgagaaccgggccgatctgcccgaggcttgggccgggctcaccgatgtggcgctggaagaggcgagcggagtcgcgggcgcgaaattctgtcacaacgggcgattcattgccgtggcggcgacgcgcgaggcggtgatggcgctggccgatctggcggtggccgaggcgggctag

SEQ ID NO: 7350 - protein, 305 aa, Roseovarius nubinhibens ISM
MQITHLVTHSGGFHADELLSSVVLSRLYPEATIVRSREAEWITPGAGRIIYDVGRGYDAAARLFDHHQRPNPLREDGQPYSSFGLIWHHYGRDYLRALAVPEADIEEVHAAFDRGFVLPVDLLDNGAIDPSEAGALAGMTLPELLETLKPVFDDRGEAADDRAFAEALPVARAFVEAGVRARAAKRRAEAMVSEAIVAAGASRVLELPMGMPFRSAVEKAGADHLLFVVHPRGEDWALTTIRKSGGSFENRADLPEAWAGLTDVALEEASGVAGAKFCHNGRFIAVAATREAVMALADLAVAEAG

SEQ ID NO: 7351 - DNA, 870 bp, Oceanospirillum sp. MED92
  CDS (1)..(870): transl_table=11
atgtctgacttaacagtagtaacacatagcggcaattttcatgcagatgatgtattcagtatcgctgcactcagaactgtatttccctctttgaaactgatccgcacccgtgatcaagagcttattagcaaggccgatattgtcgttgatgtgggtggtgaatacgatccagctacaggaagatttgatcatcaccaacgtggcggtgctggtgagcgtgacaacggcattccctactcttcatttggcctaatttggcagaagtatggtgttgagatttgccagggaaatacagacgttgctaaagcagtagatgccgatctggtatcagcgattgatgcgatcgactgtggctatggtgacggtgttgcgaaaggcgttagccttagccaaacaatctctatgtttaatcccacatggcaagaggaaacccatttcgatgaggctttcaacgaagccattgcgttcgcatctcatgtattaaaccgttttatagcttcggcggacggtggtattagtgccagggatatcgtcgctcaggcgataaaaaaagcagaagatcctcgcgtggttgttttagaacaatacaccccatggaaaagaaccgtacatgccctgtccaaagaagctttgtacattgtttatccatccgatacgggtcagtggcgtattcaggcggtacctgtaaaactaggctcgtttgaagacaaaaagtcattgcccgctgcctgggcaggtttatcaggtaaagcccttcaggatgaaaccgggatcagtgatgctatgttttgccataacggcttatttattgccggctgcgactcttatgaaagcacaatgaaaatggcgaaattagctctggcggaatag

SEQ ID NO: 7352 - protein, 289 aa, Oceanospirillum sp. MED92
MSDLTVVTHSGNFHADDVFSIAALRTVFPSLKLIRTRDQELISKADIVVDVGGEYDPATGRFDHHQRGGAGERDNGIPYSSFGLIWQKYGVEICQGNTDVAKAVDADLVSAIDAIDCGYGDGVAKGVSLSQTISMFNPTWQEETHFDEAFNEAIAFASHVLNRFIASADGGISARDIVAQAIKKAEDPRVVVLEQYTPWKRTVHALSKEALYIVYPSDTGQWRIQAVPVKLGSFEDKKSLPAAWAGLSGKALQDETGISDAMFCHNGLFIAGCDSYESTMKMAKLALAE

SEQ ID NO: 7353 - DNA, 1095 bp, Aspergillus oryzae
  CDS (1)..(1095)
atggccgacgagactatcgcaaagaaaatcaagacctcttctcccttgattgggactcatagcggccattttcatgccgacgaggccctcgcggtctatcttctccgacaactccccacctattctgcctctcccctcatccgtaccagagatccggtgcagctagcaacctgccacactgtcgtcgacgttggtggagaatatgaccccgcgaacaaccgttatgatcaccatcagcgtagcttttccacgaccttccctaaccacactaccaaattgtcctcggcgggcttagtatacatgcatttcggtcgagcgatcattgctgaacacacgtcattgccggtggatcaccacgacgtgaacttactgtacgaaaaactgtacacagatttcatcgaagccatcgatgccaacgacaatggcatttcagcctatgatcccgctgaaatatctgctgctaatctcgagaagcgcttcaaggatggtgccatcaccatcacatcggtggtgggtgacatgaacaaccccgatccgacctgcccgcccggggagcctcaggatgaagacagtctctttggtcgagcaagtacctttattggaaacgttttcactcgcaaactgcaccacgccagtacttcctggttacctgcacgcactactgtgggaaactcctaccgttcccgccgtgatgttcatccttccggccgtatcatcgttctccctcagggcggtgtgccatggaaagagcacttgtataacttcgaaaaggaagcgtcggaatccgataagcccaagtccgaagaagaggtctattacgttctctaccctgagagtgctactgaaggatctaaatggcgcgtgcagtgcgtgtcagtgaatgaaactagctttgtgtccaggaaacctctgccagagacctggcgtggtgttcgcgatgcagatctcgacggtgttatggccgcagaagccgagaaaaccggcaagcccaagattcctgagggtgcagtttttgtccatgccagcggtttcatcggtggccataagaccaaggaaggagcattttccatggcggtccgtggcttggagcaatag

SEQ ID NO: 7354 - protein, 364 aa, Aspergillus oryzae
MADETIAKKIKTSSPLIGTHSGHFHADEALAVYLLRQLPTYSASPLIRTRDPVQLATCHTVVDVGGEYDPANNRYDHHQRSFSTTFPNHTTKLSSAGLVYMHFGRAIIAEHTSLPVDHHDVNLLYEKLYTDFIEAIDANDNGISAYDPAEISAANLEKRFKDGAITITSVVGDMNNPDPTCPPGEPQDEDSLFGRASTFIGNVFTRKLHHASTSWLPARTTVGNSYRSRRDVHPSGRIIVLPQGGVPWKEHLYNFEKEASESDKPKSEEEVYYVLYPESATEGSKWRVQCVSVNETSFVSRKPLPETWRGVRDADLDGVMAAEAEKTGKPKIPEGAVFVHASGFIGGHKTKEGAFSMAVRGLEQ

SEQ ID NO: 7355 - DNA, 1086 bp, Giardia lamblia ATCC 50803
  CDS (1)..(1086)
atgattgacacctcgaagctcaaattcgtggcctccacgtcaagcatagtttcatctgactcccctaagcagggttcaggcacaccatttaaaattattgccacccatgacggtaaatttcactgggacgaatgtcttgcggtttggttcattaagcagcttccagattatattgacgcacgcatcatgcgtacgcgcgaccctgaagagctagagtttgctaccatcacagtggatgtgggggatgtttacgatagcgagaagctgtgcttcgatcatcacatgaagggcttccaggtgttcttttcagatgcgtacaaagacatatgtttaagttctgcaggactaatatatgtgcactatggaagaagtattctaaagcagctcttcccgcgtttagacgggcccacagagcttgagtttctctatcactatgtgtatgacaactatatccgcgtggttgacgctgtggacaacggggtagagagtcactataacactgatgggtctgagcctatttgccgatggactgaccccacatctatgagtgcacgaatcactcgcatttatgagattgccggtgatgagggttttggaacagcttacaagatggctggacaggacttcatggagtggatacagaccgtagtaataacttacttgcccgcgcgcagagagcttgttagagctattgagcaagcacataagcttcaccccagtggtcgcatcattgagctctctagcccggggccatatcaacaatttattcattcggtggaacatgatctatctctatgcaaagacgggcctggcggtgacactatcctgtttctcatacatccagacgactaccaagctggctaccgtattaggaccgtttcgacacagaagggctcatttgcattcaggctgggactcccggaggcctggcgcgggctgagggacgaagcgcttcagaatgtcagcgggtaccagggcatgtcttttgttcataagagcggtttccttgggggcgcaaaggaccgtgacacggcactggctgtcgtgacacgcattgtagaggactttgaggcccgcaatttctaa

SEQ ID NO: 7356 - protein, 361 aa, Giardia lamblia ATCC 50803
MIDTSKLKFVASTSSIVSSDSPKQGSGTPFKIIATHDGKFHWDECLAVWFIKQLPDYIDARIMRTRDPEELEFATITVDVGDVYDSEKLCFDHHMKGFQVFFSDAYKDICLSSAGLIYVHYGRSILKQLFPRLDGPTELEFLYHYVYDNYIRVVDAVDNGVESHYNTDGSEPICRWTDPTSMSARITRIYEIAGDEGFGTAYKMAGQDFMEWIQTVVITYLPARRELVRAIEQAHKLHPSGRIIELSSPGPYQQFIHSVEHDLSLCKDGPGGDTILFLIHPDDYQAGYRIRTVSTQKGSFAFRLGLPEAWRGLRDEALQNVSGYQGMSFVHKSGFLGGAKDRDTALAVVTRIVEDFEARNF

SEQ ID NO: 7357 - DNA, 1107 bp, Plasmodium yoelii yoelii
  CDS (1)..(1107)
atgaaacttctaacatcgaaatatcctaaaatatcaaaagatatttttcagaggaataatattatcctaagaaaaaagaacgaaacaagtaattttaagaaattattgtgcaggtcttttatattttattcagcaatgcaaaaagtaattgggactcattcaggacgttttcatactgatgagatattagcatcagtgatgttaaaatttttacctgaatataaagatgcaaaaattatcagaacccgggatcaagaacttttagataaatgtgatattgttgtagatgtaggagggatatatgatcatgaaaaaaagagatatgatcatcatcaaagagaatttaatgatggcttagatgaaaatcataatataagactaagtagtgcagggttaatttataaacattatggaaaagacgtattaaggaaaggatttaatataactgatgaaaataaagtaaatatattatatgataaaatatatactgtattaatagaatcgatagatgcacttgataatgggattaatcaatatgaaggagaagcaaaatatcaaataaatacaaccttacaacatcgagtaaatagatttaatccaaattttttggaagacgatgttgatgaaaatgaacgttttatgttagcttcaaatgttgtaaaagatgaatttagtagttttgtaaattattattctaatgtttggtatgaagctaaaactataactttagaagctgtgaaaaatagatataattttcataaatcaggtagagttatatttttacaaaaacattgcccatattcggatcatatatataatatagaaaaagagctaaatattaaagatcaaattttattttgtatttacaaagatagatataacaattgcaggtgtggtacaatttcaaaagaaaacgaaggttttaatcttagacttccatttccccctagttttagaggtttaaaaaatgaagctttagttaaagaatcaaatatcgaaggcttaacatttgttcattattctggctttactagtgctggtgataatattgaatgtttggttaaattggttgaggctactttaaaagaaaatggtatttcttattaa

SEQ ID NO: 7358 - protein, 368 aa, Plasmodium yoelii yoelii
MKLLTSKYPKISKDIFQRNNIILRKKNETSNFKKLLCRSFIFYSAMQKVIGTHSGRFHTDEILASVMLKFLPEYKDAKIIRTRDQELLDKCDIVVDVGGIYDHEKKRYDHHQREFNDGLDENHNIRLSSAGLIYKHYGKDVLRKGFNITDENKVNILYDKIYTVLIESIDALDNGINQYEGEAKYQINTTLQHRVNRFNPNFLEDDVDENERFMLASNVVKDEFSSFVNYYSNVWYEAKTITLEAVKNRYNFHKSGRVIFLQKHCPYSDHIYNIEKELNIKDQILFCIYKDRYNNCRCGTISKENEGFNLRLPFPPSFRGLKNEALVKESNIEGLTFVHYSGFTSAGDNIECLVKLVEATLKENGISY

SEQ ID NO: 7359 - DNA, 1041 bp, Arabidopsis thaliana
  CDS (1)..(1041)
atggctccttcaagcgtcgttagggtttactctaccgctacctctccttctccttctgaaatttccgtcaagaaagttggtactcataatggaagctttcactgcgacgaagctctcggctgtttcatgattcgcctcgtcgataaattctccggcgctgatatcgtccgttctcgtgaccctaagatattggcagaacttgatgcagtgcttgatgttggaggtgtttatgatccggagcatgaccgttatgatcatcaccagaaaggttttgaagaggtttttggacatggcttcaacactaagctcagtagtgctggtcttgtttacaagcattttggaaaggagatcatagctaaggaacttaatgtcgaacaagatcaccctgatgttcttcggttgtttttagctgtctacaagagcttcatggaggcaattgatgctgtggacaatggaataaaccggtatgatactgatcagcctccacgatatgtgaacaacacacatctgtctccaagggttggaagattaaatctggattggattgaccctgaccagtcacaagaaaaggagaatgaagctttccaacgtgcagtggctctagctggaaaagagttcctcgaaagtgttcagttccatgcaagatcgtggttaccggctcgatcaattgtgatgcagtgtcttgaagaaagattcaagacagaccccagcggtgagatcatgatattggatagattttgcccttggaagcttcatttgttcgagcttgagcaagaaatgaagatcgagcctctcatcaaatacgtcatttaccaggacgagagagcaaagcagtggagagttcaagcagtggcggtcgcaccagacaggtttgagaaccgaaagcctctccctgagaaatggagaggccttagggatgaggaactctcgaaagctgctgagattcccggttgtgtctttgtccacatgagtggctttatcggcggaaaccaatcctatgacggcgctctatccatggctcaaaccgcactcactctctga

SEQ ID NO: 7360 - protein, 346 aa, Arabidopsis thaliana
MAPSSVVRVYSTATSPSPSEISVKKVGTHNGSFHCDEALGCFMIRLVDKFSGADIVRSRDPKILAELDAVLDVGGVYDPEHDRYDHHQKGFEEVFGHGFNTKLSSAGLVYKHFGKEIIAKELNVEQDHPDVLRLFLAVYKSFMEAIDAVDNGINRYDTDQPPRYVNNTHLSPRVGRLNLDWIDPDQSQEKENEAFQRAVALAGKEFLESVQFHARSWLPARSIVMQCLEERFKTDPSGEIMILDRFCPWKLHLFELEQEMKIEPLIKYVIYQDERAKQWRVQAVAVAPDRFENRKPLPEKWRGLRDEELSKAAEIPGCVFVHMSGFIGGNQSYDGALSMAQTALTL

SEQ ID NO: 7361 - DNA, 1041 bp, Arabidopsis thaliana
  CDS (1)..(1041)
atggctccttcaagcgtcgttagggtttactctaccgctacctctccttctccttctgaaatttccgtcaagaaagttggtactcataatggaagctttcactgcgacgaagctctcggctgtttcatgattcgcctcgtcgataaattctccggcgctgatatcgtccgttctcgtgaccctaagatattggcagaacttgatgcagtgcttgatgttggaggtgtttatgatccggagcatgaccgttatgatcatcaccagaaaggttttgaagaggtttttggacatggcttcaacactaagctcagtagtgctggtcttgtttacaagcattttggaaaggagatcatagctaaggaacttaatgtcgaacaagatcaccctgatgttcttcggttgtttttagctgtctacaagagcttcatggaggcaattgatgctgtggacaatggaataaaccggtatgatactgatcagcctccacgatatgtgaacaacacacatctgtctccaagggttggaagattaaatctggattggattgaccctgaccagtcacaagaaaaggagaatgaagctttccaacgtgcaatggctctagctggaaaagagttcctcgaaagtgttcagttccatgcaagatcgtggttaccggctcgatcaattgtgatgcagtgtcttgaagaaagattcaagacagaccccagcggtgagatcatgatattggatagattttgcccttggaagcttcatttgttcgagcttgagcaagaaatgaagatcgagcctctcatcaaatacgtcatttaccaggacgagagagcaaagcagtggagagttcaagcagtggcggtcgcaccagacaggtttgagaaccgaaagcctctccctgagaaatggagaggccttagggatgaggaactctcgaaagctgctgagattcccggttgtgtctttgtccacatgagtggctttatcggcggaaaccaatcctatgacggcgctctatccatggctcaaaccgcactcactctctga

SEQ ID NO: 7362 - protein, 346 aa, Arabidopsis thaliana
MAPSSVVRVYSTATSPSPSEISVKKVGTHNGSFHCDEALGCFMIRLVDKFSGADIVRSRDPKILAELDAVLDVGGVYDPEHDRYDHHQKGFEEVFGHGFNTKLSSAGLVYKHFGKEIIAKELNVEQDHPDVLRLFLAVYKSFMEAIDAVDNGINRYDTDQPPRYVNNTHLSPRVGRLNLDWIDPDQSQEKENEAFQRAMALAGKEFLESVQFHARSWLPARSIVMQCLEERFKTDPSGEIMILDRFCPWKLHLFELEQEMKIEPLIKYVIYQDERAKQWRVQAVAVAPDRFENRKPLPEKWRGLRDEELSKAAEIPGCVFVHMSGFIGGNQSYDGALSMAQTALTL

SEQ ID NO: 7363 - DNA, 1179 bp, Drosophila melanogaster
  CDS (151)..(1098)
cgaaattaattgaaatatctgggcttaactgaatgttttgaagcaggaaaactatctataatgactggagttaccccaccaaaacgctctcccctttggatcggcacacacagcggcacttttcactgcgacgagttggtcgcatgttttatgctcaagcaattggatgagtacaaaaacgcagagattttccgcagtcgggacaacaaggctttgaaggagaagtgcgatataattgtcgacgtgggcggcgtttatgatcatgccaagaaattgtacgatcaccaccaaataaccttcaaggagacttttagttccgttcgcccagatgtaagcgaggactacaacgttgtcaggctaagcagtgctggactggtctactgtcactatggcgagcgtgttatacagagcatcctgcagcgcgaaaagggaattaaactctcaccggaaaacctgcaaacggcctttattcagatctataggaattttatcaacgaactggacgcaattgataatggagtgcccatgttcgagggcgttgagcctatatacaaaatctccactcatctatctgcccgcattgccaaactgaatccgtcctggcaggaaactggcgtagacatcgaagaccgattcagacaggcgatggatactgcaggtcgtgagtttgtggacaacgttgtggaggtatcatgttcctggattccagcccgggatcacgtacgagaggctcttaaaaatgccaagaacgtccatcccaccggcgagattcttgtgttgaagaatttctgcccctggaagtctcatctgttcgatcttgaaaaggagtacaaggtggagggtgtgcccaagctggtcgtcttcaacagcggcaatagttggcgagtggccggagttccagtgacgcctggcagctatctgggccgcaaatttctgcccactccttggcgcggactgatggacgatgaactatgcgataaggcgagcatcaaagatctcgaattcatccatcacacaggatttattggcggggcaaaaaccgaggaggctgccatgttgttggccaagaaatccaccgagtggacagaagagcaataatataatacgacttaaagttatgcttttgaaattgaaaaacaataattagatcgcatttaattctggtgttattacgcattt

SEQ ID NO: 7364 - protein, 315 aa, Drosophila melanogaster
MLKQLDEYKNAEIFRSRDNKALKEKCDIIVDVGGVYDHAKKLYDHHQITFKETFSSVRPDVSEDYNVVRLSSAGLVYCHYGERVIQSILQREKGIKLSPENLQTAFIQIYRNFINELDAIDNGVPMFEGVEPIYKISTHLSARIAKLNPSWQETGVDIEDRFRQAMDTAGREFVDNVVEVSCSWIPARDHVREALKNAKNVHPTGEILVLKNFCPWKSHLFDLEKEYKVEGVPKLVVFNSGNSWRVAGVPVTPGSYLGRKFLPTPWRGLMDDELCDKASIKDLEFIHHTGFIGGAKTEEAAMLLAKKSTEWTEEQ

SEQ ID NO: 7365 - DNA, 1552 bp, Mus musculus
  CDS (380)..(1522)
tgagggaaacttcggagggaaccagctactagatggttcgattagtctttcgcccctatacccaggtcggacgaccgatttgcacgtcaggaccgctacggacctccaccagagtttcctctggcttcgccctgcccaggcatagttcaccatctttcgggtcctaacgcgtacgctcgtgctccacctccccggcgcggcgggcgagacgggccggtggtgcgccctcggcggactggagaggcctcgggatcccacctcgggcccccgggcggggcccttcaccttcattgcgccacggcggctttcggacgagcccctgactcgcgcacgcgttagactccttggtccgggtcgaccttcccttggagggaactatatgggtagacgtttcctgcgtggtatcttaacattgccgctccggtcagttctccaagcccagcaccgcatgcttggctcagagcaggatccgcccgctaaaagacctcgcaacaacctcatggcaccgccccgaatcgggacgcacaacggcaccttccactgcgatgaagctctggcttgcgcgttgctccgcctcctgcccgagtacgcgaacgcagagattgtgcggactcgggatcctgaaaagttggcttcgtgtgacatcgtggtggatgtgggcggtgagtacaacccccagagtcaccgttatgatcatcaccagaggacttttacagaaaccatgagttcactgtgccctggaaagccatggcagaccaagctgagcagtgcgggacttgtctatttgcacttcggacgtaagctcctggcccagttgctgggcactagtgaagaggacagcgtggtggataccatctatgacaagatgtatgagaactttgtggaagaggtggatgcggtggacaatgggatctctcagtgggcagagggggagcctcggtatgccatgaccaccacactgagtgcccgggttgctcggcttaatcccacctggaaccagcccaaccaagacactgaggcagggttcaggcgagcaatggacctggtacaagaggagtttctgcaaagactaaacttctaccagcacagctggctgccagcccgggccttagtagaggaggcactggcccagagattcaaggtagattcaagtggggaaatagtggaactcgcaaaaggtggatgcccttggaaggagcatctataccacctagaatctgagctgtcccccaaagtggccattacctttgttatctacactgaccaggctggacagtggcgagtccagtgcgtacccaaggagcctcactcattccaaagccggctacccttgcccgagccatggagaggacttcgggataaggccctggaccaagtcagtgggatccctggttgcatcttcgtccatgccagtggcttcattggtgggcaccacactcgagagggtgccctgaacatggcccgtgccacccttgcccagcgcccagcacctgtgcctcttgcaaatgctgtagtccaataaaacgtattcacctctaaaaaaaaaaaaaaa

SEQ ID NO: 7366 - protein, 380 aa, Mus musculus
MGRRFLRGILTLPLRSVLQAQHRMLGSEQDPPAKRPRNNLMAPPRIGTHNGTFHCDEALACALLRLLPEYANAEIVRTRDPEKLASCDIVVDVGGEYNPQSHRYDHHQRTFTETMSSLCPGKPWQTKLSSAGLVYLHFGRKLLAQLLGTSEEDSVVDTIYDKMYENFVEEVDAVDNGISQWAEGEPRYAMTTTLSARVARLNPTWNQPNQDTEAGFRRAMDLVQEEFLQRLNFYQHSWLPARALVEEALAQRFKVDSSGEIVELAKGGCPWKEHLYHLESELSPKVAITFVIYTDQAGQWRVQCVPKEPHSFQSRLPLPEPWRGLRDKALDQVSGIPGCIFVHASGFIGGHHTREGALNMARATLAQRPAPVPLANAVVQ

SEQ ID NO: 7367 - DNA, 975 bp, Schizosaccharomyces pombe
  CDS (1)..(975)
atgaataatttagttaaaattgctactcatagtggtacttttcatgcagatgaggccttggctgtttacatgcttcgccgtttagatagattctccggtgcccaaattgtgcgcagccgtgatcctcaagttttagactcatgcgacattattgtagatgttggaggaaagtacgatggtattaaatattttgaccatcatcaacgtgaattcaatgatactttttcacccaaatacagcactcgtctttctagtgccggtttgatctacaaacattttggtcgtgaagttattcacgctgtccttccacagttgaaaataaacgagcaggatcttgaaacactttatgaaaaagtttatcaatcattcgttgaaggtcttgatgctaatgacaatggaatttctgcttatccggctggcctaaagcctagcttcaaagccgctatgagtctacctgagatggtttcaagtttccttcctgcatggaattcggaaaagcaagatgaccaaacttaccttgaatgttttcaaaaggcctcggatttaatgggtacatggtttgttcgatctgtagaacattatgctttatcatggttaccagctaaaactctcgctcgagaagcaattttgaaggctaaagattctcctattttgatcgtagatcagttttttccctggaagggtcatttatttgatattgaaaaagaacttggcattgagaaccaatttaaatacgctatctactctgatgggaaagcttggagagttcaggctgtttctattgatcccacttcttttacttgtcgcttaccactaccagaaccatggagaggaattcgtgatgaaaagctttctgagttaactggcattccaggttgcatctttgttcatgcttccggtttcattggtggtaatcaaacttttgagggtgctctggaaatggctaggaaagctttagattttccacaaaattaa

SEQ ID NO: 7368 - protein, 324 aa, Schizosaccharomyces pombe
MNNLVKIATHSGTFHADEALAVYMLRRLDRFSGAQIVRSRDPQVLDSCDIIVDVGGKYDGIKYFDHHQREFNDTFSPKYSTRLSSAGLIYKHFGREVIHAVLPQLKINEQDLETLYEKVYQSFVEGLDANDNGISAYPAGLKPSFKAAMSLPEMVSSFLPAWNSEKQDDQTYLECFQKASDLMGTWFVRSVEHYALSWLPAKTLAREAILKAKDSPILIVDQFFPWKGHLFDIEKELGIENQFKYAIYSDGKAWRVQAVSIDPTSFTCRLPLPEPWRGIRDEKLSELTGIPGCIFVHASGFIGGNQTFEGALEMARKALDFPQN

SEQ ID NO: 7369 - DNA, 1634 bp, Zea mays
  CDS (9)..(1163)
ctagtagtatgctcgccgccgcctggaggctgtcgcagcgagccgtcacgtctcctctcctaggcatcgggcgatcccaaatccgaaaccctttctccaccatggcgtctctgtcgccggcagccgcctcgccgaagaggctgagggtctactcgtctgccgcggccgacggtgacggcgcggggagcggcaagcgcgtggggacccacaacggaagcttccactgcgatgaggcgctcggctgcttcctcatccgcctcacctcccagttcgccggcgccgacgtcgtccgcacccgcgattcccagatccttgatacattggatgctgttcttgatgttgggggtgtctatgatcccagtcggcatcgctatgatcatcaccagaagggcttcagtgaggtttttggacatggattcaacacaaaacttagcagtgctggacttgtgtacaagcacttcggtaaggagataattgctaaggagcttgcggttaatgaggatcatgaagatgttcactgtttgtatctcgcgatatataaaagctttgttgaggcacttgatgcgattgacaatggaatcaatcaatatgacacagatcaaccgccaaagtatgtgaacaatacacacttgtcttcacgcgttggacgctttaatctggactggactgatccagaccagtcacttgagaaggagaatgcggcatttgaacaggcaatgatactagctggaagtgaatttatggagagggttcgcttccatgttaaatcatggttaccggcaaggtctattgtcctggagtgtttgttatcaaaaggaaacattgatccaagtggagaaatcttggttttggatagattctgcccgtggaaacttcatttatttgagcttgaagaggagctgaagactgatcctctgaccaagtatgtgctgtatcaggatgagaggagcaagagttggcgagtccaagcagtcgcagttgctcctgacaggttcgagagccgaaaggctctgccagagaagtggaggggcatgagagacgacgaactttcagcagaaaccggcatccctggctgtgtgtttgtccacatgagtggcttcattgggggcaacaagacctacgagggagcattggaaatggcgagagctgctctgaaattctgattcaaccaaagcatattacccatgttaccattatatcagtaaacacatcaggaacacaagatgcagttgcgctttctccaatgttatcgtggactccagccgtggttaactgggactgattcttgcactgatcttctgttatcctcatcttacagaagaggtcgattgacccttttcattctttcgtgggatctggtattgtttagaatgtgacggtttatctgaaaaaaatgatggaactttttgtcctcaagcatgttctccgttttggagtattcatctgtggcccggcacagccaccgtggttttgtgtgtgcatggagagacaggcagacgaaaacgaatgcaaagaaagcttgtggggatcaggtagttttaccctctaaacgactgtacttgaattataatttcagtgtcgatgtgagcatgatttccaactacatgaattgatggtgagaaaaaaaaaaaaaa

SEQ ID NO: 7370 - protein, 384 aa, Zea mays
MLAAAWRLSQRAVTSPLLGIGRSQIRNPFSTMASLSPAAASPKRLRVYSSAAADGDGAGSGKRVGTHNGSFHCDEALGCFLIRLTSQFAGADVVRTRDSQILDTLDAVLDVGGVYDPSRHRYDHHQKGFSEVFGHGFNTKLSSAGLVYKHFGKEIIAKELAVNEDHEDVHCLYLAIYKSFVEALDAIDNGINQYDTDQPPKYVNNTHLSSRVGRFNLDWTDPDQSLEKENAAFEQAMILAGSEFMERVRFHVKSWLPARSIVLECLLSKGNIDPSGEILVLDRFCPWKLHLFELEEELKTDPLTKYVLYQDERSKSWRVQAVAVAPDRFESRKALPEKWRGMRDDELSAETGIPGCVFVHMSGFIGGNKTYEGALEMARAALKF

SEQ ID NO: 7371 - DNA, 1110 bp, Glycine max
  CDS (1)..(1110)
atgtgggctgcagcaacaaaaccattcgtccaattccaattccgcagacacactactacttctctccttccgattcttctgatggcaaaccaagcttcactctccttctcttcggggtctccagttcacgcgcctctgaagcgcgtgggcacgcacaacggaagcttccactgcgacgaggcccttggctgcttcatgattcgcctcacgaacaaattcaacagcgccgaaatcgttcgctcccgagaccctcaggtgttggaggatcttgatgctgttcttgatgttgggggagtgtatgaccctgctcgagatcggtatgatcatcatcaaaaaggatttgaagaagtttttgggcatggtttctccactaaattgagtagtgctggtcttgtttataagcattttggaaaggagattatagccaaagaacttaaggtagatgaggaacaccgagatgtgcattacatatatttggctgtttacaagagcttcatggaggcaattgatgctatagacaatggaatcaatcggtatgatacagaccaacctccaagatatgtgaataatactcatttatcctcaagagtaggaaggctaaatttagattggacagatcctgatcagtcacctgagaaagaaaatgaggcctttcaacgtgcaatggctcttgctggcagtgagtttctggatagtgttcgatttcatgtcaattcatggttaccagcaaggtcaattgtaatggagaccctagaggctagacatactgttgatcctagtggagaaattctagttttgactaaattgtgtccttggaagcttcacttatttgagcttgagggagagttgaaaaatgacccttctgtcaaatatgttctgtatcaggatgaaagaagcaaacaatggcgagtgcaggcagttgcagtatctcctgacagttttcagagccgaaaggctctaccctcacagtggcaagggttaagggatgaagaattgtcgaaggagtctggcattccaggatgtgtttttgtgcatatgagcggatttattggtggaaacaaaaactttgacggtgccttggccatggcgaaggctgctttgacaatgtag

SEQ ID NO: 7372 - protein, 369 aa, Glycine max
MWAAATKPFVQFQFRRHTTTSLLPILLMANQASLSFSSGSPVHAPLKRVGTHNGSFHCDEALGCFMIRLTNKFNSAEIVRSRDPQVLEDLDAVLDVGGVYDPARDRYDHHQKGFEEVFGHGFSTKLSSAGLVYKHFGKEIIAKELKVDEEHRDVHYIYLAVYKSFMEAIDAIDNGINRYDTDQPPRYVNNTHLSSRVGRLNLDWTDPDQSPEKENEAFQRAMALAGSEFLDSVRFHVNSWLPARSIVMETLEARHTVDPSGEILVLTKLCPWKLHLFELEGELKNDPSVKYVLYQDERSKQWRVQAVAVSPDSFQSRKALPSQWQGLRDEELSKESGIPGCVFVHMSGFIGGNKNFDGALAMAKAALTM

SEQ ID NO: 7373 - DNA, 1068 bp, Triticum aestivum
  CDS (1)..(1068)
atggccgccgccgccggcgccacctcgcccaagcgcctgagggtctactcgtcggccgccggcgacgccgactcctttaacggcgcggggaacggcaggcgcgtggggacccacaacggcagcttccactgcgacgaggcgctcggctgcttcctcatccgcctcacctcccagttcgcaggcgccgacgtcgtccgcacccgcgactcccagatccttgattcgctggaggccgtgcttgacgttggtggtgtctatgatcccagccggcatcgctatgatcatcaccagaagggcttcaacgaggtctttggacatggctttaacacgaaacttagcagtgctgggcttgtttacaagcattttggtaaggagataattgcaaaggagcttcagcttaatgaggagcatgaagatgttcaccgtgtgtatcttgccatatacaaaagctttgttgaggcacttgatgcaatcgataatggaatcaatcaatatgacacagagcaaacccccaagtatgtgaacaatacacacttgtcttcacgtgttgggcgccttaatccagactggactgatccagatcaatcacctgagaaggaaaatgccgcatttcaaaaggcaatggcacttgccggaagtgagtttatggagagtgtccgctttcatgttaaatcgtggctacctgcaagatctattgtcatggagtgtttgctgtcaagaggaaatgttgatccaagtggagaaatcatggttttagatagattctgcccgtggaaacttcatctgtttgagctagagcaggagctgaagactgatcctctgaccaagtatgtgttgtatgaggatgagaggagcaaaggctggcgagtgcaggccgtctctgttgcacctgacagattcgagagccgaaaggctctcccagagaagtggaggggcatgagagatgatgaactgtccaaggaaaccggcatccctggctgtgtgttcatccatatgagtggcttcattggtgggaacaagacctacgagggagcgctggaaatggcaagagctgccctcaaatgctaa

SEQ ID NO: 7374 - protein, 355 aa, Triticum aestivum
MAAAAGATSPKRLRVYSSAAGDADSFNGAGNGRRVGTHNGSFHCDEALGCFLIRLTSQFAGADVVRTRDSQILDSLEAVLDVGGVYDPSRHRYDHHQKGFNEVFGHGFNTKLSSAGLVYKHFGKEIIAKELQLNEEHEDVHRVYLAIYKSFVEALDAIDNGINQYDTEQTPKYVNNTHLSSRVGRLNPDWTDPDQSPEKENAAFQKAMALAGSEFMESVRFHVKSWLPARSIVMECLLSRGNVDPSGEIMVLDRFCPWKLHLFELEQELKTDPLTKYVLYEDERSKGWRVQAVSVAPDRFESRKALPEKWRGMRDDELSKETGIPGCVFIHMSGFIGGNKTYEGALEMARAALKC

SEQ ID NO: 7375 - DNA, 26 bp, Artificial sequence
  primer
atgaatagcgtaaaaagagtaaagct

SEQ ID NO: 7376 - DNA, 23 bp, Artificial sequence
  primer
ctaggccaaagacatcttagcca

SEQ ID NO: 7377 - protein, 373 aa, Artificial sequence
  consensus sequence
  Variant (3)..(3): Xaa in position 3 is any amino acid
  Variant (5)..(5): Xaa in position 5 is any amino acid
  Variant (8)..(8): Xaa in position 8 is any amino acid
  Variant (11)..(11): Xaa in position 11 is any amino acid
  Variant (13)..(22): Xaa in position 13 to 22 is any amino acid
  Variant (23)..(26): Xaa in position 23 to 26 is any or no amino acid
  Variant (28)..(30): Xaa in position 28 to 30 is any amino acid
  Variant (32)..(32): Xaa in position 32 is any amino acid
  Variant (34)..(45): Xaa in position 34 to 45 is any amino acid
  Variant (46)..(47): Xaa in position 46 to 47 is any or no amino acid
  Variant (52)..(52): Xaa in position 52 is any amino acid
  Variant (55)..(59): Xaa in position 55 to 59 is any amino acid
  Variant (60)..(60): Xaa in position 60 is any or no amino acid
  Variant (65)..(66): Xaa in position 65 to 66 is any amino acid
  Variant (68)..(69): Xaa in position 68 to 69 is any amino acid
  Variant (70)..(70): Xaa in position 70 is any or no amino acid
  Variant (72)..(76): Xaa in position 72 to 76 is any amino acid
  Variant (77)..(86): Xaa in position 77 to 86 is any or no amino acid
  Variant (93)..(93): Xaa in position 93 is any amino acid
  Variant (95)..(95): Xaa in position 95 is any amino acid
  Variant (97)..(97): Xaa in position 97 is any amino acid
  Variant (99)..(112): Xaa in position 99 to 112 is any amino acid
  Variant (113)..(126): Xaa in position 113 to 126 is any or no amino acid
  Variant (128)..(129): Xaa in position 128 to 129 is any amino acid
  Variant (131)..(131): Xaa in position 131 is any amino acid
  Variant (133)..(134): Xaa in position 133 to 134 is any amino acid
  Variant (137)..(137): Xaa in position 137 is any amino acid
  Variant (142)..(150): Xaa in position 142 to 150 is any amino acid
  Variant (151)..(168): Xaa in position 151 to 168 is any or no amino acid
  Variant (170)..(176): Xaa in position 170 to 176 is any amino acid
  Variant (178)..(184): Xaa in position 178 to 184 is any amino acid
  Variant (185)..(198): Xaa in position 185 to 198 is any or no amino acid
  Variant (200)..(201): Xaa in position 200 to 201 is any amino acid
  Variant (203)..(206): Xaa in position 203 to 206 is any amino acid
  Variant (208)..(208): Xaa in position 208 is any amino acid
  Variant (209)..(209): Xaa in position 209 is any or no amino acid
  Variant (211)..(216): Xaa in position 211 to 216 is any amino acid
  Variant (217)..(220): Xaa in position 217 to 220 is any or no amino acid
  Variant (222)..(222): Xaa in position 222 is any amino acid
  Variant (225)..(227): Xaa in position 225 to 227 is any amino acid
  Variant (229)..(237): Xaa in position 229 to 237 is any amino acid
  Variant (238)..(243): Xaa in position 238 to 243 is any or no amino acid
  Variant (245)..(245): Xaa in position 245 is any amino acid
  Variant (247)..(250): Xaa in position 247 to 250 is any amino acid
  Variant (251)..(254): Xaa in position 251 to 254 is any or no amino acid
  Variant (258)..(258): Xaa in position 258 is any amino acid
  Variant (260)..(263): Xaa in position 260 to 263 is any amino acid
  Variant (265)..(265): Xaa in position 265 is any amino acid
  Variant (267)..(278): Xaa in position 267 to 278 is any amino acid
  Variant (279)..(295): Xaa in position 279 to 295 is any or no amino acid
  Variant (298)..(300): Xaa in position 298 to 300 is any amino acid
  Variant (302)..(307): Xaa in position 302 to 307 is any amino acid
  Variant (308)..(308): Xaa in position 308 is any or no amino acid
  Variant (310)..(311): Xaa in position 310 to 311 is any amino acid
  Variant (313)..(314): Xaa in position 313 to 314 is any amino acid
  Variant (317)..(318): Xaa in position 317 to 318 is any amino acid
  Variant (322)..(323): Xaa in position 322 to 323 is any amino acid
  Variant (325)..(326): Xaa in position 325 to 326 is any amino acid
  Variant (328)..(334): Xaa in position 328 to 334 is any amino acid
  Variant (335)..(345): Xaa in position 335 to 345 is any or no amino acid
  Variant (347)..(348): Xaa in position 347 to 348 is any amino acid
  Variant (350)..(350): Xaa in position 350 is any amino acid
  Variant (352)..(353): Xaa in position 352 to 353 is any amino acid
  Variant (359)..(368): Xaa in position 359 to 368 is any amino acid
  Variant (370)..(372): Xaa in position 370 to 372 is any amino acid
THXGXFHXDEXLXXXXXXXXXXXXXXAXXXRXRXXXXXXXXXXXXXXDVGGXYDXXXXXXDHHQXXFXXXFXXXXXXXXXXXXXXXLSSAGLXYXHXGXXXXXXXXXXXXXXXXXXXXXXXXXXXXYXXFXEXXDAXDNGIXXXXXXXXXXXXXXXXXXXXXXXXXXXLXXXXXXXNXXXXXXXXXXXXXXXXXXXXXFXXAXXXXGXXFXXXXXXXXXXWXPAXXXVXXXXXXXXXXXXXXXGXIXXXXXXXXPWKXHXXXXEXEXXXXXXXXXXXXXXXXXXXXXXXXXXXXXWRXXXVXXXXXXXFXXRXXLPXXWRGXXDXXLXXXXXXXXXXXXXXXXXXGXXFXHXXGFIGGXXXXXXXXXXAXXXL

SEQ ID NO: 7378 - protein, 19 aa, Artificial sequence
  protein pattern
  Variant (2)..(3): Xaa in position 2 to 3 is any or no amino acid
  Variant (5)..(6): Xaa in position 5 to 6 is any amino acid
  Variant (9)..(9): Xaa in position 9 is Ala, Glu, Gln or Ser
  Variant (10)..(12): Xaa in position 10 to 12 is any amino acid
  Variant (14)..(14): Xaa in position 14 is Phe, Ile, Leu, Met or Val
  Variant (15)..(15): Xaa in position 15 is any amino acid
  Variant (17)..(18): Xaa in position 17 to 18 is any amino acid
FXXRXXLPXXXXGXXDXXL

SEQ ID NO: 7379 - protein, 21 aa, Artificial sequence
  protein pattern
  Variant (2)..(2): Xaa in position 2 is Ile or Val
  Variant (4)..(4): Xaa in position 4 is any amino acid
  Variant (5)..(5): Xaa in position 5 is Ala, Ser or Thr
  Variant (10)..(15): Xaa in position 10 to 15 is any or no amino acid
  Variant (18)..(20): Xaa in position 18 to 20 is any amino acid
  Variant (21)..(21): Xaa in position 21 is Ala, Asp or Glu
FXHXXGFIGXXXXXXGAXXXX

SEQ ID NO: 7380 - protein, 13 aa, Artificial sequence
  protein pattern
  Variant (3)..(3): Xaa in position 3 is Asn or Ser
  Variant (5)..(5): Xaa in position 5 is any amino acid
  Variant (8)..(8): Xaa in position 8 is Ala, Cys or Thr
  Variant (11)..(12): Xaa in position 11 to 12 is any or no amino acid
THXGXFHXDEXXA

SEQ ID NO: 7381 - protein, 9 aa, Artificial sequence
  protein pattern
  Variant (5)..(5): Xaa in position 5 is Lys or Arg
  Variant (6)..(6): Xaa in position 6 is Glu, Gly or Thr
  Variant (8)..(8): Xaa in position 8 is any amino acid
  Variant (9)..(9): Xaa in position 9 is Asp, Glu, Ser or Thr
DHHQXXFXX

SEQ ID NO: 7382 - protein, 14 aa, Artificial sequence
  protein pattern
  Variant (2)..(2): Xaa in position 2 is any amino acid
  Variant (3)..(3): Xaa in position 3 is Asp, Glu, Asn, Gln or Ser
  Variant (5)..(5): Xaa in position 5 is Ile, Met or Val
  Variant (6)..(6): Xaa in position 6 is Glu or Asn
  Variant (7)..(7): Xaa in position 7 is Ala, Glu, Gly or Ser
  Variant (8)..(8): Xaa in position 8 is Ile, Leu or Val
  Variant (11)..(11): Xaa in position 11 is any amino acid
YXXFXXXXDAXDNG

SEQ ID NO: 7383 - protein, 11 aa, Artificial sequence
  protein pattern
  Variant (3)..(3): Xaa in position 3 is any amino acid
  Variant (5)..(5): Xaa in position 5 is Phe, Ile or Leu
  Variant (6)..(6): Xaa in position 6 is Phe or Tyr
  Variant (7)..(7): Xaa in position 7 is any amino acid
  Variant (8)..(8): Xaa in position 8 is Phe, Ile, Leu or Val
  Variant (10)..(10): Xaa in position 10 is any amino acid
  Variant (11)..(11): Xaa in position 11 is Ala, Asp, Glu or Gly
WKXHXXXXEXX

SEQ ID NO: 7384 - DNA, 1980 bp, Saccharomyces cerevisiae
  CDS (1)..(1980)
atggatagtacgaatttgaacaaacggcccttattacaatatagtctcagttcattgggctcgcaaataacaaaatggagctcatctagaccgacttcgccagttcgtaaggcgagaagcactgaaaatgactttctttccaagcaagatacgtctagtatcctcccaagtatcaacgacgacggcggtgaacagtggtacgaaaagttcaagcccaattgtttggagcaagtggccatacataaaagaaaacttaaagatgtacaagaagctttagatgccatgtttttacctaacgccaagcataggatcctactactgtctggccccagtggatgctctaaaagtacggtcataaaagaactctcaaaaatcttagttcctaaatacagacaaaacagcaacggaacgtcctttcgaagcaccccgaacgagcataaagtgaccgagtttagaggtgattgtatagtcaacgatcttcctcagatggaaagctttagtgagttcttaaaaggcgcacggtatcttgtgatgtccaacctgtcattaatacttatcgaggaccttcccaacgtcttccatatagataccagacgtcgatttcaacaacttatattacagtggctatatagttcggagcctctattacctccccttgttatatgtataactgaatgtgaaattccagagaacgataataattatcgcaaatttggtattgattatacatttagtgcagaaaccataatgaacaaagaaatattgatgcatccaaggttgaaaagaattaagtttaatccaattaacagcactttattaaaaaagcacttgaaatttatttgtgtacagaatatgaaaatgttgaaggagaaaaataaatggaataaaagacaggaagtcatagattatattgcgcaagagactggtgatattaggtcggccattacgacccttcaattttgggcgacatcaagtggaagtttgccgatttcaacccgagaatccaccatatcatactttcatgccattgggaaggtgatacatggttcccatagcacgaataacgataacgaaatgattaataacctcttcgaaaattcgaacaatttgttatcgaaagaggatttcaaattaggaatattagagaactataacacatttaataaaggcgaattcagcatttctgatgcatcatcaattgtggattgcctgagcgagtgtgataatatgaatggtctaccagaatccaatgagtatggtttacgagaagtgcgcaaaacctttcgtaacatcagtaaacaaggccataatcatggaacggtttattttccaagagaatggaaagtaagaaaattacaaaattcatttaaagttcaagctgaagattggttaaatgttagtctttataagtacaacgcggtacattctttcaggaatataactctagaatttggctactacgcacctctaattagaaagtgtcagagttataaaaaaaaatacattctctattatttgaagaatcttccgagtggctcctcggggcccaaacaaaccatggacaaatttagtgatataatgaaagttgagaacggaatcgacgttgtggatcggataggcgggcctatcgaagcactatctgtggaggatggactagcaccattgatggataatgatagcaataattgtgaccatttagaggatcaaaaaaaggaaagggacagaaggcttcgcatgttgattgaccaatatgaaagaaatgtgatgatggctaacgacgatcttgaagacgaagaaacttcttttaatgatgaccctattgtcgatagcgatagcgataacagcaataatattggcaatgaaacatttggtagaagcgacgaagacgagtctctatgtgaaattctgtcccagagacagccgcgtaaagcgccagttatcagtgagtccctttcagattcagatctggaaatactctaa

SEQ ID NO: 7385 - protein, 659 aa, Saccharomyces cerevisiae
MDSTNLNKRPLLQYSLSSLGSQITKWSSSRPTSPVRKARSTENDFLSKQDTSSILPSINDDGGEQWYEKFKPNCLEQVAIHKRKLKDVQEALDAMFLPNAKHRILLLSGPSGCSKSTVIKELSKILVPKYRQNSNGTSFRSTPNEHKVTEFRGDCIVNDLPQMESFSEFLKGARYLVMSNLSLILIEDLPNVFHIDTRRRFQQLILQWLYSSEPLLPPLVICITECEIPENDNNYRKFGIDYTFSAETIMNKEILMHPRLKRIKFNPINSTLLKKHLKFICVQNMKMLKEKNKWNKRQEVIDYIAQETGDIRSAITTLQFWATSSGSLPISTRESTISYFHAIGKVIHGSHSTNNDNEMINNLFENSNNLLSKEDFKLGILENYNTFNKGEFSISDASSIVDCLSECDNMNGLPESNEYGLREVRKTFRNISKQGHNHGTVYFPREWKVRKLQNSFKVQAEDWLNVSLYKYNAVHSFRNITLEFGYYAPLIRKCQSYKKKYILYYLKNLPSGSSGPKQTMDKFSDIMKVENGIDVVDRIGGPIEALSVEDGLAPLMDNDSNNCDHLEDQKKERDRRLRMLIDQYERNVMMANDDLEDEETSFNDDPIVDSDSDNSNNIGNETFGRSDEDESLCEILSQRQPRKAPVISESLSDSDLEIL

SEQ ID NO: 7386 - DNA, 1872 bp, Eremothecium gossypii
  CDS (1)..(1872)
atgaataaaaggattcgacaaaagggagtacgaattttggggtcgcagctggatagtaagatctctgtgaagaaccgcaagatagcaagcattaatggtagttcaagaaatcaaggcgcggatgataccgaacttggaaattggtatgataagtatcggcccaggcgcctggatgaggtagccatacatcggaataagctggagggggtgcgcaaggccctcgaggcgatgttgtccggtacatcgcagacacgcatactacttctgaccgggccagctggatgttccaagagcacagttgtgaaactgctctccgcagagctggttctgcagtatcgatctgcggctcgcgaggacatgcatctccctgccagggcgaatacctacgtagagtacagcaatgacactgacgcgccgccactggagcaattcgacgagtttctccagcaggcgaagtacagaatagggcccaatcttgctgtagctctggttgaagaactgcccaatgtttttcacgaggagacgaggcaccgatttaacatgtctttgcttcagtggctctctatggagcgcgagctaccgccgttggtaatatgcctcacagagtgcgagataaatgaatccaatcgccgttttggtatagacacgatgtttgtcgccgagactctgctgacgaaggaggttttgacgcaccatcttctttcacggataaagttcaatgctatcaatgccacgctcctcaccaaacggctgcgttatatcgctgcccgtgagacccaatttctaccgcattcgaaacgagcgcttgtcggatcctacatcaaggaactggcgggaagatcaggcgatatcagatccgccatagctgcattacagttttggtgccatagcgcgggtagcagcggcctggcactgggccgtgagtcgtccctaaactatttccacgcgatagggaaggtgatatacggctccaaggatactactgatgatgagacgattacagcacttacgagtacaggtcatcctggtagcgaaacattcaagttgggaatattggaaaactatgcgaagttcgcaaaaggaaacttcccagtagatactgctgccactgtcgtggaagcactaagcacttgcgatctgcttcaccatagaggtgagtgcttggaaggttattcggagtttgcgctgcggagcgtccggtatagccttcttaagctgaagaatgatcgcgaccagcatggggccgctgcatttccgagagaatgggcagttaagggtcaccaggcgcgctttaagttgcaagcagaagattttggattggtagaataccataagtatggccaagtacgaaggtttcgtgatattgtcctatactacggatactataccccagctatacgaagtttgaggagcttcaacggtaagagtttgcgttcctatattaaatatttgcatgaccagaaggagatagataagttgcttgcgatgaataaagaatctctgtctattgacccaagcatcgacttccttgagcgactgggcggggatcttggccacgtttccctggattctagtttgccacccgaaccatctgcttattctagtaggaagaatatatacatgcgggctaagcaacttattacaaggagggaagaatcttgtccagatgtctttcagctggataatgaagaggcgtcgccagaaggtcaagaatttgtccgcgatccaatagaagagtcaggcgaggaagattttacccttgacgatgattcgatatatgagatattttcccagaaacgtcctgttcctgagcaaaccgaaggtattttgcatgatgagtctctttctgactcagacctggaggacttatag

SEQ ID NO: 7387 - protein, 623 aa, Eremothecium gossypii
MNKRIRQKGVRILGSQLDSKISVKNRKIASINGSSRNQGADDTELGNWYDKYRPRRLDEVAIHRNKLEGVRKALEAMLSGTSQTRILLLTGPAGCSKSTVVKLLSAELVLQYRSAAREDMHLPARANTYVEYSNDTDAPPLEQFDEFLQQAKYRIGPNLAVALVEELPNVFHEETRHRFNMSLLQWLSMERELPPLVICLTECEINESNRRFGIDTMFVAETLLTKEVLTHHLLSRIKFNAINATLLTKRLRYIAARETQFLPHSKRALVGSYIKELAGRSGDIRSAIAALQFWCHSAGSSGLALGRESSLNYFHAIGKVIYGSKDTTDDETITALTSTGHPGSETFKLGILENYAKFAKGNFPVDTAATVVEALSTCDLLHHRGECLEGYSEFALRSVRYSLLKLKNDRDQHGAAAFPREWAVKGHQARFKLQAEDFGLVEYHKYGQVRRFRDIVLYYGYYTPAIRSLRSFNGKSLRSYIKYLHDQKEIDKLLAMNKESLSIDPSIDFLERLGGDLGHVSLDSSLPPEPSAYSSRKNIYMRAKQLITRREESCPDVFQLDNEEASPEGQEFVRDPIEESGEEDFTLDDDSIYEIFSQKRPVPEQTEGILHDESLSDSDLEDL

SEQ ID NO: 7388 - DNA, 1986 bp, Candida glabrata CBS 138
  CDS (1)..(1986)
atggatatttcagggaagagtacacctgttagaacaccgtctagggccagctcgccggtgaagatcagtcagttgtttagaccgcgaagcctacggaagaccttggaacagttagaaagcacatctaactataaccatgtaacacaagagaatacagatggcgcctggtatataacttgttcccctcgaaacattgacgaggtagctttgcataaaaggaagctcgctgatgtgaaggaggctttcctgtcaatgctccaaagtaactcgagtatgcaaagaccacggatattattattaactggaccaagtggatgctctaaaagtacagttattaaattactggcagagcagtatataccaaatatcaggaaggagtatctaacggctggaccgtataactactccacgacagataataggaaggtgataaacgaatataataataatagtaatttaattgggcaatcccatatggatagctttgcagaatatttgagacatgcaaagtatttgacgggacgcaatttgtcattaatgttagttgaagacttaccgaacgttactcataaagaaactagaagagaatttcagaaacttttattacaatggttgtatagtcctgaagctttactaccacctctaataatttgtttgactgaatgtgaacttaaacccgaaaacgataataagaatttcaattatatcggaacagattacttatttacagcagagactgttttgggtcaacaaatattatcacatccattattaaaacgaataaaatttaatcctataaatgcaaccctgatgaaaaagcatctgaatatagtgagtcatatgaatgctggcacacttaagaacaatggaaaatggaatgatgttagcggttatattagtgatgttgcaaaaaatacaggagatattagatcaggtatctcaaacttacaattttgggcttgtagctcatctaataataaaatctccttcttgagagaaaacaatgtttcatactttcatgccattggtaaaataatttacggttcccgtgagtttgacaatgataatgacatgataaataatctcattgcatcaaatactggtacaatatttaatgacaatttcaaattgggtctttttgaaaactacgtcacgtacaataaaggtgatataccactcaccaccgcattatcaataacagacacttttagccagaatgataaactagcgtatgtactggagtcactcgaatatttgattagaagtgttagagacaagttgggagcagtgaaaagtggtgatggtcttttacatgggaaaacatattttccaagagaagggaagataagaaaattgcagcatgttttcaacttctcaatggatgattacaatcttattaacttcaagaaataccaatcatatgagcaatataaaactatcaaattacttatgggttattatggtccgtatatcaggaaaaagagaaactataagaaaaaatctttgaaatatttccttgactctatggaaaaaaattcttctgaatataaagccataatcaatcaaaatttggagacgtttatggtaaacgaagatatagatattttggagaggattggtggtgagctgaagacggtggagacggaactggaattggcgggaggagatgacgaggaaagagaggaacttacttcgataaatagactacaacaggagaggcaaactaaaatggcacttctacaaaaagaagaagatcaaagtaatgaaatagatacatttggtggtgacgaaatattgaacactaactttggatttgaggaaaatattgaggattcatcggacaatgaaactgaaaatatcgaacttgatgatgatgcagataactcattgattgagtttttatctcagcaaccaccaaaagttgtagagagatcacaagacaaaattgatgataatctttctgattcggatcttgatgacctataa

SEQ ID NO: 7389 - protein, 661 aa, Candida glabrata CBS 138
MDISGKSTPVRTPSRASSPVKISQLFRPRSLRKTLEQLESTSNYNHVTQENTDGAWYITCSPRNIDEVALHKRKLADVKEAFLSMLQSNSSMQRPRILLLTGPSGCSKSTVIKLLAEQYIPNIRKEYLTAGPYNYSTTDNRKVINEYNNNSNLIGQSHMDSFAEYLRHAKYLTGRNLSLMLVEDLPNVTHKETRREFQKLLLQWLYSPEALLPPLIICLTECELKPENDNKNFNYIGTDYLFTAETVLGQQILSHPLLKRIKFNPINATLMKKHLNIVSHMNAGTLKNNGKWNDVSGYISDVAKNTGDIRSGISNLQFWACSSSNNKISFLRENNVSYFHAIGKIIYGSREFDNDNDMINNLIASNTGTIFNDNFKLGLFENYVTYNKGDIPLTTALSITDTFSQNDKLAYVLESLEYLIRSVRDKLGAVKSGDGLLHGKTYFPREGKIRKLQHVFNFSMDDYNLINFKKYQSYEQYKTIKLLMGYYGPYIRKKRNYKKKSLKYFLDSMEKNSSEYKAIINQNLETFMVNEDIDILERIGGELKTVETELELAGGDDEEREELTSINRLQQERQTKMALLQKEEDQSNEIDTFGGDEILNTNFGFEENIEDSSDNETENIELDDDADNSLIEFLSQQPPKVVERSQDKIDDNLSDSDLDDL

SEQ ID NO: 7390 - DNA, 1947 bp, Kluyveromyces lactis NRRL Y-1140
  CDS (1)..(1947)
atgtcaactcctagtttgaaacgatctatcagtgaaatcagcgataggataagcagagcatccccaagaaaggataagaaggtgaaacgatcatctacgtcggttccttcctttccttacacgaatttggatcatgtggatttgacacgacctagtggagaacggacgttgccaagtgagctgcaatggtatgacaaatttagtccgaagagagttgatgacatcgcattgcataagaagaagatagaggaagtacggtattatttagagggtatggtctcagggaaatcagatgaacggattcttctgttaagtgggcctgcaggttgttctaaaagtacttgtgttaagcttataagcgatgagatagtgcctcgttatagagctacgtcaggactcacagtgagtggaagggaagttccgaattttacagaatatcttacagatatgagtagcgtttcaccatctgagtcgtttgatgattttttgcttcaatctaagtacttaatcggtaggaatttgtcagtacttcttgtcgaagatctgccgaatgttttccacgagtcaacgttgaaaaggttcagggagagtattctctcgtggctctttgcttctgatcgtctaccaccactggtgatttgtcttactgaatgtcaactactggactcgaattctactaattcatcatttggaatagattctaccttcatttcagaaacaatcttgggcaaagatatcttgatgcacccgttgttgcatcgaattaagtttaatcccatcaatgcaacattaatgacgaagcatttaaagcagataatacagaaagttagaagagaaatcccctcagagaaataccaaagaagtggcactttcattaagaaccttgcatctagtacaggtgatattcgatctggcatcgcggcattacaattctggtgcacttctagctttgatgaaactaatagtattttcacgagagaaagttcaacaagttatttccatggtattggtaaggtaatatatggatcgaaggataatgaaaatgataggtatatgataaatgagcttgttgacggcggaacaattgccaatgacacgttcaaattgggtatcctggagaatttctctaaattaaacaaatcacagttcccgctgcactatgctgcagatgttgtggacacattgagtataacggacacactacgacctctagaagaagaacctctgtattattgtcttgggaaagttagaaatatttctagcgatgtgaaaagttccaatcacagcgtacatggtcaagcaaactttccaagagagtataagatggttcaggaacaaaagaggtttcaatttcaattgcaggatttcattgctgttgaattttacaaataccactccttgtggtccaccaaagacgcggttctttatgggagttattttggtcctgaaatacgtaaattcctatcatttaaggcgaagtctttgaaatattatattgattcgttgaaacctaccacagaacaatataatgattatatgtctaagtataggagattattgacgatagacgatcttgacatcttggaaagagttggtggtgaaatgaggatgatgcatgcaacttctgaattaacgactagtttagatgattctaagagcgaaaatttagcattaaccaatgaacggaacttggaaaaactgaaatctttgcagaagcagtcgctcctagacgaggacccctctactttaccagataaccatgatttcaaagatgatccgatagtggattcagacagcgagccagctatcggtctggaagtagaagagggtgactctgaactttacgaaattttgtcccaaaggccaaaacaaacgaagttcaatggcactcagaactcaattaatgaagacgttcctctatctgattctgatatagagaacctatag

SEQ ID NO: 7391 - protein, 648 aa, Kluyveromyces lactis NRRL Y-1140
MSTPSLKRSISEISDRISRASPRKDKKVKRSSTSVPSFPYTNLDHVDLTRPSGERTLPSELQWYDKFSPKRVDDIALHKKKIEEVRYYLEGMVSGKSDERILLLSGPAGCSKSTCVKLISDEIVPRYRATSGLTVSGREVPNFTEYLTDMSSVSPSESFDDFLLQSKYLIGRNLSVLLVEDLPNVFHESTLKRFRESILSWLFASDRLPPLVICLTECQLLDSNSTNSSFGIDSTFISETILGKDILMHPLLHRIKFNPINATLMTKHLKQIIQKVRREIPSEKYQRSGTFIKNLASSTGDIRSGIAALQFWCTSSFDETNSIFTRESSTSYFHGIGKVIYGSKDNENDRYMINELVDGGTIANDTFKLGILENFSKLNKSQFPLHYAADVVDTLSITDTLRPLEEEPLYYCLGKVRNISSDVKSSNHSVHGQANFPREYKMVQEQKRFQFQLQDFIAVEFYKYHSLWSTKDAVLYGSYFGPEIRKFLSFKAKSLKYYIDSLKPTTEQYNDYMSKYRRLLTIDDLDILERVGGEMRMMHATSELTTSLDDSKSENLALTNERNLEKLKSLQKQSLLDEDPSTLPDNHDFKDDPIVDSDSEPAIGLEVEEGDSELYEILSQRPKQTKFNGTQNSINEDVPLSDSDIENL

SEQ ID NO: 7392 - DNA, 1815 bp, Debaryomyces hansenii CBS767
  CDS (1)..(1815)
atgtacaataaacgtaatcgagagaggaaagatgatgaaaatagactatcgaagactgaggatgtaagtgatgaaagtataagcgaatttgaggcgtctgaggaattcattccctctaaaagacaaagaaaacagacatgtacggatacctttcagcagcaatggatagataagtatactccaactagatccgaagacatatgtataaatccaaggaagttgaaagaggttaaggaaacattatcgaatatgatatccggaatagatcctaccaagttacttattcttacagggccgtcgggaagctctaaatcaactactataaaagttttggcaaatgagatcattcctcgttcagcgacaagtaataactttgaatcgtacatgacgagacaagaatctactctgcatgataattggattgagtatattgacaccatagtcactgatacaccacaatcgaaacaattcagcgaattcttgaacgatgcaaggtatagaatagggtcaaacttatctataatactcatcgaggatttaccaaatatattccatgcagatatcttgtcgaagttcagaggtaatctaaacgaatgggttaatacagatcaccaattaccgccattagtgctctgtttaagtgaaatagaactaacgcaagaacaaagaaatcaagattattttaatatcgaaaataacttgactgtggataccttattgggaagagagtttttaagtcaacgtgggaaggtcaagcaaattaaattcaattcgattgcagcttcatttatgaaaaagtcgatgaataaaatcgttaatgaagaaagaagggcgtttaacggtatcgcaaagactagcattaacgacttttcaagtcacataattgaaagtggtgatatacgatcggcgatatcaaatttacaattctggtctgggttatctaagaaaggaaggggagaaattttcaattcattacgagagaatcaactaaatttatttcatgctataggaaaagtgatatattcaagctctaaataccgggatttagatgaggaagaatcagattacctatcgataaagactgtattagacaattatggaaataattcactattaaatttgtcgatactagagaattatcatatatacaatgacctgaattatgggatagagattgcgagcgaaattactaacaacctaagcataagtgacattttgaataactttgatgaaggtaaagaaacaggtatacgatccactcggaatcaattacgtagggttagcgggagacaatcgcaacgtatgaatgttaagtttcctcgccatttcaagatgataaaagaatataataaaactaagcgagaaattggtatgtatcgaagtgtagttaatgaatgccacacttcatttaacgatttgaatttaatcgatggctattatttgccgctcatttataacaagcaacaacacaataaattaaaatacggcaggctaggtggactgttcaaacaaatcgtatctgacggagatttgcctgtattggaagaagatatagcctgcctgtatgcacaggaccaattccagagagatattgacgataaaatgaaaacagtacaagaagatgaagaaatattgagcgaccccatagagacggacatcgattcagatgacgagatattcaacgactcgatcgacgaaacccaaatccaccgattagtgacgcagtctcgaagccaaacgcacaaattggagtcggaggatgaatttctgtcggaccccgagctagaccaactcatcctggctaaaaactactag

SEQ ID NO: 7393 - protein, 604 aa, Debaryomyces hansenii CBS767
MYNKRNRERKDDENRLSKTEDVSDESISEFEASEEFIPSKRQRKQTCTDTFQQQWIDKYTPTRSEDICINPRKLKEVKETLSNMISGIDPTKLLILTGPSGSSKSTTIKVLANEIIPRSATSNNFESYMTRQESTLHDNWIEYIDTIVTDTPQSKQFSEFLNDARYRIGSNLSIILIEDLPNIFHADILSKFRGNLNEWVNTDHQLPPLVLCLSEIELTQEQRNQDYFNIENNLTVDTLLGREFLSQRGKVKQIKFNSIAASFMKKSMNKIVNEERRAFNGIAKTSINDFSSHIIESGDIRSAISNLQFWSGLSKKGRGEIFNSLRENQLNLFHAIGKVIYSSSKYRDLDEEESDYLSIKTVLDNYGNNSLLNLSILENYHIYNDLNYGIEIASEITNNLSISDILNNFDEGKETGIRSTRNQLRRVSGRQSQRMNVKFPRHFKMIKEYNKTKREIGMYRSVVNECHTSFNDLNLIDGYYLPLIYNKQQHNKLKYGRLGGLFKQIVSDGDLPVLEEDIACLYAQDQFQRDIDDKMKTVQEDEEILSDPIETDIDSDDEIFNDSIDETQIHRLVTQSRSQTHKLESEDEFLSDPELDQLILAKNY

SEQ ID NO: 7394 - DNA, 26 bp, Artificial sequence
  primer
atggatagtacgaatttgaacaaacg

SEQ ID NO: 7395 - DNA, 26 bp, Artificial sequence
  primer
ttagagtatttccagatctgaatctg

SEQ ID NO: 7396 - protein, 625 aa, Artificial sequence
  consensus sequence
  Variant (3)..(3): Xaa in position 3 is any amino acid
  Variant (5)..(6): Xaa in position 5 to 6 is any amino acid
  Variant (8)..(13): Xaa in position 8 to 13 is any amino acid
  Variant (15)..(15): Xaa in position 15 is any amino acid
  Variant (17)..(18): Xaa in position 17 to 18 is any amino acid
  Variant (21)..(22): Xaa in position 21 to 22 is any amino acid
  Variant (24)..(26): Xaa in position 24 to 26 is any amino acid
  Variant (28)..(29): Xaa in position 28 to 29 is any amino acid
  Variant (31)..(37): Xaa in position 31 to 37 is any amino acid
  Variant (38)..(40): Xaa in position 38 to 40 is any or no amino acid
  Variant (46)..(46): Xaa in position 46 is any amino acid
  Variant (49)..(49): Xaa in position 49 is any amino acid
  Variant (56)..(57): Xaa in position 56 to 57 is any amino acid
  Variant (59)..(59): Xaa in position 59 is any amino acid
  Variant (61)..(65): Xaa in position 61 to 65 is any amino acid
  Variant (67)..(68): Xaa in position 67 to 68 is any amino acid
  Variant (70)..(99): Xaa in position 70 to 99 is any amino acid
  Variant (100)..(106): Xaa in position 100 to 106 is any or no amino acid
  Variant (108)..(108): Xaa in position 108 is any amino acid
  Variant (112)..(113): Xaa in position 112 to 113 is any amino acid
  Variant (115)..(115): Xaa in position 115 is any amino acid
  Variant (117)..(118): Xaa in position 117 to 118 is any amino acid
  Variant (120)..(120): Xaa in position 120 is any amino acid
  Variant (124)..(125): Xaa in position 124 to 125 is any amino acid
  Variant (127)..(127): Xaa in position 127 is any amino acid
  Variant (136)..(137): Xaa in position 136 to 137 is any amino acid
  Variant (139)..(141): Xaa in position 139 to 141 is any amino acid
  Variant (143)..(146): Xaa in position 143 to 146 is any amino acid
  Variant (148)..(148): Xaa in position 148 is any amino acid
  Variant (151)..(155): Xaa in position 151 to 155 is any amino acid
  Variant (156)..(156): Xaa in position 156 is any or no amino acid
  Variant (169)..(175): Xaa in position 169 to 175 is any amino acid
  Variant (176)..(180): Xaa in position 176 to 180 is any or no amino acid
  Variant (185)..(186): Xaa in position 185 to 186 is any amino acid
  Variant (188)..(189): Xaa in position 188 to 189 is any amino acid
  Variant (192)..(192): Xaa in position 192 is any amino acid
  Variant (194)..(197): Xaa in position 194 to 197 is any amino acid
  Variant (199)..(199): Xaa in position 199 is any amino acid
  Variant (201)..(202): Xaa in position 201 to 202 is any amino acid
  Variant (203)..(203): Xaa in position 203 is any or no amino acid
  Variant (205)..(205): Xaa in position 205 is any amino acid
  Variant (211)..(211): Xaa in position 211 is any amino acid
  Variant (217)..(218): Xaa in position 217 to 218 is any amino acid
  Variant (220)..(220): Xaa in position 220 is any amino acid
  Variant (222)..(223): Xaa in position 222 to 223 is any amino acid
  Variant (225)..(235): Xaa in position 225 to 235 is any amino acid
  Variant (236)..(236): Xaa in position 236 is any or no amino acid
  Variant (238)..(242): Xaa in position 238 to 242 is any amino acid
  Variant (243)..(244): Xaa in position 243 to 244 is any or no amino acid
  Variant (246)..(248): Xaa in position 246 to 248 is any amino acid
  Variant (250)..(252): Xaa in position 250 to 252 is any amino acid
  Variant (258)..(258): Xaa in position 258 is any amino acid
  Variant (260)..(261): Xaa in position 260 to 261 is any amino acid
  Variant (266)..(267): Xaa in position 266 to 267 is any amino acid
  Variant (269)..(276): Xaa in position 269 to 276 is any amino acid
  Variant (277)..(280): Xaa in position 277 to 280 is any or no amino acid
  Variant (283)..(286): Xaa in position 283 to 286 is any amino acid
  Variant (299)..(303): Xaa in position 299 to 303 is any amino acid
  Variant (304)..(306): Xaa in position 304 to 306 is any or no amino acid
  Variant (308)..(309): Xaa in position 308 to 309 is any amino acid
  Variant (310)..(310): Xaa in position 310 is any or no amino acid
  Variant (312)..(313): Xaa in position 312 to 313 is any amino acid
  Variant (315)..(324): Xaa in position 315 to 324 is any amino acid
  Variant (325)..(326): Xaa in position 325 to 326 is any or no amino acid
  Variant (336)..(338): Xaa in position 336 to 338 is any amino acid
  Variant (341)..(347): Xaa in position 341 to 347 is any amino acid
  Variant (349)..(354): Xaa in position 349 to 354 is any amino acid
  Variant (357)..(358): Xaa in position 357 to 358 is any amino acid
  Variant (360)..(360): Xaa in position 360 is any amino acid
  Variant (362)..(365): Xaa in position 362 to 365 is any amino acid
  Variant (367)..(369): Xaa in position 367 to 369 is any amino acid
  Variant (370)..(370): Xaa in position 370 is any or no amino acid
  Variant (372)..(376): Xaa in position 372 to 376 is any amino acid
  Variant (378)..(389): Xaa in position 378 to 389 is any amino acid
  Variant (390)..(392): Xaa in position 390 to 392 is any or no amino acid
  Variant (395)..(397): Xaa in position 395 to 397 is any amino acid
  Variant (402)..(402): Xaa in position 402 is any amino acid
  Variant (404)..(407): Xaa in position 404 to 407 is any amino acid
  Variant (409)..(410): Xaa in position 409 to 410 is any amino acid
  Variant (412)..(416): Xaa in position 412 to 416 is any amino acid
  Variant (418)..(420): Xaa in position 418 to 420 is any amino acid
  Variant (422)..(423): Xaa in position 422 to 423 is any amino acid
  Variant (424)..(424): Xaa in position 424 is any or no amino acid
  Variant (427)..(436): Xaa in position 427 to 436 is any amino acid
  Variant (438)..(439): Xaa in position 438 to 439 is any amino acid
  Variant (443)..(443): Xaa in position 443 is any amino acid
  Variant (445)..(445): Xaa in position 445 is any amino acid
  Variant (448)..(454): Xaa in position 448 to 454 is any amino acid
  Variant (456)..(458): Xaa in position 456 to 458 is any amino acid
  Variant (459)..(488): Xaa in position 459 to 488 is any or no amino acid
  Variant (490)..(492): Xaa in position 490 to 492 is any amino acid
  Variant (494)..(494): Xaa in position 494 is any amino acid
  Variant (497)..(506): Xaa in position 497 to 506 is any amino acid
  Variant (508)..(539): Xaa in position 508 to 539 is any amino acid
  Variant (540)..(559): Xaa in position 540 to 559 is any or no amino acid
  Variant (561)..(562): Xaa in position 561 to 562 is any amino acid
  Variant (566)..(567): Xaa in position 566 to 567 is any amino acid
  Variant (569)..(576): Xaa in position 569 to 576 is any amino acid
  Variant (577)..(586): Xaa in position 577 to 586 is any or no amino acid
  Variant (588)..(591): Xaa in position 588 to 591 is any amino acid
  Variant (593)..(594): Xaa in position 593 to 594 is any amino acid
  Variant (597)..(597): Xaa in position 597 is any amino acid
  Variant (598)..(598): Xaa in position 598 is any or no amino acid
  Variant (600)..(606): Xaa in position 600 to 606 is any amino acid
  Variant (607)..(613): Xaa in position 607 to 613 is any or no amino acid
  Variant (615)..(616): Xaa in position 615 to 616 is any amino acid
  Variant (623)..(624): Xaa in position 623 to 624 is any amino acid
WYXKXXPXXXXXXAXHXXKLXXVXXXLXXMXXXXXXXXXXRILLLXGPXGCSKSTXXKXLXXXXXPXXRXXXXXXXXXXXXXXXXXXXXXXXXXXXXXXXXXXXXXFXEFLXXAXYXXGXNLSXXLXEDLPNVFHXXTXXXFXXXXLXWLXXXXXXLPPLVICLTECEXXXXXXXXXXXXFGIDXXFXXETXLXXXXLXHXXXLXRIKFNXINATLXXKXLXXIXXXXXXXXXXXXKXXXXXXXIXXXAXXXGDIRSXIXXLQFWXXSXXXXXXXXXXXXREXXXXYFHAIGKVIYGSXXXXXXXXDXXXIXXLXXXXXXXXXXXXFKLGILENYXXXNKXXXXXXXAXXXXXXLSXXDXLXXXXEXXXXYXXXXXRXXXXXXXXXXXXXXXHGXXXFPREXKXXXXQXXFXXXXXDXXXVXXXKYXXXXXXXXXXLXXGYYXPXIRXXXXXXXKXXXXXXXXXXXXXXXXXXXXXXXXXXXXXXXXXDXXXRXGGXXXXXXXXXXLXXXXXXXXXXXXXXXXXXXXXXXXXXXXXXXXXXXXXXXXXXXXXXXXXXXXFXXDPIXXSXXXXXXXXXXXXXXXXXXDXXXXEXXSQXXPXXXXXXXXXXXXXXDXXLSDSDLXXL

SEQ ID NO: 7397 - protein, 42 aa, Artificial sequence
  protein pattern
  Variant (2)..(3): Xaa in position 2 to 3 is any amino acid
  Variant (6)..(6): Xaa in position 6 is any amino acid
  Variant (7)..(7): Xaa in position 7 is Asp, Gly or Gln
  Variant (8)..(8): Xaa in position 8 is Ala or Ser
  Variant (9)..(9): Xaa in position 9 is Lys or Arg
  Variant (11)..(11): Xaa in position 11 is any amino acid
  Variant (12)..(12): Xaa in position 12 is Ile or Val
  Variant (13)..(14): Xaa in position 13 to 14 is any amino acid
  Variant (17)..(17): Xaa in position 17 is Ala or Ser
  Variant (18)..(18): Xaa in position 18 is Ile, Leu or Val
  Variant (19)..(19): Xaa in position 19 is Ala, Ile or Leu
  Variant (21)..(21): Xaa in position 21 is Ile or Val
  Variant (23)..(23): Xaa in position 23 is Asp or Glu
  Variant (27)..(27): Xaa in position 27 is Ile or Val
  Variant (30)..(30): Xaa in position 30 is any amino acid
  Variant (31)..(31): Xaa in position 31 is Asp, Glu or Ser
  Variant (32)..(34): Xaa in position 32 to 34 is any amino acid
  Variant (35)..(35): Xaa in position 35 is Lys or Arg
  Variant (37)..(39): Xaa in position 37 to 39 is any amino acid
  Variant (40)..(40): Xaa in position 40 is any or no amino acid
  Variant (42)..(42): Xaa in position 42 is Asn, Gln or Ser
FXXFLXXXXYXXXXNLXXXLXEXLPNXFHXXXXXXFXXXXLX

SEQ ID NO: 7398 - protein, 28 aa, Artificial sequence
  protein pattern
  Variant (5)..(5): Xaa in position 5 is Ser or Thr
  Variant (8)..(8): Xaa in position 8 is Ala or Ser
  Variant (15)..(15): Xaa in position 15 is Cys or Val
  Variant (16)..(16): Xaa in position 16 is Ile or Val
  Variant (18)..(18): Xaa in position 18 is any amino acid
  Variant (19)..(19): Xaa in position 19 is Ile or Leu
  Variant (20)..(20): Xaa in position 20 is Ala or Ser
  Variant (21)..(23): Xaa in position 21 to 23 is any amino acid
  Variant (24)..(24): Xaa in position 24 is Ile or Val
  Variant (25)..(25): Xaa in position 25 is Leu or Pro
  Variant (26)..(27): Xaa in position 26 to 27 is any amino acid
ILLLXGPXGCSKSTXXKXXXXXXXXXXR

SEQ ID NO: 7399 - protein, 20 aa, Artificial sequence
  protein pattern
  Variant (2)..(4): Xaa in position 2 to 4 is any or no amino acid
  Variant (9)..(9): Xaa in position 9 is Ala or Gly
  Variant (11)..(11): Xaa in position 11 is Ala, Ser or Thr
  Variant (12)..(12): Xaa in position 12 is Ala, Asn or Thr
  Variant (17)..(17): Xaa in position 17 is Ala or Cys
  Variant (18)..(18): Xaa in position 18 is any amino acid
  Variant (20)..(20): Xaa in position 20 is Ala or Ser
GXXXDIRSXIXXLQFWXXSX

SEQ ID NO: 7400 - protein, 19 aa, Artificial sequence
  protein pattern
  Variant (2)..(2): Xaa in position 2 is any amino acid
  Variant (3)..(4): Xaa in position 3 to 4 is any or no amino acid
  Variant (6)..(7): Xaa in position 6 to 7 is any or no amino acid
  Variant (11)..(11): Xaa in position 11 is Ala or Gly
  Variant (15)..(15): Xaa in position 15 is Ile or Val
  Variant (17)..(17): Xaa in position 17 is His or Tyr
EXXXSXXYFHXIGKXIXGS

SEQ ID NO: 7401 - protein, 21 aa, Artificial sequence
  protein pattern
  Variant (2)..(3): Xaa in position 2 to 3 is any amino acid
  Variant (5)..(5): Xaa in position 5 is any amino acid
  Variant (11)..(11): Xaa in position 11 is Ala or Pro
  Variant (14)..(14): Xaa in position 14 is Ala or Ser
  Variant (17)..(17): Xaa in position 17 is Leu or Met
  Variant (18)..(18): Xaa in position 18 is any amino acid
  Variant (20)..(20): Xaa in position 20 is His or Arg
HXXLXRIKFNXINXTLXXKXL

SEQ ID NO: 7402 - protein, 29 aa, Artificial sequence
  protein pattern
  Variant (2)..(3): Xaa in position 2 to 3 is any amino acid
  Variant (4)..(5): Xaa in position 4 to 5 is any or no amino acid
  Variant (7)..(8): Xaa in position 7 to 8 is any or no amino acid
  Variant (10)..(12): Xaa in position 10 to 12 is any amino acid
  Variant (13)..(13): Xaa in position 13 is Asp or Glu
  Variant (14)..(14): Xaa in position 14 is Asp, Glu or Gln
  Variant (15)..(15): Xaa in position 15 is Ile or Val
  Variant (16)..(16): Xaa in position 16 is Ala or Cys
  Variant (17)..(17): Xaa in position 17 is Ile or Leu
  Variant (18)..(20): Xaa in position 18 to 20 is any amino acid
  Variant (22)..(22): Xaa in position 22 is Ile or Leu
  Variant (23)..(23): Xaa in position 23 is Glu or Lys
  Variant (24)..(24): Xaa in position 24 is Asp, Glu or Gly
  Variant (26)..(28): Xaa in position 26 to 28 is any amino acid
WXXXXKXXPXXXXXXXXXXXKXXXVXXXL

SEQ ID NO: 7403 - protein, 31 aa, Artificial sequence
  protein pattern
  Variant (3)..(3): Xaa in position 3 is any amino acid
  Variant (4)..(4): Xaa in position 4 is Ala, Thr or Val
  Variant (5)..(5): Xaa in position 5 is any amino acid
  Variant (10)..(10): Xaa in position 10 is any amino acid
  Variant (11)..(12): Xaa in position 11 to 12 is any or no amino acid
  Variant (14)..(15): Xaa in position 14 to 15 is any amino acid
  Variant (16)..(17): Xaa in position 16 to 17 is any or no amino acid
  Variant (19)..(20): Xaa in position 19 to 20 is any amino acid
  Variant (22)..(22): Xaa in position 22 is any amino acid
  Variant (23)..(23): Xaa in position 23 is Phe, Leu or Val
  Variant (24)..(24): Xaa in position 24 is Gln or Ser
  Variant (25)..(25): Xaa in position 25 is any amino acid
  Variant (26)..(26): Xaa in position 26 is Asp, Glu or Gln
  Variant (28)..(28): Xaa in position 28 is Phe, Trp or Tyr
  Variant (29)..(30): Xaa in position 29 to 30 is any amino acid
  Variant (31)..(31): Xaa in position 31 is Ile or Val
HGXXXFPREXXXKXXXXQXXFXXXXXDXXXX

SEQ ID NO: 7404 - protein, 51 aa, Artificial sequence
  protein pattern
  Variant (5)..(5): Xaa in position 5 is any or no amino acid
  Variant (7)..(7): Xaa in position 7 is any or no amino acid
  Variant (10)..(10): Xaa in position 10 is Phe or Tyr
  Variant (11)..(11): Xaa in position 11 is Ala, Asn, Ser or Val
  Variant (12)..(13): Xaa in position 12 to 13 is any amino acid
  Variant (14)..(14): Xaa in position 14 is Ala or Asn
  Variant (16)..(16): Xaa in position 16 is Gly or Ser
  Variant (17)..(17): Xaa in position 17 is Asp, Glu, Asn or Gln
  Variant (18)..(18): Xaa in position 18 is Phe or Ile
  Variant (19)..(19): Xaa in position 19 is Pro or Ser
  Variant (20)..(20): Xaa in position 20 is Ile, Leu or Val
  Variant (21)..(22): Xaa in position 21 to 22 is any amino acid
  Variant (24)..(24): Xaa in position 24 is any amino acid
  Variant (25)..(25): Xaa in position 25 is Asp, Ser or Thr
  Variant (26)..(26): Xaa in position 26 is Ile or Val
  Variant (27)..(27): Xaa in position 27 is Thr or Val
  Variant (28)..(28): Xaa in position 28 is Asp or Glu
  Variant (29)..(29): Xaa in position 29 is Ala, Cys or Thr
  Variant (30)..(30): Xaa in position 30 is Phe or Leu
  Variant (32)..(32): Xaa in position 32 is any amino acid
  Variant (33)..(33): Xaa in position 33 is Cys, Asn or Thr
  Variant (35)..(35): Xaa in position 35 is any amino acid
  Variant (36)..(36): Xaa in position 36 is Leu or Met
  Variant (37)..(40): Xaa in position 37 to 40 is any amino acid
  Variant (42)..(44): Xaa in position 42 to 44 is any amino acid
  Variant (45)..(45): Xaa in position 45 is any or no amino acid
  Variant (47)..(50): Xaa in position 47 to 50 is any amino acid
  Variant (51)..(51): Xaa in position 51 is Leu or Val
FKLGXLXENXXXXXKXXXXXXXAXXXXXXXSXXDXXXXXXEXXXXYXXXXX

SEQ ID NO: 7405 - protein, 12 aa, Artificial sequence
  protein pattern
  Variant (5)..(5): Xaa in position 5 is Ile or Val
  Variant (8)..(8): Xaa in position 8 is Ile or Leu
  Variant (12)..(12): Xaa in position 12 is Glu or Gln
LPPLXICXTECX

SEQ ID NO: 7406 - protein, 29 aa, Artificial sequence
  protein pattern
  Variant (3)..(3): Xaa in position 3 is any amino acid
  Variant (4)..(4): Xaa in position 4 is Ala, Gln or Ser
  Variant (5)..(6): Xaa in position 5 to 6 is any amino acid
  Variant (7)..(7): Xaa in position 7 is Gln, Arg or Ser
  Variant (8)..(8): Xaa in position 8 is any amino acid
  Variant (9)..(9): Xaa in position 9 is Lys or Arg
  Variant (10)..(10): Xaa in position 10 is Asp, Asn or Thr
  Variant (11)..(11): Xaa in position 11 is Ala or Ile
  Variant (12)..(12): Xaa in position 12 is any amino acid
  Variant (14)..(14): Xaa in position 14 is any amino acid
  Variant (15)..(15): Xaa in position 15 is any or no amino acid
  Variant (17)..(17): Xaa in position 17 is any or no amino acid
  Variant (19)..(19): Xaa in position 19 is Phe or Tyr
  Variant (20)..(20): Xaa in position 20 is Ala, Gly or Thr
  Variant (22)..(22): Xaa in position 22 is any amino acid
  Variant (25)..(27): Xaa in position 25 to 27 is any amino acid
  Variant (28)..(28): Xaa in position 28 is Asn or Ser
  Variant (29)..(29): Xaa in position 29 is Phe or Tyr
KYXXXXXXXXXXLXXGXYXXPXIRXXXXX

SEQ ID NO: 7407 - DNA, 1629 bp, Saccharomyces cerevisiae
  CDS (1)..(1629)
atgtcgttactgagactgtggaacaaagaatcaagggcaccatcaaaaataaagagtcatggtattgttggcagttacggcaacagcatgctggcccataacaacgtgaagcaatttcgtatagacatagacgaaccgcatagagtatggaaaccgaatgaaagcataaccggagaagcggtcattgacataaagagagacataactaacgtagcgatcaaattatcgctagtatgtgaggttcgcgtgaaaacggggaacagtccaacctccaagaataagagaattgagaaaaccttagagaagtcgacgtttctttatggacaggactacgtaaagacagctttttcggctaaggaaaagaaaccgcatgttgacaaaaccaccattctcaatggtttaagcaagggggaacacaggtttccctttaggatacgaataccacgaggcagaggaatgttgagctctataaagttcgaaaggggctcgataacatacttcctctcttgcactttagaatccctcaacaacatcaacggattaaaaaaaccggaagcaagatgcgaacgtgagtttgcagtcatagttccgctggacgtctcgaggctgcccaagccgaaaactaagacagtggttttacaatcagcatctatggtccaaaacaaaaagaacaaatctacagaggacgaatcctcatcgtatacacaattaactcaaaagtctactacttctaattcttctagcagttcagtaaactccaagacgtcccccttaccaaataaaacggtgactatatccgtagacataccgcaggctggattcatgattggtgaaattatccctatagacgttaagattgaccactataagcctttctatgcccctgcgggtctcaccaccactttggtgaggatatgtagggtgggcggtgcaggcaaagatgatcctatggagactttcagaaaagatatatgtcagagtatctctcctatatatattaaccctgaaacgttgcagtttcaatctagagtttatctgaaagtgccccttgatgcattttcgacccttactactgtgggaaaatttttctccttccaatactatatcgaggttatggttaacttatcaaaaaaaaacgtggtttacacagaatctaatagaataataggaactcctattggagaacaaaatggcttgggcgtagagaataatatcaaccgtatccaaaggaaaatgctacgtatggtcaatccagaaacgttggagaacgattctgagggttatgaatccagtatatttttcaaagatatggtaaatgtggaaaagctaaagagactgaggaatgtaactggtatgtccatagaaaccgtcataggaacgacgagatccgaacagcagcaatctgatgcaagcatcccatcccaatcctcaatcacggctcctcaaaattctccatcgaatttaagagattggttggccccattaaatgcatatgatagtgacgatgttccagttccaaagtattcgccaaatgataaagtcagtgtaccgtcggaagacaaacaagaacttgaacaaaaaagactacaacagttagaaagcgatcctcccccttgtgatgactattaa

SEQ ID NO: 7408 - protein, 542 aa, Saccharomyces cerevisiae
MSLLRLWNKESRAPSKIKSHGIVGSYGNSMLAHNNVKQFRIDIDEPHRVWKPNESITGEAVIDIKRDITNVAIKLSLVCEVRVKTGNSPTSKNKRIEKTLEKSTFLYGQDYVKTAFSAKEKKPHVDKTTILNGLSKGEHRFPFRIRIPRGRGMLSSIKFERGSITYFLSCTLESLNNINGLKKPEARCEREFAVIVPLDVSRLPKPKTKTVVLQSASMVQNKKNKSTEDESSSYTQLTQKSTTSNSSSSSVNSKTSPLPNKTVTISVDIPQAGFMIGEIIPIDVKIDHYKPFYAPAGLTTTLVRICRVGGAGKDDPMETFRKDICQSISPIYINPETLQFQSRVYLKVPLDAFSTLTTVGKFFSFQYYIEVMVNLSKKNVVYTESNRIIGTPIGEQNGLGVENNINRIQRKMLRMVNPETLENDSEGYESSIFFKDMVNVEKLKRLRNVTGMSIETVIGTTRSEQQQSDASIPSQSSITAPQNSPSNLRDWLAPLNAYDSDDVPVPKYSPNDKVSVPSEDKQELEQKRLQQLESDPPPCDDY

SEQ ID NO: 7409 - DNA, 1647 bp, Ashbya gossypii
  CDS (1)..(1647)
atgcacatgaggctattttccaagttcaagcttcacggttcgtcggccgcatctgaggaagtgtttggtggaaagttcagttatacgtctgcggtcgccgacttttacatcgaactaggggatgcgcacaagatctggaagccccgggatgtggtgaccggtgaggtggtgctgacgctgcgcaagccgctgcgtggggtgagcttgcggatgtccctggagggcaatctgcgagtacagacgggcagcggtgctacgtcgcgcctgaagttccagcgaacgctgttcagcaaaagctcgatgatctacggcgtcgagcagccagaagacgctgagcaagagggacacgggctgacacgcggcgatcaccgtttcccgttccgaatgcgggtgccctctaaaaacatatacacatcgattgccttcgagaaggggtccatctcatatgctgtggggtgcgtgttagagacgcgcagcggggcgcagaggctgtcttcctgttcgcgccagatatctgttctagtccctgtggacgttagcctgctgccgaagctacggccgaagactgtggtcctacagtccccgcaactcctacgcagcgcgaaagcgaattacccagaacatgatacagcgtcttctctcacgaagcgcaccactgcctcggctaactccaattcctccgtgacaaccgtgtgctcttcgaagactgtgactatatctgtcgatctgccggaatccggatacgttattggggacaccattaggatcaaagtccatatccagcactacaaagagtataggaattctgcggggcttattgcaacgcttgtccgcatttgccgtgttcacagcaccggcaccgatgacccgatggagactttccgcaaggacatctgccaatgtgttgcgcctctctacgtcgagcccgagacacatacctgctccgtcgggatgaacctcaatgtcccgctggatgcgtttccaacgctagttgtccccaaccaaggcttcaccttccaatattacattgaagttctcgcaaatctgtcgtcgaagaacattgtttacacagagtccaaccgggtcataggtggcagcggcatggccgacattcccatgcctggctccaagctgcatcctgtgaagaagatcagcatgctccctctcaagctgcaaggccctctgggcaagcaggacacaaacatcgatgagtcactgatcttcttccaagacatggtgaatgtcgataaactcaaacgtctgcgcaatgtaacaggcacttcgatagaagttgtcattggaacacatcggaacaactccgtccagcaagcgcggcagtcctgcccgggcagtcccgtaggcggctctgactccacgatgatgtcagagcaatctgctgccggaacatctctaccctcctcagtactggacatctacgaccaactagctaataggctgtcgagtagcgttggagatcagcttctccgttacggcatgtctccagattctggcccccattcagcgaacgatgagctgccgaggtatacgcccaacgtcgattacatggtaactgaagataaacgtgaacttgaacaaaggaagttaaaagagctagagagcgaaccatccgtggaagaagaacagtga

SEQ ID NO: 7410 - protein, 548 aa, Ashbya gossypii
MHMRLFSKFKLHGSSAASEEVFGGKFSYTSAVADFYIELGDAHKIWKPRDVVTGEVVLTLRKPLRGVSLRMSLEGNLRVQTGSGATSRLKFQRTLFSKSSMIYGVEQPEDAEQEGHGLTRGDHRFPFRMRVPSKNIYTSIAFEKGSISYAVGCVLETRSGAQRLSSCSRQISVLVPVDVSLLPKLRPKTVVLQSPQLLRSAKANYPEHDTASSLTKRTTASANSNSSVTTVCSSKTVTISVDLPESGYVIGDTIRIKVHIQHYKEYRNSAGLIATLVRICRVHSTGTDDPMETFRKDICQCVAPLYVEPETHTCSVGMNLNVPLDAFPTLVVPNQGFTFQYYIEVLANLSSKNIVYTESNRVIGGSGMADIPMPGSKLHPVKKISMLPLKLQGPLGKQDTNIDESLIFFQDMVNVDKLKRLRNVTGTSIEVVIGTHRNNSVQQARQSCPGSPVGGSDSTMMSEQSAAGTSLPSSVLDIYDQLANRLSSSVGDQLLRYGMSPDSGPHSANDELPRYTPNVDYMVTEDKRELEQRKLKELESEPSVEEEQ

SEQ ID NO: 7411 - DNA, 1950 bp, Candida glabrata
  CDS (1)..(1950)
atggcgttcatcaagctgctcaggaagaccaaggacgagccctcgcggctggcgaaagcggtgcgtcacctacaagttacgctggatgacccccatgcgacatatagacctagggacgtactgtttgggcaggtactactggacttgaagcagaacgtggcaaatgtgagggtacggctgacatttatcggcgaggtgaagtccaagtacggcacggcgcacaagcggggtggttgcttcatggagaagtcgacagtgctatatggagacgacggtgacttggatacagacgaaatggagcctacagtcaatgggctcacaaaaggtgtgcacaagttcccctttagtatacgagtaccgagcggcaaaaagatacattcatctataaagtttgagcgaggttccgtttcttaccatctgatggcagtttttgagagtgttgtggagccagagggtgttagcgcaaaggttcgcacgaaagttaatatactcgtgccaatagatgtttacagatatagtgatgtagttgtcaagaccatactgctgaactcgaatgctaagagtaaatctcacaaaataaatagcaacgaccacaatggtcatctaaatggtgatgtgactactcttactactagcgatgggtcaagcgaaggtacaaagaaaactatttcggaatcgcaaataattaacaatttgtcacaaaggcaagttctccagaaatcaaaatctgaaggttcaaaatccgagagcattcaggcatctacaggccagataaatcagcttcctgaaacatcatcacaagtatcttataatgctgtgctcaccaatggcatgaacagggatgcagataatcaaactgttaaaattgatgtccgcttaccgcattcaggttttgtgcagggtgaatacattcccctaactatcaatgttagtcactatcgggaatattaccaccctgctggagttattgcaactttagtgagggtatgcaaagttgctagtggcagaaaggaggatacaaaggaaatttatagaaaagatatatgccagagtatttctccattgcttatagaatccaataaactggaaaataccatttctacttatctaaaagtaccgaatgacattattgcatcaatgactagcctgccagaacattttacttttcaatatttcgttgaagtggtaataaacttatccaggaagcttgaaatatattcccattcccagaaaccgttatcgtatatactggagaagcaaaaaacaaaaaaacctctgacgataccacgagatttgaaagagctgaacttaccggcatccgtcaatgaaaatggcgcatgggaagtaccacgaccttctcttaataacgaaaagtcgaatggtggtatagacagttcgagaaatgacttccagagtaaatttggttcagcattcaataagtctacattgttcggtttaaaaaatattgatgaaattcatgtggccgaacagacaataatatttgatgacatggttgatgtagaaagattgaaacgcatgagaaatgttgcaggtctctccattgaaacaataataggcaataagaggtcatctcctgcaattgatttagctaagctagagatatcaaaattatctcagggtaaggtcatgaaatcgaatggaacatcgaaaaacacaagctcttcgggttcgatagaatcgaacagtattgtgcgttatagatacatttctttcgaacaagatactcagtcatctactgactcctatgacgaagatataacgaagatgggtaatcagttaaacgaatggctgtcacctgctaatgcctatgaggaatattatccggtacccgaatacagcgcaaatgaaaatgtctttgcttctgaagataagcaggaattagaatacaagcgtttgcacgagcttgagagtgatcctcctcaattttaa

SEQ ID NO: 7412 - protein, 649 aa, Candida glabrata
MAFIKLLRKTKDEPSRLAKAVRHLQVTLDDPHATYRPRDVLFGQVLLDLKQNVANVRVRLTFIGEVKSKYGTAHKRGGCFMEKSTVLYGDDGDLDTDEMEPTVNGLTKGVHKFPFSIRVPSGKKIHSSIKFERGSVSYHLMAVFESVVEPEGVSAKVRTKVNILVPIDVYRYSDVVVKTILLNSNAKSKSHKINSNDHNGHLNGDVTTLTTSDGSSEGTKKTISESQIINNLSQRQVLQKSKSEGSKSESIQASTGQINQLPETSSQVSYNAVLTNGMNRDADNQTVKIDVRLPHSGFVQGEYIPLTINVSHYREYYHPAGVIATLVRVCKVASGRKEDTKEIYRKDICQSISPLLIESNKLENTISTYLKVPNDIIASMTSLPEHFTFQYFVEVVINLSRKLEIYSHSQKPLSYILEKQKTKKPLTIPRDLKELNLPASVNENGAWEVPRPSLNNEKSNGGIDSSRNDFQSKFGSAFNKSTLFGLKNIDEIHVAEQTIIFDDMVDVERLKRMRNVAGLSIETIIGNKRSSPAIDLAKLEISKLSQGKVMKSNGTSKNTSSSGSIESNSIVRYRYISFEQDTQSSTDSYDEDITKMGNQLNEWLSPANAYEEYYPVPEYSANENVFASEDKQELEYKRLHELESDPPQF

SEQ ID NO: 7413 - DNA, 2349 bp, Debaryomyces hansenii
  CDS (1)..(2349)
atgagaagagctgtatcaaaaataatcccaaacggacctcctaggttcctacagagtgggtcattgctatcgggagatacaaacttcaagtatagaatagatttcaattccgtggacgagttttatatcctgctcgcagatccccatagatcctggcttcccggagacgaaatatcaggacaaataatatttatatctaaaaaagatcttgcaaacatagtaataacgttgtcgttgatagggagtgtgaagataaatgcatcatcacactctaaattacgaccagttaaagagctattatttcatcatacaataaaaatttatggagacgaaaatagtggcaataataacgaaaacggagaagagttcagtaatggattgtttaaaggtgaacataggtttccatttattgttaagttgcctaacaaacgagtgttcactagtattgatttcgggaagggctcaattaaatattcgttgaaggcagccgtggggaatgcatcatcattcgctaatgatagtccggcagcctcgccgttatcggactctaataataataataataatacaacgaagaacaattttattctgaagactaaaaacttgaactttcataattcggtctacacatcggaaaagatcattactttgataaacccgatagatgtttcaaaattgcctagatccaaaccaaaaagactcattatcaaagatccccgtctaagtaaaaagttatcccgaacccaatcctcgacatcaacattgaatacagtaaatacattcaacacattatcctcaaataattcagatactacaacaaacggtgaatttcattcgaatggtaatacaccaggtaatagtgcatctcagtctaattccaattcaccattgaatgggctagataatgctagaccgcaggttattaaagttgcgctcgagatacctgaaagaggttttcttagaggtgaattgattccgacaaaacttaatattaatcattcaagaaaaattcaagatttaaatggtattatcgtcacgttagttagggtatgtagactcagcaatggccatgaaaacatggttgagtcattcagaaaggatttacaacaactggtacttccattatatgttgatccaaacacatttcaatctgaaattaacacgaatttaagagttccagcagatgcattccctacgatatctgggtgtccactagtatcatttcaatatttcattgaagtattgatcaatttatctgggaaatccctaatactagatagcagtaatcaccacaaacccagtatatcgacagatgaagcaaaccattcattattggaaaatccttcaaatgatttgaaatataagtttaatttcaattcaaatgcatctatgaatcaaaatgaacgatcgggatttattaataccgataagtataaaagaatgaagaaatttctacttttaacaactgaggtaatcattggaactaatcgtctgaatgaacgtctggcctacacttctaacgaacgatctaatgaactattacatgataatctcaactctatttctccgacttcaagaaagtcatcatctgtttctggatccaatgattccccattattattcaatcaaactgggtcaacaccaccttcccagcaaggtcatcaacaaccaatgagccttaatccactctcagaagcgatacctgctaataatttttctacacctccttattttgagaaccagcaagattcaccattaaatattgctgatacacctattcctggctatgaagaagtttcaaataattatcatgcaaattcaagtttggcacctgttcaaatgccgacacatcaacatttatccgagaaagaacaaatacgagcacacgaggcgagcttactaccgtccgcaccacctttagatgatgcagaagaaacagaaacaatcagtccaattgataaaaataatgaaatattagaaaatatagaggaactgggggaagaggtaaatcaattaaataacgaatcaaacgatagtgcatcatcgaggcattcacagtcattcggatttttcacttaccaaaattccacatccacaactactcccacaaatcacgaaagtttagaggaagaggaggaagaggaggaggataatttataccatagtaataatcttctgaactcacatgccgaaatagatagcgaatcaactgattgggttcccaattatgaaactgctaatcacgatatattgcttgaaaatgatcatgtcagtaccggtactaatatgcatccaggtagaaatgctaattcgagtgcacgtgggccgcagcaagataattcatcttaa

SEQ ID NO: 7414 - protein, 782 aa, Debaryomyces hansenii
MRRAVSKIIPNGPPRFLQSGSLLSGDTNFKYRIDFNSVDEFYILLADPHRSWLPGDEISGQIIFISKKDLANIVITLSLIGSVKINASSHSKLRPVKELLFHHTIKIYGDENSGNNNENGEEFSNGLFKGEHRFPFIVKLPNKRVFTSIDFGKGSIKYSLKAAVGNASSFANDSPAASPLSDSNNNNNNTTKNNFILKTKNLNFHNSVYTSEKIITLINPIDVSKLPRSKPKRLIIKDPRLSKKLSRTQSSTSTLNTVNTFNTLSSNNSDTTTNGEFHSNGNTPGNSASQSNSNSPLNGLDNARPQVIKVALEIPERGFLRGELIPTKLNINHSRKIQDLNGIIVTLVRVCRLSNGHENMVESFRKDLQQLVLPLYVDPNTFQSEINTNLRVPADAFPTISGCPLVSFQYFIEVLINLSGKSLILDSSNHHKPSISTDEANHSLLENPSNDLKYKFNFNSNASMNQNERSGFINTDKYKRMKKFLLLTTEVIIGTNRLNERLAYTSNERSNELLHDNLNSISPTSRKSSSVSGSNDSPLLFNQTGSTPPSQQGHQQPMSLNPLSEAIPANNFSTPPYFENQQDSPLNIADTPIPGYEEVSNNYHANSSLAPVQMPTHQHLSEKEQIRAHEASLLPSAPPLDDAEETETISPIDKNNEILENIEELGEEVNQLNNESNDSASSRHSQSFGFFTYQNSTSTTTPTNHESLEEEEEEEEDNLYHSNNLLNSHAEIDSESTDWVPNYETANHDILLENDHVSTGTNMHPGRNANSSARGPQQDNSS

SEQ ID NO: 7415 - DNA, 1719 bp, Kluyveromyces lactis
  CDS (1)..(1719)
atgggattatttgataaacttctgcggtcgaacgaacgagctgagcgaggttctcctagtgcatttgtggtgagtagcttcgattcagtgagcaatgctggcaagagctccattttcaagcactccggtatgaaatcgtacattttggagtttgaaattgtacttgatgatgtgcacagagtgtggaaaccgaacgagactatcagtgggactgtgaagcttcgattgagaaaagatgtgcctaatgtttggattaaacttgctcatataggagagtttcaactccattccaataacccgatgaccgcaggttctctaaaatcgaaatactctgatacagtgttttgcaggtccacgagtatttatggtagtgaggagaatccattacacttgactggcggtgaacacaagtttccattctcttgtaaaattaatggtaagaacttggtgagctcgatagattttaagaagggttccataagatattgggttcaagcagagcttcatgcccaaaagacgcctcctatcttttgcaagcagcattaccagttgattgtgccaatagacgtcggccaattaccaaagccaaatatcaagacggtggtcttacaatcacccaactcaagcaataatggaatccatgttagaagacttatggcagcaggttctgcagacccacaagacggggcttcgtctctgactaggaaaacaggcggatcctctactatcactaatggttcatcaagctcaaataattcaggtaattccaacgcttccatgctcgctgataacaagactgtcaagatctcggtagagattccctgtctaggatacaccatcggagaagaaattccggttaaagtccacgtcactcattacaaacaatacttccaccctgcggggttgattgcaacgttggtcagaatctctcgggtttcaaaccctagaaatacagaacagatcgaaacatttagaaaagatatctgtcaaggtgttgccccattatatacagaccccgaaacgcatgaagctgttataatgttgaaactaaaggttccattagacaccttcccgagtttggatttaaagaataagttcttcactttccagtattacgtggagatcctagcaaatttgtcaaggaagaatttggtatacacagagtccaatagacttgtgggtggacagagaactagtagtataccgatgccgtcgaacaagttttcgatgttccaagacctctcaaaccagggtgaggttactgctggcgaagatgattcagtaacgtttttccaagatttgattaatgtagacagactcaaacgtctaagaaacgttacaggtatgtcaatcgaagttgtgatcggaacacacagagaagaacatgagcctgaatcgcccacagtggaccgtctggattcccattctatcaaccaattacctgatgatgtggatgcagtttacaaccaatgctctagcgctgaatctccaatagacgaagcttacgactatttgttacatagacataacgggccatcaccttcctctcgtatcttcacggatacggatatgactttgtgctatccggctgaccctgttccactgtatagtcgtggattagatgacttcactgggtgttcaatgtcaggtgttacagatgataaacaagaactagagcaaatgcggttgaaagaattggaaagcgaaccgcccatataa

SEQ ID NO: 7416 - protein, 572 aa, Kluyveromyces lactis
MGLFDKLLRSNERAERGSPSAFVVSSFDSVSNAGKSSIFKHSGMKSYILEFEIVLDDVHRVWKPNETISGTVKLRLRKDVPNVWIKLAHIGEFQLHSNNPMTAGSLKSKYSDTVFCRSTSIYGSEENPLHLTGGEHKFPFSCKINGKNLVSSIDFKKGSIRYWVQAELHAQKTPPIFCKQHYQLIVPIDVGQLPKPNIKTVVLQSPNSSNNGIHVRRLMAAGSADPQDGASSLTRKTGGSSTITNGSSSSNNSGNSNASMLADNKTVKISVEIPCLGYTIGEEIPVKVHVTHYKQYFHPAGLIATLVRISRVSNPRNTEQIETFRKDICQGVAPLYTDPETHEAVIMLKLKVPLDTFPSLDLKNKFFTFQYYVEILANLSRKNLVYTESNRLVGGQRTSSIPMPSNKFSMFQDLSNQGEVTAGEDDSVTFFQDLINVDRLKRLRNVTGMSIEVVIGTHREEHEPESPTVDRLDSHSINQLPDDVDAVYNQCSSAESPIDEAYDYLLHRHNGPSPSSRIFTDTDMTLCYPADPVPLYSRGLDDFTGCSMSGVTDDKQELEQMRLKELESEPPI

SEQ ID NO: 7417 - DNA, 25 bp, Artificial sequence
  primer
atggatcctatggagactttcagaa

SEQ ID NO: 7418 - DNA, 24 bp, Artificial sequence
  primer
ttaatagtcatcacaagggggagg

SEQ ID NO: 7419 - protein, 748 aa, Artificial sequence
  consensus sequence
  Variant (2)..(20): Xaa in position 2 to 20 is any amino acid
  Variant (21)..(47): Xaa in position 21 to 47 is any or no amino acid
  Variant (49)..(50): Xaa in position 49 to 50 is any amino acid
  Variant (52)..(52): Xaa in position 52 is any amino acid
  Variant (54)..(54): Xaa in position 54 is any amino acid
  Variant (56)..(56): Xaa in position 56 is any amino acid
  Variant (58)..(58): Xaa in position 58 is any amino acid
  Variant (60)..(61): Xaa in position 60 to 61 is any amino acid
  Variant (63)..(63): Xaa in position 63 is any amino acid
  Variant (65)..(69): Xaa in position 65 to 69 is any amino acid
  Variant (71)..(81): Xaa in position 71 to 81 is any amino acid
  Variant (84)..(86): Xaa in position 84 to 86 is any amino acid
  Variant (88)..(90): Xaa in position 88 to 90 is any amino acid
  Variant (92)..(101): Xaa in position 92 to 101 is any amino acid
  Variant (102)..(108): Xaa in position 102 to 108 is any or no amino acid
  Variant (110)..(117): Xaa in position 110 to 117 is any amino acid
  Variant (119)..(121): Xaa in position 119 to 121 is any amino acid
  Variant (124)..(130): Xaa in position 124 to 130 is any amino acid
  Variant (131)..(148): Xaa in position 131 to 148 is any or no amino acid
  Variant (150)..(151): Xaa in position 150 to 151 is any amino acid
  Variant (153)..(153): Xaa in position 153 is any amino acid
  Variant (155)..(155): Xaa in position 155 is any amino acid
  Variant (159)..(162): Xaa in position 159 to 162 is any amino acid
  Variant (164)..(164): Xaa in position 164 is any amino acid
  Variant (165)..(165): Xaa in position 165 is any or no amino acid
  Variant (167)..(170): Xaa in position 167 to 170 is any amino acid
  Variant (173)..(173): Xaa in position 173 is any amino acid
  Variant (175)..(176): Xaa in position 175 to 176 is any amino acid
  Variant (180)..(180): Xaa in position 180 is any amino acid
  Variant (182)..(204): Xaa in position 182 to 204 is any amino acid
  Variant (205)..(241): Xaa in position 205 to 241 is any or no amino acid
  Variant (244)..(244): Xaa in position 244 is any amino acid
  Variant (247)..(248): Xaa in position 247 to 248 is any amino acid
  Variant (251)..(254): Xaa in position 251 to 254 is any amino acid
  Variant (257)..(258): Xaa in position 257 to 258 is any amino acid
  Variant (260)..(260): Xaa in position 260 is any amino acid
  Variant (262)..(274): Xaa in position 262 to 274 is any amino acid
  Variant (275)..(289): Xaa in position 275 to 289 is any or no amino acid
  Variant (291)..(292): Xaa in position 291 to 292 is any amino acid
  Variant (294)..(299): Xaa in position 294 to 299 is any amino acid
  Variant (300)..(324): Xaa in position 300 to 324 is any or no amino acid
  Variant (326)..(326): Xaa in position 326 is any amino acid
  Variant (328)..(331): Xaa in position 328 to 331 is any amino acid
  Variant (332)..(332): Xaa in position 332 is any or no amino acid
  Variant (334)..(338): Xaa in position 334 to 338 is any amino acid
  Variant (339)..(362): Xaa in position 339 to 362 is any or no amino acid
  Variant (365)..(365): Xaa in position 365 is any amino acid
  Variant (367)..(367): Xaa in position 367 is any amino acid
  Variant (369)..(370): Xaa in position 369 to 370 is any amino acid
  Variant (372)..(373): Xaa in position 372 to 373 is any amino acid
  Variant (375)..(377): Xaa in position 375 to 377 is any amino acid
  Variant (380)..(380): Xaa in position 380 is any amino acid
  Variant (383)..(388): Xaa in position 383 to 388 is any amino acid
  Variant (391)..(396): Xaa in position 391 to 396 is any amino acid
  Variant (399)..(399): Xaa in position 399 is any amino acid
  Variant (401)..(401): Xaa in position 401 is any amino acid
  Variant (406)..(406): Xaa in position 406 is any amino acid
  Variant (410)..(417): Xaa in position 410 to 417 is any amino acid
  Variant (418)..(418): Xaa in position 418 is any or no amino acid
  Variant (420)..(420): Xaa in position 420 is any amino acid
  Variant (428)..(430): Xaa in position 428 to 430 is any amino acid
  Variant (434)..(435): Xaa in position 434 to 435 is any amino acid
  Variant (437)..(437): Xaa in position 437 is any amino acid
  Variant (439)..(446): Xaa in position 439 to 446 is any amino acid
  Variant (448)..(448): Xaa in position 448 is any amino acid
  Variant (451)..(451): Xaa in position 451 is any amino acid
  Variant (453)..(453): Xaa in position 453 is any amino acid
  Variant (455)..(462): Xaa in position 455 to 462 is any amino acid
  Variant (463)..(463): Xaa in position 463 is any or no amino acid
  Variant (465)..(465): Xaa in position 465 is any amino acid
  Variant (469)..(470): Xaa in position 469 to 470 is any amino acid
  Variant (473)..(474): Xaa in position 473 to 474 is any amino acid
  Variant (478)..(478): Xaa in position 478 is any amino acid
  Variant (480)..(482): Xaa in position 480 to 482 is any amino acid
  Variant (484)..(485): Xaa in position 484 to 485 is any amino acid
  Variant (488)..(502): Xaa in position 488 to 502 is any amino acid
  Variant (503)..(544): Xaa in position 503 to 544 is any or no amino acid
  Variant (546)..(563): Xaa in position 546 to 563 is any amino acid
  Variant (564)..(577): Xaa in position 564 to 577 is any or no amino acid
  Variant (579)..(579): Xaa in position 579 is any amino acid
  Variant (581)..(582): Xaa in position 581 to 582 is any amino acid
  Variant (585)..(586): Xaa in position 585 to 586 is any amino acid
  Variant (590)..(590): Xaa in position 590 is any amino acid
  Variant (594)..(594): Xaa in position 594 is any amino acid
  Variant (596)..(596): Xaa in position 596 is any amino acid
  Variant (600)..(601): Xaa in position 600 to 601 is any amino acid
  Variant (605)..(605): Xaa in position 605 is any amino acid
  Variant (607)..(614): Xaa in position 607 to 614 is any amino acid
  Variant (615)..(640): Xaa in position 615 to 640 is any or no amino acid
  Variant (642)..(643): Xaa in position 642 to 643 is any amino acid
  Variant (645)..(673): Xaa in position 645 to 673 is any amino acid
  Variant (674)..(700): Xaa in position 674 to 700 is any or no amino acid
  Variant (702)..(702): Xaa in position 702 is any amino acid
  Variant (704)..(704): Xaa in position 704 is any amino acid
  Variant (706)..(715): Xaa in position 706 to 715 is any amino acid
  Variant (716)..(730): Xaa in position 716 to 730 is any or no amino acid
  Variant (733)..(733): Xaa in position 733 is any amino acid
  Variant (737)..(739): Xaa in position 737 to 739 is any amino acid
  Variant (741)..(742): Xaa in position 741 to 742 is any amino acid
  Variant (746)..(746): Xaa in position 746 is any amino acid
MXXXXXXXXXXXXXXXXXXXXXXXXXXXXXXXXXXXXXXXXXXXXXXVXXFXIXLXDXHXXWXPXXXXXGXXXXXXXXXXXNVXXXLXXXGXXXXXXXXXXXXXXXXXKXXXXXXXXSXXXYGXXXXXXXXXXXXXXXXXXXXXXXXXLXXGXHXFPFXXXXPXXKXXXXSIXFXXGSIXYXXXXXXXXXXXXXXXXXXXXXXXXXXXXXXXXXXXXXXXXXXXXXXXXXXXXXXXXXXXXVPXDVXXLPXXXXKTXXLXSXXXXXXXXXXXXXXXXXXXXXXXXXXXXDXXSXXXXXXXXXXXXXXXXXXXXXXXXXXXXXXXSXSXXXXXSXXXXXXXXXXXXXXXXXXXXXXXXXXXXXTVXIXVXXPXXGXXXGEXIPXXXXXXHYXXXXXXAGXIXTLVRXCRVXXXXXXXXXEXFRKDICQXXXPLYXXPXTXXXXXXXXLXVPXDXFXXXXXXXXXFXFQYXXEVXXNLSXKXXXYXXSNXXXXXXXXXXXXXXXXXXXXXXXXXXXXXXXXXXXXXXXXXXXXXXXXXXXXXXXXXNXXXXXXXXXXXXXXXXXXXXXXXXXXXXXXXXFXDXXNVXXLKRXRNVXGXSIEXXIGTXRXXXXXXXXXXXXXXXXXXXXXXXXXXXXXXXXXXSXXSXXXXXXXXXXXXXXXXXXXXXXXXXXXXXXXXXXXXXXXXXXXXXXXXXXXXXXXXPXPXYXXXXXXXXXXXXXXXXXXXXXXXXXDKXELEXXXLXXLESXPP

SEQ ID NO: 7420 - protein, 42 aa, Artificial sequence
  protein pattern
  Variant (2)..(3): Xaa in position 2 to 3 is any amino acid
  Variant (5)..(6): Xaa in position 5 to 6 is any amino acid
  Variant (8)..(8): Xaa in position 8 is Phe or Tyr
  Variant (9)..(10): Xaa in position 9 to 10 is any amino acid
  Variant (12)..(12): Xaa in position 12 is Asp or Glu
  Variant (13)..(13): Xaa in position 13 is any amino acid
  Variant (15)..(15): Xaa in position 15 is any amino acid
  Variant (16)..(16): Xaa in position 16 is Ile, Leu or Val
  Variant (17)..(17): Xaa in position 17 is any amino acid
  Variant (18)..(18): Xaa in position 18 is Ile or Val
  Variant (19)..(19): Xaa in position 19 is any amino acid
  Variant (20)..(20): Xaa in position 20 is Ile or Val
  Variant (21)..(21): Xaa in position 21 is Asp, Gln, Ser or Thr
  Variant (24)..(24): Xaa in position 24 is Lys or Arg
  Variant (25)..(25): Xaa in position 25 is Glu, Pro or Gln
  Variant (26)..(26): Xaa in position 26 is Phe or Tyr
  Variant (27)..(28): Xaa in position 27 to 28 is any amino acid
  Variant (29)..(29): Xaa in position 29 is Pro or Ser
  Variant (32)..(32): Xaa in position 32 is Leu or Val
  Variant (33)..(33): Xaa in position 33 is any amino acid
  Variant (34)..(34): Xaa in position 34 is Ala or Thr
  Variant (39)..(39): Xaa in position 39 is Ile or Val
  Variant (40)..(40): Xaa in position 40 is Cys or Ser
  Variant (41)..(41): Xaa in position 41 is Lys or Arg
VXXPXXGXXXGXXIXXXXXXXHYXXXXXXAGXXXTLVRXXXV

SEQ ID NO: 7421 - protein, 39 aa, Artificial sequence
  protein pattern
  Variant (2)..(2): Xaa in position 2 is any amino acid
  Variant (7)..(7): Xaa in position 7 is Ile or Leu
  Variant (8)..(8): Xaa in position 8 is any amino acid
  Variant (10)..(10): Xaa in position 10 is any amino acid
  Variant (11)..(11): Xaa in position 11 is Ile or Val
  Variant (12)..(12): Xaa in position 12 is any amino acid
  Variant (14)..(14): Xaa in position 14 is Ile or Leu
  Variant (16)..(16): Xaa in position 16 is any amino acid
  Variant (17)..(17): Xaa in position 17 is Asp, Glu or Asn
  Variant (19)..(19): Xaa in position 19 is Glu or Asn
  Variant (21)..(21): Xaa in position 21 is any amino acid
  Variant (22)..(22): Xaa in position 22 is Glu, Gln or Thr
  Variant (23)..(28): Xaa in position 23 to 28 is any amino acid
  Variant (30)..(30): Xaa in position 30 is any amino acid
  Variant (33)..(33): Xaa in position 33 is Ala or Leu
  Variant (35)..(35): Xaa in position 35 is Ala or Thr
  Variant (37)..(37): Xaa in position 37 is Pro or Ser
  Variant (38)..(38): Xaa in position 38 is Ser or Thr
  Variant (39)..(39): Xaa in position 39 is Ile or Leu
EXFRKDXXQXXXPXYXXPXTXXXXXXXXLXVPXDXFXXX

SEQ ID NO: 7422 - protein, 29 aa, Artificial sequence
  protein pattern
  Variant (2)..(2): Xaa in position 2 is any amino acid
  Variant (4)..(4): Xaa in position 4 is Leu or Met
  Variant (5)..(5): Xaa in position 5 is Ile or Val
  Variant (6)..(6): Xaa in position 6 is Asp or Asn
  Variant (8)..(8): Xaa in position 8 is Asp or Glu
  Variant (9)..(9): Xaa in position 9 is Lys or Arg
  Variant (13)..(13): Xaa in position 13 is Leu or Met
  Variant (17)..(17): Xaa in position 17 is Ala or Thr
  Variant (19)..(19): Xaa in position 19 is any amino acid
  Variant (23)..(23): Xaa in position 23 is Thr or Val
  Variant (24)..(24): Xaa in position 24 is Ile or Val
  Variant (27)..(27): Xaa in position 27 is Asn or Thr
  Variant (28)..(28): Xaa in position 28 is any amino acid
FXDXXXVXXLKRXRNVXGXSIEXXIGXXR

SEQ ID NO: 7423 - protein, 25 aa, Artificial sequence
  protein pattern
  Variant (2)..(2): Xaa in position 2 is Ser or Thr
  Variant (6)..(6): Xaa in position 6 is Phe or Tyr
  Variant (7)..(7): Xaa in position 7 is Ile or Val
  Variant (9)..(9): Xaa in position 9 is Ile or Val
  Variant (10)..(10): Xaa in position 10 is Leu, Met or Val
  Variant (11)..(11): Xaa in position 11 is Ala, Ile or Val
  Variant (15)..(15): Xaa in position 15 is any amino acid
  Variant (17)..(18): Xaa in position 17 to 18 is any amino acid
  Variant (19)..(19): Xaa in position 19 is Ile or Val
  Variant (21)..(21): Xaa in position 21 is Ser or Thr
  Variant (22)..(22): Xaa in position 22 is Glu or His
  Variant (24)..(24): Xaa in position 24 is Asn or Gln
  Variant (25)..(25): Xaa in position 25 is Lys or Arg
FXFQYXXEXXXNLSXKXXXYXXSXX

SEQ ID NO: 7424 - protein, 42 aa, Artificial sequence
  protein pattern
  Variant (2)..(4): Xaa in position 2 to 4 is any or no amino acid
  Variant (6)..(6): Xaa in position 6 is any amino acid
  Variant (7)..(7): Xaa in position 7 is any or no amino acid
  Variant (9)..(9): Xaa in position 9 is Lys or Arg
  Variant (10)..(10): Xaa in position 10 is any amino acid
  Variant (12)..(12): Xaa in position 12 is any amino acid
  Variant (14)..(14): Xaa in position 14 is any amino acid
  Variant (15)..(15): Xaa in position 15 is Asp or Glu
  Variant (16)..(16): Xaa in position 16 is any amino acid
  Variant (17)..(17): Xaa in position 17 is Ile or Val
  Variant (18)..(18): Xaa in position 18 is Ser or Thr
  Variant (20)..(20): Xaa in position 20 is Glu, Gln or Thr
  Variant (21)..(21): Xaa in position 21 is Ala, Ile or Val
  Variant (22)..(22): Xaa in position 22 is any amino acid
  Variant (23)..(23): Xaa in position 23 is Phe, Ile or Leu
  Variant (24)..(25): Xaa in position 24 to 25 is any amino acid
  Variant (26)..(27): Xaa in position 26 to 27 is Lys or Arg
  Variant (28)..(28): Xaa in position 28 is Asp or Pro
  Variant (29)..(29): Xaa in position 29 is Ile, Leu or Val
  Variant (30)..(30): Xaa in position 30 is any amino acid
  Variant (31)..(31): Xaa in position 31 is Gly or Asn
  Variant (32)..(32): Xaa in position 32 is Ile or Val
  Variant (33)..(33): Xaa in position 33 is any amino acid
  Variant (34)..(34): Xaa in position 34 is Ile or Leu
  Variant (35)..(35): Xaa in position 35 is any amino acid
  Variant (36)..(36): Xaa in position 36 is Leu or Met
  Variant (37)..(37): Xaa in position 37 is Ala or Ser
  Variant (38)..(39): Xaa in position 38 to 39 is any amino acid
  Variant (40)..(40): Xaa in position 40 is Cys or Gly
  Variant (41)..(41): Xaa in position 41 is Glu, Asn or Ser
  Variant (42)..(42): Xaa in position 42 is Phe, Leu or Val
IXXXDXXHXXWXPXXXXXGXXXXXXXXXXXXXXXXXXXXXXX

SEQ ID NO: 7425 - protein, 19 aa, Artificial sequence
  protein pattern
  Variant (3)..(3): Xaa in position 3 is any amino acid
  Variant (4)..(4): Xaa in position 4 is Lys or Arg
  Variant (6)..(6): Xaa in position 6 is any amino acid
  Variant (8)..(8): Xaa in position 8 is Lys or Arg
  Variant (12)..(13): Xaa in position 12 to 13 is any amino acid
  Variant (14)..(18): Xaa in position 14 to 18 is any or no amino acid
GLXXGXHXFPFXXXXXXXR

SEQ ID NO: 7426 - protein, 19 aa, Artificial sequence
  protein pattern
  Variant (3)..(3): Xaa in position 3 is Gln or Arg
  Variant (7)..(7): Xaa in position 7 is any amino acid
  Variant (8)..(8): Xaa in position 8 is any or no amino acid
  Variant (10)..(10): Xaa in position 10 is any or no amino acid
  Variant (12)..(12): Xaa in position 12 is any amino acid
  Variant (13)..(13): Xaa in position 13 is Glu or Gln
  Variant (17)..(17): Xaa in position 17 is Asp or Glu
  Variant (19)..(19): Xaa in position 19 is Pro or Ser
DKXELEXXRXLXXLESXPX

SEQ ID NO: 7427 - protein, 18 aa, Artificial sequence
  protein pattern
  Variant (3)..(3): Xaa in position 3 is any amino acid
  Variant (5)..(5): Xaa in position 5 is any amino acid
  Variant (6)..(6): Xaa in position 6 is Lys or Arg
  Variant (10)..(10): Xaa in position 10 is any amino acid
  Variant (12)..(12): Xaa in position 12 is any amino acid
  Variant (13)..(16): Xaa in position 13 to 16 is any or no amino acid
  Variant (18)..(18): Xaa in position 18 is Glu, His or Lys
SIXFXXGSIXYXXXXXLX

SEQ ID NO: 7428 - protein, 25 aa, Artificial sequence
  protein pattern
  Variant (2)..(2): Xaa in position 2 is any or no amino acid
  Variant (4)..(5): Xaa in position 4 to 5 is any or no amino acid
  Variant (7)..(7): Xaa in position 7 is Ile, Leu or Val
  Variant (10)..(12): Xaa in position 10 to 12 is any amino acid
  Variant (13)..(13): Xaa in position 13 is Pro or Ser
  Variant (14)..(14): Xaa in position 14 is Asp or Lys
  Variant (15)..(15): Xaa in position 15 is Leu, Pro or Val
  Variant (16)..(17): Xaa in position 16 to 17 is any amino acid
  Variant (20)..(20): Xaa in position 20 is Ile or Val
  Variant (21)..(21): Xaa in position 21 is Leu or Val
  Variant (23)..(23): Xaa in position 23 is Asn or Gln
  Variant (25)..(25): Xaa in position 25 is Ala, Asn or Pro
IXVXXPXDVXXXXXXXXKTXXLXSX

SEQ ID NO: 7429 - DNA, 360 bp, Saccharomyces cerevisiae
  CDS (1)..(360)
atgccaaagaagagagcttccaacggtagaaacaagaaaggtagaggtcacgtcaaaccagtcagatgtgtcaactgttccaagtctattccaaaggataaggctatcaagagaatggctatcagaaacattgttgaagccgctgccgtcagagatttgtccgaagcttctgtctaccctgaatacgctttgccaaagacttacaacaagttacactactgtgtttcttgtgctattcacgccagaattgtcagagtcagatccagagaagacagaaagaacagagctccacctcaaagaccaagattcaacagagaaaacaaggtttcccctgctgatgccgccaagaaggctttataa

SEQ ID NO: 7430 - protein, 119 aa, Saccharomyces cerevisiae
MPKKRASNGRNKKGRGHVKPVRCVNCSKSIPKDKAIKRMAIRNIVEAAAVRDLSEASVYPEYALPKTYNKLHYCVSCAIHARIVRVRSREDRKNRAPPQRPRFNRENKVSPADAAKKAL

SEQ ID NO: 7431 - DNA, 396 bp, zea mays
  CDS (1)..(396)
atgaccttcaagcgccgcaacggcggccgcaacaagcatggccgcggtcacgtcaagtacatccggtgctcaaactgcgccaagtgctgccccaaggacaaggcgatcaagaggtttcaggtgaggaacatcgtggaacaggcggccatcagggacgtccaggaagcatgcgtctatgatggctacgtcctcccgaagctgtacgccaaggtgcaccactgcgtctcgtgcgcgatccacgctcacatcgtccgcgtccgatcccgtgagaagcgcagggaccgcaagccgccggagcgcttcaggcgcagggaggatacgcctgctggtgggacaaaggaggcccccgccctggtccctggtggctgctgctccagctccagctccagcacctaa

SEQ ID NO: 7432 - protein, 131 aa, zea mays
MTFKRRNGGRNKHGRGHVKYIRCSNCAKCCPKDKAIKRFQVRNIVEQAAIRDVQEACVYDGYVLPKLYAKVHHCVSCAIHAHIVRVRSREKRRDRKPPERFRRREDTPAGGTKEAPALVPGGCCSSSSSST

SEQ ID NO: 7433 - DNA, 546 bp, Oryza sativa
  CDS (17)..(385)
atcaagactatccaaaatgacgaagaagagacgatccggcggccgcaacaagtccggccgaggccacgttacgtttgtgcgatgctcgaactgtgctcgcgccgtccccaaggacaaggcgatcaagcgcttcactgttcgcaacattgtcgaggctgctgccatccgtgatctgtcggaggcgtcggtgtaccaggagtacgctctgcccaagctgtacatcaaggtggtctactgcgtctcgtgcgcgatccacgcccacattgtgcgtgtgcgctcgcgcgagggtcgccgcaaccgtctgccccctccccgtgtccgctacaacaaggacggaaagaagatcaaccccgccgtcgcccagatccaggcccagcgcgcttaaatcttcctttcacccatccccagcctcctgcaggcgtccaatgccgatcggaggctgtaaaatctcgattgcgtaggaggactttccttcgatgcgagagagtcgcacctgctcaccgcacacacacacacacccaaaatatcatccttctcctaaaagcc

SEQ ID NO: 7434 - protein, 122 aa, Oryza sativa
MTKKRRSGGRNKSGRGHVTFVRCSNCARAVPKDKAIKRFTVRNIVEAAAIRDLSEASVYQEYALPKLYIKVVYCVSCAIHAHIVRVRSREGRRNRLPPPRVRYNKDGKKINPAVAQIQAQRA

SEQ ID NO: 7435 - DNA, 520 bp, Sorghum bicolor
  CDS (33)..(431)
gccggccgggctgggatctttatcgacacatcatgaccaagaagagaagaggaaacggccgaaacaagaagggacgaggacacgtcaagagcgtccgatgctccaactgctcgcgatgcgtgcctaaggacaaggccatcaagcgatactcggtcaagaacatggtcgaggccgctgccgtccgtgacctgtccgaggcttccgtttacgccgagtacgccctccccaagctctacatccgagtggcctactgcatctcgtgcgctatccacgccaagatcgtccgagtccgatccgccaagcccggagcgatcaactcccgaaagaaccgactgccgcccccccgtgctatcttccgggacggaaagcgaatcaaccctgccgtcgccgccgccatggctgcgaagaccgccgagggccagaaggcttaaggagggtcttgatgggttgtagtggtttgcagcagacatgcacgtatgacgactatgacgtaaaaaaaaaaaaaaaaaagggccctaag

SEQ ID NO: 7436 - protein, 132 aa, Sorghum bicolor
MTKKRRGNGRNKKGRGHVKSVRCSNCSRCVPKDKAIKRYSVKNMVEAAAVRDLSEASVYAEYALPKLYIRVAYCISCAIHAKIVRVRSAKPGAINSRKNRLPPPRAIFRDGKRINPAVAAAMAAKTAEGQKA

SEQ ID NO: 7437 - DNA, 742 bp, Sorghum bicolor
  CDS (116)..(514)
cggccgctcaggcgccggccggtaccggacgcacaccccgctcgagccgccgccgccgtcgcatcccgcagcgaaccctagccctcctcagcggcggcttggagctcccccagccatgacgttcaagcggaggaatggcggtcgcaacaagcacgggcgcggccacgtcaagtacatccgctgctccaactgcgcaaaatgctgtcctaaggataaggctatcaagcggttcttggtgaggaacattgtcgagcaggctgctgtgagagatgtgcaggaggcttgtgtgcatgatggatatgttcttcccaaattgtacgcaaaggttcatcactgtgtctcatgcgcaatccatgcgcacattgtccgtgtccgctctcgtgagaacaggaggaaccgtgagcccccgcagcgtttcaggcgccgggatgacggcccaaggccaggacagggcccaccgcgcccagggggtgctgcacctgcagctgcccctgcagccgctcctcgtacctaagttcaggaatgcgtttcagggcttagttttgtcacctatgggataatggatttttcctgttttgagaaaccaatgttactgtatccccttgatgttaaacttgtagtacaatttgtggttcgacccgttctcactctttgtgctgttaagttctcttccaacttgatatatgttgccatacgaagctatgaagattctggttgcttgttgcaattgcattttgttttg

SEQ ID NO: 7438 - protein, 132 aa, Sorghum bicolor
MTFKRRNGGRNKHGRGHVKYIRCSNCAKCCPKDKAIKRFLVRNIVEQAAVRDVQEACVHDGYVLPKLYAKVHHCVSCAIHAHIVRVRSRENRRNREPPQRFRRRDDGPRPGQGPPRPGGAAPAAAPAAAPRT

SEQ ID NO: 7439 - DNA, 675 bp, Zea mays
  CDS (76)..(444)
ttgggtacctcgaggccggccggggacacaccccactgctgacttttagattccacatcttcaaatcagcccaacatggtcaagaagcgagcgtccaacggccgtaacaagaagggtcgcggccacgtcaagcccatccgttgctccaactgctcgcgatgcactcccaaggacaaggcgatcaagagattcaccatccgcaacatggttgagtccgccgccatccgtgatatctccgatgcctccgtcttccccgagtacactgtccccaagatgtacctgaagctccagtactgcgtctcatgcgctatccacggcaagattgtccgtgtccgctcgcgcgaaggacgccgcaaccgtgctcctcccccacgtgttaggtacaacaaggatggaaagaagatcaaccccaaccaagctgctgctaagactaccactgcttaagcggggcgcgggtatggaaaggaattgatcacggcgcttggtgtgggtcttatggttctttcggagtgtcatactggaaaatgcatgaatccacggaagatagggcaggccaaatgacgaatcatggttgaggcacgctcggaattgcctgcttgagcaccgagagctagctatgaacttgtaaacgaatatccaagtcgacttactaaaaaaaaaaaaaaaaaagcggcc

SEQ ID NO: 7440 - protein, 122 aa, Zea mays
MVKKRASNGRNKKGRGHVKPIRCSNCSRCTPKDKAIKRFTIRNMVESAAIRDISDASVFPEYTVPKMYLKLQYCVSCAIHGKIVRVRSREGRRNRAPPPRVRYNKDGKKINPNQAAAKTTTA

SEQ ID NO: 7441 - DNA, 676 bp, Zea mays
  CDS (98)..(466)
ttgggtacctcgaggccggccggggtcaaggattaacctcacgacaaccaccccactgctgacttttagataacacatcttcaaatcagccgcaaacatggtcaagaagcgcgcgtccaacggtcgtaacaagaagggccgcggccacgtcaagcccatccgctgctccaactgctcgcgatgcacacccaaggacaaggcaatcaagagattcaccatccgcaacatggtcgagtccgccgccatccgtgatatctccgatgcctccgtcttccccgagtacgctgtccccaagatgtacctgaagctccagtactgcgtctcctgcgctatccacggcaagatcgtccgtgtccgctcccgtgaaggccgccgcaaccgtgctcctcccccacgtgtcaggtacaacaaggacggaaagaagatcaaccccaaccaggccgctgctaagactactactgcttaagtagcgtgtggttcgaaaagggaatgatcatggcgcttggtgtggggtcttagggttctttcggaatgtcatactggaaaatgcatgaatccagaagaagggacaggccaaatgacgaaatcatggttgaagcttgctcgggaaagcctgcataagcagcaccgagagctagctatgaacttgtagacgaatatccaagtcgacttgcac

SEQ ID NO: 7442 - protein, 122 aa, Zea mays
MVKKRASNGRNKKGRGHVKPIRCSNCSRCTPKDKAIKRFTIRNMVESAAIRDISDASVFPEYAVPKMYLKLQYCVSCAIHGKIVRVRSREGRRNRAPPPRVRYNKDGKKINPNQAAAKTTTA

SEQ ID NO: 7443 - DNA, 402 bp, Arabidopsis thaliana
  CDS (1)..(402)
atgactttcaagcgaaggaacggtgggaggaacaagcacaacagaggacacgtcaacccaatcagatgctccaactgtggcaaatgttgccccaaggacaaggccattaagaggttcattgtgaggaacattgtggagcaggctgctattagagatgttcaggaagctagcgtctatgagggatacacattgccgaagctatatgcaaagacgcaatactgtgtctcctgtgctatccactctcatgtcgttagagtccgttcccgcaccaaccgcagggttcgtactcctccacctcgtttcgccagacgcaaggaggatactcccaagcctgggcaaccaggacaggcacctcgtcctgctggacctggagctgcagctgcagctgcaccgcgtgtctga

SEQ ID NO: 7444 - protein, 133 aa, Arabidopsis thaliana
MTFKRRNGGRNKHNRGHVNPIRCSNCGKCCPKDKAIKRFIVRNIVEQAAIRDVQEASVYEGYTLPKLYAKTQYCVSCAIHSHVVRVRSRTNRRVRTPPPRFARRKEDTPKPGQPGQAPRPAGPGAAAAAAPRV

SEQ ID NO: 7445 - DNA, 393 bp, Arabidopsis thaliana
  CDS (1)..(393)
atgactttcaagcgcaggaatggtggcaggaacaagcataaccgtggtcatgtgaaaccaatcaggtgttccaactgtggaaagtgttgccccaaggacaaggcgattaagagatttatcgtaaggaacattgttgagcaggctgctattagagatgttcaagaagctagcgtctacgaaggttacactctcccaaagctttacgctaagacgcagtactgtgtctcgtgtgctatccattctcacgttgtgagagtccgatcccgcaccaaccgtagagttcgtaccccaccacctcgttttgccagacgcaaggaggatacacccaagcctgcacaacctggtcaggctcctcgccctgccggtggtgctcctgctgctcctcgtgcctga

SEQ ID NO: 7446 - protein, 130 aa, Arabidopsis thaliana
MTFKRRNGGRNKHNRGHVKPIRCSNCGKCCPKDKAIKRFIVRNIVEQAAIRDVQEASVYEGYTLPKLYAKTQYCVSCAIHSHVVRVRSRTNRRVRTPPPRFARRKEDTPKPAQPGQAPRPAGGAPAAPRA

SEQ ID NO: 7447 - DNA, 360 bp, Eremothecium gossypii
  CDS (1)..(360)
atgccaaagaagagagcttccaacggtagaaacaagaagggtagaggccacgtcaagccggtcagatgcgtcaactgctccaagtgtgttcctaaggacaaggccatcaagagaatgaccatcagaaacatcgttgaggctgctgctatcagagacttgtccgaggcctccgtgtacgctgagtacgctttgccaaagacctacaacaagctacactactgtgtgtcttgtgccatccacgctagaatcgtgcgtgtcagatccagagaggaccggagaatcagaactcctcctcagagacagagattcaaccgtgagaaccgcgtcaacccagctgacgccgctaagaaggctttgtag

SEQ ID NO: 7448 - protein, 119 aa, Eremothecium gossypii
MPKKRASNGRNKKGRGHVKPVRCVNCSKCVPKDKAIKRMTIRNIVEAAAIRDLSEASVYAEYALPKTYNKLHYCVSCAIHARIVRVRSREDRRIRTPPQRQRFNRENRVNPADAAKKAL

SEQ ID NO: 7449 - DNA, 360 bp, Magnaporthe grisea 70-15
  CDS (1)..(360)
atgcccaagaagagaaagaacaacggacgcaacaagaagggccgcggccacgtcaagcccatccgttgctcaaactgctcgcgatgcacgcccaaggataaggccatcaagagatttaccatccgcaacatggtcgagtctgctgccattcgtgatatctcggacgcttcggtctttgccgaatatgtcgttcccaagatgtacctcaagctgcagtactgcgtgagctgtgccattcacggcaagatcgttcgtgttcgttcgcgtgagggacgccgcaaccgtgctcctccccctcgtgtccgctacaacaaggacggcaagaagatcactcccacccagggcgctaagacctcttag

SEQ ID NO: 7450 - protein, 119 aa, Magnaporthe grisea 70-15
MPKKRKNNGRNKKGRGHVKPIRCSNCSRCTPKDKAIKRFTIRNMVESAAIRDISDASVFAEYVVPKMYLKLQYCVSCAIHGKIVRVRSREGRRNRAPPPRVRYNKDGKKITPTQGAKTS

SEQ ID NO: 7451 - DNA, 360 bp, Candida glabrata CBS 138
  CDS (1)..(360)
atgccaaagaagagagcttccaacggtagaaacaagaagggtagaggtcacgtcaagccagtcagatgtgttaactgttccaagtctgtcccaaaggacaaggctatcaagagaatggctatcagaaacattgttgaagctgccgctgtcagagatttgtctgaagcctccgtctactctgagtacgtcttgccaaagacctacaacaagttgcactactgtgtctcttgtgctatccacgccagaattgtcagagtcagatccagagaagctagaagaatcagaactcctccacaaagaccaagattcaacagagaaaacaaggtctctccagctgacgccgccaagaaggctttgtaa

SEQ ID NO: 7452 - protein, 119 aa, Candida glabrata CBS 138
MPKKRASNGRNKKGRGHVKPVRCVNCSKSVPKDKAIKRMAIRNIVEAAAVRDLSEASVYSEYVLPKTYNKLHYCVSCAIHARIVRVRSREARRIRTPPQRPRFNRENKVSPADAAKKAL

SEQ ID NO: 7453 - DNA, 360 bp, Kluyveromyces lactis NRRL Y-1140
  CDS (1)..(360)
atgccaaagaagagagcttccaacggtagaaacaagaagggtagaggtcacgtcaagcctgtcagatgtgtcaactgttccagatctgttccaaaggacaaggccatcaagagaatggctatcagaaacatcgttgaagctgctgctatcagagatttgtctgaagcctctgtctacgctgaatatgctcttccaaagacctacaacaagttgcactactgtatttcttgcgctatccacgctagaattgttagagtcagatccagaactgacagaagaatcagagctcctccacaaagaccaagattcaacagagacaacaaggtttctccagctgatgccgctaagaaagctttgtaa

SEQ ID NO: 7454 - protein, 119 aa, Kluyveromyces lactis NRRL Y-1140
MPKKRASNGRNKKGRGHVKPVRCVNCSRSVPKDKAIKRMAIRNIVEAAAIRDLSEASVYAEYALPKTYNKLHYCISCAIHARIVRVRSRTDRRIRAPPQRPRFNRDNKVSPADAAKKAL

SEQ ID NO: 7455 - DNA, 360 bp, Debaryomyces hansenii CBS767
  CDS (1)..(360)
atgccaaaaaagagagcttccaacggtagaaataagaagggtagaggtcacgttaagccagttagatgtttaaactgtgctaaatgtgttcctaaggataaggccatcaagagagtcaccatcagaaacatggttgaagctgctgctgttagagatttatccgaagcttcagtctactctgaatacgctttaccaaaattatacaacaaattgcactactgtgtctcttgtgccatccacgccagaatcgtcagagtcagatctagaaccgacagaagaatcagagctcctccacaaaggaagagattcactgctgacaagaaagtcaacccagctgacgctgctaagaaagctaactaa

SEQ ID NO: 7456 - protein, 119 aa, Debaryomyces hansenii CBS767
MPKKRASNGRNKKGRGHVKPVRCLNCAKCVPKDKAIKRVTIRNMVEAAAVRDLSEASVYSEYALPKLYNKLHYCVSCAIHARIVRVRSRTDRRIRAPPQRKRFTADKKVNPADAAKKAN

SEQ ID NO: 7457 - DNA, 363 bp, Yarrowia lipolytica CLIB122
  CDS (1)..(363)
atggtcaagaagcgagcttccaacggacgaaacaagaagggtcgaggacacgttacctccatccgatgctctaactgtgcccgaatggtccccaaggacaaggccatcaagcgattcaccatccgaaacatggtcgaggccgcctccatccgagatctttccgaggcctccgtctaccaggagtacgtgctgcccaagctctacctcaagatccagtactgcgtgtcttgcgccatccactccaaggttgtccgagtccgatctcgagagggccgaaaggttcgaactcctccccagcgagtccgattcaacaaggacggtaagaagatcaaccctgctgccgccgccaaggttgtcgtttag

SEQ ID NO: 7458 - protein, 120 aa, Yarrowia lipolytica CLIB122
MVKKRASNGRNKKGRGHVTSIRCSNCARMVPKDKAIKRFTIRNMVEAASIRDLSEASVYQEYVLPKLYLKIQYCVSCAIHSKVVRVRSREGRKVRTPPQRVRFNKDGKKINPAAAAKVVV

SEQ ID NO: 7459 - DNA, 360 bp, Aspergillus nidulans FGSC A4
  CDS (1)..(360)
atggtcaagaagagggcgaacaacggccgcaacaagaacggccgcggccacgttaagcccgtgcgctgctccaactgcgctcgctgcgttcccaaggacaaggccatcaagagattcaccatccgcaacatggtcgagtctgctgccatccgtgatatctccgacgcctccgtcttcgccgactacgccgtccccaagatgtacctcaagctgcagtactgcgtctcctgcgctatccacggcaagatcgttcgtgtccgctcccgggaaggtcgtcgcaaccgtgcccctccccctcgcattaggtacaacaaggacggcaagaagctgaaccctccccaggccgccaaggctatgtaa

SEQ ID NO: 7460 - protein, 119 aa, Aspergillus nidulans FGSC A4
MVKKRANNGRNKNGRGHVKPVRCSNCARCVPKDKAIKRFTIRNMVESAAIRDISDASVFADYAVPKMYLKLQYCVSCAIHGKIVRVRSREGRRNRAPPPRIRYNKDGKKLNPPQAAKAM

SEQ ID NO: 7461 - DNA, 360 bp, Candida albicans SC5314
  CDS (1)..(360): transl_table=12
atgccaaaaaagagagcttccaacggtagaaacaagaaaggtagaggtcacgttaaaccagtcagatgtttgaactgtgctagatgtgttccaaaggataaagccatcaagagagtcaccatcagaaacatggttgaagctgctgctgtcagagatttgtctgaagcttctgtctacgctgaatacgctttaccaaaattatacaacaaattacactactgtgtctcttgtgctatccacgccagaattgttagagttagatcaagaactgacagaaaaattagaactccaccacaaagaaagagattcacctctgacagaaaagtttctccacaagatgctgctaaaaaagctaactaa

SEQ ID NO: 7462 - protein, 119 aa, Candida albicans SC5314
MPKKRASNGRNKKGRGHVKPVRCLNCARCVPKDKAIKRVTIRNMVEAAAVRDLSEASVYAEYALPKLYNKLHYCVSCAIHARIVRVRSRTDRKIRTPPQRKRFTSDRKVSPQDAAKKAN

SEQ ID NO: 7463 - DNA, 369 bp, Ustilago maydis 521
  CDS (1)..(369)
atgactaagaagagaagatccggcggccgcaacaagtccggccgaggccacgtcacttttgtgcgatgctccaactgtgctcgcgcggtgcccaaggacaaggctatcaagcgcttcactgttcgcaacattgttgaggctgctgccatccgtgatctttccgaggcttcggtgtaccaggagtacgctctgcccaagctgtacatcaaggtggtctactgtgtctcgtgcgcgattcacgctcacattgtgcgtgtgcgatcgcgcgagggtcgtcgcagccgtctgccccctcctcgtgttcgctacaacaaggacggcaagaagatcaaccccgccgttgcccagctccaggccagccgcgcttaa

SEQ ID NO: 7464 - protein, 122 aa, Ustilago maydis 521
MTKKRRSGGRNKSGRGHVTFVRCSNCARAVPKDKAIKRFTVRNIVEAAAIRDLSEASVYQEYALPKLYIKVVYCVSCAIHAHIVRVRSREGRRSRLPPPRVRYNKDGKKINPAVAQLQASRA

SEQ ID NO: 7465 - DNA, 354 bp, Gibberella fujikuroi
  CDS (1)..(354)
atggtcaagaagagaaagaacaacggccgaaacaagaagggccgtggccacgtcaagcccatccgatgcagcaactgctcgcgatgcacccccaaggataaggcgatcaagagattcaccatccgcaacatggttgagtctgctgctattcgtgacatctcggatgcctccgtcttcgcggagtacaccgtgcccaagatgtacctgaagctgcagtactgcgtctcttgcgccattcacggcaagattgtccgcgtccgatccgtcgttggccgacgcaaccgtgcccctccccctcgcgtccgctacaacaaggacggcaagaagatcgtccctactgcccctaaggcttaa

SEQ ID NO: 7466 - protein, 117 aa, Gibberella fujikuroi
MVKKRKNNGRNKKGRGHVKPIRCSNCSRCTPKDKAIKRFTIRNMVESAAIRDISDASVFAEYTVPKMYLKLQYCVSCAIHGKIVRVRSVVGRRNRAPPPRVRYNKDGKKIVPTAPKA

SEQ ID NO: 7467 - DNA, 360 bp, Saccharomyces cerevisiae
  CDS (1)..(360)
atgccaaaaaagagagcttccaacggtagaaacaagaagggtagaggtcacgtcaagccagtgagatgtgttaactgttccaagtccattccaaaggataaggctatcaagagaatggctattagaaacattgttgaagctgctgccgtcagagatttgtccgaagcttctgtctacccagaatacgccttgccaaagacttacaacaagttgcactactgtgtctcctgtgctattcacgccagaattgttagagttagatccagagaagacagaaagaacagagctcctccacaaagaccaagatttaacagggataacaaagttcctccagcagctgccgcaaagaaagctttgtaa

SEQ ID NO: 7468 - protein, 119 aa, Saccharomyces cerevisiae
MPKKRASNGRNKKGRGHVKPVRCVNCSKSIPKDKAIKRMAIRNIVEAAAVRDLSEASVYPEYALPKTYNKLHYCVSCAIHARIVRVRSREDRKNRAPPQRPRFNRDNKVPPAAAAKKAL

SEQ ID NO: 7469 - DNA, 402 bp, Arabidopsis thaliana
  CDS (1)..(402)
atgactttcaagcgaaggaacggtgggaggaacaagcacaacagaggacacgtcaacccaatcagatgctccaactgtggcaaatgttgccccaaggacaaggccattaagaggttcattgtgaggaacattgtggagcaggctgctattagagatgttcaggaagctagcgtctatgagggatacacatttccgaagctatatgcaaagacgcaatactgtgtctcctgtgctatccactctcatgtcgttagagtccgttcccgcaccaaccgcagggttcgtactcctccacctcgtttcgccagacgcaaggaggatactcccaagcctgggcaaccaggacaggcacctcgtcctgctggacctggagctgcagctgcagctgcaccgcgtgtctga

SEQ ID NO: 7470 - protein, 133 aa, Arabidopsis thaliana
MTFKRRNGGRNKHNRGHVNPIRCSNCGKCCPKDKAIKRFIVRNIVEQAAIRDVQEASVYEGYTFPKLYAKTQYCVSCAIHSHVVRVRSRTNRRVRTPPPRFARRKEDTPKPGQPGQAPRPAGPGAAAAAAPRV

SEQ ID NO: 7471 - DNA, 393 bp, Pisum sativum
  CDS (1)..(393)
atgactttcaagcgtaggaatggaggacgtaacaagcatggccgtggccatgtcaagttcatccgttgctccaactgcggaaaatgctgtcccaaggataaggcaatcaagagatttcttgtgaggaacattgttgaacaggctgctgttagagatgttcaggaagcttgtgtctatgaccaatacactcttcctaagctgtatgtgaagatgcagtactgtgtgtcttgtgctattcattctcatgttgtgagggttagatctcgcactgataggaggaagcgtgaccctcctcagcgtttcatcaggcgcagggatgatgcaccaaggcctggtcagcctggtcaagcacctcgccctgctgtagccggaggagctcctgtccgcacttaa

SEQ ID NO: 7472 - protein, 130 aa, Pisum sativum
MTFKRRNGGRNKHGRGHVKFIRCSNCGKCCPKDKAIKRFLVRNIVEQAAVRDVQEACVYDQYTLPKLYVKMQYCVSCAIHSHVVRVRSRTDRRKRDPPQRFIRRRDDAPRPGQPGQAPRPAVAGGAPVRT

SEQ ID NO: 7473 - DNA, 375 bp, Medicago sativa
  CDS (1)..(375)
atggaggccggtaacaaacatggtcgtgaccatgtcaaattcattcgttgctccaactgtggtaaatgctgtcccaaggacaaggcaatcaagaggtttcttgttaggaacattgttgaacaagctgcagttagagatgttcaggaagcatgtgtttatgaccagtacactcttcataagctgtatgtgaagatgcagtactgtgtttcatgtgctatccattctcatgttgtgagagttagatctcgcactgataggaggaagcgtgaccctccacagcgtttcatcaggcgcagggatgatgccccaaggcctggtcagcctggtcaagcgcctcgccctgctgtagccgaaggagctcctgtccgtacctaa

SEQ ID NO: 7474 - protein, 124 aa, Medicago sativa
MEAGNKHGRDHVKFIRCSNCGKCCPKDKAIKRFLVRNIVEQAAVRDVQEACVYDQYTLHKLYVKMQYCVSCAIHSHVVRVRSRTDRRKRDPPQRFIRRRDDAPRPGQPGQAPRPAVAEGAPVRT

SEQ ID NO: 7475 - DNA, 363 bp, Schizosaccharomyces pombe
  CDS (1)..(363)
atgactcaaaaaagaagaaattgtggtcgtaacaagcatggccgtggtcataccaaatttgtgagatgtattaactgcagccgtgccgtccccaaggacaaggccatcaagcgctggaacatccgtaatatggttgaaactgctgcaattcgtgatttgtctgaagcctctgtttatagtgaatatgctattcccaagatatatgtcaagcttcaatactgtgtctcatgtgctattcacgctcgcgttgttcgtgtccgttcccgtgaaggacgccgcattcgtactcctccccctcgtgtccgctataaccgtgatggcaagagagttaaccctgctgctattgccaaaacagctctttaa

SEQ ID NO: 7476 - protein, 120 aa, Schizosaccharomyces pombe
MTQKRRNCGRNKHGRGHTKFVRCINCSRAVPKDKAIKRWNIRNMVETAAIRDLSEASVYSEYAIPKIYVKLQYCVSCAIHARVVRVRSREGRRIRTPPPRVRYNRDGKRVNPAAIAKTAL

SEQ ID NO: 7477 - DNA, 360 bp, Schizosaccharomyces pombe
  CDS (1)..(360)
atgactcagaagagaagaaataacggacgcaacaagcacggccgtggacacgttaaattcgttcgctgcatcaactgcagccgcgctgtccccaaggacaaagccattaagcgctggactatccgtaacatggttgaaactgccgccattcgtgacttgtctgaggcttccgtttacagcgagtacaccatccccaagttgtacatcaagttgcaatattgtgtctcttgcgctattcactctcgtgtggtccgtgttcgctctcgcgagggacgtcgtattcgtacacctcctccccgtgtacgctacaaccgcgatggcaagaaggttaaccctactgccgttgccaaaaatttgtag

SEQ ID NO: 7478 - protein, 119 aa, Schizosaccharomyces pombe
MTQKRRNNGRNKHGRGHVKFVRCINCSRAVPKDKAIKRWTIRNMVETAAIRDLSEASVYSEYTIPKLYIKLQYCVSCAIHSRVVRVRSREGRRIRTPPPRVRYNRDGKKVNPTAVAKNL

SEQ ID NO: 7479 - DNA, 360 bp, Saccharomyces cerevisiae
  CDS (1)..(360)
atgccaaaaaagagagcttccaacggtagaaacaagaagggtagaggtcacgtcaagccagtgagatgtgttaactgttccaagtccattccaaaggataaggctatcaagagaatggctattagaaacattgttgaagctgctgccgtcagagatttgtccgaagcttctgtctacccagaatacgccttgccaaagacttacaacaagttgcactactgtgtctcctgtgctattcacgccagaattgttagagttagatccagagaagacagaaagaacagagctcctccacaaagaccaagatttaacagggataacaaagtttctccagcagctgccgcaaagaaagctttgtaa

SEQ ID NO: 7480 - protein, 119 aa, Saccharomyces cerevisiae
MPKKRASNGRNKKGRGHVKPVRCVNCSKSIPKDKAIKRMAIRNIVEAAAVRDLSEASVYPEYALPKTYNKLHYCVSCAIHARIVRVRSREDRKNRAPPQRPRFNRDNKVSPAAAAKKAL

SEQ ID NO: 7481 - DNA, 396 bp, Arabidopsis thaliana
  CDS (1)..(396)
atgactttcaagcgaaggaacggtgggaggaacaagcacaacagaggacacgtcaacccaatcagatgctccaactgcggcaaatgctgccctaaggacaaggccattaagaggttcattgtgaggaacattgtggagcaggctgctattagagatgttcaggaagctagcgtctatgagggatacacattgccgaagctatatgcaaagacgcaatactgtgtctcctgtgctatccactctcacgtcgttagagtccgttcccgcaccaaccgtagggttcgtactcctcctccacgtttcaccagacgcaaggaggatactcccaagcctggacagccaggacaggcccctcgtccagctgggcctggagctgcagctgcaccgcgtgtctga

SEQ ID NO: 7482 - protein, 131 aa, Arabidopsis thaliana
MTFKRRNGGRNKHNRGHVNPIRCSNCGKCCPKDKAIKRFIVRNIVEQAAIRDVQEASVYEGYTLPKLYAKTQYCVSCAIHSHVVRVRSRTNRRVRTPPPRFTRRKEDTPKPGQPGQAPRPAGPGAAAAPRV

SEQ ID NO: 7483 - DNA, 360 bp, Neurospora crassa
  CDS (1)..(360)
atggtcaagaagagaaagaacaacggccgcaacaagaagggccgcggccacgtcaagcccatccgctgctccaactgctcgcgatgcactcccaaggacaaggccatcaagcgcttcaccatccgcaacatggttgagtccgctgccatccgtgatatctcggatgcctcggtgttcgctgagtacacggttcccaagatgtacctcaagctgcagtactgcgtctcttgcgccattcacggcaagattgtccgtgtccgttcccgcgagggccgccgcaaccgtgctcctcccccgcgtgtccgctacaacaaggacggcaagaaggtcacccctacccagggtgctaagaccgcctaa

SEQ ID NO: 7484 - protein, 119 aa, Neurospora crassa
MVKKRKNNGRNKKGRGHVKPIRCSNCSRCTPKDKAIKRFTIRNMVESAAIRDISDASVFAEYTVPKMYLKLQYCVSCAIHGKIVRVRSREGRRNRAPPPRVRYNKDGKKVTPTQGAKTA

SEQ ID NO: 7485 - DNA, 381 bp, Schizophyllum commune
  CDS (1)..(381)
atgaccaagaagagaagaaatggcggccgtaacaagagtggccgtggccacgtaacgttcgtgcgttgctcgaactgctcgcgctgcgtcgcgaaggacaaggcgatcaagcgcttcaccgtccgcaacatggtggagagcgccgccatccgtgatatcagcgatgcttccgtgtaccctgaatacgcgatccccaagctgtacatcaaaattgcttactgcgtttcctgcgccatccactcccatgtcgtccgtgtccgctctcgcgagggccgccgcaaccgtgctcctcccccgcgtgtccgctggaaggacggcaagaaggtcaaccccgcggtcgccgcagctgaggacgcgaaggccgccgctgccagaacctga

SEQ ID NO: 7486 - protein, 126 aa, Schizophyllum commune
MTKKRRNGGRNKSGRGHVTFVRCSNCSRCVAKDKAIKRFTVRNMVESAAIRDISDASVYPEYAIPKLYIKIAYCVSCAIHSHVVRVRSREGRRNRAPPPRVRWKDGKKVNPAVAAAEDAKAAAART

SEQ ID NO: 7487 - DNA, 393 bp, Brassica napus
  CDS (1)..(393)
atgactttcaagcgcaggaacggagggaggaacaagcacaaccgtggccacgtcaagccaatcagatgctccaactgcggcaaatgctgccccaaagacaaggccatcaagaggttcatagtgaggaacatcgtggagcaggctgccattagagatgttcaggaagccagcgtctacgatgggtacacgttgccaaagctgtatgcgaagacgcagtactgtgtctcgtgtgctatccactctcacgttgttcgtgtccgttcccgcactaaccgcagggttcgtactccccctccacgtttcgtcagacgcaaggaggatgcgcccaagcctggacaacctggtcaggctcctcgtcctgctggagctggagcagctgcaccgcgtgcctga

SEQ ID NO: 7488 - protein, 130 aa, Brassica napus
MTFKRRNGGRNKHNRGHVKPIRCSNCGKCCPKDKAIKRFIVRNIVEQAAIRDVQEASVYDGYTLPKLYAKTQYCVSCAIHSHVVRVRSRTNRRVRTPPPRFVRRKEDAPKPGQPGQAPRPAGAGAAAPRA

SEQ ID NO: 7489 - DNA, 393 bp, Brassica napus
  CDS (1)..(393)
atgactttcaagcgcaggaacggtggcaggaacaagcacaaccgtggtcatgtgaagcccatcaggtgttccaactgcgggaaatgctgtcccaaggataaggctatcaagaggttcatcgtcaggaacatcgttgagcaggctgccatcagagatgttcaagaagccagtgtctacgatggttacactcttcccaagttgtacgccaagacgcagtactgtgtctcatgtgctatccactctcacgttgtgagagtccgttcccgcaccaaccgtagggttcgtacccctcccccacgtttcgtcagacgcaaggaggatgctcccaagcccggacaacctggtcaggctgctcgccctgctggtggtgcccctgctgctcctcgtgcctag

SEQ ID NO: 7490 - protein, 130 aa, Brassica napus
MTFKRRNGGRNKHNRGHVKPIRCSNCGKCCPKDKAIKRFIVRNIVEQAAIRDVQEASVYDGYTLPKLYAKTQYCVSCAIHSHVVRVRSRTNRRVRTPPPRFVRRKEDAPKPGQPGQAARPAGGAPAAPRA

SEQ ID NO: 7491 - DNA, 390 bp, Brassica napus
  CDS (1)..(390)
atgactttcaaacgcaggaacggagggaggaacaagcacaaccgtgggcacgtgaagccaatcagatgctccaactgcggcaaatgttgcccaaaggacaaggccatcaagaggtttatcgtgaggaacattgtggagcaggctgctattagagatgttcaggaagctagcgtatacgatgggtacacattgcctaagctgtatgctaagacgcagtactgtgtctcctgtgcgatacactctcacgttgttagagttcgttcccgcaccaaccgcagagttcgtactcccccgcctcgttttgttagacgcaaggaggatgctcccaagcctggacaacctggtcaggctcctcgtcctgctggagctgcagctgccccgcgtgcctga

SEQ ID NO: 7492 - protein, 129 aa, Brassica napus
MTFKRRNGGRNKHNRGHVKPIRCSNCGKCCPKDKAIKRFIVRNIVEQAAIRDVQEASVYDGYTLPKLYAKTQYCVSCAIHSHVVRVRSRTNRRVRTPPPRFVRRKEDAPKPGQPGQAPRPAGAAAAPRA

SEQ ID NO: 7493 - DNA, 393 bp, Brassica napus
  CDS (1)..(393)
atgactttcaaacgaaggaacggtggtaggaacaagcacaaccgtggtcatgtgaacccaatcaggtgttccaactgcgggaaatgctgtcccaaggataaggcgattaagagattcctcgtcaggaacatcgttgagcaagctgccatcagagatgttcaagaagctagtgtttacgatggttacactctaccaaagttgtacgctaagatgcagtactgtgtttcatgtgctatccactctcacgttgtgagagttcgatcgcgcactaaccgtagagttcgtaccccaccgccccgttttgccagacgcaaggaggatgctcccaagcctggacaacctggtcaggcccctcgccctgctggtggtgctccagctgctcctcgtgcctaa

SEQ ID NO: 7494 - protein, 130 aa, Brassica napus
MTFKRRNGGRNKHNRGHVNPIRCSNCGKCCPKDKAIKRFLVRNIVEQAAIRDVQEASVYDGYTLPKLYAKMQYCVSCAIHSHVVRVRSRTNRRVRTPPPRFARRKEDAPKPGQPGQAPRPAGGAPAAPRA

SEQ ID NO: 7495 - DNA, 393 bp, Brassica napus
  CDS (1)..(393)
atgactttcaagcgcaggaacggtggcaggaacaagcacaaccgtggtcatgtgaagcccatcaggtgttccaactgcgggaaatgctgtcccaaggataaggctatcaagaggttcatcgtcaggaacatcgttgagcaggctgccatcagagatgttcaagaagccagtgtctacgatggttacactcttcccaagttgtacgccaagacgcagtactgtgtctcatgtgctatccactctcacgttgtgagagtccgttcccgcaccaaccgtagggttcgtaccccacccccacgtttcgtcagacgcaaggaggatgctcccaagcccggacaacctggtcaggctgctcgccctgctggtggtgcccctgctgctcctcgtgcctaa

SEQ ID NO: 7496 - protein, 130 aa, Brassica napus; identical to SEQ ID NO: 7490

SEQ ID NO: 7497 - DNA, 393 bp, Brassica napus
  CDS (1)..(393)
atgactttcaagcgcaggaacggagggaggaacaagcacaaccgtggccacgtcaagccaatcagatgctccaactgcggcaaatgctgccccaaagacaaggccatcaagaggttcatagtgaggaacatcgtggagcaagctgccattagagatgttcaggaagccagcgtctacgatgggtacacgttgccaaagctgtatgcgaagacgcagtactgtgtctcatgtgcgatccactctcacgttgttcgtgtccgttcccgcactaaccgcagggttcgtactccccctccacgtttcgtcagacgcaaggaggatgcgcccaagcctggacaacctggtcaggctcctcgtcctgctggagctggagcagctgcaccgcgtgcctga

SEQ ID NO: 7498 - protein, 130 aa, Brassica napus; identical to SEQ ID NO: 7488

SEQ ID NO: 7499 - DNA, 393 bp, Brassica napus
  CDS (1)..(393)
atgactttcaagcgtagaaacggtggcaggaacaagcacaaccgtggtcatgtgaaccccattaggtgttccaactgcgggaaatgctgccccaaggataaggcaattaagagattccttgtcaggaacattgttgaacaagcagctatcagagatgttcaagaagccagtgtttacgatggttacactctcccaaagttgtacgccaagatgcaatattgtgtttcatgcgctatccactcacacgttgtgagagtccgatcccgcaccaaccgtagggttcgtaccccacctcctcgttttgctagacgcaaggaggatactcccaagccgggacaacctggtcagccccctcgccctgctggtggtgcccctgctgctcctcgtgcttaa

SEQ ID NO: 7500 - protein, 130 aa, Brassica napus
MTFKRRNGGRNKHNRGHVNPIRCSNCGKCCPKDKAIKRFLVRNIVEQAAIRDVQEASVYDGYTLPKLYAKMQYCVSCAIHSHVVRVRSRTNRRVRTPPPRFARRKEDTPKPGQPGQPPRPAGGAPAAPRA

SEQ ID NO: 7501 - DNA, 399 bp, Zea mays
  CDS (1)..(399)
atgacgttcaagcggaggaatggcggacgcaacaagcacgggcgcggccacgtcaagtacatccgctgctccaactgcgccaagtgctgccccaaggataaggctatcaagcggttcttggtgaggaacattgttgagcaggctgccgtgagagatgtgcaggaggcctgtgtacatgatggatatgttctacccaaattgtatgcaaaggttcatcactgtgtctcatgtgcaatccatgcgcacattgtccgggtccgctctcgtgagaacaggaggaaccgtgagcccccgcagcgcttcagacgccgggatgatggcccaaggcctggtcagggcccgccgcgcccaggcggtgcagctcctgcagctgcagctgctgctgctcctcgtacctaa

SEQ ID NO: 7502 - protein, 132 aa, Zea mays
MTFKRRNGGRNKHGRGHVKYIRCSNCAKCCPKDKAIKRFLVRNIVEQAAVRDVQEACVHDGYVLPKLYAKVHHCVSCAIHAHIVRVRSRENRRNREPPQRFRRRDDGPRPGQGPPRPGGAAPAAAAAAAPRT

SEQ ID NO: 7503 - DNA, 390 bp, Glycine max
  CDS (1)..(390)
atgactttcaagcgcaggaatggaggtcgcaacaaacacggccgcggccacgtcaagttcattcgatgctccaactgcggcaaatgctgccctaaggacaaggctatcaagaggtttctggtgaggaacattgttgaacaggctgcagtcagagatgtgcaggaggcttgtgtctacgaacaatacacgcttccgaagctgtatgtgaagatgcagtattgtgtttcctgtgctatccactctcatgttgtgagggttcgatcccgcactgataggagaaagcgtgagcctccacagcgattcatcaggcgcagggatgatgcaccaaggcctggtcagcctggtcaagccccacgtcctgctggagtaggagctcctgcccgagcttaa

SEQ ID NO: 7504 - protein, 129 aa, Glycine max
MTFKRRNGGRNKHGRGHVKFIRCSNCGKCCPKDKAIKRFLVRNIVEQAAVRDVQEACVYEQYTLPKLYVKMQYCVSCAIHSHVVRVRSRTDRRKREPPQRFIRRRDDAPRPGQPGQAPRPAGVGAPARA

SEQ ID NO: 7505 - DNA, 393 bp, Glycine max
  CDS (1)..(393)
atgacattcaagcgcaggaatggaggtcgcaacaaacacggccgcggccatgtcaaattcatccgatgctccaactgcggaaaatgctgccccaaggacaaggccatcaagaggtttttggttaggaacattgttgaacaggctgcagtcagagatgtgcaggaagcttgtgtctatgaacaatatacacttccaaaactctatgtgaagatgcagtactgtgtttcctgtgctatccactctcatgttgtgagggttcgatcccgcaccgacaggaggaagcgtgagcctccacagagattcatcaggcgcagggatgatgcaccaagacctggtcagcccggtcaaggacctcgtcctgctggcacagcagcagcacctgtccgaacctaa

SEQ ID NO: 7506 - protein, 130 aa, Glycine max
MTFKRRNGGRNKHGRGHVKFIRCSNCGKCCPKDKAIKRFLVRNIVEQAAVRDVQEACVYEQYTLPKLYVKMQYCVSCAIHSHVVRVRSRTDRRKREPPQRFIRRRDDAPRPGQPGQGPRPAGTAAAPVRT

SEQ ID NO: 7507 - DNA, 390 bp, Glycine max
  CDS (1)..(390)
atgacttttaagcgcaggaatggaggtcgcaacaaacacggccgtggccacgtcaagttcattcgatgctccaactgcggcaaatgctgtcctaaggacaaggctatcaagaggtttctggtgaggaacattgttgaacaggctgcagtcagagatgttcaggaggcttgtgtctatgaacaatacacgcttccgaagctttatgtgaagatgcagtattgtgtttcctgtgctatccactctcatgttgtgagggttcgatcccgcactgataggagaaagcgtgagcctccacagcgatttatcagacgcagggatgatgcaccaaggcctggtcagcctggtcaagccccacgtcctgctggagtaggagctcctgcccgaacttaa

SEQ ID NO: 7508 - protein, 129 aa, Glycine max
MTFKRRNGGRNKHGRGHVKFIRCSNCGKCCPKDKAIKRFLVRNIVEQAAVRDVQEACVYEQYTLPKLYVKMQYCVSCAIHSHVVRVRSRTDRRKREPPQRFIRRRDDAPRPGQPGQAPRPAGVGAPART

SEQ ID NO: 7509 - DNA, 393 bp, Glycine max
  CDS (1)..(393)
atgacattcaagcgcaggaatggaggtcgcaacaaacacggccgcggccacgtcaaattcatccggtgctccaactgtggcaaatgctgtcccaaggacaaggccatcaagaggtttctggtgaggaacattgttgaacaggctgcagtcagagatgtgcaggaagcttgtgtctatgaacaatatactcttccgaaactctatgtgaagatgcagtactgtgtttcttgtgctatccactctcatgttgtgagggttcgatcccgcactgacaggaggaaacgtgagcctccacagagattcatcaggcgcagggatgatgcacctaggcctggtcagcccggcggccaaggacctcgtcctgctggcacagcagcacctgtccgaacctaa

SEQ ID NO: 7510 - protein, 130 aa, Glycine max
MTFKRRNGGRNKHGRGHVKFIRCSNCGKCCPKDKAIKRFLVRNIVEQAAVRDVQEACVYEQYTLPKLYVKMQYCVSCAIHSHVVRVRSRTDRRKREPPQRFIRRRDDAPRPGQPGGQGPRPAGTAAPVRT

SEQ ID NO: 7511 - DNA, 390 bp, Glycine max
  CDS (1)..(390)
atgacattcaagcgcaggaatggaggtcgcaacaaacacggccgtggccacgtcaaattcatccgatgctccaactgtggcaaatgctgccccaaggacaaggccatcaagaggtttcttgtgaggaacattgttgaacaggctgcagtcagagatgtgcaggaagcctgtgtctatgaacagtacacgcttccgaaactctatgtgaagatgcagtactgtgtttcctgtgctatccactctcatgttgtgagggttcgatcccgcactgacaggaggaagcgtgaccctccacagcgattcatcaggcgcagggatgatgcacaaaggcccggtcagcctggtcaagcacctcgtcctgctggcacagcagcacctgtccgaacctaa

SEQ ID NO: 7512 - protein, 129 aa, Glycine max
MTFKRRNGGRNKHGRGHVKFIRCSNCGKCCPKDKAIKRFLVRNIVEQAAVRDVQEACVYEQYTLPKLYVKMQYCVSCAIHSHVVRVRSRTDRRKRDPPQRFIRRRDDAQRPGQPGQAPRPAGTAAPVRT

SEQ ID NO: 7513 - DNA, 390 bp, Glycine max
  CDS (1)..(390)
atgacattcaagcgcaggaacggaggtcgcaacaaacacggccgtggccatgtcaaattcatccgatgctccaactgcggcaaatgctgccccaaggacaaggccatcaagaggtttcttgtgaggaacattgttgaacaggctgcagtcagagatgtgcaggaagcctgtgtctatgaacaatacacgcttccgaaactatatgtgaagatgcagtactgtgtttcctgtgctatccattctcatgttgtgagggttcgatcccgcactgataggaggaagcgtgagcctccacagcgattcatcaggcgcagggatgatgcacaaaggcctggtcagcctggtcaagctcctcgtcctgctggcacaggagcacctgttcgaacctaa

SEQ ID NO: 7514 - protein, 129 aa, Glycine max
MTFKRRNGGRNKHGRGHVKFIRCSNCGKCCPKDKAIKRFLVRNIVEQAAVRDVQEACVYEQYTLPKLYVKMQYCVSCAIHSHVVRVRSRTDRRKREPPQRFIRRRDDAQRPGQPGQAPRPAGTGAPVRT

SEQ ID NO: 7515 - DNA, 387 bp, Helianthus annuus
  CDS (1)..(387)
atgactttcaagcgaagaaacggcggacggaacaagcacggtcgcggtcacgtcaagttcatccgctgctctaactgtggaaagtgctgccctaaggacaaggctattaagagatttaatgtgaggaacatagtggaacaagcagctgttagggatgttcaagaagcttgtgcatttgatcagtacacacttcccaagttgtatttgaaggtgcaatattgtgtttcttgcgcaattcactcgaaagttgttagggtccgctcaaggactgataggaggaaccgtgagccaccaaagcgtttctctcgcccaagggatgatgctcctaagccaggtcaagcccctcgtcccgggggtgcaggtggtccccctcccgtgcgttcttaa

SEQ ID NO: 7516 - protein, 128 aa, Helianthus annuus
MTFKRRNGGRNKHGRGHVKFIRCSNCGKCCPKDKAIKRFNVRNIVEQAAVRDVQEACAFDQYTLPKLYLKVQYCVSCAIHSKVVRVRSRTDRRNREPPKRFSRPRDDAPKPGQAPRPGGAGGPPPVRS

SEQ ID NO: 7517 - DNA, 435 bp, Hordeum vulgare
  CDS (1)..(435)
atgacgttcaagcggaggaacggcgggcgcaacaagcacggccgcggccatgtcaagtacatccgctgctccaactgcgccaagtgctgccccaaggacaaggctatcaagcgtttcttggtgaggaacattgtggagcaggctgctgtgagagatgtgcaggaggcttgtgtgcatgatggatatgttctccccaagctgtatgccaaggtgcaccactgtgtttcttgtgccatccatgctcacattgtccgtgtccgctcccgtgagaacaggaggaaccgtgagcccccgcagcgtttcaggcgcagggacgacggccctaggcctggacaaggtggcccgccccgtgctggaggccctggtggacctggtggtgcgcctgctggcgctggcgctgttcctggcgcccctgctccccgtgcattgatctag

SEQ ID NO: 7518 - protein, 144 aa, Hordeum vulgare
MTFKRRNGGRNKHGRGHVKYIRCSNCAKCCPKDKAIKRFLVRNIVEQAAVRDVQEACVHDGYVLPKLYAKVHHCVSCAIHAHIVRVRSRENRRNREPPQRFRRRDDGPRPGQGGPPRAGGPGGPGGAPAGAGAVPGAPAPRALI

SEQ ID NO: 7519 - DNA, 435 bp, Hordeum vulgare
  CDS (1)..(435)
atgacgttcaagcggaggaacggcggccgcaacaagcacggccgcggccatgtcaagtacatccgctgctccaactgcgccaagtgctgccccaaggacaaggctatcaagcgtttcttggtgaggaacattgtggagcaggctgctgtgagagatgtgcaggaggcttgtgtgcatgatggatatgttctccccaagctgtgtgccaaggtgcaccactgtgttggttgtgccatgcatgctcacattggccgtgtgcgctcccgagagaacaggaggaaccgtgagccccctatgcgttgggtgcgcagggacgacgggcctgtgcctggacaggggggtccggccttggctaggagccctagaggacctggatgggcgcctgcgggagctttggcgggatattggcgctttgccgggtatgcgttgcagtag

SEQ ID NO: 7520 - protein, 144 aa, Hordeum vulgare
MTFKRRNGGRNKHGRGHVKYIRCSNCAKCCPKDKAIKRFLVRNIVEQAAVRDVQEACVHDGYVLPKLCAKVHHCVGCAMHAHIGRVRSRENRRNREPPMRWVRRDDGPVPGQGGPALARSPRGPGWAPAGALAGYWRFAGYALQ

SEQ ID NO: 7521 - DNA, 435 bp, Hordeum vulgare
  CDS (1)..(435)
atgacgttcaagcggaggaacggcggccgcaacaagcacggccgcggccatgtcaagtacatccgctgctccaactgcgccaagtgctgccccaaggacaaggctatcaagcgtttcttggtgaggaacattgtggagcaggctgctgtgagagatgtgcaggaggcttgtgtgcatgatggatatgttctccccaagctgtatgccaaggtgcaccactgtgtttcttgtgccatccatgctcacattggccgtgtccgctcccgtgagaacaggaggaaccgtgagcccccgcagcgtttcaggcgcagggacgacggccctaagcctggacaaggtggcccgccccgtgctggaggccctggtggacctggtggtgcgcctgctggcgctggcgctgttcctgtcgcccctgctccccgtgcattgatctag

SEQ ID NO: 7522 - protein, 144 aa, Hordeum vulgare
MTFKRRNGGRNKHGRGHVKYIRCSNCAKCCPKDKAIKRFLVRNIVEQAAVRDVQEACVHDGYVLPKLYAKVHHCVSCAIHAHIGRVRSRENRRNREPPQRFRRRDDGPKPGQGGPPRAGGPGGPGGAPAGAGAVPVAPAPRALI

SEQ ID NO: 7523 - DNA, 396 bp, Linum usitatissimum
  CDS (1)..(396)
atgcctttcaagcgaaggaacggaggtcgcaacaagcacggacgcggccacaccaagttcatccgctgctccaactgcggcaaatgctgccctaaggacaaagcgatcaagagattcctggtgaggaacatcgtcgagcaagctgctgtcagagatgttcaggaagcatgcgtctatgacggatatgttctcccaaagctgtacgtaaagatgcaatactgcgtctcatgtgccatccactctcgcgttgtgagggtccgatcaaccactgatcgcaggaagcgtgacccaccccagcgtttccagaggcgcaaggaggatgctaagcctggtcaaggtggacctgctggtcctggtgctcgccctggcgctcctccagttgctgcccgtgcttaa

SEQ ID NO: 7524 - protein, 131 aa, Linum usitatissimum
MPFKRRNGGRNKHGRGHTKFIRCSNCGKCCPKDKAIKRFLVRNIVEQAAVRDVQEACVYDGYVLPKLYVKMQYCVSCAIHSRVVRVRSTTDRRKRDPPQRFQRRKEDAKPGQGGPAGPGARPGAPPVAARA

SEQ ID NO: 7525 - DNA, 396 bp, Linum usitatissimum
  CDS (1)..(396)
atgcctttcaagcgtaggaacggaggtcgcaacaagcagggacgcggccacactaagttcatccgctgctccaactgcggcaaatgctgccctaaggacaaggcgatcaagagattccttgtgaggaacattgtcgagcaggctgctgttagagatgttcaggaatcatgcgtctttgacggatatgttctcccaaagctttatgtaaagatgcagtactgcgtctcatgtgccatccactctcgcgttgtgagggtccgatcaagcactgatcgcaggaagcgtgacccaccccagcgtttccagaggcgcaaggaggatgctaagcctggtcaaggtggacctgctggtcctggtgctcgccctggcgctcctccagttgctgcccgtgcttaa

SEQ ID NO: 7526 - protein, 131 aa, Linum usitatissimum
MPFKRRNGGRNKQGRGHTKFIRCSNCGKCCPKDKAIKRFLVRNIVEQAAVRDVQESCVFDGYVLPKLYVKMQYCVSCAIHSRVVRVRSSTDRRKRDPPQRFQRRKEDAKPGQGGPAGPGARPGAPPVAARA

SEQ ID NO: 7527 - DNA, 396 bp, Linum usitatissimum
  CDS (1)..(396)
atgacgttcaagcgaaggaatggaggtcgcaacaagcacggacgtggccacaccaagttcatccgctgctccaactgcggcaaatgctgccctaaggacaaagctatcaagaggtttctggtgaggaacatcgttgagcaagctgctgtccgtgatgttcaggaggcttgcgtctatgacggatatgttcttccgaagctgtacgtgaagatgcaatactgtgtctcctgtgctatccactctcgtgttgtgagggtgcgatccactgttgatcgtaggaagcgtgacccaccccagcgtttccagaggcgcaaggaggacaacaagcctggccaaggtgctgcaggtggccctggagctcgccctgccggtgctccagctccggtccgtgcttaa

SEQ ID NO: 7528 - protein, 131 aa, Linum usitatissimum
MTFKRRNGGRNKHGRGHTKFIRCSNCGKCCPKDKAIKRFLVRNIVEQAAVRDVQEACVYDGYVLPKLYVKMQYCVSCAIHSRVVRVRSTVDRRKRDPPQRFQRRKEDNKPGQGAAGGPGARPAGAPAPVRA

SEQ ID NO: 7529 - DNA, 399 bp, Zea mays
  CDS (1)..(399)
atgacgttcaagcggaggaacggcggacgcaacaagcacgggcgcggccacgtcaagtacatacgctgctccaactgcgccaagtgctgcccaaaggataaggctatcaagcggttcttggtgaggaacattgttgagcaggctgctgtgagggacgtgcaggaggcttgtgtgcatgatggatatgttcttcccaaattgtacgcaaaggttcatcactgtgtctcatgcgcaatccatgcgcacattgtccgtgtccgctctcgtgagaacaggaggaaccgtgagcccccgcagcgtttcaggcgccgggatgatggcccaaggccaggtcagggcccaccgcgcccaggtgctgctgccacagcagctccccctgctgccgctcctcgtacctaa

SEQ ID NO: 7530 - protein, 132 aa, Zea mays
MTFKRRNGGRNKHGRGHVKYIRCSNCAKCCPKDKAIKRFLVRNIVEQAAVRDVQEACVHDGYVLPKLYAKVHHCVSCAIHAHIVRVRSRENRRNREPPQRFRRRDDGPRPGQGPPRPGAAATAAPPAAAPRT

SEQ ID NO: 7531 - DNA, 429 bp, Triticum aestivum
  CDS (1)..(429)
atgacgttcaagcggaggaacggcgggcgcaacaagcacggccgcggccacgtcaagtacatccgctgctccaactgcgccaagtgctgccccaaggacaaggctatcaagcgtttcttggtgaggaacatcgtggagcaggctgctgtgagagatgtgcaggaggcttgtgtgcatgatggatatgttcttcccaagctgtatgccaaggtgcaccactgcgtttcctgtgccatccatgctcacattgtccgtgtccgctcccgtgagaacaggaggaaccgggagcccccgcagcgtttcaggcgcagggacgacggcccgaggcctggacagggtggcccgccccgtgccggcggccctggtgctcctggtggtgcgcctgctggcgccggtgccgttcctggtgcccctgctccccgtgtctag

SEQ ID NO: 7532 - protein, 142 aa, Triticum aestivum
MTFKRRNGGRNKHGRGHVKYIRCSNCAKCCPKDKAIKRFLVRNIVEQAAVRDVQEACVHDGYVLPKLYAKVHHCVSCAIHAHIVRVRSRENRRNREPPQRFRRRDDGPRPGQGGPPRAGGPGAPGGAPAGAGAVPGAPAPRV

SEQ ID NO: 7533 - DNA, 420 bp, Triticum aestivum
  CDS (1)..(420)
atgacgttcaagcggaggaacggcgggcgcaacaagcatggccgcggccacgtcaagtacatccgctgctccaactgcgccaagtgctgccccaaggacaaggctatcaagcgtttcttggtgaggaacatcgtggagcaggctgctgtgagagatgtgcaggaggcttgtgtgcatgatggatatgtgcttcccaagctgtacgccaaggtgcaccactgtgtgtcttgtgccatccatgcccacattgtccgtgtccgctcgcgtgagaacaggaggaaccgtgagcccccgcagcgtttcaggcgcagggatgatggcccgaggcctggacagggtggcccgccccgtgctggtggacctggtggcgcgcctgctggcgctggtgccgttcctggtgctcctgctccccgtgtctag

SEQ ID NO: 7534 - protein, 139 aa, Triticum aestivum
MTFKRRNGGRNKHGRGHVKYIRCSNCAKCCPKDKAIKRFLVRNIVEQAAVRDVQEACVHDGYVLPKLYAKVHHCVSCAIHAHIVRVRSRENRRNREPPQRFRRRDDGPRPGQGGPPRAGGPGGAPAGAGAVPGAPAPRV

SEQ ID NO: 7535 - DNA, 429 bp, Triticum aestivum
  CDS (1)..(429)
atgacgttcaagcggaggaacggcgggcgcaacaagcacggccgcggccacgtcaagtacatccgctgctccaactgcgccaagtgctgccccaaggacaaggctatcaagcgtttcttggtgaggaacatcgtggagcaggctgctgtgagagatgtgcaggaggcttgtgtacatgatggatatgttcttcccaagctgtatgccaaggtgcaccactgcgtttcctgtgccatccatgctcacattgtccgtgtccgctcccgtgagaacaggaggaaccgggagcccccgcagcgtttcaggcgcagggacgacggcccgaggcctggacagggtggcccgccccgtgccggcggccctggtgcccctggtggtgcgcctgctggcgccggtgccgttcctggtgcccctgctccccgtgtctag

SEQ ID NO: 7536 - protein, 142 aa, Triticum aestivum; identical to SEQ ID NO: 7532

SEQ ID NO: 7537 - DNA, 420 bp, Triticum aestivum
  CDS (1)..(420)
atgacgttcaagcggaggaacggcgggcgcaacaagcatggccgcggccacgtcaagtacatccgctgctccaactgcgccaagtgctgccccaaggacaaggctatcaagcgtttcttggtgaggaacatcgtggagcaggctgctgtgagagatgtgcaggaggcttgtgtgcatgatggatatgtgcttcccaagctgtacgccaaggtgcaccactgtgtgtcttgtgccatccatgcccacattgtccgtgtccgctcgcgtgagaacagggggaaccgtgagcccccgcagcgtttcaggcgcaggggtgatggcccgaggcctggacagggtggcccgccccgtgctggtggacctggtggcgcgcctgctggcgctggtgccgttcctggtgctcctgctccccgtgtctag

SEQ ID NO: 7538 - protein, 139 aa, Triticum aestivum
MTFKRRNGGRNKHGRGHVKYIRCSNCAKCCPKDKAIKRFLVRNIVEQAAVRDVQEACVHDGYVLPKLYAKVHHCVSCAIHAHIVRVRSRENRGNREPPQRFRRRGDGPRPGQGGPPRAGGPGGAPAGAGAVPGAPAPRV

SEQ ID NO: 7539 - DNA, 354 bp, Triticum aestivum
  CDS (1)..(354)
atggtcaagaagagaaagaacaacggccgaaacaagaagggtcgcggccacgtcaagcccatccgatgcagcaactgctcgcgatgcacccccaaggataaggctatcaagagattcaccatccgcaacatggttgagtctgctgctatccgtgacatctccgatgcctccgtcttcgcggagtacaccgtccccaagatgtacctgaagctgcagtactgtgtctcttgcgccatccacggcaagattgtccgtgtccgatccgttgtcggccgacgcaaccgtgcccctcctcctcgcgtccgctacaacaaggacggcaagaagatcgtccctactgcccctaaggcttag

SEQ ID NO: 7540 - protein, 117 aa, Triticum aestivum; identical to SEQ ID NO: 7466

SEQ ID NO: 7541 - DNA, 420 bp, Triticum aestivum
  CDS (1)..(420)
atgacgttcaagcggaggaacggcgggcgcaacaagcatggccgcggccacgtcaagtacatccgctgctccaactgcgccaagtgctgccccaaggacaaggctatcaagcgttttttggtgaggaacatcgtggagcaggctgctgtgagagatgtgcaggagggtggtgtgcatgatggatatgtgcttcccaagctgtacgccaaggtgcaccactgtgtgtcttgtgccatccatgcccacattgtccgtgtccgctcgcgtgagaacaggaggaaccgtgagcccccgcagcgtttcaggcgcagggatgatggcccgaggcctggacagggtggcccgccccgtgctggtggacctggtggcgcgcctgctggcgctggtgccgttcctggtgctcctgctccccgtgtctag

SEQ ID NO: 7542 - protein, 139 aa, Triticum aestivum
MTFKRRNGGRNKHGRGHVKYIRCSNCAKCCPKDKAIKRFLVRNIVEQAAVRDVQEGGVHDGYVLPKLYAKVHHCVSCAIHAHIVRVRSRENRRNREPPQRFRRRDDGPRPGQGGPPRAGGPGGAPAGAGAVPGAPAPRV

SEQ ID NO: 7543 - DNA, 420 bp, Triticum aestivum
  CDS (1)..(420)
atgacgttcaagcggaggaacggcgggcgcaacaagcatggccgcggccacgtcaagtacatccgctgctccaactgcgccaagtgctgccccaaggacaaggctatcaagcgtttcttggtgaggaacatcgtggagcaggctgctgtgagagatgtgcaggaggcttgtgtgcatgatggatatgtgcttcccaagctgtacgccaaggtgcaccactgtgtgtcttgtgccatccatgcccacattgtccgtgtccgctcgcgtgagaacaggaggaaccgtgagcccccgcagcgtttcaggcgcagggatgatggcccgaggcctggacagggtggcccgccccgtgctggcggacctggtggcgcgcctgctggcgctggtgccgttcctggtgctcctgctccccgtgtctag

SEQ ID NO: 7544 - protein, 139 aa, Triticum aestivum; identical to SEQ ID NO: 7534

SEQ ID NO: 7545 - DNA, 408 bp, Zea mays
  CDS (1)..(408)
atgaccttcaagcgccgcaacggcggccgcaacaagcatggccgcggtcacgtcaagtacatccggtgctcaaactgcgccaagtgctgccccaaggacaaggcgatcaagaggtttcaggtgaggaacatcgtggaacaggcggccatcagggacgtccaggaagcatgcgtctatgatggctacgtcctcccgaagctgtacgccaaggtgcaccactgcgtctcgtgcgcgatccacgctcacatcgtccgcgtccgatcccgtgagaagcgcagggaccgcaagccgccggagcgcttcaggcgcagggaggataggcctgctggtggacaaggaggcccccgccctggtcctggtgctgctgctccagctccagctccagcacctgttgctgctcgcccatag

SEQ ID NO: 7546 - protein, 135 aa, Zea mays
MTFKRRNGGRNKHGRGHVKYIRCSNCAKCCPKDKAIKRFQVRNIVEQAAIRDVQEACVYDGYVLPKLYAKVHHCVSCAIHAHIVRVRSREKRRDRKPPERFRRREDRPAGGQGGPRPGPGAAAPAPAPAPVAARP

SEQ ID NO: 7547 - DNA, 399 bp, Zea mays
  CDS (1)..(399)
atgacgttcaagcggaggaacggcggacgcaacaagcacgggcgcggccacgtcaagtacatacgctgctccaactgcgccaagtgctgtccaaaggataaggctatcaagcggttcttggtgaggaacattgttgagcaggctgctgtgagggacgtgcaggaggcttgtgtgcatgatggatatgttcttcccaaattgtacgcaaaggttcatcactgtgtctcatgcgcaatccatgcgcacattgtccgtgtccgctctcgtgagaacaggaggaaccgtgagcccccgcagcgtttcaggcgccgggatgatggcccaaggccaggtcagggcccaccgcgcccaggtgctgctgccacagcagctccccctgctgccgctcctcgtacctaa

SEQ ID NO: 7548 - protein, 132 aa, Zea mays; identical to SEQ ID NO: 7530

SEQ ID NO: 7549 - DNA, 399 bp, Zea mays
  CDS (1)..(399)
atgacgttcaagcggaggaacggcggacgcaacaagcacgggcgcggccacgtcaagtacatacgctgctccaactgcgccaagtgctgtccaaaggataaggctatcaagcggttcttggtgaggaacattgttgagcaggctgctgtgagggacgtgcaggaggcctgtgtgcatgatggatatgttcttcccaaattgtacgcaaaggttcatcactgtgtctcatgcgcaatccatgcgcacattgttcgtgttcgctctcgtgagaacaggaggaaccgtgagcccccgcagcgtttcaggcgccgggatgatggcccaaggccaggtcagggcccaccgcgcccaggtgctgctgccacagcagctccccctgctgccgctcctcgtgcctaa

SEQ ID NO: 7550 - protein, 132 aa, Zea mays
MTFKRRNGGRNKHGRGHVKYIRCSNCAKCCPKDKAIKRFLVRNIVEQAAVRDVQEACVHDGYVLPKLYAKVHHCVSCAIHAHIVRVRSRENRRNREPPQRFRRRDDGPRPGQGPPRPGAAATAAPPAAAPRA

SEQ ID NO: 7551 - DNA, 399 bp, Zea mays
  CDS (1)..(399)
atgacgttcaagcggaggaatggcggacgcaacaagcacgggcgcggccacgtcaagtacatccgctgctccaactgcgccaagtgctgccccaaggataaggctatcaagcggttcttggtgaggaacattgttgagcaggctgccgtgagagatgtgcaggaggcctgtgtacatgatggatatgttctacccaaattgtatgcaaaggttcatcactgtgtctcatgcgcaatccatgcgcacattgtccgggtccgctctcgtgagaacaggaggaaccgtgagcccccgcagcgcttcagacgccgggatgatggcccaaggcctggtcagggcccgccgcgcccaggcggtgcagctcctgcagctgcagctgctgctgctcctcgtacctaa

SEQ ID NO: 7552 - protein, 132 aa, Zea mays; identical to SEQ ID NO: 7502

SEQ ID NO: 7553 - DNA, 24 bp, Artificial sequence
  primer
atgccaaagaagagagcttccaac

SEQ ID NO: 7554 - DNA, 24 bp, Artificial sequence
  primer
ttataaagccttcttggcggcatc

SEQ ID NO: 7555 - protein, 117 aa, Artificial sequence
  consensus sequence
  Variant (2)..(3): Xaa in position 2 to 3 is any amino acid
  Variant (6)..(8): Xaa in position 6 to 8 is any amino acid
  Variant (13)..(13): Xaa in position 13 is any amino acid
  Variant (20)..(21): Xaa in position 20 to 21 is any amino acid
  Variant (27)..(28): Xaa in position 27 to 28 is any amino acid
  Variant (30)..(30): Xaa in position 30 is any amino acid
  Variant (40)..(41): Xaa in position 40 to 41 is any amino acid
  Variant (44)..(44): Xaa in position 44 is any amino acid
  Variant (47)..(47): Xaa in position 47 is any amino acid
  Variant (50)..(50): Xaa in position 50 is any amino acid
  Variant (53)..(54): Xaa in position 53 to 54 is any amino acid
  Variant (57)..(57): Xaa in position 57 is any amino acid
  Variant (59)..(61): Xaa in position 59 to 61 is any amino acid
  Variant (63)..(63): Xaa in position 63 is any amino acid
  Variant (67)..(67): Xaa in position 67 is any amino acid
  Variant (69)..(69): Xaa in position 69 is any amino acid
  Variant (71)..(73): Xaa in position 71 to 73 is any amino acid
  Variant (81)..(83): Xaa in position 81 to 83 is any amino acid
  Variant (90)..(91): Xaa in position 90 to 91 is any amino acid
  Variant (92)..(96): Xaa in position 92 to 96 is any or no amino acid
  Variant (99)..(99): Xaa in position 99 is any amino acid
  Variant (101)..(101): Xaa in position 101 is any amino acid
  Variant (104)..(104): Xaa in position 104 is any amino acid
  Variant (106)..(114): Xaa in position 106 to 114 is any amino acid
  Variant (115)..(116): Xaa in position 115 to 116 is any or no amino acid
MXXKRXXXGRNKXGRGHVKXXRCSNCXXCXPKDKAIKRFXXRNXVEXAAXRDXXEAXVXXXYXLPKXYXKXXXCVSCAIHXXXVRVRSRXXXXXXXRRXRXPPXRXXXXXXXXXXXP

SEQ ID NO: 7556 - protein, 17 aa, Artificial sequence
  protein pattern
  Variant (7)..(7): Xaa in position 7 is Glu or Thr
  Variant (8)..(8): Xaa in position 8 is Asp, Gly or Asn
  Variant (10)..(11): Xaa in position 10 to 11 is any or no amino acid
  Variant (13)..(14): Xaa in position 13 to 14 is any amino acid
  Variant (16)..(16): Xaa in position 16 is Pro or Gln
VRVRSRXXRXXRXXPXR

SEQ ID NO: 7557 - protein, 15 aa, Artificial sequence
  protein pattern
  Variant (2)..(2): Xaa in position 2 is Pro, Thr or Val
  Variant (3)..(3): Xaa in position 3 is any amino acid
  Variant (6)..(6): Xaa in position 6 is any amino acid
  Variant (7)..(7): Xaa in position 7 is Gly, Asn or Ser
  Variant (8)..(8): Xaa in position 8 is Cys, Gly or Asn
  Variant (13)..(13): Xaa in position 13 is any amino acid
MXXKRXXXGRNKXGR

SEQ ID NO: 7558 - DNA, 1155 bp, Saccharomyces cerevisiae
  CDS (1)..(1155)
atggttacatatgctggaaaactggttctagctccaatggtaagagccggcgaactgcccacgagactgatggcgctggcccacggtgcagatctcgtctggtccccagaaatcatcgacaaaaagctaattcagtgcgtcaggaaggaaaacactgcactccaaactgtcgactacgtcgtgccgtccaaggttcaaacgaggccggagacgctcgttttcagaacatatccaaaactagaatcctctaaattgattttccagatcgggtctgcatccccggctctggccacccaggctgctttgaaagtgatcaacgacgtcagcgggatagatatcaatgcaggctgccccaaacacttctctatacactccggcatgggctctgccctcttgcgcaccccagacacactgtgtctcatcttgaaagaactggttaagaacgtgggtaaccctcacagcaaacccatcagtgtgaaaataagactcttggacaccaagcaagacactctacagctcgtcaaacgtctgtgtgccacgggcatcacaaatcttacagttcactgcaggaagactgaaatgagaaacagagagcagcccatcacagattacattgcggagatctacgagatatgccaggcaaataacgtgtcgttgattgtgaacggcgctatccgcgaccgctctcattttcatgatttacaagcgaatcattggaaaaacactaacattggtggtatgattgcagagtgtgctgaacgggaccctacagtttttgatcacacttctaagccttcagaagacggtccatcttgggtcgttgcttgtcgcgagtttattcagtgggcaacgaagtttgacaaccacatcggcaatacaaaatacatgttaagcagaattgtccccggaaaatcagtcttttttcagtactttgcccgttgcaagagcccggaagaagttagtttcgtactaaagcaattgaacgatgatggaagcgctcaaacagatccttcagagtacttggaaaactgcagagctcaagaaaaagctttgaaaaacgccaacgccatcgccaagcaaaagaggaaacagaccgatcacataggcagtgacactaaaaagcaaaaggttgtaccccttcccacagatatataa

SEQ ID NO: 7559 - protein, 384 aa, Saccharomyces cerevisiae
MVTYAGKLVLAPMVRAGELPTRLMALAHGADLVWSPEIIDKKLIQCVRKENTALQTVDYVVPSKVQTRPETLVFRTYPKLESSKLIFQIGSASPALATQAALKVINDVSGIDINAGCPKHFSIHSGMGSALLRTPDTLCLILKELVKNVGNPHSKPISVKIRLLDTKQDTLQLVKRLCATGITNLTVHCRKTEMRNREQPITDYIAEIYEICQANNVSLIVNGAIRDRSHFHDLQANHWKNTNIGGMIAECAERDPTVFDHTSKPSEDGPSWVVACREFIQWATKFDNHIGNTKYMLSRIVPGKSVFFQYFARCKSPEEVSFVLKQLNDDGSAQTDPSEYLENCRAQEKALKNANAIAKQKRKQTDHIGSDTKKQKVVPLPTDI

SEQ ID NO: 7560 - DNA, 3169 bp, Oryza sativa
  CDS (543)..(3080)
atacgacactactatcacctctgcgatgccggtctcttgagaacgaaacgctcggttgctcgaacaacgacgcatgaccgagagcggaggcagaggccatcggctcttagcaaaggcgcgcaggcccaaaaaggctcgccagcctccacacagccgagttggtcagcggtggacttgcttttctttttcatttctttgtttcgagactgagcacgaaagaaacgagacagctcagcacgatgacgagaaggaattgtttcttccccaccaaccaaggtcgcatttctcgcatttctctctacacctcgcatctgtgccggccgcctcgatcgacaggcgcttcgatacatcagctttccgcctatctgcccttctccgcttgtccagcttcgaccgcagaggctgattcatcgacctcacccgctcggaccatcacgaaagcagctgctcctccgtccatccctctccaccacagcctatatatcgcttcgcgaccgtttcgtcggtcgtgatctgctccgcaccccactaaactcgagttcatgcaccagctctcggcgctccctacgcacatcatccgcgccaagtccctcgtcaaccttaccgcatcgactcgtccgctccgtccatcctctagcttctcgcacatcttcgccagatccttgataaaagggaacacgttcagctcgcgctctacgtcggcttcagcgcactcaccgcccgtccgcaccttcgtcaacgcaagcatgccttccgtcgcccagctccgacagccttcgccatccatgcttcccccggcaaagcgcgccaagatgcactccaataccgaaccagactcgcacgtcgctgcgaccgatggtgcagccgcggccccggagatcgaggctgtcgccgccgactccacctcgtacaacgacgtgcccgccctgcccgacaacgcccatcaccacgtcgacgatctcgaccccatccccgcgtgcacctcgacgctcaccttccaaaacggcatcttcctcgcacccatggtgcgcatcggcacgcttcctacgcgcctcctctcgctcgagtatggcgccgacctcgtgtggggtcccgaaatcgtcgatcgcgccatcatcggctgcgagcgcaaggtcagccccaccaccggcgtcgtcgaatacctcaaggagcacaagcagatcttctcgtgccaccccatcgaaaggccttatctcgtgtaccagctcggcagcgccaacccggatctcgcctaccaggccatcaagatcatcacgcaggcagacgacgttgccgccgtcgacctcaactgcggctgccccaagcccttctccacccacgcaggcatgggtgccaacatgctctccacccccgtactgctgtgcaacacgctcaaggccatgcgtcgagccgcacctccgcacgtcgccgtcacgtgcaagatccggctgctgcccacccaggaggctacgatcgagctcgtagacaagatcgtgcgcaccggtgccatcgagtgcctcaccgtccactgccgcaccaaggacatgcgcccacgcgagcccgcgctcctccaccgcctccgcgagatcgtcgaccacgtcaacacgctcgcggccgagatgggccgcatcatccccgtcgtatgcaacggcgacgtgtgggacgccgtcaatgcgccgcgcatcaaggagctcaccggcgtcacctccaccatggtcgcgcgcggcgcggaggccaatccatcgtgcttccgcccacagggcagtctgagcatccccgacgtcatcgcgcccaagtgggtgcgctactcgctcgcactcaacaatcccatcggcaacacaaagtactgcatggcacagctcgccttcaagcccgccgagtccgtcgccaaggacgccggtgcaaaggccaagccgatgaacaagaagcagctgtcggctctgcgcatgggcattgcacaggcaaagacgcatgaagagctcgcggcggtgttcaagatcgacgttgatcaggtgcgtgcactcggcgtggacgacgagatcctcggtgatctgcgcaccgcgctctcgcagcgcgtctcgcaccgctccgccagcgctggcggcttcgacggcgagaggctgggtgctgtgctcaacaatgccagcggcggcgcttcgcagcagggtggacagggcgtgggcgatggccatgcttccggcgacggccagaagcgcgccacggacaattcgccgcagcccgagtggaagcagctgctggcgacgagcgtgagcgacaacatcaaggacgaaaagtcgatcctctactacgcctttagcacggtcgagccgccgagctcggtgcatgatgccgccaagccgcacgtgcgctacgttgtgcaccgcggctttgtcaacgagcagcgcgatggcgatcgtccgggcggtattgcgccgcacaatgcgtcgtttggatcgagcccgtgtctgctgaccaccaccgacgtgcgcacgcccaaggtgcagcagctcacgtcgcagagcagcctgcgtgcgcacggccccgacggctcgcgcggcggcgagtgcgagatcgcctggtggatcgaatctgcccagctccagttccgcatttcgggcacggttcatgtgctccccacgccaggacacccgctccgatcgctgtttccctttgagcgtctctccccgccacgcgcgcccggaagcgaggccatcgacgccttcgactgggacaaggaacgcaagcgcatctttgataagctcaacccaggcctccttgcgtccttctgtcgacctactcctggctcggcgcacccgaacgctgacaggctgcaacaagccaagccaaaggacgacaccagctcgccctggccgctcgaattgccaagcccgggcaaggaggagaacgaggagcagaagaggatgctcgagcagagcgagaagaactttgcgctggttgttgttgagccctacaaggtcgacctcgtcaatctcgccgacgatacaaggaccgtctacgagctccagccgggcgagtgtgccgccacgggcaggtggaccgcacgccgcgtagttccctagcctagactcctggttcttggtgtacctgagttcgttcgtttccgagtccgtgtagatttcccgcatttgcaatcgtattggtctgtcct

SEQ ID NO: 7561 - protein, 845 aa, Oryza sativa
MHQLSALPTHIIRAKSLVNLTASTRPLRPSSSFSHIFARSLIKGNTFSSRSTSASAHSPPVRTFVNASMPSVAQLRQPSPSMLPPAKRAKMHSNTEPDSHVAATDGAAAAPEIEAVAADSTSYNDVPALPDNAHHHVDDLDPIPACTSTLTFQNGIFLAPMVRIGTLPTRLLSLEYGADLVWGPEIVDRAIIGCERKVSPTTGVVEYLKEHKQIFSCHPIERPYLVYQLGSANPDLAYQAIKIITQADDVAAVDLNCGCPKPFSTHAGMGANMLSTPVLLCNTLKAMRRAAPPHVAVTCKIRLLPTQEATIELVDKIVRTGAIECLTVHCRTKDMRPREPALLHRLREIVDHVNTLAAEMGRIIPVVCNGDVWDAVNAPRIKELTGVTSTMVARGAEANPSCFRPQGSLSIPDVIAPKWVRYSLALNNPIGNTKYCMAQLAFKPAESVAKDAGAKAKPMNKKQLSALRMGIAQAKTHEELAAVFKIDVDQVRALGVDDEILGDLRTALSQRVSHRSASAGGFDGERLGAVLNNASGGASQQGGQGVGDGHASGDGQKRATDNSPQPEWKQLLATSVSDNIKDEKSILYYAFSTVEPPSSVHDAAKPHVRYVVHRGFVNEQRDGDRPGGIAPHNASFGSSPCLLTTTDVRTPKVQQLTSQSSLRAHGPDGSRGGECEIAWWIESAQLQFRISGTVHVLPTPGHPLRSLFPFERLSPPRAPGSEAIDAFDWDKERKRIFDKLNPGLLASFCRPTPGSAHPNADRLQQAKPKDDTSSPWPLELPSPGKEENEEQKRMLEQSEKNFALVVVEPYKVDLVNLADDTRTVYELQPGECAATGRWTARRVVP

SEQ ID NO: 7562 - DNA, 1063 bp, Oryza sativa
  CDS (80)..(1039)
gcacgagggccgcggagtcctctccaaacttcgcggggaaaaaaattcggagccgccgagcggcggcggcgcggcggggatggagtaccgcgacaagctggtgctcgcgcccatggttcgcgtgggtaccctgccgtttaggctactggctgctgaatatggtgctgatatcacttacggagaagaaataatagatcataagtttttgaagtgtgaacgtgttacaaatgaatctcttggtactactgattttttggagagagggactgatactgtagtattccgtacttgcccacaagaaagggatagggttgtattccaaatgggaacatctgatgctgtgagggcactgaaagctgctcagcttgtgtgtaacgatgttgctgctatagatatcaacatgggttgtcccaaatctttctctcttagtggtggaatgggagccgcattactctccaaacctgagcttattcatgatattttgaccacattgcggaggaacttggacactaccgtgacatgtaaaatccgtcttctgaacacacgccaggacactgtggagttggctcgccgagttgagaagattggtgttccagcccttgctgtccatggaagaaaggtcaaagacagaccaagagatcctgctaagtgggatgagattgcagatgttgtgtctgcactgtcaattccagttatagctaatggagatgtatttgaatatgaggattttaaaagaattaaagatgctacaggtgccgcttctgtaatggttgccagaggtgccatgtggaatgcctcaattttttgtcccaaaggaaaaacaccttgggaggatgtcaaaagagagtacgtgagaaagagtattttgtgggacaatgatttgaagagcacaaaacaaaccataaaagaaatgataatgcactattcttgccttgaattccctgaaggaaaaggtgtgaacaagtgtgatacaatagctgatttagcgaaactatatggggaagagtactacaatttcgttctttcaaataggaattgaccatgagtatcatagcatttcttg

SEQ ID NO: 7563 - protein, 319 aa, Oryza sativa
MEYRDKLVLAPMVRVGTLPFRLLAAEYGADITYGEEIIDHKFLKCERVTNESLGTTDFLERGTDTVVFRTCPQERDRVVFQMGTSDAVRALKAAQLVCNDVAAIDINMGCPKSFSLSGGMGAALLSKPELIHDILTTLRRNLDTTVTCKIRLLNTRQDTVELARRVEKIGVPALAVHGRKVKDRPRDPAKWDEIADVVSALSIPVIANGDVFEYEDFKRIKDATGAASVMVARGAMWNASIFCPKGKTPWEDVKREYVRKSILWDNDLKSTKQTIKEMIMHYSCLEFPEGKGVNKCDTIADLAKLYGEEYYNFVLSNRN

SEQ ID NO: 7564 - DNA, 1865 bp, Zea mays
  CDS (392)..(1537)
gtgacgcggagctgcctttgcccctccgccgctgcctagatgtttcatttcatctttcggcgtgtgaggcacacgacacgataaggatggatgttgggtggggctgctccctctttcaatggaatgacagtcaatatcacgttggggagggactttagtgtactcctgaaagacttcagagtattgttgcagtaaggcttgaatagccagacgaagagtgtggtgcctacagagacaagctgttgagatgcagaatgaaactagaaatgcctttgttgagaagcttgttcattatccttttcagttgttcagtgtacgcatcctgagatgtacaatcctttaatgagagaagagtatcatcttctaaggactcaagggtgttgttcaaggcatgttcctgaatagagaatgcagtgcctgttatgattgccccagatttagtggagaaattacagatacttccaccgcgtactccctccctccctcgtctcgtcttcgtctccaggtttcgcgggggccaaggtttctgccggagcagtcgcggtctgcgctgcggcacggcgacgaggtggggatggagtaccgcgacaagctcgtgctggcgcccatggtccgcgtgggcaccttgccatttaggctactggctgctgaatatggtgctgatattacttatggagaagaaattattgatcacaaattcttgaagtgtgagcgtgttacaaatgaatctcttgggactactgattttgtggagaaagggactgacagtgtagttttccgtacatgcccacaagaaaggggcagggttgtattccaaatgggcacatcaaatgctgtgagggcacttaaagctgctcagatcgtgtgccgtgatgtttctgctatagatatcaacatgggttgtccaaagtctttttcacttagtggagggatgggtgctgcattactctccaaacctgagcttatacacgatattttgacaacattgcggaggaacttggacacaactgtgacatgtaaaatccgtcttctgaacacacctaaagacactgtggagttggcacgccggattgagaaaactggtgttcctgctcttgctgtccatggaagaaagattaaagatagaccgagagatcttgccaagtgggatgagatagctgatgttgtgtcagcgctgtcaattccagttatagctaatggagatgtctttgagtatgaggattttaagagaattaaagatgcaacaggtgccgcgtctgttatggttgctagaggtgccatgtggaatgcctccatcttttgtgccaaaggaaaaacaccttgggaggatgtcaaaagagagtatgtaagaaagagcatattgtgggacaacgatgtgaagagcacgaaacatacattgaaagaaatgataatgcactattcttgccttgaacttcctgaggggaaaggcgttataaagtgtgatacatcagaagatttagcgagactgtacggggaagaggactactataattttgttgttgcaaataggaaatgaatacaatttgatgttgtgagctctcatgtgtaccagcttctgcttgattcctatctcaccctttattgatgggattaggaggaattcctgccaccaaggacaacgggatttgccattttggcgctgtctggacttaacactgaagctgctgatctttctcttgtactggtaatagataggtttatacctggaattaatcgaataccatatttttttttgaaacacatactaatttatttgctttctataccattgaaattttgtcatgtattgttggtggaagtactattgtgctttgaaggaattgaaagactttgataaagaaaac

SEQ ID NO: 7565 - protein, 381 aa, Zea mays
MFLNRECSACYDCPRFSGEITDTSTAYSLPPSSRLRLQVSRGPRFLPEQSRSALRHGDEVGMEYRDKLVLAPMVRVGTLPFRLLAAEYGADITYGEEIIDHKFLKCERVTNESLGTTDFVEKGTDSVVFRTCPQERGRVVFQMGTSNAVRALKAAQIVCRDVSAIDINMGCPKSFSLSGGMGAALLSKPELIHDILTTLRRNLDTTVTCKIRLLNTPKDTVELARRIEKTGVPALAVHGRKIKDRPRDLAKWDEIADVVSALSIPVIANGDVFEYEDFKRIKDATGAASVMVARGAMWNASIFCAKGKTPWEDVKREYVRKSILWDNDVKSTKHTLKEMIMHYSCLELPEGKGVIKCDTSEDLARLYGEEDYYNFVVANRK

SEQ ID NO: 7566 - DNA, 1560 bp, Arabidopsis thaliana
  CDS (1)..(1560)
atggaaacgagaatagaactgaagaagaaaatttccgagattttcaaagactttatgacagtaatcacgcagcttgaagaactagggaatgctgcaaacaactttcttctacggtttcagcaaggactaagttttcttcaacgccctccaatagttacttcgtccaagttgattgagaacattatcaagaagaatgaaacaaggcggcttaaatcatatatcgaggcaggatgtattaatatccatgatgctgcacaaagcacaagagcttatgtgaatgttgcagccaaaaacttgttgattgagctggaacgtctcactgatgaggccgcccttgcaattgagtctgccacacagctagataaagactcaagtgatggattgcaacaagtaacatgtgatgaggagaacgagactgtacaattacctcaaggacctgaagttacagagtacgctgcacttattgcagttatttacagtatgatgaagcagaactatgttatgcaggataagattgtgagatcgcttagtttgaagtcatcatctggtgagctagagacttacagtctgatgtggtcattgcgccccggcgtcttcgaatttttcgtggctacgtttgacggtgccacgaagaagaagaagacgaagatggattatcagaacaagcttgttcttgctcccatggttcgtgtgggaacgctctctttcaggatgttggcggcggaatacggcgccgatatcacatacggtgaagagattattgatcataagcttgttaaatgcgaacgccgactcaatgttgcttctgggacatctgagtttgtggagaaaggaacagataatgtagtctttagcacatgtgatgaagaaaaaagtagggttgtttttcagatgggaacttctgatgctgttagggctctaaaggcttctgagattgtgtgtaatgacgttgcaactattgatattaatatgggttgccccaaggcattctctatccaaggtggaatgggtgctgctttgttaagtaaacccgagctaattcatgatattttggcaacacttaagaggaacttagacgtaccggttacttgcaagattcgtctattaaaatcaccagcagatactgttgaattggctaggagaatcgagaaacttggtgtaccagctcttgctgtacatgggaggaaaattgcagacaggccaagagatcctgctaaatgggatgagattgcagatgtggtggcagcattatccattcccgtcattgcaaatggcgatgttttagaatatgatgatttttctcgcattaaaaccgcaacaggcgctgcatcagttatggttgcaagaggagctatgtggaatgcttcaattttctctccaaaaggaaaatcacactgggaagatgtgaaaaagaaataccttagaaagagcatcttgtggaataacgatgttaagagcacgaaatacacgataaaggagatgatagcgcatcattcttgtcttgaactaccggaagggaagtctatcaacaaagcagacactttagaagatttagcgtaa

SEQ ID NO: 7567 - protein, 519 aa, Arabidopsis thaliana
METRIELKKKISEIFKDFMTVITQLEELGNAANNFLLRFQQGLSFLQRPPIVTSSKLIENIIKKNETRRLKSYIEAGCINIHDAAQSTRAYVNVAAKNLLIELERLTDEAALAIESATQLDKDSSDGLQQVTCDEENETVQLPQGPEVTEYAALIAVIYSMMKQNYVMQDKIVRSLSLKSSSGELETYSLMWSLRPGVFEFFVATFDGATKKKKTKMDYQNKLVLAPMVRVGTLSFRMLAAEYGADITYGEEIIDHKLVKCERRLNVASGTSEFVEKGTDNVVFSTCDEEKSRVVFQMGTSDAVRALKASEIVCNDVATIDINMGCPKAFSIQGGMGAALLSKPELIHDILATLKRNLDVPVTCKIRLLKSPADTVELARRIEKLGVPALAVHGRKIADRPRDPAKWDEIADVVAALSIPVIANGDVLEYDDFSRIKTATGAASVMVARGAMWNASIFSPKGKSHWEDVKKKYLRKSILWNNDVKSTKYTIKEMIAHHSCLELPEGKSINKADTLEDLA

SEQ ID NO: 7568 - DNA, 1594 bp, Triticum aestivum
  CDS (208)..(1170)
gcaagaggatccggtccggaaaggacacagtgctctgttcctgcacgggacagcgcggtcgccgccagcgtcgccttctcttctctgcggcactgtccgccgcggaccctcgtcctccagaattccccggggtagcaaggagagggccagaggcggagcagccgcagcggccagcggcggagacgcggcgacgcgaggcaagaagagatggagtaccgcaacaagatggtgctcgcgcccatggtccgcgcgggtactctgccgtttaggctattggctgctgaatatggcgcggatattacgtacggagaagaaataatagatcataagtttgtgaactgtcaacgcgttataaatgaatctcttgggacaactgattttgtggagagagggactgatagtgttgttttccgaacatgcccgcaagaaagggacaaggttgtctttcaaatcggcacgtcagatgctgtgagagcacttaaagctgctgagattgtgtgtaatgatgtcgctgctatagatatcaacatgggttgtccaaaggctttttctgtcagtggaggaatgggttctgcattactctccaaacctgagcttatacatgatattttgaccacattgtggaggaacttgaacacaccagtgacatgtaaaatccgtctactgaacacacgtcaggacactgtggaattggcacgccggattgagaaatgtggtgttccagctctggctgtccatggaagaaaggtcaaagacaggccaagggatccggctaagtgggatgagattgctgatgttgtatccgcactgtcaattccagttatagctaatgggaatgtatttgagtacgaagattttaagagaatcaaagatgctacaggtgccacatctgtaatggctgctagaggtgccttgtggaatgcctccattttctctgctaaaggcaaagtaccttgggaggatttcaaaagagagtatgtgagaaagactattttgtgggacaacgatattaagagcacaaagacaacgctaagagaaatcataatgcactacatttgccttgaagggactgaagggaaaggtgtgataaagtgtggttcgtcagcagatgtagcgagactttacggggaagaggattactataattttgttgtttcaaataggaaatgaaaaaaacaggattttgctaacctctatgtgacccagcttctgcttggatccctcggttggttttatgaatgttttctccggagatctttggatgagttttggagaaattcacatatcaccaaagaagagtgcagttttggcttttgcactgtgccatcatggtatctgatcaagatcaactgaggattcatggattccttatttcgtggggtacagttttgcgccgtgttcttataggattttttttgacaaaaaaggccgttgatttagactgacaagaatctagaagcattttgagatactgtattctttccattactgacaaaatatataatccatgacttgctgatagacaccatttctgtaagcttacatatattttagttattctgccaatctggatcgctcaaaaaaaaaaaaaaaa

SEQ ID NO: 7569 - protein, 320 aa, Triticum aestivum
MEYRNKMVLAPMVRAGTLPFRLLAAEYGADITYGEEIIDHKFVNCQRVINESLGTTDFVERGTDSVVFRTCPQERDKVVFQIGTSDAVRALKAAEIVCNDVAAIDINMGCPKAFSVSGGMGSALLSKPELIHDILTTLWRNLNTPVTCKIRLLNTRQDTVELARRIEKCGVPALAVHGRKVKDRPRDPAKWDEIADVVSALSIPVIANGNVFEYEDFKRIKDATGATSVMAARGALWNASIFSAKGKVPWEDFKREYVRKTILWDNDIKSTKTTLREIIMHYICLEGTEGKGVIKCGSSADVARLYGEEDYYNFVVSNRK

SEQ ID NO: 7570 - DNA, 1440 bp, Schizosaccharomyces pombe 972h-
  CDS (1)..(1440)
atgggtctgctaaattatagcaataaagtatgtctagctcccatggttaggattggggaacttcccatgaggttattagcacttcgatatggcgctaatctagtatgggggccagaaattgtggataaagctcttctgagtggaacacctgtagaaagagtcgtaaatgataggatcaattgcatcgattttgttaaaccacctagcaataaggtgttgtttcgtgtgcatccgcttgaagctaatcgattgatttttcaactcggaagtgcatccccagaacttgcagtggaagcagcaaaacttgtagctaatgatgttgcaggcattgacttaaactgtggttgccccaaacatttttctgtacatgctggaatgggagctggccttttgaaaaatcaagatcgtctagtcagtattctcgatgctctagtgaatgagatcgggaagccttacaaaatttccataagttgtaaaattcgtttattagagacaaaagaagataccctaaaattggtagagcgcatatgcgatacaggagttcgagcaatcactgttcattgccgtacaactccaatgcgaaatactgagcctgcagatcgtagttatttatcggaaattgtaggcgtctgtcgaaataaagatgtttcgatcttagtaaatggggatgtcttaagctataatgatggattggatgttattgagaaatatggagtcgacggtgtgcttatcgccagagctgctgaaaggaacgtatcctgttttcgaatagagggcccactttctagttttaaggttgccgaggagtttttgaaaatggctcttgaggttgataataattttgggaatactaaatattgtttaaatcaaatcatgcagggttcatttcggaaaaatgttcgacaactcgctcagactgctaaaacttatgaagacttgaagaaggcatttgagatcgaatacaagcattcggatgcttcatcggtctgccctactttagaaaaagaaaaatcattggttatatcttttgtagatttgcccagttttttggagtctttattagcgtccaatattttaaagcaactaagtaggcttcatttcacaaaaatctttgcagtaagtgaagaggaagatatttgcaagcagctagacgatattcatgagaagtttttgtgccacggaattgcactttctttaatttcagctgataacctagcttctgcaatcgctagtgctcatctggtcatatgcatggaaaaagacgaatctattatgaatgaggctgtatgcgatcaaaaaataactattcgtttgccgatcaattccaatacgaatgaagctgtagtggaatgtgaaaataagtcaatgcaaagcaaacatgcattggatataattcaagaaaggataaaggatttagaagagaaagctcaagtcgtttag

SEQ ID NO: 7571 - protein, 479 aa, Schizosaccharomyces pombe 972h-
MGLLNYSNKVCLAPMVRIGELPMRLLALRYGANLVWGPEIVDKALLSGTPVERVVNDRINCIDFVKPPSNKVLFRVHPLEANRLIFQLGSASPELAVEAAKLVANDVAGIDLNCGCPKHFSVHAGMGAGLLKNQDRLVSILDALVNEIGKPYKISISCKIRLLETKEDTLKLVERICDTGVRAITVHCRTTPMRNTEPADRSYLSEIVGVCRNKDVSILVNGDVLSYNDGLDVIEKYGVDGVLIARAAERNVSCFRIEGPLSSFKVAEEFLKMALEVDNNFGNTKYCLNQIMQGSFRKNVRQLAQTAKTYEDLKKAFEIEYKHSDASSVCPTLEKEKSLVISFVDLPSFLESLLASNILKQLSRLHFTKIFAVSEEEDICKQLDDIHEKFLCHGIALSLISADNLASAIASAHLVICMEKDESIMNEAVCDQKITIRLPINSNTNEAVVECENKSMQSKHALDIIQERIKDLEEKAQVV

SEQ ID NO: 7572 - DNA, 1155 bp, Eremothecium gossypii
  CDS (1)..(1155)
atggcaaactacgcgggcaagcttgtgctggcgccgatggtgcgcgcgggcgagctaccgacccggttgcttgctctgcggcacggcgccgacctggtgtggggcccggaaatcatcgacaagaaattggtgcagtgccagcgggtgccgaacgacgaactgcagacggtggactatgtattgcctagcacgcatgcaggaaagcccccagtggtggtgttccggacggcgccggcgctggagggcgggcgcgtgatcttccagctggggacggcgagcccgactttggcggtgcgtgcggcgaacactgtgatcggtgatgtggccggcatcgacgtgaacgccgggtgccccaagcacttctcgatccatgccgggatgggcgctgcactgctgcgcacgccagacacgctgtgcgggattctgcgtgcgctggtggacgaggtagggcggccgcactcgaagcccatcagcgtgaagattcggctgctggacgacctggcggccacgctcgatctggtggagaagctctgtgcgactggcatcagcaacctgacggttcactgccgtacgactccgatgcgaaaccgggaggccccgatccgcagctacctggcgtccattttcgagctgtgccaggccagcaaagtgtcacttataatgaacggagcgctggaaggtcgcaagcactttgaggaggtccgcgccgagctaaagctacccaccgacgttggcggaatgatcgcggaggcggcagaggcaaacccaacggtcttctcgttgaatccgctgccgtggcaccaggccgtacccgaatatctacagattgcggaccaataccgtaatcataccagcaacacgaagtacatgatgaatcgcatggttcctggcaagtcacccttctaccagtacttcatccgctgcaagacctcggatgacttcctctatgtggggaagcagctaggtccgaatggggaatgcctctccgacccgacagaataccttgcaaagagcaggaaggaggagcagcaggagaaaaaggcgaccaagggcaagttgctgcagcatcatgatgagtcgcaatcgaagggcaagcgtgttctcgaagatgagaattcgcaggaatcgaagcggaccaagacagagcaggcatga

SEQ ID NO: 7573 - protein, 384 aa, Eremothecium gossypii
MANYAGKLVLAPMVRAGELPTRLLALRHGADLVWGPEIIDKKLVQCQRVPNDELQTVDYVLPSTHAGKPPVVVFRTAPALEGGRVIFQLGTASPTLAVRAANTVIGDVAGIDVNAGCPKHFSIHAGMGAALLRTPDTLCGILRALVDEVGRPHSKPISVKIRLLDDLAATLDLVEKLCATGISNLTVHCRTTPMRNREAPIRSYLASIFELCQASKVSLIMNGALEGRKHFEEVRAELKLPTDVGGMIAEAAEANPTVFSLNPLPWHQAVPEYLQIADQYRNHTSNTKYMMNRMVPGKSPFYQYFIRCKTSDDFLYVGKQLGPNGECLSDPTEYLAKSRKEEQQEKKATKGKLLQHHDESQSKGKRVLEDENSQESKRTKTEQA

SEQ ID NO: 7574 - DNA, 1557 bp, Magnaporthe grisea 70-15
  CDS (1)..(1557)
atggcagggggatttttgtcgggtatttgtctccgcatagcgcacctccaggcctatacgtctgtacaatacctacctaagatcgggttgatcggattttcggccgtcaccgccacgaggggtggttcgcctgcatacataaatccctccgaacatcgcaagtctcggttgagtaacctacagagcctaccaaactacgtattggaatgcatgcacgacaaagcacggcaacgcactgcaaagcagctcggttcccgagccatgaccagtatggcagcaaacacggtgcctatcccgcgcaggggtgtcgattacagaggaaagatagttcttgcacccatggtgcgcagcagcgagttgccgtcgaggctgatggcgcttcactacggcgccgatctggtatggggacccgagacggtcgactactccatgatcggcaccacgcgccgcctcaacccaaagaccaacgtgctgcagtggacacgactccagaacaacggccagaagcaggcccctcccgacgccaaggagaacgccatgtttacgatgcacccggagctcgagggcaaacgcctcatcttccagctggggtcgggcgacccggagcgcgccgttgcggccgcgaggctggtcgccaacgacgtggcgggcatcgacctcaacgcggggtgcccgaagcccttcagcacgacgggagggatgggcgcggcgctgctcagggacccggaccggctggtggccatactggaggcgctggtgcgcgaggtcgcccccgctgccgagatcggcatcagcgtcaagatccgcctactggagaccgccgccgagactgaggcactggtccgccggctcgtcaagacgggcatcacggcgctgacggtacactgccgcaccacgcccatgaggccgcgcgagcgcgccatccgcggccagctgcgcatggtcgccgatgtctgccgcgaggctggcgtcgcatgcctgatgaatggcgacgtcaaggacagggacgagggcgtccgcctggcagccgagtacggcaccgacggtgccatgatcgccagggctgccgaggagaacccgagctgcttccgcgccggggccgacggcggcctcgccccctggaccgagaccgtgcccttgttcatgaggttctgcctcgacatggagaacaagttctcaaacacaaagtaccttctcaacaacatgatacccggcaaggctccagaattccggcccacgcagcacggcaagtcatacctggctctgtgcgaggccctgaaccttgaagacctcgtcgaacaggccaaggccttagacgacaagctgggactgacggaaagacaagaaaagtccaagccagtggcacctttggagaagaagaagaaacagaaacagaacaaccccgccgcacttgcttccggtggtaacatgagcaaagcgagggatgcaagtgcaaagcctcgcaagccgttatctgaaaggggcgtggggtcacggcaagaagagtcacatattacaaaagctgcggcactggaaccagcgacgttgaacacgtag

SEQ ID NO: 7575 - protein, 518 aa, Magnaporthe grisea 70-15
MAGGFLSGICLRIAHLQAYTSVQYLPKIGLIGFSAVTATRGGSPAYINPSEHRKSRLSNLQSLPNYVLECMHDKARQRTAKQLGSRAMTSMAANTVPIPRRGVDYRGKIVLAPMVRSSELPSRLMALHYGADLVWGPETVDYSMIGTTRRLNPKTNVLQWTRLQNNGQKQAPPDAKENAMFTMHPELEGKRLIFQLGSGDPERAVAAARLVANDVAGIDLNAGCPKPFSTTGGMGAALLRDPDRLVAILEALVREVAPAAEIGISVKIRLLETAAETEALVRRLVKTGITALTVHCRTTPMRPRERAIRGQLRMVADVCREAGVACLMNGDVKDRDEGVRLAAEYGTDGAMIARAAEENPSCFRAGADGGLAPWTETVPLFMRFCLDMENKFSNTKYLLNNMIPGKAPEFRPTQHGKSYLALCEALNLEDLVEQAKALDDKLGLTERQEKSKPVAPLEKKKKQKQNNPAALASGGNMSKARDASAKPRKPLSERGVGSRQEESHITKAAALEPATLNT

SEQ ID NO: 7576 - DNA, 1251 bp, Gibberella zeae PH-1
  CDS (1)..(1251)
atggctacagaagtcaagcgagtgcccatcccccgtcgtggtgtcgactatcgcggcaaggttgtccttgcacccatggtgcgttcgggagagcttccttcaagacttttggcgctcaagtatggcgcagatcttgtctggggaccagagactgttgattattccatgattggaacctctcgacgcttcgatgaagagtctaagacactagagtggttccgtacttcttctcatgggcagaaagatccacctcctgatgccaaggagagcattatttacagattgcaccctgaacttgaaaaggacaaactcatctttcagatcggcaccgcagaccctgatcgcgcggtggaagcagccaggctggtagctgcagatgttgccggcatcgatgtcaatgctggctgcccgaaacctttcagcacgagcggaggcatgggcgctgcccttctccagactcccgacaagctctgcgccattcttgaggctctcgtgaagaacattacccctgaatttgagatcggaatcagtgtcaagatcaggcttctcgacactgctgcggaaacagaggctctcgtccgtcgtctttgcgccaccggtatcacaggactgaccatccattgccgtacgacacccatgcgacccagagaacgagccatccgtggacagctccggatgatcgcagaagtctgccatgagtttggtgtcgcctgtttggtgaatggagatgttgaggggagggaccacggtcttcagctcgctgaagagtttggggcagatggtgcaatgattgcagtcgctgccgagaagaacccgagttgcttcaggagcaaggccaatggtggtgtggcaccttgggaagaagttgtcaaacaatacgtcaagacttctattgaagtcgacaatcgcttcggcaacacaaagtttctcctctcaaacatgattcccggaaaatcaaagttttaccaacctgtcaaccagtccaagacctacaagagtatttgcgaagcgctatgtctcgacgattatcttgaagccgccattgccgttgacaaaaggcgtggcctcggtcaacctctacagggaaaggccgcaaagaaggcggcagctaaggcattggctgctgccaacgcacagtcacccaaatcagaacaaggaaaggaacagaagcgcaagaggaagatgtctgatagcagacccacgaaacaggtcaaggcctctgagcctacaccagtcgcagcaactctttag

SEQ ID NO: 7577 - protein, 416 aa, Gibberella zeae PH-1
MATEVKRVPIPRRGVDYRGKVVLAPMVRSGELPSRLLALKYGADLVWGPETVDYSMIGTSRRFDEESKTLEWFRTSSHGQKDPPPDAKESIIYRLHPELEKDKLIFQIGTADPDRAVEAARLVAADVAGIDVNAGCPKPFSTSGGMGAALLQTPDKLCAILEALVKNITPEFEIGISVKIRLLDTAAETEALVRRLCATGITGLTIHCRTTPMRPRERAIRGQLRMIAEVCHEFGVACLVNGDVEGRDHGLQLAEEFGADGAMIAVAAEKNPSCFRSKANGGVAPWEEVVKQYVKTSIEVDNRFGNTKFLLSNMIPGKSKFYQPVNQSKTYKSICEALCLDDYLEAAIAVDKRRGLGQPLQGKAAKKAAAKALAAANAQSPKSEQGKEQKRKRKMSDSRPTKQVKASEPTPVAATL

SEQ ID NO: 7578 - DNA, 1116 bp, Candida glabrata CBS 138
  CDS (1)..(1116)
atggacatgtatgcaggtaagctggtgctggccccgatggtgcgggctggggagttgcccacgcggcttatggccctgaagtacggtgctgggctggtgtggtcgcccgagataatagacaagaaactgattcagacacagcgtgtggaaaacagcagcctgagctctgtggactacgtgatgccctcgggtgtgctggtgtttcgcactgtgccttctctagagcgcgggaaactgatattccagatcgggtcggcggacccggcgctggcgaaggaagctgctttgaaagtgatccaggacgtggatggcatagacttgaactgtggatgccccaagcacttctccatacacgctgggatggggtccgcgctgctgaaaaagcccgaaaagctgtgctcgatcctaaaagagctggtggagcacgtcggtacaccgcatggtaaacctatctcctgcaagatacggctgctcgaggatgaagcctccacacttgagttggtgaagatgatatgtgacacagggattaggaacttgactgtgcattgccggactactccaatgagaaacagagagacgccgatcagagactatatagatagtatattcagtgtttgcaagaaggcaggtgtgtcactattgatcaatggtgcgataaggcacagggaggagtttgagcagttgttctcgtataacccggaaatcggtggtatgatagccgaagccgctgagagtaacccaacagtcttttcaaaggatgtgctaccgtggcaccaaacagtgaaggaattcttggagatcgcaaagaagtatgaaaataatataggaaacaccaagtacatgctctctaggctagtgccaggaaaatccaaattcttccaatactatgcacaatgcaagacagtagaggacctggatcacatctcctcattgatagatgacaacggtgaacccaaaggcgacccatcagaatatttgattaagcgtagagaagaagaaaagctgctaaagaggcaggaaggtgaaaggaaagcgttggaaaggaagctggccaagcagcaaaaacgtgagttggaagtagagtcagattccaataaaaaacctaagctcgattaa

SEQ ID NO: 7579 - protein, 371 aa, Candida glabrata CBS 138
MDMYAGKLVLAPMVRAGELPTRLMALKYGAGLVWSPEIIDKKLIQTQRVENSSLSSVDYVMPSGVLVFRTVPSLERGKLIFQIGSADPALAKEAALKVIQDVDGIDLNCGCPKHFSIHAGMGSALLKKPEKLCSILKELVEHVGTPHGKPISCKIRLLEDEASTLELVKMICDTGIRNLTVHCRTTPMRNRETPIRDYIDSIFSVCKKAGVSLLINGAIRHREEFEQLFSYNPEIGGMIAEAAESNPTVFSKDVLPWHQTVKEFLEIAKKYENNIGNTKYMLSRLVPGKSKFFQYYAQCKTVEDLDHISSLIDDNGEPKGDPSEYLIKRREEEKLLKRQEGERKALERKLAKQQKRELEVESDSNKKPKLD

SEQ ID NO: 7580 - DNA, 1080 bp, Kluyveromyces lactis NRRL Y-1140
  CDS (1)..(1080)
atggtacaatatgcaggaaagttagtgcttgcgcctatggtcagggcaggtgaactgccaacgagattgttggccttgaagcacggcgcagatttggtctggtccccagaaatcattgacaagaaacttatacagtgtcaaagacaggttaatgatacattgaagactgtcgattttattattcctgccaaacgggagggaacggaacctggtgtggttttcaggacagttccagaagtagagcatggaaaactcatatttcagatcggaacatcaactccatcgctcgctgtcgaagccgctctcaaggttattgaggatgttgctggtattgatgtaaatgcgggatgtcctaaacatttctccattcattctggaatgggtgcagctctattgcagactccggataaattatgctccattttgattgagttagttgagaaagttgggaagatttatgggaaacctatttccgtgaagattagaatcctaaaagatgaagaagatactttgactttggtggaaaaattatgtgcaactggtatcacgaacttaactgttcattgtagaactaccccgatgagaaacagagaatctccaatccgggcatatattccaaaaatatatgaaatatgtgaacgtaataaggtatcgttaataatgaacggtgctatcagggataaggaacatttcgaacagctacgaagtgatctgaacctacctaaaactattggtggtatgatggcggattgtgctgagagaaatccaacagttttttctgaatcaccattgccatggttcaaagcggtaaaagaatacctggatatagcaaaccaatacaaccatcatcctgcaaatgttaaatatatgatgaatagaatgactcccgggaaatctccattctatcaatactttacacaatgccgtaaactctctgactttgcacatgtttgtcagcaattaggttctagtggcggtgcattgaatgatccaataccatttttaatccaagaacgtgaaaaggaaatggctgagaaacagagattgaacaatctcaaatcgacgaagacgtctgactga

SEQ ID NO: 7581 - protein, 359 aa, Kluyveromyces lactis NRRL Y-1140
MVQYAGKLVLAPMVRAGELPTRLLALKHGADLVWSPEIIDKKLIQCQRQVNDTLKTVDFIIPAKREGTEPGVVFRTVPEVEHGKLIFQIGTSTPSLAVEAALKVIEDVAGIDVNAGCPKHFSIHSGMGAALLQTPDKLCSILIELVEKVGKIYGKPISVKIRILKDEEDTLTLVEKLCATGITNLTVHCRTTPMRNRESPIRAYIPKIYEICERNKVSLIMNGAIRDKEHFEQLRSDLNLPKTIGGMMADCAERNPTVFSESPLPWFKAVKEYLDIANQYNHHPANVKYMMNRMTPGKSPFYQYFTQCRKLSDFAHVCQQLGSSGGALNDPIPFLIQEREKEMAEKQRLNNLKSTKTSD

SEQ ID NO: 7582 - DNA, 1125 bp, Debaryomyces hansenii CBS767
  CDS (1)..(1125)
atggttgagtacagcgggaaactagcgcttgcaccgatggtgagaagcggagagatccctactagactcatggccttgcgatatggagctgatcttgtgtggacccccgagattgttgataagaagctcatcaagtgtgaacgggtgataaacgatgatttggggacggttgactttttggatccaaataagaaggttgtttttcgaacgtatcccgcagaggaactgggaaagctcattttccagattggatcggccgaccccgagttggcagtacaggctgctaagatagtggcacaagatgtggatggaattgacttgaactgtgggtgtcctaagccgttttccacgcattcgggaatgggggctgcgttgttaacaacccccgatttgctcgaactgatcttgcgaaatttagtgtcagaggtaggaaaagtgtacgatattccaatcagtgctaagatcaggcttctagatgatacagatgtgactccttcattggaacttattgatagattgtgcaagacgggaatttcgaacttgacgttacactgtcgtaccccaagaatgaggaatagagacactccagtgagggactttttaccgtcaattatcgatactgttcacgccaataacgtgagttttatcattaacggatctatccgcagtcgtcgtgaattccacttattgcagcggaagtacggggaaaaagttggggggatgattgcagaaagtgctgaatctaatccaactgtttttgcagaaactccgttgccttggaaccaagtagtacccgaatttatcaaaatagcgcaagatatggataattatccgggaaacacaaagtatataatgctcaatcaggttccaggaaaatccaagttctatcaaaagttctgtcaagtcaagacgcataaagaattacttgaaatcgccgaaaccataggcgacgagggaaatcggattatgatgaagtatttgcagaaagacttattgatcaacccttcagatttcgagggttaccaatatgaaatgcaaaataaacgcagactagaacatggggataaaattaatgataacgacaaaatcgataagaaacagaaaacagtagctgtcgctgtataa

SEQ ID NO: 7583 - protein, 374 aa, Debaryomyces hansenii CBS767
MVEYSGKLALAPMVRSGEIPTRLMALRYGADLVWTPEIVDKKLIKCERVINDDLGTVDFLDPNKKVVFRTYPAEELGKLIFQIGSADPELAVQAAKIVAQDVDGIDLNCGCPKPFSTHSGMGAALLTTPDLLELILRNLVSEVGKVYDIPISAKIRLLDDTDVTPSLELIDRLCKTGISNLTLHCRTPRMRNRDTPVRDFLPSIIDTVHANNVSFIINGSIRSRREFHLLQRKYGEKVGGMIAESAESNPTVFAETPLPWNQVVPEFIKIAQDMDNYPGNTKYIMLNQVPGKSKFYQKFCQVKTHKELLEIAETIGDEGNRIMMKYLQKDLLINPSDFEGYQYEMQNKRRLEHGDKINDNDKIDKKQKTVAVAV

SEQ ID NO: 7584 - DNA, 1185 bp, Yarrowia lipolytica CLIB122
  CDS (1)..(1185)
atggtcagttacgctggaaaattggtactggcgcccatggtgcgttccggcgagttccccacgcggctgctctccatcaagtacggggctgatctggtgtggagtcccgagattgtggacaagaagatgttggagtgcacccgagagtggaacgagaagaccaagacggtcgactttactgtcagtcagcagggcaagggaaacactgagaaaaaggccattattttccgaacctctgaggctgagagagacaagatcatcttccaggtgggttcggctaaccccgagatcgccgtggccgcttgcaaaatggttgccaaggacgtcgctggtattgatctcaactgtggctgtcccaagcacttttccatgcatgcaggtatgggagccgctctgctcaagacccccgataagctggttgctatcctggaggccttggtgaaggaggtgggagagcctttcaatgttagcatttcagtcaagatccgactgctggagacggaagagaagactctggagcttgtggacaggctggctcagaccggagtcaaaaacctgacgatccactgtcgaactacacccatgcgacctcgagaacctgtgattcgagatactttggccaaggtagctgaggtgtgtcacaagcacggaatcacctgccttgttaacggagatgttgaaggtcgacatgagcttgctgatcttcaggaaaagtacggcatcgatggagctatgattgcccgagcagccgaggctaacgcttcttgtttcagagctgaaggtatgctcccttggcagcaggtgaccaaggagtaccttgatatctgtcgagagtatgacaacttttaccagaacacaaaatactgtctgactcgcatgatccccggaaagagtcccagttataagaaagtggctgctttgaaggactgcgagagtctggagaagtacattaacgagcagtacgaggaaatgctcaaggagagggccgaggaggaagccaaaaagcctgaagagcaggttatcaaagaggtgggggagaaggccacaagggaggtggaggaatctatggtttcgaacgttgaggaggccgttcaagaggcaccggttgaagagacacctctggctgctggcaagcatgctctggaggctgaggagcagacatctgcgaagcgggtggctgtttag

SEQ ID NO: 7585 - protein, 394 aa, Yarrowia lipolytica CLIB122
MVSYAGKLVLAPMVRSGEFPTRLLSIKYGADLVWSPEIVDKKMLECTREWNEKTKTVDFTVSQQGKGNTEKKAIIFRTSEAERDKIIFQVGSANPEIAVAACKMVAKDVAGIDLNCGCPKHFSMHAGMGAALLKTPDKLVAILEALVKEVGEPFNVSISVKIRLLETEEKTLELVDRLAQTGVKNLTIHCRTTPMRPREPVIRDTLAKVAEVCHKHGITCLVNGDVEGRHELADLQEKYGIDGAMIARAAEANASCFRAEGMLPWQQVTKEYLDICREYDNFYQNTKYCLTRMIPGKSPSYKKVAALKDCESLEKYINEQYEEMLKERAEEEAKKPEEQVIKEVGEKATREVEESMVSNVEEAVQEAPVEETPLAAGKHALEAEEQTSAKRVAV

SEQ ID NO: 7586 - DNA, 1314 bp, Aspergillus nidulans FGSC A4
  CDS (1)..(1314)
atgacttcctgcccgaaacgagttcccatccccgccaacggcgtcgactaccgtggcaaggtcgtgcttgcaccgatggtgcgctccggcgagctgccatcccgtcttctagctctcaagtatggtgccgatctctgctggggtcctgaaacgattgacagagcaatgatcggtactactcgtcgtgttaacccccgcaatggctgcatcgaatttactcgtatgccctcgaatagcgtcaacaaagacgatgccaaagaatccgtcatatatcgccttgatccggcacgggagaagggaaagcttatattccagatgggtacggctaacccggaattagccgttcaagctggcaagctggtcgcagctgatgtgaatggaattgacgtgaactcggggtgtccaaagccgttcagcacaagtggtggaatgggagccgcactgctacgtactccggacaagctggtgtccatccttgaggctttagtcaaggaagttggcgaaccgtatcagattggaatatccgtgaaaatacgtctgctcgagactccagagctcacggagagcttggtgtcaaggctagtacgcacaggtatcacgggccttaccattcactgccgaacaacacccatgcggccgcgcgagcgtgcaattcgcgaccaactccgtatgattgtctcaacatgtcacaacgctggcgtcgcctgcatcatgaacggagatgtaacttcacgcgacgaagccctcgccctcatgcaagaatatggtgcagacggcgcgatgattgcgacagccgccgaagccaactcatcctgctttcggtctgaggcagacggcggtctcgctccctggcgcgaggtagtccacgagtacgtcaaactctgtatcgagtgcgaaaaccgctttggtaacaccaaatatctcatcaacatgctcatacccggcaaagacaaggagttcagagaagcaaagcaggctaaatgctacactgacctctgcaccatcctgcagcacgatgacctaatgcctgctgctcaggaagtagacgagattctcggcattgcacataagtcgacggcaaggagcaaggctgttgaaaatgctatcgcgaacaacgatactgctagagccgcgggcggcgtctcaagatcgaaaaacacctcccctgctacaggcggaattggacccatccgcacaaactccatccctaaacctatgaaagcagagacgaaggcagagtcgaaaccagcagcaacggatgtggacgtttccacgccagctccgcagccttctcaaaatgaggtggccgtctag

SEQ ID NO: 7587 - protein, 437 aa, Aspergillus nidulans FGSC A4
MTSCPKRVPIPANGVDYRGKVVLAPMVRSGELPSRLLALKYGADLCWGPETIDRAMIGTTRRVNPRNGCIEFTRMPSNSVNKDDAKESVIYRLDPAREKGKLIFQMGTANPELAVQAGKLVAADVNGIDVNSGCPKPFSTSGGMGAALLRTPDKLVSILEALVKEVGEPYQIGISVKIRLLETPELTESLVSRLVRTGITGLTIHCRTTPMRPRERAIRDQLRMIVSTCHNAGVACIMNGDVTSRDEALALMQEYGADGAMIATAAEANSSCFRSEADGGLAPWREVVHEYVKLCIECENRFGNTKYLINMLIPGKDKEFREAKQAKCYTDLCTILQHDDLMPAAQEVDEILGIAHKSTARSKAVENAIANNDTARAAGGVSRSKNTSPATGGIGPIRTNSIPKPMKAETKAESKPAATDVDVSTPAPQPSQNEVAV

SEQ ID NO: 7588 - DNA, 1302 bp, Candida albicans SC5314
  CDS (1)..(1302): transl_table=12
atgattgaatatgcaaataaattatgtcttgcccccatggtaagaagtggagaactacctattcgtcttttatcattaagatatggttgtgatttactttggactccggaattagttgataaaaaaatcttacaatcgactcgaatcatcaatcaagaattaaataccattgattatattgtatctaatcatcaacaactggacaagaaaactgtgattttccgtaaacatcctgttgaaaccgggagactaatattacaacttggatcgagtgatcctcaattagcagtagatgctgctcgaaaagtgattgatgatgttgatggtattgatttaaattgtggatgtccgaaaaatttctcaactcatagtggtatgggagcagagttattgaaaactccagataaattatgttctatcttgatcaatttagttgaaaaaattggtatcccgaataaaaaatccattagttgtaaaattcgattatttaataattatgatcaactgaaaaatttaattgaaaaaattttacaaacggggatatctaatttaacgattcattgtcgtactccaatcatgagaaatcgtcaagatccagtatggaatttcttacctaaattgatccccattattcaaacagcaggagttaatttagtgattaatggtaatatgcaaaatgttgctgatttgaaaaatctccaatcagcattgaatgacaacggtggaggaaaattgagtattatgattgctgaagcagcggaagcaaatccttcagttttcagccattcaccaaaaccacaatgtttaattatacaagaattatttgaaatttgtcaaaaatattatcaaaatttcctggcaactaaatttttaatgttgaatatgattcctagcaaatcaaaatattttcaaaaattatctcaaacgaaaagttttgatcaaatgggtgttatattgaaagaaatatctcaagaatatgaaaagcagaagcaaatgtctacaaaagggttggataaaatttttactataatgaatcgtgattgtcaaaaagccaattttttcaatttagatcaatttcaaaaacatattgcccaaagaggagaatatatgacgaaatttttccatgaatggcaagaatcaactatgttggaagatttcgatgatactcctactaaacgaccactcctgaatgataataataataatgtgtctaatcaaccatccaaacgacaaaagaaaaagatggcaaaaagccaaactcaacccctgtcaagtatagaaaaccccatcaaagtaacttga

SEQ ID NO: 7589 - protein, 433 aa, Candida albicans SC5314
MIEYANKLCLAPMVRSGELPIRLLSLRYGCDLLWTPELVDKKILQSTRIINQELNTIDYIVSNHQQSDKKTVIFRKHPVETGRLILQLGSSDPQLAVDAARKVIDDVDGIDLNCGCPKNFSTHSGMGAELLKTPDKLCSILINLVEKIGIPNKKSISCKIRLFNNYDQSKNLIEKILQTGISNLTIHCRTPIMRNRQDPVWNFLPKLIPIIQTAGVNLVINGNMQNVADLKNLQSALNDNGGGKLSIMIAEAAEANPSVFSHSPKPQCLIIQELFEICQKYYQNFSATKFLMLNMIPSKSKYFQKLSQTKSFDQMGVILKEISQEYEKQKQMSTKGLDKIFTIMNRDCQKANFFNLDQFQKHIAQRGEYMTKFFHEWQESTMLEDFDDTPTKRPLSNDNNNNVSNQPSKRQKKKMAKSQTQPSSSIENPIKVT

SEQ ID NO: 7590 - DNA, 2301 bp, Ustilago maydis 521
  CDS (1)..(2301)
atgccttcggtcgccgaaatccatcaactttctcctaatcactccatggacccaccagccaaacgtctcaagatggactctgatgcgcctcgcatcgacatcgaggcggtagctgccgactccacctcatatcaagacgttggtcctcttcccaccacctccgaaaccgagcgagtcgacgacctcgatcccatccccgtctgcacctctactctcgagtaccgcaacggtatcttccttgcccccatggtccgcattggtacactccctacgcgtctgctctcgctcgaatatggtgccgaccttgtctggggacccgaaatcgtcgaccgcgccatcatcggctgcgaacgcaaagtcaatcctcacaccggcgtcgtggaatacctcaaggatcacaaacaaatcttctcgtgccatcccatcgaacgtccctaccttgtctatcagctcggctccgctgatccacatcttgcgttccaggcgattaaaacgattacccaggcagacgacgtcgctgccgtcgatctcaactgcggctgccccaaacctttttccacgcacgccggcatgggtgccaatatgctctcgactcccatcctgctgtgcaacacactcaaggcgatgcgtcgtgctgcgccagcacatgttgcggtcacgtgcaaaattcggctcttgccgacgcaagagaaaactctcgagctggttgacaagattgttcgcacgggtgcgatcgaatgtctcaccgttcactgcaggaccaaggatatgcgtccacgcgagccagctctccttcatcgattgagggaaattgttgatcacgtcaacagtgtcgctaccgagatgggaaggaccatcccagtggtgtgcaacggcgatgtctgggatgcggctaccgtcccacgcatcaaggagctgaccggcgtcacgtcgaccatgatcgcaagaggtgcagaggcgaacccttcttgcttcagaccgcaggggaatgtgagcattccgcaagtgatcgcgccgaagtgggtaaagtattcgatcgcgctcaataacccagtgggaaataccaagtactgcatggcgcagctcgctttcaagccggctgaggcgggaaatgccaagggaatgtccaagaagcaactctccgcgctgcgtatgggcatttcgcacgcaaagacgcacgaagaactagcagctgtatttgggatcgatgcagagcaagtcaagtctcagagcgtcgaaaagcaaatactgaaggatcttagagaggcattggaagagagagtcaagcgtcacgccacaagtcacagcggttccggctccgatggtcagcgattgggcgctgtcgtcaacaacgctagcaactctttggatcaatcatctgcgggtggacagcagaacaatgacggtcatgcttccgggcctgatcagaacaaagccacatccaactcaccccagcccgaatggaagcagatcctcgccgacggaatcggtgacaacatcaagaacgaaaagtccatcctctactatgctttttcgacggtggagcagcctagctcggttcacgacgcggccaaaccgcacgttcgatacgttgttcaccgaggcttcgttaacgagaagcgcgacggagacgccgaggggggcgttgcgtcgcataatccggcgttcggttcgagtccatgcctcatgaccactaccgacgtacgcacgcccaaggtgcaacagctgacttcgcagagcagtctgcgcgcgcatggtcacgatggcagtcgttgtggagaatgcgagatttcgtggtggatcgaatccacacaaatgcaattccgaatctcgggcaccgtgcatgtcttgcctacccccggccacccgctgcgatctttgttcccgtttgaacgcctctctccaccacgggcgccagacgcgatggattccggcgaacctttcgattgggacgccgagcgaacgcgaatattcaacaagctcaatgcaggtctgctggcgtcattctgtcgacccacaccaggcagtccccatcccaacgctcaccgcttggacgcagctaagcccaaagacgacaccagctcaccttggcctctgcagcttcctcaaccgggcaaggaggagaacgaggagcaaaaggaacagctcaaacagagcgagaaaaatttcgcacttgttgtcgtcgaaccgtacaaggtcgatctggtcaacttggccgatgacactaggacaatctacgagctcgtcgatggcgagtgtgcggctacaggaagatggactagtcgtcgtgttgtaccctag

SEQ ID NO: 7591 - protein, 766 aa, Ustilago maydis 521
MPSVAEIHQLSPNHSMDPPAKRLKMDSDAPRIDIEAVAADSTSYQDVGPLPTTSETERVDDLDPIPVCTSTLEYRNGIFLAPMVRIGTLPTRLLSLEYGADLVWGPEIVDRAIIGCERKVNPHTGVVEYLKDHKQIFSCHPIERPYLVYQLGSADPHLAFQAIKTITQADDVAAVDLNCGCPKPFSTHAGMGANMLSTPILLCNTLKAMRRAAPAHVAVTCKIRLLPTQEKTLELVDKIVRTGAIECLTVHCRTKDMRPREPALLHRLREIVDHVNSVATEMGRTIPVVCNGDVWDAATVPRIKELTGVTSTMIARGAEANPSCFRPQGNVSIPQVIAPKWVKYSIALNNPVGNTKYCMAQLAFKPAEAGNAKGMSKKQLSALRMGISHAKTHEELAAVFGIDAEQVKSQSVEKQILKDLREALEERVKRHATSHSGSGSDGQRLGAVVNNASNSLDQSSAGGQQNNDGHASGPDQNKATSNSPQPEWKQILADGIGDNIKNEKSILYYAFSTVEQPSSVHDAAKPHVRYVVHRGFVNEKRDGDAEGGVASHNPAFGSSPCLMTTTDVRTPKVQQLTSQSSLRAHGHDGSRCGECEISWWIESTQMQFRISGTVHVLPTPGHPLRSLFPFERLSPPRAPDAMDSGEPFDWDAERTRIFNKLNAGLLASFCRPTPGSPHPNAHRLDAAKPKDDTSSPWPLQLPQPGKEENEEQKEQLKQSEKNFALVVVEPYKVDLVNLADDTRTIYELVDGECAATGRWTSRRVVP

SEQ ID NO: 7592 - DNA, 1335 bp, Aspergillus oryzae
  CDS (1)..(1335)
atgacttcgctcactacaccacctcgcgttcccatccccgccaacggggtcgactatcgtggcaaaatagtcctagcgccgatggtccgatcgggagaattaccttcgcgccttacagcccttaaatatggtgcagatcttgtctggggtcccgaaacgattgatcgtgcgctcgccggtgcctctcgccgcgtgaaccctcgaaacggatgcattgaatatacgaggctgccctcgaacggtggtcgcaccgaagcagcacctcaggaatcggtgatttaccgccttgatccggtgcgggagaaggggaaactcatattccaactcggtacagcctcgcccgagctcgctgtgcaagccgccaaagtggtcgctggtgatgttgctggtatagatgtgaactcaggatgtccgaaaccattcagtacaagcggcggtatgggtgcggccttgttacggacacctgataaactggtttcaattctagaggcgctagtccgcgagattggcgaaccttatcaaattggtatctccgtgaagatccgcatccttgaaaagccggagattacagaggcgttggtctcaaggcttgtcaaaacaggcattacaggcttgacggtccattgccgaacaccagccatgcgtcctcgcgaacgagcaatccgcgaacagctccgtatgatacgcgacatctgccatgacgctggtgtcgcatgcctcatgaatggcgatgtgacctcccgtgaccaggggctggctttgatggaagagtttggcgtagatggagccatgattgcaacatctgctgaggccaatccttcctgtttccaaagcgaagcagatggaggtttgcttccattcagagaagtcgttcatgcttacctaaagttctgtctcgagtcggagaatcgcttcggtaacaccaagtttctactgaatgtcatgatcccgggcaagaacaaagagtttcaggacacaaagggcgccaagagctatgccgattactgccacatcctgaggttcgacgacctcatgccagctgcgctccaagtcgatgaaattttgaacctcacgggaaaatcagctttcttcaaggaagagacacgaaacaaagctgtccagaacgcgattgagaataacgaaaccgctcgagcagccagtggtgcttcaaggcccaaatccacgtcccccgctaccagcggtgtgggaccaattcgtactagctccttccctacccctacgaagacgaagcctgaggagaaggaggccggggccaatcccgatattcctgaatcagcttctcagccatcccagaaacaggaagtcgccgcatga

SEQ ID NO: 7593 - protein, 444 aa, Aspergillus oryzae
MTSLTTPPRVPIPANGVDYRGKIVLAPMVRSGELPSRLTALKYGADLVWGPETIDRALAGASRRVNPRNGCIEYTRLPSNGGRTEAAPQESVIYRLDPVREKGKLIFQLGTASPELAVQAAKVVAGDVAGIDVNSGCPKPFSTSGGMGAALLRTPDKLVSILEALVREIGEPYQIGISVKIRILEKPEITEALVSRLVKTGITGLTVHCRTPAMRPRERAIREQLRMIRDICHDAGVACLMNGDVTSRDQGLALMEEFGVDGAMIATSAEANPSCFQSEADGGLLPFREVVHAYLKFCLESENRFGNTKFLLNVMIPGKNKEFQDTKGAKSYADYCHILRFDDLMPAALQVDEILNLTGKSAFFKEETRNKAVQNAIENNETARAASGASRPKSTSPATSGVGPIRTSSFPTPTKTKPEEKEAGANPDIPESASQPSQKQEVAA

SEQ ID NO: 7594 - DNA, 963 bp, Zea mays
  CDS (1)..(963)
atggagtaccgcgacaagctcgtgctggcgcccatggtccgcgtgggcaccttgccatttaggctactggctgctgaatatggtgctgatattacttatggagaagaaattattgatcacaaattcttgaagtgtgagcgtgttacaaatgaatctcttgggactactgattttgtggagaaagggactgacagtgtagttttccgtacatgcccacaagaaaggggcagggttgtattccaaatgggcacatcaaatgctgtgagggcacttaaagctgctcagatcgtgtgccgtgatgtttctgctatagatatcaacatgggttgtccaaagtctttttcacttagtggagggatgggtgctgcattactctccaaacctgagcttatacacgatattttgacaacactgcggaggaacttggacacaactgtgacatgtaaaatccgtcttctgaacacacctaaagacactgtggagttggcacgccggattgagaaaactggtgttcctgctcttgctgtccatggaagaaagattaaagatagaccgagagatcttgccaagtgggatgagatagctgatgttgtgtcagcgctgtcaattccagttatagctaatggagatgtctttgagtatgaggattttaagagaattaaagatgcaacaggtgccgcgtctgttatggttgctagaggtgctatgtggaatgcctccatcttttgtgccaaaggaaaaacaccttgggaggatgtcaaaagagagtatgtaagaaagagcatattgtgggacaacgatgtgaagagcacgaaacataccttgaaagaaatgataatgcactattcttgccttgaacttcctgaggggaaaggcgttataaagtgtgatacatctgaagatttagcgagactatacggggaagaggactactataattttgttgttgcaaataggaaatga

SEQ ID NO: 7595 - protein, 320 aa, Zea mays
MEYRDKLVLAPMVRVGTLPFRLLAAEYGADITYGEEIIDHKFLKCERVTNESLGTTDFVEKGTDSVVFRTCPQERGRVVFQMGTSNAVRALKAAQIVCRDVSAIDINMGCPKSFSLSGGMGAALLSKPELIHDILTTLRRNLDTTVTCKIRLLNTPKDTVELARRIEKTGVPALAVHGRKIKDRPRDLAKWDEIADVVSALSIPVIANGDVFEYEDFKRIKDATGAASVMVARGAMWNASIFCAKGKTPWEDVKREYVRKSILWDNDVKSTKHTLKEMIMHYSCLELPEGKGVIKCDTSEDLARLYGEEDYYNFVVANRK

SEQ ID NO: 7596 - DNA, 963 bp, Zea mays
  CDS (1)..(963)
atggagtaccgcgacaagctggtgctggcgcccatggtccgcgtgggcaccttgccatttaggctactggctgctgagtatggtgctgatattacttatggagaagaaattattgatcacaaattcttgaagtgtgagcgtgttacaaatgaatctcttgggactactgattttgtggagaaagggactgacagtgtagttttccgtacatgcccacaagaaaggggcagggttgtattccaaatgggcacatcaaatgctgtgagggcacttaaagctgctcagatcgtgtgccgtgatgtttctgctatagatatcaacatgggttgtccaaagtctttttcacttagtggagggatgggtgctgcattactctccaaacctgagcttatacacgatattctgacaacactgcggaggaacttggacacaactgtgacatgtaaaatccgtcttctgaacacacctaaagacactgtggagttggcacgccggattgagaaaactggtgttcctgctcttgctgtccatggaagaaagattaaagatagaccgagagatcttgccaagtgggatgagatagctgatgttgtgtcagcgctgtcaattccagttatagctaatggagatgtctttgagtatgaggattttaagagaattaaagatgcaacaggtgccgcgtctgttatggttgctagaggtgctatgtggaatgcctccatcttttgtgccaaaggaaaaacaccttgggaggatgtcaaaagagagtatgtaagaaagagcatattgtgggacaacgatgtgaagagcacgaaacataccttgaaagaaatgataatgcactattcttgccttgaacttcctgaggggaaaggcgttataaagtgtgatacatctgaagatttagcgagactatacggggaagaggactactataattttgttgttgcaaataggaaatga

SEQ ID NO: 7597 - protein, 320 aa, Zea mays; identical to SEQ ID NO: 7595

SEQ ID NO: 7598 - DNA, 25 bp, Artificial sequence
  primer
atggttacatatgctggaaaactgg

SEQ ID NO: 7599 - DNA, 25 bp, Artificial sequence
  primer
ttatatatctgtgggaaggggtaca

SEQ ID NO: 7600 - protein, 313 aa, Artificial sequence
  consensus sequence
  Variant (2)..(3): Xaa in position 2 to 3 is any amino acid
  Variant (5)..(6): Xaa in position 5 to 6 is any amino acid
  Variant (13)..(13): Xaa in position 13 is any amino acid
  Variant (15)..(15): Xaa in position 15 is any amino acid
  Variant (18)..(18): Xaa in position 18 is any amino acid
  Variant (21)..(21): Xaa in position 21 is any amino acid
  Variant (23)..(24): Xaa in position 23 to 24 is any amino acid
  Variant (29)..(33): Xaa in position 29 to 33 is any amino acid
  Variant (35)..(36): Xaa in position 35 to 36 is any amino acid
  Variant (38)..(44): Xaa in position 38 to 44 is any amino acid
  Variant (45)..(47): Xaa in position 45 to 47 is any or no amino acid
  Variant (49)..(50): Xaa in position 49 to 50 is any amino acid
  Variant (52)..(72): Xaa in position 52 to 72 is any amino acid
  Variant (73)..(86): Xaa in position 73 to 86 is any or no amino acid
  Variant (88)..(91): Xaa in position 88 to 91 is any amino acid
  Variant (92)..(92): Xaa in position 92 is any or no amino acid
  Variant (95)..(95): Xaa in position 95 is any amino acid
  Variant (97)..(102): Xaa in position 97 to 102 is any amino acid
  Variant (104)..(105): Xaa in position 104 to 105 is any amino acid
  Variant (107)..(109): Xaa in position 107 to 109 is any amino acid
  Variant (111)..(112): Xaa in position 111 to 112 is any amino acid
  Variant (113)..(114): Xaa in position 113 to 114 is any or no amino acid
  Variant (117)..(118): Xaa in position 117 to 118 is any amino acid
  Variant (121)..(121): Xaa in position 121 is any amino acid
  Variant (123)..(123): Xaa in position 123 is any amino acid
  Variant (128)..(128): Xaa in position 128 is any amino acid
  Variant (131)..(133): Xaa in position 131 to 133 is any amino acid
  Variant (141)..(142): Xaa in position 141 to 142 is any amino acid
  Variant (144)..(148): Xaa in position 144 to 148 is any amino acid
  Variant (151)..(152): Xaa in position 151 to 152 is any amino acid
  Variant (154)..(163): Xaa in position 154 to 163 is any amino acid
  Variant (164)..(167): Xaa in position 164 to 167 is any or no amino acid
  Variant (173)..(177): Xaa in position 173 to 177 is any amino acid
  Variant (178)..(179): Xaa in position 178 to 179 is any or no amino acid
  Variant (181)..(182): Xaa in position 181 to 182 is any amino acid
  Variant (184)..(189): Xaa in position 184 to 189 is any amino acid
  Variant (192)..(194): Xaa in position 192 to 194 is any amino acid
  Variant (195)..(195): Xaa in position 195 is any or no amino acid
  Variant (197)..(198): Xaa in position 197 to 198 is any amino acid
  Variant (200)..(200): Xaa in position 200 is any amino acid
  Variant (202)..(205): Xaa in position 202 to 205 is any amino acid
  Variant (207)..(207): Xaa in position 207 is any amino acid
  Variant (209)..(229): Xaa in position 209 to 229 is any amino acid
  Variant (230)..(238): Xaa in position 230 to 238 is any or no amino acid
  Variant (241)..(260): Xaa in position 241 to 260 is any amino acid
  Variant (261)..(265): Xaa in position 261 to 265 is any or no amino acid
  Variant (267)..(267): Xaa in position 267 is any amino acid
  Variant (269)..(270): Xaa in position 269 to 270 is any amino acid
  Variant (272)..(273): Xaa in position 272 to 273 is any amino acid
  Variant (275)..(277): Xaa in position 275 to 277 is any amino acid
  Variant (279)..(300): Xaa in position 279 to 300 is any amino acid
  Variant (301)..(306): Xaa in position 301 to 306 is any or no amino acid
  Variant (308)..(311): Xaa in position 308 to 311 is any amino acid
YXXKXXLAPMVRXGXLPXRLXAXXYGADXXXXXEXXDXXXXXXXXXXRXXNXXXXXXXXXXXXXXXXXXXXXXXXXXXXXXXXXXXEXXXXXFQXGXXXXXXAXXAXXXVXXXXDVXXIDXNXGCPKXFSXXXGMGAALLXXPXXXXXILXXLXXXXXXXXXXXXXXKIRLLXXXXXXXTXXLXXXXXXTGXXXXLXXHXRXXXXRXRXXXXXXXXXXXXXXXXXXXXXXXXXXXXXXNGXXXXXXXXXXXXXXXXXXXXXXXXXMXAXXAXXNXXXFXXXXXXXXXXXXXXXXXXXXXXXXXXXXNXXXXTK

SEQ ID NO: 7601 - protein, 43 aa, Artificial sequence
  protein pattern
  Variant (2)..(2): Xaa in position 2 is any amino acid
  Variant (3)..(3): Xaa in position 3 is Asp, Gly or Asn
  Variant (5)..(6): Xaa in position 5 to 6 is any or no amino acid
  Variant (8)..(9): Xaa in position 8 to 9 is any or no amino acid
  Variant (15)..(15): Xaa in position 15 is any amino acid
  Variant (17)..(17): Xaa in position 17 is Glu or Thr
  Variant (18)..(18): Xaa in position 18 is Phe, Ile or Leu
  Variant (20)..(20): Xaa in position 20 is any amino acid
  Variant (23)..(23): Xaa in position 23 is any amino acid
  Variant (24)..(24): Xaa in position 24 is Ala or Ser
  Variant (25)..(25): Xaa in position 25 is Ala, Ile or Leu
  Variant (26)..(26): Xaa in position 26 is any amino acid
  Variant (27)..(27): Xaa in position 27 is His or Tyr
  Variant (29)..(29): Xaa in position 29 is Ala or Cys
  Variant (30)..(30): Xaa in position 30 is Asp, Gly or Asn
  Variant (31)..(31): Xaa in position 31 is Ile or Leu
  Variant (32)..(32): Xaa in position 32 is any amino acid
  Variant (33)..(33): Xaa in position 33 is Trp or Tyr
  Variant (34)..(34): Xaa in position 34 is Gly, Ser or Thr
  Variant (35)..(35): Xaa in position 35 is Glu or Pro
  Variant (37)..(37): Xaa in position 37 is any amino acid
  Variant (38)..(38): Xaa in position 38 is Ile or Val
  Variant (40)..(41): Xaa in position 40 to 41 is any amino acid
  Variant (42)..(42): Xaa in position 42 is Phe, Ile, Leu or Met
  Variant (43)..(43): Xaa in position 43 is Ala, Ile, Leu or Val
YXXKXXLXXAPMVRXGXXPXRLXXXXXGXXXXXXXEXXDXXXX

SEQ ID NO: 7602 - protein, 41 aa, Artificial sequence
  protein pattern
  Variant (3)..(3): Xaa in position 3 is Ala, Asp, Asn or Ser
  Variant (4)..(4): Xaa in position 4 is Ala, Gly or Thr
  Variant (7)..(7): Xaa in position 7 is Ile, Leu or Val
  Variant (9)..(10): Xaa in position 9 to 10 is any or no amino acid
  Variant (12)..(13): Xaa in position 12 to 13 is any or no amino acid
  Variant (16)..(16): Xaa in position 16 is any amino acid
  Variant (19)..(20): Xaa in position 19 to 20 is any amino acid
  Variant (21)..(21): Xaa in position 21 is Ala, Gly or Ser
  Variant (25)..(25): Xaa in position 25 is Ala or Ser
  Variant (29)..(30): Xaa in position 29 to 30 is any amino acid
  Variant (32)..(32): Xaa in position 32 is Asp or Glu
  Variant (33)..(33): Xaa in position 33 is any amino acid
  Variant (34)..(34): Xaa in position 34 is Ile or Leu
  Variant (35)..(36): Xaa in position 35 to 36 is any amino acid
  Variant (39)..(39): Xaa in position 39 is any amino acid
  Variant (40)..(40): Xaa in position 40 is Ala, Glu, Asn or Thr
DVXXIDXNXXCXXPKXFSXXXGMGXALLXXPXXXXXILXXL

SEQ ID NO: 7603 - protein, 27 aa, Artificial sequence
  protein pattern
  Variant (2)..(2): Xaa in position 2 is Ala or Thr
  Variant (3)..(3): Xaa in position 3 is Ile or Val
  Variant (5)..(5): Xaa in position 5 is Cys or Gly
  Variant (7)..(10): Xaa in position 7 to 10 is any amino acid
  Variant (12)..(12): Xaa in position 12 is Asn or Pro
  Variant (14)..(19): Xaa in position 14 to 19 is any or no amino acid
  Variant (21)..(21): Xaa in position 21 is any amino acid
  Variant (22)..(22): Xaa in position 22 is Ala or Pro
  Variant (23)..(26): Xaa in position 23 to 26 is any amino acid
  Variant (27)..(27): Xaa in position 27 is Ala, Ile or Leu
LXXHXRXXXXRXRXXXXXXEXXXXXXX

SEQ ID NO: 7604 - protein, 20 aa, Artificial sequence
  protein pattern
  Variant (2)..(2): Xaa in position 2 is any amino acid
  Variant (3)..(3): Xaa in position 3 is Asp, Gly, Asn or Ser
  Variant (4)..(4): Xaa in position 4 is Lys or Arg
  Variant (5)..(5): Xaa in position 5 is Ile, Leu or Val
  Variant (6)..(6): Xaa in position 6 is Ile or Val
  Variant (9)..(9): Xaa in position 9 is Ile, Leu, Met or Val
  Variant (11)..(13): Xaa in position 11 to 13 is any amino acid
  Variant (14)..(16): Xaa in position 14 to 16 is any or no amino acid
  Variant (18)..(19): Xaa in position 18 to 19 is any amino acid
EXXXXXFQXGXXXXXXAXXA

SEQ ID NO: 7605 - protein, 21 aa, Artificial sequence
  protein pattern
  Variant (2)..(2): Xaa in position 2 is any amino acid
  Variant (3)..(4): Xaa in position 3 to 4 is any or no amino acid
  Variant (7)..(7): Xaa in position 7 is Ile or Leu
  Variant (9)..(13): Xaa in position 9 to 13 is any amino acid
  Variant (15)..(15): Xaa in position 15 is any amino acid
  Variant (16)..(16): Xaa in position 16 is Ala, Asp, Glu, Gln, Ser or Thr
  Variant (18)..(18): Xaa in position 18 is Ala or Val
  Variant (19)..(19): Xaa in position 19 is any amino acid
  Variant (20)..(20): Xaa in position 20 is Lys or Arg
  Variant (21)..(21): Xaa in position 21 is Ile, Leu or Val
VXXXIRXLXXXXXTXXLXXXX

SEQ ID NO: 7606 - DNA, 324 bp, Saccharomyces cerevisiae
  CDS (1)..(324)
atgcgccttcagtggccaaagttcatcaccttccttagcacgggttcttgctgtctgctcttcctgcttcttccctgttcgtttttccctcttcctacggctatgcacagtggcaaatgcactgcatgtgtttctgtggcgggtatccctcaattgcgggtaacaataagtaactcaacatcacgaacgacgtttatgtttgctgttaccacaaagggtaaaacgtcaataaaagcaagcaatgttattcgtgccagagaactatatctggcgtacgtcttatatataacacaagcaagggcaaatacgtggttagtggtgtaa

SEQ ID NO: 7607 - protein, 107 aa, Saccharomyces cerevisiae
MRLQWPKFITFLSTGSCCLLFLLLPCSFFPLPTAMHSGKCTACVSVAGIPQLRVTISNSTSRTTFMFAVTTKGKTSIKASNVIRARELYLAYVLYITQARANTWLVV

SEQ ID NO: 7608 - DNA, 23 bp, Artificial sequence
  primer
atgcgccttcagtggccaaagtt

SEQ ID NO: 7609 - DNA, 24 bp, Artificial sequence
  primer
ttacaccactaaccacgtatttgc

SEQ ID NO: 7610 - DNA, 2430 bp, Saccharomyces cerevisiae
  CDS (1)..(2430)
atgtcttctgtagaagaattgactcagctgttttcacaggttgggtttgaagataaaaaggtgaaggagattgtcaagaataaaaaggtttctgattcactttacaaattgattaaggagactccttcggactatcaatggaacaaatctactagagcgctagtacacaacctggcatcttttgtcaaaggtacagatctacccaagtctgaattaattgttaacggcatcattaatggtgatttgaagacatctctgcaagtcgatgccgcatttaaatatgtaaaggctaatggcgaggcatccaccaaaatgggtatgaatgaaaactctggtgttggtattgagattacagaggatcaggttagaaattacgtcatgcagtacattcaagaaaacaaggaaagaattttaactgaacgctataaactggtgccaggtatttttgccgatgttaaaaacttaaaggagctgaagtgggccgatccacgtagtttcaagccaattatcgaccaagaagtcttaaaacttttgggtccaaaggatgagagagacttaatcaagaagaagaccaagaataatgaaaagaagaaaaccaattctgccaagaagagttctgataattctgcatcatccggtccaaagaggactatgttcaatgaaggtttcctaggtgatttgcataaagtgggtgaaaacccacaagcttacccagaattaatgaaggaacaccttgaggttactggtggcaaagttcgtacaaggttccctccggagcccaatggatatttgcatattggtcattctaaagctattatggttaattttggctatgctaaatatcacaatggtacctgttatttaagatttgacgataccaaccccgaaaaggaagctcctgaatattttgaatccattaagagaatggtttcttggttaggttttaaaccatggaaaattacttactcaagtgattattttgacgagctttatcgcctcgctgaagtgttgatcaaaaacggcaaagcttacgtttgtcattgtaccgccgaagaaattaaaagaggtcgtggtattaaagaagacggtactccaggtggggagagatatgcttgtaagcatcgtgatcagtcgatagaacaaaacctgcaagaattcagagatatgagagatggcaagtacaaacctggtgaagctatcttaagaatgaaacaggatctaaattcaccaagcccacaaatgtgggacttgattgcgtatagagttttaaatgctccacatccaagaacgggaacaaaatggagaatttatcctacttacgattttacacattgtttggtcgattcaatggaaaatattacacattctttatgtactactgaattctacctatctagagaaagctatgaatggttatgtgatcaggttcatgtgttcagacccgctcaaagagaatatggtcgtttgaatatcaccggtacagttttatccaaaagaaaaattgcgcaattggtggatgaaaaattcgttagaggctgggacgatcctagactattcacgcttgaagctatacgcagacgtggtgttcctcctggtgccattttatcctttatcaacacattaggtgttaccacaagtaccacaaacattcaagttgtgaggtttgagagcgctgttagaaagtacctagaagataccacaccgagattaatgtttgtgttggatcctgttgaagttgttgtcgataatttatctgacgattatgaagaattggcaactattccttacagacctggtactccagaatttggtgaaagaactgtaccatttacaaacaaattctacattgaaaggtcagatttctcagaaaacgttgatgataaggaatttttcagattaacaccaaaccaaccagttggtttaattaaagtctcacacacagtttctttcaaaagtttggaaaaagatgaagctggtaaaattataagaattcatgtcaactatgataacaaggttgaagaaggttcgaaaccaaagaaaccaaaaacttatattcaatgggttcctatctcttcaaaatataattctccattgagagttactgaaactagggtttacaaccaattgttcaaatctgaaaatccatcttctcatcctgaaggcttcttgaaggacatcaacccagaaagtgaagtcgtttataaagaatctgtcatggaacataacttcggggacgttgtcaagaacagtccatgggtcgttgattctgttaaaaactcggaattttatgttgaagaagataaggattccaaagaagtgtgtagattccaagctatgagagtaggttatttcactctggataaagagagtacgacttctaaggttattttgaatagaatagttagcttgaaggacgcaacttccaagtga

SEQ ID NO: 7611 - protein, 809 aa, Saccharomyces cerevisiae
MSSVEELTQLFSQVGFEDKKVKEIVKNKKVSDSLYKLIKETPSDYQWNKSTRALVHNLASFVKGTDLPKSELIVNGIINGDLKTSLQVDAAFKYVKANGEASTKMGMNENSGVGIEITEDQVRNYVMQYIQENKERILTERYKLVPGIFADVKNLKELKWADPRSFKPIIDQEVLKLLGPKDERDLIKKKTKNNEKKKTNSAKKSSDNSASSGPKRTMFNEGFLGDLHKVGENPQAYPELMKEHLEVTGGKVRTRFPPEPNGYLHIGHSKAIMVNFGYAKYHNGTCYLRFDDTNPEKEAPEYFESIKRMVSWLGFKPWKITYSSDYFDELYRLAEVLIKNGKAYVCHCTAEEIKRGRGIKEDGTPGGERYACKHRDQSIEQNLQEFRDMRDGKYKPGEAILRMKQDLNSPSPQMWDLIAYRVLNAPHPRTGTKWRIYPTYDFTHCLVDSMENITHSLCTTEFYLSRESYEWLCDQVHVFRPAQREYGRLNITGTVLSKRKIAQLVDEKFVRGWDDPRLFTLEAIRRRGVPPGAILSFINTLGVTTSTTNIQVVRFESAVRKYLEDTTPRLMFVLDPVEVVVDNLSDDYEELATIPYRPGTPEFGERTVPFTNKFYIERSDFSENVDDKEFFRLTPNQPVGLIKVSHTVSFKSLEKDEAGKIIRIHVNYDNKVEEGSKPKKPKTYIQWVPISSKYNSPLRVTETRVYNQLFKSENPSSHPEGFLKDINPESEVVYKESVMEHNFGDVVKNSPWVVDSVKNSEFYVEEDKDSKEVCRFQAMRVGYFTLDKESTTSKVILNRIVSLKDATSK

SEQ ID NO: 7612 - DNA, 2577 bp, Cryptococcus neoformans var. neoformans JEC21
  CDS (1)..(2577)
atgcctcccaagtttgaccccaactccccagaaaacgcccctcttattcagctcttccagagtctcggcctcgccagcaactctgccacagagctcgttcgtcagcctaagtctggaaaggctttcaagtccctgatagacgagtacggtcttacaaacaacaagtacgatgagaagcaagcaggagctcttgtcaagcttagctctgtgagcgctaagctgggcagtgaacagaaggatttcctcgtgcagaagattgtgaagggggatgtgaagactccagaccaggttacagcggccgtcaaatttgcagagaaaaatcctgacttgaaggcgaacgaggaggctttcgacaaggaatgtggtgttggtatcaacatcactcttgccgacctccctgaactcctcaaatcatatattacttctcttccttcaccccctgagggctggaacagtcttggtcctattcttggcggcatcaagggtggtgcttctgaccttcgatgggccaacgccacggaagttaagtccacccttgaatccatattcgtctctcttttcggtaccaaggaagccgccgccgccgctgccgctgctaagcccaaagctaaggcccccaaggccgctgaaaaacccgttaaacctgtctccaccactgctgccgttgctaccaaatcttcttccgctacccctgctatccctacaaacatttttgaggaaggcttcctttccgaattccacaaagtcggtgaaaacccccagagtgatcccaagttgaaggaggagcatttggcgtggacaaaggggcaggtgtacacccgattcccaccagagcctaatggatacctacatattggacacgtcaaggctatcatggtcgactttggttatgccaaataccacggtggtcgaacatacctcagatacgacgataccaatcctgaagctgaagaaggccgatactttcaatctatcctcgagactgttcgatggcttggttttgagccttggaagattacttactccagcgacaactttgacaggttatacgagctcgcggttgaattgattcggcgaggaaagggatacgtctgtacttgtgacgctgagaaaatcaaggaagaccgaggtatgggcaaggggaaccccatcccttgtgtgcaccgagaccgacctatcgaggagtctcttcatgagtttgaacgaatgaagaatggcgagtataaggaaaaggaggcgtgcatgaggatgaagatggacttgaatagcggcaacccttatatgtgggacactgttgcctaccgagtcaagaaggcgcctcatcacaggaccggtgacaagtggaagatctaccccacttatgactttacacattgtctttgtgatagcattgagaacatcacgcactctctctgtaccatcgaatttatccccgctcgtgaatcctacgaatggctctgtgacgccctcagcgtttacaaggctcgtcagtacgaattcgcacgtctcaacctccagggtactttcctctccaaacgaaagatcgcgaagcttgtccagaacggccacgtcaaggactgggatgaccctcgtctttacactatcatcgcccttcgtcgacgcggcattcctcccggcgccttgctctcctttgtttccgagcttggtgtgaccaacatcccttccaccactgaaattcaaaagttcgaatcttgcgtccgaggttaccttgagagctccgcgcccaggttgatgatggttctcaaccctatcaaaatcatcatcgacaatgtgcccgacgattaccgtgtccaggtcgaagtgcctctccatcccaaaatccctgctatgggcactgtccagaccatcttcaccaaggaagtctacatcgatgctgacgatttcagagaggtcgattctcccgactacttccgtctggcccccggcaagtctgtcggcttgttcaaggctccctaccctgttacttgcacatccttcaccaaggaccccgttaccggtcgtgttaccgaggtacattgtacgctcgccggcgaaggcttcaagaagccaaaggcttacatccagtgggtcaatgcgcccgaggcagttaagatcgacgaagtgcgatacttcaagaagcttttcaagtctgatccccctcctgcggactatgaggcagatgtcgaccccgattctcttgaggtttacagcaatgctgtgattgagcctgcgttctatgaacttgctaagaagcagatctccgatgcgaggaaagacagtgaagaacgtacgaagaaggccgtcgagcaggctgctaagcctgatacatcttctgctcctgtggaaggcagtgcggcggctcagcacaaggatgaggagcccgtagctactgctgagcagttggtgggtaacgagaacatcagattccagggtatgaggttggcgtactttactttggacagggaaagcaagttgggctgcttggagaaggaggatgtcaagggcaggagcgagggtgacaagattatactaaacaggattgtctcgctcaaggaggatgcgggcaagagtgcttag

SEQ ID NO: 7613 - protein, 858 aa, Cryptococcus neoformans var. neoformans JEC21
MPPKFDPNSPENAPLIQLFQSLGLASNSATELVRQPKSGKAFKSLIDEYGLTNNKYDEKQAGALVKLSSVSAKLGSEQKDFLVQKIVKGDVKTPDQVTAAVKFAEKNPDLKANEEAFDKECGVGINITLADLPELLKSYITSLPSPPEGWNSLGPILGGIKGGASDLRWANATEVKSTLESIFVSLFGTKEAAAAAAAAKPKAKAPKAAEKPVKPVSTTAAVATKSSSATPAIPTNIFEEGFLSEFHKVGENPQSDPKLKEEHLAWTKGQVYTRFPPEPNGYLHIGHVKAIMVDFGYAKYHGGRTYLRYDDTNPEAEEGRYFQSILETVRWLGFEPWKITYSSDNFDRLYELAVELIRRGKGYVCTCDAEKIKEDRGMGKGNPIPCVHRDRPIEESLHEFERMKNGEYKEKEACMRMKMDLNSGNPYMWDTVAYRVKKAPHHRTGDKWKIYPTYDFTHCLCDSIENITHSLCTIEFIPARESYEWLCDALSVYKARQYEFARLNLQGTFLSKRKIAKLVQNGHVKDWDDPRLYTIIALRRRGIPPGALLSFVSELGVTNIPSTTEIQKFESCVRGYLESSAPRLMMVLNPIKIIIDNVPDDYRVQVEVPLHPKIPAMGTVQTIFTKEVYIDADDFREVDSPDYFRLAPGKSVGLFKAPYPVTCTSFTKDPVTGRVTEVHCTLAGEGFKKPKAYIQWVNAPEAVKIDEVRYFKKLFKSDPPPADYEADVDPDSLEVYSNAVIEPAFYELAKKQISDARKDSEERTKKAVEQAAKPDTSSAPVEGSAAAQHKDEEPVATAEQLVGNENIRFQGMRLAYFTLDRESKLGCLEKEDVKGRSEGDKIILNRIVSLKEDAGKSA

SEQ ID NO: 7614 - DNA, 2361 bp, Arabidopsis thaliana
  CDS (1)..(2361)
atggttctcaaagacgataactccgagaaatctattgagctcttcattagtattggtttggacgagaaaacagctcgtaataccatcaataataacaaggtcaccgccaatctcaccgccgttatccacgaggctgctgttactgatgggtgcgatcgaaatactggcaatctgttatactcggtcgctactaagttccctacaaatgctcttgtgcatcgccctacattgctcaagtacattgttaactctaagattaaaactccagcccaattggaagctgcatttgccttttttgccagtaccggtcctgaggactttaagctgaatgagtttgaagaggcatgtggtgttgggattgaagtttccccagaagatattgagaaagcagttaaaggaatctttgaagagaataagaaaacaatattggagcagcgctatcgaactaatgtgggtgaattatttggacatgtccggaaaagtttgccatgggccgatcctaagattgtaaagaaactcatagatgagaaaatgtatgagctgcttggtgagaaaaccgctgctgataatgaaaaacctacaaaaaagaaggagaagaaggagaagcctgccaaagtcgaggaaaagaaagctgtggtggaaactaccgcagagccatctgaagaggagcttaatccatatactatattccctcagccagaacaaaattttatggttcacacagaagtgtttttcagtgatggctctattctcagatgtagcaatacaaaggaagtacttgacaaacatctcaaggtgactggagggaaagtttatactcggttcccccctgaaccaaatggttatcttcatattggacatgccaaggctatgtttgttgattttggtcttgcaaaggagcgagggggttgctgttatctaaggtatgatgatacaaatccagaggcagaaaaggaagagtatattaatcatattgaagaaattgttaagtggatgggttgggaacccttcaaggaactgtatgatttggcagtggagttgattcggagaggtcatgcttatgttgatcatcagactgctgatgagataaaagagtacagagagaagaaaatgaacagcccctggagggacagacctattgaagaatctctaaaactttttgatgaaatgagacgaggcatcattgaggaagggaaggcaaccctaagaatgaagcaagatatgcagagtgacaattttaatatgtatgatcttattgcctatcgaataaagttcgcacctcatcctaaggctggtgacaagtggtgtatctatccgagttatgattatgcccactgcactgttgattctcttgagaatataacgcattcgctctgtactcttgaatttgaaacccggcgtgcttcatactattggctgttacattccctgagtctctacatgccatatgtgtgggaatattcacggttgaatgtgacaaacactgtaatgtccaagcgtaagttgaattacatagtgacaaacaagtatgttgatggttgggatgatccacgtcttttgacactttctggtttgagacggaggggtgtgacttcaactgcgattaatgcatttgtacgaggcattgggattactagaagtgatggtagcatgatacacgtaagtcgtcttgagcatcatattagagaggaattgaataaaacagcccctcgcaccatggtggtgcttaatcctcttaaagtggtcatcaccaatttggaatcagacaagcttatagagcttgatgccaaaaggtggcctgatgctcagaacgatgatccctcagcattctacaaggtaccgttctctagagttgtatacattgaccaatctgacttccgaatgaaggattcaaaagattattatgggctcgcccctggtaaatctgttttgctaagatatgctttcccaatcaagtgcaccaatgttgtctttgctgatgacaatgaaaccgttcgtgagattcatgcggaatatgaccccgagaaaaagtcaaagccaaagggggttctacactgggtcgctgaatcttccccaggagaagagcccataaaggtggaagtccgattatttgagaaactctttaactccgagaacccggctgaactcaatgatgcttggctcactgacattaacccaaactctaaaatggtaatttctggtgcctatgctgtatcaacccttaaagatgctgcagttggggacagattccaattcgagaggctaggttattacgcggtggacaaggactctgagccaggaaagcttgtgttcaaccggacggtcacactcagagacagctacgggaaaggtggaaagtaa

SEQ ID NO: 7615 - protein, 786 aa, Arabidopsis thaliana
MVLKDDNSEKSIELFISIGLDEKTARNTINNNKVTANLTAVIHEAAVTDGCDRNTGNLLYSVATKFPTNALVHRPTLLKYIVNSKIKTPAQLEAAFAFFASTGPEDFKLNEFEEACGVGIEVSPEDIEKAVKGIFEENKKTILEQRYRTNVGELFGHVRKSLPWADPKIVKKLIDEKMYELLGEKTAADNEKPTKKKEKKEKPAKVEEKKAVVETTAEPSEEELNPYTIFPQPEQNFMVHTEVFFSDGSILRCSNTKEVLDKHLKVTGGKVYTRFPPEPNGYLHIGHAKAMFVDFGLAKERGGCCYLRYDDTNPEAEKEEYINHIEEIVKWMGWEPFKELYDLAVELIRRGHAYVDHQTADEIKEYREKKMNSPWRDRPIEESLKLFDEMRRGIIEEGKATLRMKQDMQSDNFNMYDLIAYRIKFAPHPKAGDKWCIYPSYDYAHCTVDSLENITHSLCTLEFETRRASYYWLLHSLSLYMPYVWEYSRLNVTNTVMSKRKLNYIVTNKYVDGWDDPRLLTLSGLRRRGVTSTAINAFVRGIGITRSDGSMIHVSRLEHHIREELNKTAPRTMVVLNPLKVVITNLESDKLIELDAKRWPDAQNDDPSAFYKVPFSRVVYIDQSDFRMKDSKDYYGLAPGKSVLLRYAFPIKCTNVVFADDNETVREIHAEYDPEKKSKPKGVLHWVAESSPGEEPIKVEVRLFEKLFNSENPAELNDAWLTDINPNSKMVISGAYAVSTLKDAAVGDRFQFERLGYYAVDKDSEPGKLVFNRTVTLRDSYGKGGK

SEQ ID NO: 7616 - DNA, 2388 bp, Arabidopsis thaliana
  CDS (1)..(2388)
atggttctcaaagacgataactccgagaaatctattgagctcttcattagtattggtttggacgagaaaacagctcgtaataccatcaataataacaaggtcaccgccaatctcaccgccgttatccacgaggctgctgttactgatgggtgcgatcgaaatactggcaatctgttatactcggtcgctactaagttccctacaaatgctcttgtgcatcgccctacattgctcaagtacattgttaactctaagattaaaactccagcccaattggaagctgcatttgccttttttgccagtaccggtcctgaggactttaagctgaatgagtttgaagaggcatgtggtgttgggattgaagtttccccagaagatattgagaaagcagttaaaggaatctttgaagagaataagaaaacaatattggagcagcgctatcgaactaatgtgggtgaattatttggacatgtccggaaaagtttgccatgggccgatcctaagattgtaaagaaactcatagatgagaaaatgtatgagctgcttggtgagaaaaccgctgctgataatgaaaaacctacaaaaaagaaggagaagaaggagaagcctgccaaagtcgaggaaaagaaagctgtggtggaaactaccgcagagccatctgaagaggagcttaatccatatactatattccctcagccagaacaaaattttatggttcacacagaagtgtttttcagtgatggctctattctcagatgtagcaatacaaaggaagtacttgacaaacatctcaaggtgactggagggaaagtttatactcggttcccccctgaaccaaatggttatcttcatattggacatgccaaggctatgtttgttgattttggtcttgcaaaggagcgagggggttgctgttatctaaggtatgatgatacaaatccagaggcagaaaaggaagagtatattaatcatattgaagaaattgttaagtggatgggttgggaacccttcaagattacatacaccagtgattatttccaggaactgtatgatttggcagtggagttgattcggagaggtcatgcttatgttgatcatcagactgctgatgagataaaagagtacagagagaagaaaatgaacagcccctggagggacagacctattgaagaatctctaaaactttttgatgaaatgagacgaggcatcattgaggaagggaaggcaaccctaagaatgaagcaagatatgcagagtgacaattttaatatgtatgatcttattgcctatcgaataaagttcgcacctcatcctaaggctggtgacaagtggtgtatctatccgagttatgattatgcccactgcactgttgattctcttgagaatataacgcattcgctctgtactcttgaatttgaaacccggcgtgcttcatactattggctgttacattccctgagtctctacatgccatatgtgtgggaatattcacggttgaatgtgacaaacactgtaatgtccaagcgtaagttgaattacatagtgacaaacaagtatgttgatggttgggatgatccacgtcttttgacactttctggtttgagacggaggggtgtgacttcaactgcgattaatgcatttgtacgaggcattgggattactagaagtgatggtagcatgatacacgtaagtcgtcttgagcatcatattagagaggaattgaataaaacagcccctcgcaccatggtggtgcttaatcctcttaaagtggtcatcaccaatttggaatcagacaagcttatagagcttgatgccaaaaggtggcctgatgctcagaacgatgatccctcagcattctacaaggtaccgttctctagagttgtatacattgaccaatctgacttccgaatgaaggattcaaaagattattatgggctcgcccctggtaaatctgttttgctaagatatgctttcccaatcaagtgcaccaatgttgtctttgctgatgacaatgaaaccgttcgtgagattcatgcggaatatgaccccgagaaaaagtcaaagccaaagggggttctacactgggtcgctgaatcttccccaggagaagagcccataaaggtggaagtccgattatttgagaaactctttaactccgagaacccggctgaactcaatgatgcttggctcactgacattaacccaaactctaaaatggtaatttctggtgcctatgctgtatcaacccttaaagatgctgcagttggggacagattccaattcgagaggctaggttattacgcggtggacaaggactctgagccaggaaagcttgtgttcaaccggacggtcacactcagagacagctacgggaaaggtggaaagtaa

SEQ ID NO: 7617 - protein, 795 aa, Arabidopsis thaliana
MVLKDDNSEKSIELFISIGLDEKTARNTINNNKVTANLTAVIHEAAVTDGCDRNTGNLLYSVATKFPTNALVHRPTLLKYIVNSKIKTPAQLEAAFAFFASTGPEDFKLNEFEEACGVGIEVSPEDIEKAVKGIFEENKKTILEQRYRTNVGELFGHVRKSLPWADPKIVKKLIDEKMYELLGEKTAADNEKPTKKKEKKEKPAKVEEKKAVVETTAEPSEEELNPYTIFPQPEQNFMVHTEVFFSDGSILRCSNTKEVLDKHLKVTGGKVYTRFPPEPNGYLHIGHAKAMFVDFGLAKERGGCCYLRYDDTNPEAEKEEYINHIEEIVKWMGWEPFKITYTSDYFQELYDLAVELIRRGHAYVDHQTADEIKEYREKKMNSPWRDRPIEESLKLFDEMRRGIIEEGKATLRMKQDMQSDNFNMYDLIAYRIKFAPHPKAGDKWCIYPSYDYAHCTVDSLENITHSLCTLEFETRRASYYWLLHSLSLYMPYVWEYSRLNVTNTVMSKRKLNYIVTNKYVDGWDDPRLLTLSGLRRRGVTSTAINAFVRGIGITRSDGSMIHVSRLEHHIREELNKTAPRTMVVLNPLKVVITNLESDKLIELDAKRWPDAQNDDPSAFYKVPFSRVVYIDQSDFRMKDSKDYYGLAPGKSVLLRYAFPIKCTNVVFADDNETVREIHAEYDPEKKSKPKGVLHWVAESSPGEEPIKVEVRLFEKLFNSENPAELNDAWLTDINPNSKMVISGAYAVSTLKDAAVGDRFQFERLGYYAVDKDSEPGKLVFNRTVTLRDSYGKGGK

SEQ ID NO: 7618 - DNA, 2328 bp, Mus musculus
  CDS (1)..(2328)
atggctactccagattcgctagcgctgttcaccggccttggccttagcgagaacaaggcccgcgagacgctcaagaacgaggctctgagcactcagctgcgcgaggcggcgacccaggcacaccagattctgggttctaccatcgacaaggctactggggtcctcctatatgacttggtctcccgactcagggatactcggcgtcgttctttccttgtgagctatatagccaataagaagattcacacgggactccagctgagcgctgctcttgaatatgttcggagtcatccccaggatcccattgataccaaggacttcgagcaggagtgtggcgtcggtgtggtggtgacaccggagcagattgaggaagctgtggagtccaccataaataagcatcagttgcagctcctagcggaacggtaccgtttcaacatggggctgctaatgggagaggctcgggctgcgctcagatgggcagacggcaaaatgatcaagaacgaggtggatatgcaggtgcttcaccttttggggcccaagatggaagctgatctggtgaagaagcccaaggtggcaaaggcacggctggaagaaacagaccggaagacagcaaaagatgtggtggagaaaggtgaagtggctggccagaccctgtctctgatggagcagctccggggggaggcacttaagtttcataagccaggtgagaactacaagacgccaggctatgtgatcactccatataccatggatctgctgaagcagcacctggagatcactgggggacaggtacgtacgcggttccctccagagcccaatggaatcctgcatattggacacgccaaagccatcaatttcaactttggttatgccaaggccaacaatggtatctgttttctgcgctttgatgacaccaaccctgagaaagaagaagcaaaattcttcactgctatttatgacatggtgacctggctgggttatacaccttacaaagtgacatatgcttctgactattttgaccagctgtatgcctgggccgtggaactcatccatgggggtcttgcttatgtgtgtcaccagagagtggaagagctcaaaggccataaccctttaccttctccatggagggacaggcctaaggaagaatcattgctgctctttgaggcaatgcgcaagggcaaatttgcagaaggagaggccacacttcgaatgaagttggtgatggaagatggcaagatggaccccgtggcctatcgagtcaagtacacgccacaccatcgcacaggggacaaatggtgcatctaccccacctatgactacacacattgtctgtgtgactccattgagcacattacccactcgttgtgtaccaaggagttccaggctcgacggtcttcctacttttggttatgtaacgctctgaaagtctattgtcctgttcagtgggaatatggtcgcctcaatttgcactatgctgttgtctcaaagcgcaagattctccagcttgtagcagctggtgctgttcgggactgggacgatccacggctcttcacactcactgccctacgacgacggggttttccaccagaggctatcaacaacttctgtgctcgggttggggtcacagtggcacagaccacaatggaacctcatcttctggaagcctgtgtgcgtgatgtgctgaatgatgcagccccacgtgccatggctgttctagagccactacaagttgtcatcaccaactttcctgctcccaagcccttggacatccgagtgccaaatttcccagctgatgagaccaagggtttccaccaggttccttttgcttccactgtcttcattgagagaagcgactttaaggaggagtcagaaccaggctataagcgcctagcttcgggccagcctgtgggcctgagacacactggttatgtcattgaactgcagaatattgtcaggggctccagtggctgtgtggaacgcttggaggtgacctgtagacgagctgatgctggagagaagcccaaggcctttattcactgggtatcacagcctttggtgtgtgagattcgcctctatgagcgcctattccagcacaagaaccccgaagaccctgttgaagtgcctggtggattcctaagtgacctgaacccggcgtcactacaagtggtagaaggagcattagtggactgctctgtggctttggcaaagccctttgacaagttccagtttgagcgccttgggtacttctctgtggatccagacagccatcaaggacagattgtcttcaaccgaactgtcacactaaaagaagacccaggcaaaatatga

SEQ ID NO: 7619 - protein, 775 aa, Mus musculus
MATPDSLALFTGLGLSENKARETLKNEALSTQLREAATQAHQILGSTIDKATGVLLYDLVSRLRDTRRRSFLVSYIANKKIHTGLQLSAALEYVRSHPQDPIDTKDFEQECGVGVVVTPEQIEEAVESTINKHQLQLLAERYRFNMGLLMGEARAALRWADGKMIKNEVDMQVLHLLGPKMEADLVKKPKVAKARLEETDRKTAKDVVEKGEVAGQTLSLMEQLRGEALKFHKPGENYKTPGYVITPYTMDLLKQHLEITGGQVRTRFPPEPNGILHIGHAKAINFNFGYAKANNGICFLRFDDTNPEKEEAKFFTAIYDMVTWLGYTPYKVTYASDYFDQLYAWAVELIHGGLAYVCHQRVEELKGHNPLPSPWRDRPKEESLLLFEAMRKGKFAEGEATLRMKLVMEDGKMDPVAYRVKYTPHHRTGDKWCIYPTYDYTHCLCDSIEHITHSLCTKEFQARRSSYFWLCNALKVYCPVQWEYGRLNLHYAVVSKRKILQLVAAGAVRDWDDPRLFTLTALRRRGFPPEAINNFCARVGVTVAQTTMEPHLLEACVRDVLNDAAPRAMAVLEPLQVVITNFPAPKPLDIRVPNFPADETKGFHQVPFASTVFIERSDFKEESEPGYKRLASGQPVGLRHTGYVIELQNIVRGSSGCVERLEVTCRRADAGEKPKAFIHWVSQPLVCEIRLYERLFQHKNPEDPVEVPGGFLSDLNPASLQVVEGALVDCSVALAKPFDKFQFERLGYFSVDPDSHQGQIVFNRTVTLKEDPGKI

SEQ ID NO: 7620 - DNA, 2397 bp, Eremothecium gossypii
  CDS (1)..(2397)
atgtcatctgttgaggagctaagccagctgttcgcagatgtggggtttgaggaagcgaaggtgaaggagatagtcaagaacaagaaggttgcacactcgctggaagaactggttcgcgaagcaggggcgagggccgaatgggacaagggtaagcgtgcgctactgcacacgcttgcaagctccttgaagggggccacggtcaccgggcagaacctggttgccgagggcatccgcagcggtgaactgaagacatcgttgcaggtggatgcggccctgaagtatgtcaagcgggcgggcgagggagccacagtggccgagatgcacgctgagagcggcgtaggcgtccaggtgacggaagaccaggtgcaggcgcgcgtggtgcagtatctcgaagagaaccgcgcgaagatcgaaagcgagcgttacaagttggttccaggcatctttgcgcagatcaaggcgttgcccgagctgaagtgggcggacccgcggctgttcaagcctattattgatcgcgaggtattgaaaatccttgggcccaaggatgagcgcgatgttgttaagaaggaaaagaagaaagagcctaaaacgaacgacaaaaagaaggccgcggtggaggaggctcctaagcgcacgatgttctccgaaggttttctaggcgacctgcacaaagttggagagaacccacaggcctacccagagctcatggtagaacacttgaaagccactggcggcaaggtgcacacgcgtttcccacctgagccaaacggatacctacacatcggtcactcgaaggccatcatggtgaactttggctatgcgaagcatcacggcggtgtctgctacttgcgttttgacgataccaacccagaggcagaagcaccagaatattttgaaagtattgagagaatggtggcatggttggggttcagtccatggaagatcacatactcgagcgactactttgaccagctatatgaacttgccgaagttctgatcaagaatggtaagggatacatctgtcactgtactgcggaagagataagacgtggacggggtatcaaggaggacggtacaccaggtggcgagagactgccatgtgcccaccgtgaacggcccattgaggagaaccttgctgagttcaggaacatgcgcgatggcaaatatgctcccggagaggctattctccgtatgaagcaggatctgtcttctccttctccgcagatgtgggatttagttgcctacagagtcttgaacgctccacacccaagaacgggttccaaatggcgcatctatcctacctatgacttcacacactgtcttgttgattctctggagaacattacccattctctgtgcaccgccgagttctatttatcgcgcgagtcgtatgaatggttgtgcgatcaagtgcatgtcttcagacctgctcaaagggagtatggtcgtctgaatatcacaggcactgtattgtctaagcgcaagatcgccaagcttgtccacgagaaatacgtccgtggctgggatgatccccgtctcttcacccttgaggctattcgcaggcgcggtgtcccacctggagccatcctctccttcattaatacgctgggtgtcaccactagtactacaaacatccaggttgtccgttttgagagtgcaatcagaaagtacctcgaagacaccactgcacgcttgatgtttgtcttagatcccatagaagtcatcgtggacaacttgccagaggactatgaggagcttgtatcgattccttaccgcccaggcacgccagagttcggagagaggacggttcccttcagcaagcgtttctacatcgagcgttccgatttctctgaggacacctctgacaaagagttcttccgtctcacgcctgctcaatcggtaggtctcatcaaggtgccatacactatcgccttcaagagcctagagcgtgatgcgaacggaaagatcacgcgtattcacgcccactatgagaacgacacacctgatgggaagcctcgcaagccaaagacctacatccagtgggttcctattgcacctcgccatggttctcctatcccagttgcagaaacgcgtgtttacaaccagctgttcacttcagagaacccaagcggagacccagccgacatcaacccttacagtgaggtcatatatccttccgcggtcgtcgagcacaacttccgtcatgtcgtctctaactctccgtgggtcgtcgaaagcgccaagcagtccgagttctacgtcccagaggaacatgatcgcaaagaggtctgccgtttccaggctatgcgcgtaggctacttcacgcttgacaaggacagtacccatgaccgcatcatcctcaaccgcattgtcagcctcaaagatggctccaagtag

SEQ ID NO: 7621 - protein, 798 aa, Eremothecium gossypii
MSSVEELSQLFADVGFEEAKVKEIVKNKKVAHSLEELVREAGARAEWDKGKRALLHTLASSLKGATVTGQNLVAEGIRSGELKTSLQVDAALKYVKRAGEGATVAEMHAESGVGVQVTEDQVQARVVQYLEENRAKIESERYKLVPGIFAQIKALPELKWADPRLFKPIIDREVLKILGPKDERDVVKKEKKKEPKTNDKKKAAVEEAPKRTMFSEGFLGDLHKVGENPQAYPELMVEHLKATGGKVHTRFPPEPNGYLHIGHSKAIMVNFGYAKHHGGVCYLRFDDTNPEAEAPEYFESIERMVAWLGFSPWKITYSSDYFDQLYELAEVLIKNGKGYICHCTAEEIRRGRGIKEDGTPGGERLPCAHRERPIEENLAEFRNMRDGKYAPGEAILRMKQDLSSPSPQMWDLVAYRVLNAPHPRTGSKWRIYPTYDFTHCLVDSLENITHSLCTAEFYLSRESYEWLCDQVHVFRPAQREYGRLNITGTVLSKRKIAKLVHEKYVRGWDDPRLFTLEAIRRRGVPPGAILSFINTLGVTTSTTNIQVVRFESAIRKYLEDTTARLMFVLDPIEVIVDNLPEDYEELVSIPYRPGTPEFGERTVPFSKRFYIERSDFSEDTSDKEFFRLTPAQSVGLIKVPYTIAFKSLERDANGKITRIHAHYENDTPDGKPRKPKTYIQWVPIAPRHGSPIPVAETRVYNQLFTSENPSGDPADINPYSEVIYPSAVVEHNFRHVVSNSPWVVESAKQSEFYVPEEHDRKEVCRFQAMRVGYFTLDKDSTHDRIILNRIVSLKDGSK

SEQ ID NO: 7622 - DNA, 2325 bp, Anopheles gambiae str. PEST
  CDS (1)..(2325)
atgaccacgatggaacatctcgtttctctcggtctaaatgagcaaaaaatcaaggaaacgcttaaaaacgcaacccttactagcacaattacacgtgccttctcttacgtcccgccgggtgtggagttaagttcagcacaaaaaccgctgatatttcaggcatgctcaaagataaaaccgcagacggctcaccatttggaacttatagtgagaaaaattttggataacagtttggacactagtctacgtgttgacaccgcactggaatatgttctggctaacgtgacgaaagccactatcgacgaagctactttcgatgcggcttgcggtgtgggagtagttgtgacaccggaagaaatcgagcgggcggttgaaataaccgttgccaaatatcgtagcgatatcgtcgaccaacgttatcgttttaatgtcggaaaattgttgagcgaaattcgaagtgctttgccatgggtggatggtaaagcccttaaaagtgaggtggatgtgcaaatgtttgatttacttggccccaaaacggatgccgatggcgagaaagtgggtaaaaaacgtcgggaaaccccagcctcagatactgcacccaaagcaacctctgtcgttgaaccatcagccgtcaatgctaataatcgaccagaaggccctcgaacgatggttgatctgatgcgtaatgtcgatttccatcgtccaggcgaaaatttcaaaactgatgggtatattattactcccgatacggaacgtctcttgaaggatcatttacagcgaactggtggcaaagtgcgtacccgcttccctcctgagccgaatggaattctgcacattggccacgctaaagctatcaacatcaactttgcttacgcggcagcgaacgatggcatctgcttccttcgttacgatgacaccaatcccgagaaggaagaggaaaaatttgttaaaggcatacgcgacattgtcgaatggctcggttataagccattcaaaattacttactcttcggactacttccaacagttgtacgaatttgctgtgcagctcataagaaaagatatggcttacgtgtgtcatcaaactgctgatcaaatgaagggatttacaaccgaaccatccaagtggcgtaatcgtccaatcgaggaaagcctgcagctgttcgaagacatgaaaaatgggaaaattgatgaaggtgcggcaacattacgcatgaaaatcacgctggaggagggaaaaatggacccggtagcctaccggatcaagtttattccacaccatcggaccggaacaaagtggtgcatctatccgacgtacgactacacacattgtttgtgcgatagtctggaggatatcacccattcgctttgcaccaaggagttccaatcgagaagatcgtcgtattattggctctgtaatgcactcaatatatactgcccagtgcaatgggaatatgcgcggcttaatgttaactacaccgtagtttctaagcgcaaaattaacaagctgatcactgaaaatattgttaacgactgggatgatcctagattattcaccctgtctgctttgcgacgcaagggttatccagccgaagcaatcaacaatttttgtgcccagatgggtctcaccggtgcccaaacgtccattgaccctgctgcactggaagcgtctgccagagatgtattgaatcttgcagcatcacgtacaatggcagtattagaacctctgaagattactatacttgattatccgcatgacgggccaattcaactatcagtgcccaattttccaaacgtgccggagaaaggcgagcacatgatttggttcgatcgtgttgtatatatagagcgaaccgatttcatggaaaatgctgacaaatctttccgtcgactaacgccaggacaaccggttggactgaaatacattggttccatgcttagagtagaaagtgttgttcgaaaatcgggcaccgtcgaggaactagtatgtcgcatagaaccgtgtactgcaaccgaaaaacctaaagcgtatgtacactgggtagctaaaccctgtccagtagaggtacgtttgtatgagaagctgtttatgcacaagaacccagaagacagtaacgatgttcccaatgggtttttgagcgactgtgcttcggacacgattcgttcactgtgcggctatgtcgatgcacatgtcatgaacagtaaagtgtacgataaatatcaattcgaacgcattggttacttctccgtggatccggatagcagaaacggccagcttgttttcaatcgtaccgtcacgcttaaagaagatactggtaaaaattag

SEQ ID NO: 7623 - protein, 774 aa, Anopheles gambiae str. PEST
MTTMEHLVSLGLNEQKIKETLKNATLTSTITRAFSYVPPGVELSSAQKPLIFQACSKIKPQTAHHLELIVRKILDNSLDTSLRVDTALEYVLANVTKATIDEATFDAACGVGVVVTPEEIERAVEITVAKYRSDIVDQRYRFNVGKLLSEIRSALPWVDGKALKSEVDVQMFDLLGPKTDADGEKVGKKRRETPASDTAPKATSVVEPSAVNANNRPEGPRTMVDLMRNVDFHRPGENFKTDGYIITPDTERLLKDHLQRTGGKVRTRFPPEPNGILHIGHAKAININFAYAAANDGICFLRYDDTNPEKEEEKFVKGIRDIVEWLGYKPFKITYSSDYFQQLYEFAVQLIRKDMAYVCHQTADQMKGFTTEPSKWRNRPIEESLQLFEDMKNGKIDEGAATLRMKITLEEGKMDPVAYRIKFIPHHRTGTKWCIYPTYDYTHCLCDSLEDITHSLCTKEFQSRRSSYYWLCNALNIYCPVQWEYARLNVNYTVVSKRKINKLITENIVNDWDDPRLFTLSALRRKGYPAEAINNFCAQMGLTGAQTSIDPAALEASARDVLNLAASRTMAVLEPLKITILDYPHDGPIQLSVPNFPNVPEKGEHMIWFDRVVYIERTDFMENADKSFRRLTPGQPVGLKYIGSMLRVESVVRKSGTVEELVCRIEPCTATEKPKAYVHWVAKPCPVEVRLYEKLFMHKNPEDSNDVPNGFLSDCASDTIRSLCGYVDAHVMNSKVYDKYQFERIGYFSVDPDSRNGQLVFNRTVTLKEDTGKN

SEQ ID NO: 7624 - DNA, 2388 bp, Candida glabrata CBS 138
  CDS (1)..(2388)
atgtctttggagaagtttgggtacgaggaggcgaagatcaaggagattaccaagaatcagaagattctgagtgagttggagaagcttttgggcgaggtccaggtcggggagttggacaagacgcagagggctatattgcaccagtttgcgacgctactggccaagcggaaggatgccggtgaggtgagcactgctctggttgtggagaatgttgtgaacggtggtatcaagaccaacttgcagatagacgctgcgttcaagtatgtggtggcacacccggatgtggaccaggagacgctggccgccgaggctggtattggtgtgcatgtcggcgaggaggatgtcagacgcaaagttgtggagtatatcgagagcaacaagagcaagattgaagagcagagatacaagcttgtgccagggatcatggcggatgtcaagaagatgccagagttgaagtgggctgaaccacgtttgttcaagcctatcattgatgaagagatcctgaaggccattggtcctaaggacgagagagatgtggtcaagaagcagcctaaggcaaagaagaatgccaagaaggatgacagtggcgacaagagctctgattcaaagggtgagaagagaaccatgttcactgaaggtttcctaggtgacctgcacaaagtcggtgagaacccacaagcttaccctgagttgatggcagaacacttgaaagccactggtggcaaagtccacaccagattcccacctgagccaaatggttacttacatatcggtcattccaaggctatcatggtcaacttcggttacgccaagtaccacgacggtgtgtgctacttgagatttgacgataccaatccagaagctgaagccccagagtactttgagtccattaagagaatggtttcgtggctgggctttaagccatggaaggttacgtactccagtgattacttcgataagctgtacgaattggctgaggttttaataaagaatggcaagggttacgtttgtcactgtactgctgaagaaatcaagcgtggtcgtggtatcaaagaggatggtactccaggtggtgaaagacatgcctgcaaacacagagatcagagtgtagaaaagaacttggaagaattcagagctatgagagatggtaagtacaagccaggtgaagctattctgagaatgaagcaaaacctagaatctccatctccacagatgtgggatttgattgcctacagagtgctaaacgctccacatccaagaactggtaccaaatggaagatttacccaacatacgatttcacacactgtttggttgattctttcgaaaacatcacacactctctatgtactactgaattttacttatcgagggagagttatgaatggctatgtgaccaggttcacgtctttagaccagcacagagagagtatggtcgtctaaacatcaccggtacggttttatccaagcgtaagattgctaagcttgttgatgaacatttcgttagaggttgggatgacccaagattatttactttggaagccattcgtagacgtggtgttccaccaggtgcaatcttatctttcatcaatacacttggtgtcacaacaagcacaaccaatattcaagttgttagatttgagagcgcaatcagaaagtacttggaagattctactccaagattgatgatgattcttgatccaattgaggtcgttgttgaaaacctaccagaggactatgaagaacttgttactattccatacagagctggtaccaaagaattcggtgacagaaatgtcccattcactaataagttttacattgaaagggcagatttctccgaaaatacagaagacaaggaattcttcagacttactccaaaccaaccggttggtttgattaaagttccatacactgtttctttcaagagtgttgagaaggatgctgatggtaagatcactagaattcatgttaagtacgataatgaagacaagccagtgaagccaagaacttacatccaatgggttcctatctccaagaagtacaactccccagtacgtgtttctgaaaccagagtttataaccaactcttcaagtctgaaaatccatccgctcatccagatggttatttgaaagacatcaaccctgaaagtgaggtcatttatgataagtctgtcattgaacataatttcgaccacgttatcaagaactccccatgggttgttgattccgttaagaattctgaattttatgttaaagaagataagtccggaaaggaaatttgtagattccaggctatgagagttggttacttcactcttgacaaggagagcactgatgataagatcattctaaatagaattgtctccctaaaagacaacactaaataa

SEQ ID NO: 7625 - protein, 795 aa, Candida glabrata CBS 138
MSLEKFGYEEAKIKEITKNQKILSELEKLLGEVQVGELDKTQRAILHQFATLLAKRKDAGEVSTALVVENVVNGGIKTNLQIDAAFKYVVAHPDVDQETLAAEAGIGVHVGEEDVRRKVVEYIESNKSKIEEQRYKLVPGIMADVKKMPELKWAEPRLFKPIIDEEILKAIGPKDERDVVKKQPKAKKNAKKDDSGDKSSDSKGEKRTMFTEGFLGDLHKVGENPQAYPELMAEHLKATGGKVHTRFPPEPNGYLHIGHSKAIMVNFGYAKYHDGVCYLRFDDTNPEAEAPEYFESIKRMVSWLGFKPWKVTYSSDYFDKLYELAEVLIKNGKGYVCHCTAEEIKRGRGIKEDGTPGGERHACKHRDQSVEKNLEEFRAMRDGKYKPGEAILRMKQNLESPSPQMWDLIAYRVLNAPHPRTGTKWKIYPTYDFTHCLVDSFENITHSLCTTEFYLSRESYEWLCDQVHVFRPAQREYGRLNITGTVLSKRKIAKLVDEHFVRGWDDPRLFTLEAIRRRGVPPGAILSFINTLGVTTSTTNIQVVRFESAIRKYLEDSTPRLMMILDPIEVVVENLPEDYEELVTIPYRAGTKEFGDRNVPFTNKFYIERADFSENTEDKEFFRLTPNQPVGLIKVPYTVSFKSVEKDADGKITRIHVKYDNEDKPVKPRTYIQWVPISKKYNSPVRVSETRVYNQLFKSENPSAHPDGYLKDINPESEVIYDKSVIEHNFDHVIKNSPWVVDSVKNSEFYVKEDKSGKEICRFQAMRVGYFTLDKESTDDKIILNRIVSLKDNTK

SEQ ID NO: 7626 - DNA, 2415 bp, Kluyveromyces lactis NRRL Y-1140
  CDS (1)..(2415)
atgtcatctgtagacgagttgaccaatctattttccaagattgggttcgaagaagctaaagtaaaggaaatcttaaagaatgctaaagtatccagctccctagagtccttagtaaacttggcatctgatgatttcccatggaacaagaattctagagctttaattcacacgttagcagcctctttaaagggagctgaagttcctcatttgcaatatatcgttgatggtattggtaagaatgatttgaagactgcattgcagatagatgcagctttgaagtacttgaagaccaagggtgaggatgccactgttgtggacttgaacaaagagtccggtgtcggtattgaagttactgaagatcaagttagaaaccgtgttgctaagtacgttgaggataacaaagataccattttgaaggaaagatacaagttagtgcctggtctatttgccaaaatcaaagctctccccgaattaaaatgggctgaaccacgtttgttcaaaccaatcattgacgaagaaatcttgaaggttttgggtccaaaagatgaaagagatatcgtaaagaaggaaaagaaaccaaaggctgaaaagaaggctaatggcaaagcaagcaaggaccaaacagaagaagatggtccaaagagatctatgttcacagaaggtttcttgggtgacttgcataaggttggagaaaatgagcaggcctacccagaactaatggctgagcatctcaaggctaccggtggtaaagtacacactagattcccaccagaacctaacggatatttacatattggtcattctaaggccattatggttaactttggcttcgctaaataccataacggggtatgttatctaagatttgatgataccaaccctgaagcagaagctccggaatatttcgagagtatcaaaagcatggtatcatggttggggttcaaaccatggaaaactacctattcctctgattacttcgatgagttataccaattagctgaaactttgattaagaacggaaaggcttatgtctgtcactgctctgcagaagaaataaaacgtggccgtggtatcaaagaagatggtacacctggtggtgaaagaaaagcttgtgtctccagagaaagacctattgaggaaagcttaactgagttcagaaagatgagagacggattctacaaaccaggtgaagcaatcttaagaatgaaacaagatttgaactctccatcaccacaaatgtgggatttgattgcttatagggtcttggatgctccacatccaagaactggtgacaaatggaaaatttacccaacatacgacttcactcactgtttagtcgattccttagaaaacattacccactccttgtgtaccacagaattttacttgtctagagaaagttacgaatggctatgtgaccaagtgcacgtcttcagaccagctcaaagagaatatggtagattgaacatcaccggtaccgttctatctaagagaaaaattgctaaacttgttactggtggatacgtcagcggatggaatgatcctcgtttattcacattggaagctatccgtagacgtggtgttccaccgggagccattctatctttcattaacactttgggtgtgaccaccagtaccactaatatccaagtcgtaagattcgaaagtgctattagaaagtacttggaagacactacacccagactcatgttcattttggatccagtggaagtggttgtggacaatgtcgatgaagatttcgttgagctatgtaacatcccatacaggccaaacactccagagttcggtgatagaaccgtcccattcaccaagagattctacatcgaaagaagcgacttctcggaagacgttgacaacaaggagttcttcagattaacacctaaccaatcagttggtttaatcaaagtaccatacaccgtatcctaccaatctttagagaaggatgcgaacgggaagatcactaaaattcatgttaaatatgagaacgaggaagccaaaccaaagaaaccaaagacctacattcaatgggtgccaatctccgaaaagcacgactccccagtaagaattgcggaaactagagtttacaaccaattgttcaagtccgaaaacccatcagcgcacccagatggttacttatctgatattaacccagacagcattatcgtgtacaagagttctgtcgctgaatacaacatcaacagcattataaagaactcgccatgggtcgtggacagtgcaaagaagtctgaattctatgtggaagaagaaaagggaagaaaggaagtctgcagattccaagccatgagagttggttatttcaccttggactctgatagcacagatgaaaagatcgtcttgaacaggatcgtttccttgaaagacggtactaaatga

SEQ ID NO: 7627 - protein, 804 aa, Kluyveromyces lactis NRRL Y-1140
MSSVDELTNLFSKIGFEEAKVKEILKNAKVSSSLESLVNLASDDFPWNKNSRALIHTLAASLKGAEVPHLQYIVDGIGKNDLKTALQIDAALKYLKTKGEDATVVDLNKESGVGIEVTEDQVRNRVAKYVEDNKDTILKERYKLVPGLFAKIKALPELKWAEPRLFKPIIDEEILKVLGPKDERDIVKKEKKPKAEKKANGKASKDQTEEDGPKRSMFTEGFLGDLHKVGENEQAYPELMAEHLKATGGKVHTRFPPEPNGYLHIGHSKAIMVNFGFAKYHNGVCYLRFDDTNPEAEAPEYFESIKSMVSWLGFKPWKTTYSSDYFDELYQLAETLIKNGKAYVCHCSAEEIKRGRGIKEDGTPGGERKACVSRERPIEESLTEFRKMRDGFYKPGEAILRMKQDLNSPSPQMWDLIAYRVLDAPHPRTGDKWKIYPTYDFTHCLVDSLENITHSLCTTEFYLSRESYEWLCDQVHVFRPAQREYGRLNITGTVLSKRKIAKLVTGGYVSGWNDPRLFTLEAIRRRGVPPGAILSFINTLGVTTSTTNIQVVRFESAIRKYLEDTTPRLMFILDPVEVVVDNVDEDFVELCNIPYRPNTPEFGDRTVPFTKRFYIERSDFSEDVDNKEFFRLTPNQSVGLIKVPYTVSYQSLEKDANGKITKIHVKYENEEAKPKKPKTYIQWVPISEKHDSPVRIAETRVYNQLFKSENPSAHPDGYLSDINPDSIIVYKSSVAEYNINSIIKNSPWVVDSAKKSEFYVEEEKGRKEVCRFQAMRVGYFTLDSDSTDEKIVLNRIVSLKDGTK

SEQ ID NO: 7628 - DNA, 2385 bp, Debaryomyces hansenii CBS767
  CDS (1)..(2385)
atggcgtcagaagaagaattgatcaacttgtttagcaaagttgggttcaatgataagaaatctaaagaagtttgcaaaaataaaaaggtttcccaatcattagcagaaatcatcaatgagtcaaaggtggaagaaacagatgaaaagaagctttctttgttgcatgcgttagccgttgagagtaaaggaggagatgttcctagacgtgaattaattacgaaggctattattgatggtagattgaagactaacttacaggtcaccgaagcattcaaatatgtcaaggaaaaccccgaaactgccaacaacgaaaccatggaagaaaagtcaggggttggtattgagctcagtgattccgatgttgaaagagagattaaaaagtacatggaagcccataagtctgatattgagactaagagatactcgattgttcctagtctattaggtgacgtcaagaaggtaccagaattgaaatgggccaagccaaacttattcaagccaattattgacagtttggtcttggagatgattggaccaaaggatgagagagatgtcgttaagaaggaaaagaagaagctgactaaaaagcaagttgaaaccaagaaggaagcacagattgagagatcgatgttttccgaagggtttttgggtgacttacacaagcctggtgaaaatccacaaaaatatcctgaattaatgaaagaacatttagaattcaccaagcgtaaagtattcactagattcccaccagaaccaaacggatatttgcacatcgggcattcgaaggcaattatggttaattttggatatgctaagtacaatggtggtaactgctacttaagattcgacgacaccaaccctgaagcggaagaagaagtgtatttcaagtcaattgaaaaaatgattgactggttaggatatgaaccatggaaagttactcattcatccgactattttgatgagttatacgatttagctgagagattaatcagcttaggtaaaggttatgtttgccattgtacggcggaagaagttaaggctcaaagagggttgaaggaagatggtaccttaggtggagaaaggtttgcatgtaagcatcgttcaagaagcgttgaagatagtatggctgaattccgtaagatgaagaacggtgaatataagagtggagaggctaccttgagaatgaagcaagacttggaatcgccatctccacaaatgtgggatcttgttgcgtacagagtcttaaacaagccccaccacaggactggagacaaatggaagatctacccaacatacgattttactcactgtcttgttgattcttttgaaaacattagtcattcattatgtactactgaatttagactttctagagagtcttacgaatggttgtgtgacgagctacacgtttacagaccagcacaaagagaatatggtagattaaatattactggtaccatattgagtaagagaaagattgctaaattagtcaacgaaggtattgttagaggatgggatgatcctagattgtacacgttagaagctatccgtcgtcgtggggttccaccgggcgctattttaagtttcatcaacacgttaggggtcaccacttcaactactaatattcaagcagtgagactcgacagtgctatcagagcattcttggaccaaacgaccccaagattgatgatgattcttgaccctgtcgaagtcgaagttgagaacttaccagaagggtacgaggaaatggtcgaggtgccatacaaaccgggtgacaccgttaagttcggaaccagaaaggttccgttcaccaagcgtttctatattgacagatctgactacagagactctacttccgacgactactttagattagcccctggccaaccagttgggttaattagggtaccattcaatgtttctgtcaaggacgttgtcaaggatgacgcaggtaaggtgacgaagatcatcgcgcactacgacaacgacggtacgttcaaaaagcctaagacttatatccaatgggtcccaaaatcggcctcttcaccaatcaaggtcaacgaggtgaggattcagaaccaattgttcaacagcgagaacccatcagctcacccagacggattcttgaacgatctcaacgagcaatcggaagagatctaccgcgatgcgattgtcgagtcggctttcactgaaattaaggagaaatcgccattgaatattcctatcgaaggaagcgagttcaacatcaaggagaagccgagtgtcgaaacggtgagattccaggccttgagagtgggatacttctgcatggacaaggattcgagcgcggacaaattggtgttgaaccgtattgtcactttgaaggaggactcgtcgaaaaattga

SEQ ID NO: 7629 - protein, 794 aa, Debaryomyces hansenii CBS767
MASEEELINLFSKVGFNDKKSKEVCKNKKVSQSLAEIINESKVEETDEKKLSLLHALAVESKGGDVPRRELITKAIIDGRLKTNLQVTEAFKYVKENPETANNETMEEKSGVGIELSDSDVEREIKKYMEAHKSDIETKRYSIVPSLLGDVKKVPELKWAKPNLFKPIIDSLVLEMIGPKDERDVVKKEKKKLTKKQVETKKEAQIERSMFSEGFLGDLHKPGENPQKYPELMKEHLEFTKRKVFTRFPPEPNGYLHIGHSKAIMVNFGYAKYNGGNCYLRFDDTNPEAEEEVYFKSIEKMIDWLGYEPWKVTHSSDYFDELYDLAERLISLGKGYVCHCTAEEVKAQRGLKEDGTLGGERFACKHRSRSVEDSMAEFRKMKNGEYKSGEATLRMKQDLESPSPQMWDLVAYRVLNKPHHRTGDKWKIYPTYDFTHCLVDSFENISHSLCTTEFRLSRESYEWLCDELHVYRPAQREYGRLNITGTILSKRKIAKLVNEGIVRGWDDPRLYTLEAIRRRGVPPGAILSFINTLGVTTSTTNIQAVRLDSAIRAFLDQTTPRLMMILDPVEVEVENLPEGYEEMVEVPYKPGDTVKFGTRKVPFTKRFYIDRSDYRDSTSDDYFRLAPGQPVGLIRVPFNVSVKDVVKDDAGKVTKIIAHYDNDGTFKKPKTYIQWVPKSASSPIKVNEVRIQNQLFNSENPSAHPDGFLNDLNEQSEEIYRDAIVESAFTEIKEKSPLNIPIEGSEFNIKEKPSVETVRFQALRVGYFCMDKDSSADKLVLNRIVTLKEDSSKN

SEQ ID NO: 7630 - DNA, 2382 bp, Yarrowia lipolytica CLIB122
  CDS (1)..(2382)
atgtccgacgttgccgagctcagcaccaagctggaacatctcggttttgccgagcccaagatcaaggaggtgttgaaaaacaaaaaggtcgccgcctccttcaacgacattctcaacgtagtgaacgtgggcaaggacgagaagcgagctgctctactccacaacctcgcctcgtcctccaaggacgccaaggatgaagccgtgatcaagaagcgaaatgaggtcgcctctgccattgccgacggccgaatcaagaccaacgtgcagctggacgccgcctggaagtgggcccaggacctacacagctccgagagcctcgatcaggctgctggcgtgggcattgaggtcacccgggacgacgtttatcgtgagattgccgcctacattgccgcaaacaaggctcagctcgaggaggagcgatacaaggccctgcctggtgtcatggtggctgccaagaagatccctgctctcaagtgggccaaccctgccgactttaagcccgtgatcgacgagcagctcaaggagcttctgggacccaaggatgagcgagatctcgtcaagaagaaggcgcccaaggccaagcctgctgccaaggatgctgccaagaaggaggagcctgagaaggtgtctgccaccgccatgttcaccaccggtttcctgggcaacctgcacaagactggagagaaccctcaggccaacatggagcgaatggttgagcatctcaaggccaccaagggccaggttttcacccggttccctcccgaacctaacggatacctgcacattggccactccaaggccatcaccgttaactttggctatgcccagttcaacaagggtaagtgctacctgcgatttgacgacacgaaccctgaggccgaggaggagcgattcttcacttccattcgagagaccattgagtggctgggcttcgagccctacaaggtcacctactcgtcggactacttccaggagctgtacgacctagctgagaagctgatcgagtgtggaggtgcgtttgtgtgtcaccagaccgccgaggagatgaaggcttcccgaggagtgtctgagggatctcgaggaggcgagcgagtgccttctccctggagaaacagaaccgtggaggagaacctggtggagttccgaaagatgcgagacggccactacaagcccggagaggcagttttgcgaatgaagcaagatctcaacaaccccaacccccaaatgtgggatctggttgcctaccgagtactcaacgctccccatcaccgaactgccgacaagtggaagatttaccctacctacgacttcacccactgtctggttgattcgctggagaatatttcgcattcgctttgtaccaccgagttctacctctcccgtgagtcatacgagtggctgtgtgacgctgtggacgtctaccgaccagcccagcgagagtatggccgacttaacatcactggaaccgttctttccaagcgaaagattgccaagctcgtttctgagggtcatgttcgaggctgggatgatccccgtctcttcactctggtcgctattcgacggcgaggtattcctcctggagccattctcaactttgtctccactctcggtgtcaccactgccgagtccaacattcagcattctcgatttgagaacaatgtgcggaagtaccttgaggacactactcctcgtctcatgatggtgctggaccccgtcaaggtgaccattgagaacctgcctgaggaccactttgaagagtttgacatgccctttggcaagaatgacgagcggtcgcgaaaggtgcccttcacccgagagctgtacattgaccgaagcgactttgaggagtctgctggcaaggagttcttccgactcactgctactcagcccgtgggtctgctcaaggtgccccacaacatttctctcaaggaggtcaagaaggatgctgctggaaacatcaccgagctgatttgccatctcgacaacgacattcccttcaagaagcccaagacatacatccagtgggtccccgagtgtgctgccaagaagtctcccgtcaagatttccgagacccgaatcttcaagcagctcttcaagtccgagaaccctcagggccaccccgatggataccttgcagatcttgctgaggagtccgaggtcatccacaagcatgctcttgtcgagcccggcttctacgacgtcaaggagaactctccttgggtcactggtgagcatactggcaaggagaagaagggatcccccgagagtgtgcggttccaggctcttcgagtgggatacttttgcatggataaggattctactgagaaggatattgttctgaaccagattgtttctctgaaggaggataaccagaagaagtaa

SEQ ID NO: 7631 - protein, 793 aa, Yarrowia lipolytica CLIB122
MSDVAELSTKLEHLGFAEPKIKEVLKNKKVAASFNDILNVVNVGKDEKRAALLHNLASSSKDAKDEAVIKKRNEVASAIADGRIKTNVQLDAAWKWAQDLHSSESLDQAAGVGIEVTRDDVYREIAAYIAANKAQLEEERYKALPGVMVAAKKIPALKWANPADFKPVIDEQLKELLGPKDERDLVKKKAPKAKPAAKDAAKKEEPEKVSATAMFTTGFLGNLHKTGENPQANMERMVEHLKATKGQVFTRFPPEPNGYLHIGHSKAITVNFGYAQFNKGKCYLRFDDTNPEAEEERFFTSIRETIEWLGFEPYKVTYSSDYFQELYDLAEKLIECGGAFVCHQTAEEMKASRGVSEGSRGGERVPSPWRNRTVEENLVEFRKMRDGHYKPGEAVLRMKQDLNNPNPQMWDLVAYRVLNAPHHRTADKWKIYPTYDFTHCLVDSLENISHSLCTTEFYLSRESYEWLCDAVDVYRPAQREYGRLNITGTVLSKRKIAKLVSEGHVRGWDDPRLFTLVAIRRRGIPPGAILNFVSTLGVTTAESNIQHSRFENNVRKYLEDTTPRLMMVLDPVKVTIENLPEDHFEEFDMPFGKNDERSRKVPFTRELYIDRSDFEESAGKEFFRLTATQPVGLLKVPHNISLKEVKKDAAGNITELICHLDNDIPFKKPKTYIQWVPECAAKKSPVKISETRIFKQLFKSENPQGHPDGYLADLAEESEVIHKHALVEPGFYDVKENSPWVTGEHTGKEKKGSPESVRFQALRVGYFCMDKDSTEKDIVLNQIVSLKEDNQKK

SEQ ID NO: 7632 - DNA, 2391 bp, Oryza sativa (japonica cultivar-group)
  CDS (1)..(2391)
atgggcaccggaggcggcgagggggacaagtcggccgtgctgccgctggaggcgctgctggcgctggggctcgaccagcgcacggcggagaacgctctggtcaacagcaaggtcaccgccaacctcgccgccgtcatagccgaggctggtataagtggatgtgataagacggttgggaacctcctgtacacggttgccactaaatacccaaccaatgcgcttgtccatcgtcctgtactcattgactatattgtgtcaacgaagataaagaatcctgcacaactagatgctgctctgtcattccttactaatactggccctgactctttagatactgggaagtttgaagaagcctgtggtgtaggtgtggttgtttcaattgaagagattaaatcaacagtcaatgaggtattaaagcataatatggaggctatattggagcagcgatatcatattaatgttggtaacctatgcggacaggttaggaagaggcacccctggggtgatgctaaggcgaccaaggatgaaattgacaagaagcttgcagagatattaggtccaaagacagatgctgacaatgtaaaaccagtgaaaaagaaaaaggaaaaagcagcaaaagttgaggagaaaaaagctgcagtagtcactgctgcaccgccatctgaggaggaattgaatccatactctatatttcctcagccagaggaaaattttaaggttcatacagaaatattctatagtgatgggaacatatggagagcgcataacagtaaggagattttagagaaacaccttaaggcaaccggtggaaaagtgatgacccgtttcccaccagaacctaatggatatcttcatattggtcatgccaaggctatgtttattgattttggactggcgaaagagagaaatggtcattgttaccttaggtttgatgacacaaatccagaagccgaaaagaaagagtatattgaccacattcaggaaatcgtacactggatgggatgggagccctacaaagttacatatacaagtgattatttccaggctttatatgagcatgcagttgagttaatacgaaaagggctagcctatgtggatcaccagaccgcagaagaaatcaaggaatacagggaaaagaaaatgaatagtccatggagggatagacccattgaagaatcactgaaactatttgaagacatgagacgtgggttgattgctgaaggtgcagcaacactccgaatgaaacaagatatgcagaatgataacaagaatatgtctgatttaatagcatatagaataaaattcactcctcatccacatgctggtgataagtggtgcatctatccaagctatgactatgctcactgcatggtggattctcttgagaacattacacattcgctgtgcacgctcgagtttgacatacgtcgcccgtcatactactggctacttgttgccttgggcctgtaccagccatatgtttgggagtattcgaggctaaacatatcgaatactgtgatgtctaaaagaaagttgaatcgacttgtgacagaaaagtgggtagatgggtgggatgaccctcgtttgttgacactagcaggattgcggcgacgtggagtgtcatcaactgcaattaattcgtttatttgtggaattggaataacaagaagtgacaatagcttaattcgggttgaccgtcttgaatatcatatcagagaagagcttaataaaacagcttcccgtgccatggttgtgttgaatcctctaaaggttgtaataactaacttggaggatgaaaaagtcatagaccttgatggaaaaatgtggcctgatgctcctgcagacgatgcttcatcctactacaaggttcctttctcaagaatcgtttacatcgaaaaaactgattttcgtctaaaggactcgaaagattactacgggctagctcctggtaaatctgccctgctaagatatgcattccccattaaatgtaccgaggttgtttatggtgacaatccagatgacatcattgaaattcgagctgaatatgacccttcaaagactactaaacctaagggtgttctgcactgggttgctcagccagcacctggagttgaaccacttaaggtggaagtaagattatttgataaattattcctctctgagaatcctgctgaactggaggattggctgggtgatcttaacccgaactcaaaagaggtgatcaagggtgcctacgccgtgccatcgcttgcgactgcggttcttggtgacaagttccagttcgagcggctaggctacttcgcagtggacacagactcgacacctgagaacattgtgttcaacaggacggttaccctgcgtgattcgtatgggaaagctgggccaaagtga

SEQ ID NO: 7633 - protein, 796 aa, Oryza sativa (japonica cultivar-group)
MGTGGGEGDKSAVLPLEALLALGLDQRTAENALVNSKVTANLAAVIAEAGISGCDKTVGNLLYTVATKYPTNALVHRPVLIDYIVSTKIKNPAQLDAALSFLTNTGPDSLDTGKFEEACGVGVVVSIEEIKSTVNEVLKHNMEAILEQRYHINVGNLCGQVRKRHPWGDAKATKDEIDKKLAEILGPKTDADNVKPVKKKKEKAAKVEEKKAAVVTAAPPSEEELNPYSIFPQPEENFKVHTEIFYSDGNIWRAHNSKEILEKHLKATGGKVMTRFPPEPNGYLHIGHAKAMFIDFGLAKERNGHCYLRFDDTNPEAEKKEYIDHIQEIVHWMGWEPYKVTYTSDYFQALYEHAVELIRKGLAYVDHQTAEEIKEYREKKMNSPWRDRPIEESLKLFEDMRRGLIAEGAATLRMKQDMQNDNKNMSDLIAYRIKFTPHPHAGDKWCIYPSYDYAHCMVDSLENITHSLCTLEFDIRRPSYYWLLVALGLYQPYVWEYSRLNISNTVMSKRKLNRLVTEKWVDGWDDPRLLTLAGLRRRGVSSTAINSFICGIGITRSDNSLIRVDRLEYHIREELNKTASRAMVVLNPLKVVITNLEDEKVIDLDGKMWPDAPADDASSYYKVPFSRIVYIEKTDFRLKDSKDYYGLAPGKSALLRYAFPIKCTEVVYGDNPDDIIEIRAEYDPSKTTKPKGVLHWVAQPAPGVEPLKVEVRLFDKLFLSENPAELEDWLGDLNPNSKEVIKGAYAVPSLATAVLGDKFQFERLGYFAVDTDSTPENIVFNRTVTLRDSYGKAGPK

SEQ ID NO: 7634 - DNA, 2400 bp, Candida albicans SC5314
  CDS (1)..(2400): transl_table=12
atgtcaacaaaaactgatatttctactgaagaattggtttccttattcagtaaagctggatttgaagaaaaaaagtctgcagagatagtcaagaataaaaaagttgcctccgctttatataatattttaggctccaacttccccaaaactgatgataaaaaattatctttgttacatcaattggctatacatgaaagtaaaaatggaaaagtaccaaatcatgactttatcattgatggaattcaaaaaggggacttgaaaactgctttgcaagtaactgaaggtatcaagtatttacaaaacaatgcaacagttgataaggaaaaatttgatgaagccagtggtgtaggtattgagattactcctgaagaagccaaggtagaaatttcaaagtaccttgactctattaaaactgatttggagagtaaaagatattcaatcttacctaaagttctaggtgaagtgaaaacccagccatctttgaaatgggcaccacctaacttattcaaaccaattttagatgaagagtttttggccagattgggtccaaaagatgaaagagatgttaaaaagaaggaaaaaaaagccaagacaccagctaatgcagctgccaccaaaaagcaagatactggttctgaacctgaacgttctatgttttctgaagggttccttggggatttgcataaaccaggtgaagaacctcaaatgtaccctgaattgttagaagagcataaaaagtttatttgtgataaagtctacacccgtttcccacctgaaccaaatggatttttgcacattggtcactctaaggccattatggttaattttgggtacgctcaattcaacaagggtaattgttacttgaggtttgacgatacaaaccctgaagctgaagaggaagtctatttcaattccatcaaagaaatggtttcttggttgggttataagccatggaagatcacctattcttccgactatttcgatgaattgtacgagttggctattaagttgattaaatcagacaaggcatatatatgtcattgtactccagaagaagtgaaggcttctcgtgggttgaaagaagatggtacattgggaggagaaagagtcgcttgtaaacacagatttcaaactgttgaacataacttgcgtgagtttgaaaacatgaaaaatgggaaatacaacgttggtgaagccacattaagaatgaaacaagatttgaattctccatcacctcaaatgtgggatttggttgcctaccgtgttttgaacacaccacatcaccgaactggtgataaatggaagatttacccaacctatgattttacgcattgtttggttgattcttttgaaaacattacccattcattgtgtaccaccgaatttgtcttgtctagagaatcgtatgagtggttgtgtgatgcattacatgtttatagaccagcacaacgtgaatacggtagattgaacttaactggtaccatcatgtccaagagaaagattgctaaattggtcaatgaaggttatgtcagaggatgggatgacccaagattatacacattagaaggtatcaaaagaagaggtgtccctccaggtgccattttgtctttcataaacaccttgggagttacaacctcgacaacaaatatccaaacggtgagatttgaaagtgccgtgcgtaactaccttgatcaaacaactccaagattgatgatggttttgcacccaattgaggttgttattgataatttggatgaaagctttagtttggacgttgaaataccatacaagccaggtaaagatgaaaagtctatgggataccgtaaacttacattttccaaacatatttacattgatgaaaatgatgttagagctgaacctgccgataaagagttttatagattggctccgggccaaccagttggtttgatgagagttcctttcaatatcagtttcaaatcaattgaagaaaaagatggaaagaaaatcgtccatgttaactatgacgaaggtgtaaaagctaaaccaaaaacctacatccaatggattcctaaagacactgctgttcatattaaagaagttagaatctacaatcaattgttcaaaagtgaaaacccttctgcacatcctgaaggttatttgaaggacattaatcctgatagtgaagaagttttgcgtaatgcagttgttgaagaaaatcttaaagacattgtggcaaaatctccaatgaacattgaaattccaggaagtgcattcaacattaaagaaaacaaaggtaataatactgtcagattccaagcattaagagaaggttacttttgcttggacaaagattccaaagaagatggtttgattcttaatagaattgtcagcttgaaagaagatgctgctaaaaaatga

SEQ ID NO: 7635 - protein, 799 aa, Candida albicans SC5314
MSTKTDISTEELVSLFSKAGFEEKKSAEIVKNKKVASALYNILGSNFPKTDDKKLSLLHQLAIHESKNGKVPNHDFIIDGIQKGDLKTALQVTEGIKYLQNNATVDKEKFDEASGVGIEITPEEAKVEISKYLDSIKTDLESKRYSILPKVLGEVKTQPSLKWAPPNLFKPILDEEFLARLGPKDERDVKKKEKKAKTPANAAATKKQDTGSEPERSMFSEGFLGDLHKPGEEPQMYPELLEEHKKFICDKVYTRFPPEPNGFLHIGHSKAIMVNFGYAQFNKGNCYLRFDDTNPEAEEEVYFNSIKEMVSWLGYKPWKITYSSDYFDELYELAIKLIKSDKAYICHCTPEEVKASRGLKEDGTLGGERVACKHRFQTVEHNLREFENMKNGKYNVGEATLRMKQDLNSPSPQMWDLVAYRVLNTPHHRTGDKWKIYPTYDFTHCLVDSFENITHSLCTTEFVLSRESYEWLCDALHVYRPAQREYGRLNLTGTIMSKRKIAKLVNEGYVRGWDDPRLYTLEGIKRRGVPPGAILSFINTLGVTTSTTNIQTVRFESAVRNYLDQTTPRLMMVLHPIEVVIDNLDESFSLDVEIPYKPGKDEKSMGYRKLTFSKHIYIDENDVRAEPADKEFYRLAPGQPVGLMRVPFNISFKSIEEKDGKKIVHVNYDEGVKAKPKTYIQWIPKDTAVHIKEVRIYNQLFKSENPSAHPEGYLKDINPDSEEVLRNAVVEENLKDIVAKSPMNIEIPGSAFNIKENKGNNTVRFQALREGYFCLDKDSKEDGLILNRIVSLKEDAAKK

SEQ ID NO: 7636 - DNA, 2574 bp, Ustilago maydis 521
  CDS (1)..(2574)
atgccgcccaaggtcgatgtcaacgatccagagaatgcaaggcttctcaagctcttcgaatcgctcaatctgaccggaaacagagccatcgagacgctcacaaacccaaagcacgtcgctgctatcgagagcgttatcgcacacaaccatctcactaacaaacagatcgaccccaaggcgtccgcactcatcatatctgcatccaccgccaaagatgcttccaaccagcccgccagagactatatcgtatcacgcatcctcgacgccagcctcacatcgtccgatcaagttaacgcagcatacaagtacctctcatccctcaacagcgagccagacaaggctgcttttgacaaggaatgcggtgttggcgtcgtcgtaacaccacaacaatctcgcaaggcggtagatgactacattgcatctcaccgatccgaactcgatcccgttgatggttggccgaaactcggctcgatcctctctggcgtcaaagcttcgcccgacatgcgatgggccaacgcagtcgacctcaaggacgccgtagatgcggcgctcctagctacatatggtcccaaaaagccacctcctcccaaggaaaagaagaagccatctgcttccacctcggcccaccccaaaaaggaagctgcaccagctggtcccgtcgatccagacgccatgttcaaggaaggcttcctcgccagtctccacaaacccggcgaaaacccccagatcaagccagagctcaaacaacagcacctcgccgctaccaagggcatggtcatgacgcgtttcccaccagaacccaacggctttctccacattggtcacagcaaggccatcgccgtcaactttggctttgcccgcttccatcgcggtctctgttacctccgatacgacgataccaaccccgaggcagaagaggaaaagtactttaccagcatcctcgagacagttcgatggcttggcttcgaacccttcaaggtcacctactcgagtgactacttccagcagctctaccagctcgccgtcgaactcattaagcgtggcaaggcttacgtcgatcactcgacacccgaagagatcaaggagcagcgcggtggtcccgagcgcggtccacgcaagccttcacgcttccgcgatcgtcccgttcaagagtcgcttcaggactttgaggacatgaagaacggcaaatacgccccaggcaaagtcacgcttcggatgaagcaggacatcgagaatggcaacccgcagatgtgggatctgatcgcctaccgtgtcctcgaagcttcacaccaccgcaccggcaaggactggtgcatctatcccacctacgactttacccactgtctcgtcgatagctttgaaaacatcagccactcgctctgcaccaccgagtttatcctctcgcgcgaatcctacgagtggctgtgcgacgcgctcgaggtgtacaagccacgtcagtccgagtacggccgtctggcgctccagggaaccgtcatgtcgaagcgcaagattctcaaactcgtaaaggagcgctacatcgaagactgggatgacccgcgcatgtttaccctcatcgctcttaggcgtagaggtgtacctcccggtgcgatcctgtcctttgttagcgcgcttggcgtcaccacagccaaatccaccatccagatcagtcggttcgatcaagctgtgcgacaatacctcgagctttcgacgccacgtttgatgatggtgctcaacccgctcaaggtgaccatcgagaacttacccgacgaccacttccaggagatcgaaaagcctctgcatcccaaggcgcccgagatgggcaccaacaagatccccttcacccgcactgtctacatcgactcgtccgacttccgcaccgaggatagcaaggactacttccgtctggccccaggcaagacggtaggtctgttgcaggtacccttccccatcacatgtcaatcgttcaagaccaacgaccagggtgtaccgatcgaagtgattgccacgtacggcgatacaagctcggccaagcccaagacatacatccagtgggtagcagagcacgctccctcgcaaagtcctgtcaaagtcgacgagacacgcatcttccaccagctcttcacctcggacgatccggcagctgaggagaacttcttggaccacgtcaacccggattctctcgaaatcgtgcgcggtgctatggtcgaggttggtttttgggatgtggccaagcgcagcgtcgagcacgctagaaaggaggctgctcagcgcaccgaaagagccgaagccgatgcggccaaagcgagaagcgagaccgagactagtgcaaccgagggtgctggtgcaggtgctcctcaacgtactgctgatcaactggtgggcaaagagttggtccgcttccagggtatgcgtaccgcctactttgcgctcgatcgcttgagcggcgatttgggcctctttggtgataaacagaagggcggcaagattgtgctcaacaggatcgtctcgttgaaagaggatgcaaagaaggacgataaggcagtcgcgtcaccggtggccaagaaagccaagtaa

SEQ ID NO: 7637 - protein, 857 aa, Ustilago maydis 521
MPPKVDVNDPENARLLKLFESLNLTGNRAIETLTNPKHVAAIESVIAHNHLTNKQIDPKASALIISASTAKDASNQPARDYIVSRILDASLTSSDQVNAAYKYLSSLNSEPDKAAFDKECGVGVVVTPQQSRKAVDDYIASHRSELDPVDGWPKLGSILSGVKASPDMRWANAVDLKDAVDAALLATYGPKKPPPPKEKKKPSASTSAHPKKEAAPAGPVDPDAMFKEGFLASLHKPGENPQIKPELKQQHLAATKGMVMTRFPPEPNGFLHIGHSKAIAVNFGFARFHRGLCYLRYDDTNPEAEEEKYFTSILETVRWLGFEPFKVTYSSDYFQQLYQLAVELIKRGKAYVDHSTPEEIKEQRGGPERGPRKPSRFRDRPVQESLQDFEDMKNGKYAPGKVTLRMKQDIENGNPQMWDLIAYRVLEASHHRTGKDWCIYPTYDFTHCLVDSFENISHSLCTTEFILSRESYEWLCDALEVYKPRQSEYGRLALQGTVMSKRKILKLVKERYIEDWDDPRMFTLIALRRRGVPPGAILSFVSALGVTTAKSTIQISRFDQAVRQYLELSTPRLMMVLNPLKVTIENLPDDHFQEIEKPLHPKAPEMGTNKIPFTRTVYIDSSDFRTEDSKDYFRLAPGKTVGLLQVPFPITCQSFKTNDQGVPIEVIATYGDTSSAKPKTYIQWVAEHAPSQSPVKVDETRIFHQLFTSDDPAAEENFLDHVNPDSLEIVRGAMVEVGFWDVAKRSVEHARKEAAQRTERAEADAAKARSETETSATEGAGAGAPQRTADQLVGKELVRFQGMRTAYFALDRLSGDLGLFGDKQKGGKIVLNRIVSLKEDAKKDDKAVASPVAKKAK

SEQ ID NO: 7638 - DNA, 2343 bp, Gallus gallus
  CDS (1)..(2343)
atggcggcgatggcggcgacggaggaagcggaggcgctggatttgttcaccggcatcgggctgaccgaggccaaagcccgcgagacgctgcgcaacgccgcgctgagcgcgcagctccgccaggccgtgctgcaggcccgcgccgcgctgggctcaggcctggataaagccaccggcgctctgctgtacaacgcggccgcccggctccgcgacccggaccgcttggccttcgtggtggggtacatcgggcggagggagatccgcaccgaccaacagttgggcgccgccctgcagtacctccgcagtcacccgctggaaccgctggaaccggcggacttcgagcgggcgtgcggcgtgggagtgcgggtcagccccgagcagatcgaggaggcggtggaggccgtggtcagccggcaccgggaggagctgctggcggagcggtaccacttcaacacggggctgctgatggcggaggcgcggagccggctgcagtgggcggatgggaagagcatcaagaacgaggtggatctgcaggtgctgcatttgctgggaccaaagacagaagctgatctggaaaagaaaccaaaggctgccaaggcccggccagccccagtggagaagcagaaggcagccgtggtggagaatggtgaggtgggcgcagagacaaagtcactgctggagcagctgcgaggagaagctctgaaattccacaagccgggagagaactacaaaacggagggctacgtggtgacacccaacaccatggctctgctgaagcagcacctggcgctcacgggtgggcaggtgcggacgcggttccctcctgagcccaatggcattctgcacatcggccatgccaaggcaatcaacttcaactttggttacgccaaggccaacgggggcatctgcttcttgcgctatgacgacaccaaccctgagaaagaggaggagaagtacttcacggccatccgggagatggtggagtggcttggctaccagccctacgctgtgactcatgcctcagactactttgaccagctctacacctgggctctggagctcatccgcaggggacaagcctacgtctgccatcagaaggttgaggagatcaagggtcacaacccaccaccgtcaccgtggcgggaccggcccgtggaggagtcactagtgctctttgaggacatgcgaaaggggaagtttggggagggggaggccacgctgcggatgaagctggtgatggaggatgggaagatggaccccgttgcctaccgcgtcaagttcacaccacaccaccgcaccggggacaagtggtgcatctacccgacgtatgactacactcactgcctttgcgactccatcgagcacatcacgcactccctctgcaccaaggagttccaggccaggcgctcctcctacttctggctgtgcaacgcgctggacgtgtactgccctgtgcagtgggaatacggccgcctcaacctgctttacaccgttgtctccaagagaaagatcatccgcctggtggagactggggctgtgcgggactgggatgacccacggctcttcacgctgacagccctgcgccggcgaggcttccctcctgaggccatcaataacttctgtgcacgggttggtgtgacagtggcccaggcgacgatggaaccccacttgctggaggcgtgtgtgagggatgtactgaatgagcaggccccccgcgccatggccgtgctggagcccctcaaggtcaccatcaccaacttcccagccccccaggcaatcgatgtcctcgtgcccaactttcctgctgatgagagccggggcttccacaaagtgcccttccagtccgtcgtctacatcgtggagagcgacttcaaggaggaggcagacaggggctacaagcgcctggccctcgggcagccagtggggctgcggcacaccggctacgtcatcgccgtgcagaatgtcatcaaggatgcccgtgggcgtgtcattgagctggaggtgacctgcaccaagtctgacgcagcggagaagcccaaagccttcatccattgggtgtcagagccgcgggtgtgcgaagtgcggctgtatgagcggctgtttttgcacaaaaaccccgaggacccttcggaggtgccgggtggattcctgagcgacctcaaccctgactccctacgtgtggtggacgatgccctggttgacagctctgtcctcggggcacggccctttgataagttccagtttgagcgcttgggctacttctcagtggatcctgacagcactgacagcaagctggtgttcaaccggactgtgacgctgaaggaggaccccggcaaagcctga

SEQ ID NO: 7639 - protein, 780 aa, Gallus gallus
MAAMAATEEAEALDLFTGIGLTEAKARETLRNAALSAQLRQAVLQARAALGSGLDKATGALLYNAAARLRDPDRLAFVVGYIGRREIRTDQQLGAALQYLRSHPLEPLEPADFERACGVGVRVSPEQIEEAVEAVVSRHREELLAERYHFNTGLLMAEARSRLQWADGKSIKNEVDLQVLHLLGPKTEADLEKKPKAAKARPAPVEKQKAAVVENGEVGAETKSLLEQLRGEALKFHKPGENYKTEGYVVTPNTMALLKQHLALTGGQVRTRFPPEPNGILHIGHAKAINFNFGYAKANGGICFLRYDDTNPEKEEEKYFTAIREMVEWLGYQPYAVTHASDYFDQLYTWALELIRRGQAYVCHQKVEEIKGHNPPPSPWRDRPVEESLVLFEDMRKGKFGEGEATLRMKLVMEDGKMDPVAYRVKFTPHHRTGDKWCIYPTYDYTHCLCDSIEHITHSLCTKEFQARRSSYFWLCNALDVYCPVQWEYGRLNLLYTVVSKRKIIRLVETGAVRDWDDPRLFTLTALRRRGFPPEAINNFCARVGVTVAQATMEPHLLEACVRDVLNEQAPRAMAVLEPLKVTITNFPAPQAIDVLVPNFPADESRGFHKVPFQSVVYIVESDFKEEADRGYKRLALGQPVGLRHTGYVIAVQNVIKDARGRVIELEVTCTKSDAAEKPKAFIHWVSEPRVCEVRLYERLFLHKNPEDPSEVPGGFLSDLNPDSLRVVDDALVDSSVLGARPFDKFQFERLGYFSVDPDSTDSKLVFNRTVTLKEDPGKA

SEQ ID NO: 7640 - DNA, 2391 bp, Oryza sativa
  CDS (1)..(2391)
atggcgaccggagaagcggcggcggcggcggcgtcgccgccggagctggcgtcgttcctggcgatcgggcttgaccagcgcacggcggagaacgccctcgccaaccgcaaggtcaccgccaacctcaccgccgtcatcgccgaggctggtgttagtgggtgtgacaaatctgtggggaatcttctctacactgtcgcgacgaagtatccggcgaatgccctggtgcatcgtcccgttgtcatccaatacattgtgtcgtcaaagatcaagacccccgcgcaattagatgctgctctgtcgtttctttctactttgggtcctgatccattggacacagcaaagtttgaagagacatgtggagtgggggtggttgtttcaactgaagagattcagtcaatggtcactgatatcctgaaggaaaacatggaagccatagttgaacagcgatatcatataaatgttggcagcttgtgcggacaggttaggaagtggcacccctggggcgatgctaagttcataaaggaggaaattgataaaaggcttacagagattcttggtccaaagacagaagctgacaatgtaaagcctgtgaaaaagaagaaggagaagcccgcaaaagttgaggagaaaaaaactgcggtagctgctcctgctccaccatctgaggaagaacttaatccctactccatatttcctcaaccggaggaaaacttaaaggtccatacagaaattttcttcagcgatggaaatatatggagagcacacaacagaaaggacattttagagaaacatcttaaagcaactggaggaaaagtgatgacccgctttcccccagagcctaatggctaccttcatattggtcatgctaaggctatgtttattgattttggactggctaaagagcgcaacggacattgttaccttaggtttgatgatacaaaccctgaggcggagaagaaagaatatatagatcacattcaagaaattgtccgatggatgggctgggagccttataaagttacctatacaagtgactatttccaagaattatatgaacttgctgtttgtttgataaagaagggactagcttatgtcgatcaccagacaccagaagagataaaggagtatagagaaaagcaaatgaatagtccatggagggataggcctatagaagagtcactaaaactgtttgaagatatgaggcatgggttggttgctgagggaaaggcaactcttaggatgaaacaagacatgcagaatgataacaagaacatggctgacttaatagcatatagaataaagtttacacctcatccccatgctggcgacaagtggtttatctatccaagctatgactatgctcattgtttggttgactctcttgaaaacattacccattcgttgtgcacactagaatttgacatacgtcgtccttcatactactggctgctcgtatccctggaccagtaccagccatatgtttgggaatattcaaggttaaacatatcaaacaatgttatgtccaagcgaaagctaaataaacttgtgacagagaagtgggtagatgggtgggatgatcctcgcctgttgacacttgcaggactacggcggagaggagtatcatcaacagcaattaactcctttattcgtggaatgggcataacaaggagtgacaacagtttgatacgcttagaacgccttgagtatcatattagagaagagctcaacaaagtagctcctcgtgctatggttgttttgcatcccctaaaggttgttataaataatttagactatggaacaataatagaccttgatgcaaaaaagtggcccgatgctccaggagatgatgcttcggcctattacaaggttccattctcaagaactgtctacatcgagcagtctgattttcgtgtaaaggattcaaaagattattatgggcttgctcctggtaaaacagtactactaaggtatgcattcccaataaaatgtacggaagttatctatggtgataattcagataatatcattgaaatccgagctgagtatgacccttcgaaggctacaaaaccaaagggtgtgttgcactgggttgccgaaccttctccaggtgttaacccgctcaaagtggaaatcagattgttcgagaaattatttctttcagagaatcctgtggagcttgaggattggctgggtgatctcaacccacgatcaaaggaagtgataaagggtgcctatgccgtgccttcgcttgcaactgcagcgctgggggacaaatttcagtttgaacgcctcggttactttgctgtggattccgactcgacggctgaggaacttgtgttcaacagaaccgttactctacgggattcctatggaaaagctggacccaagtga

SEQ ID NO: 7641 - protein, 796 aa, Oryza sativa
MATGEAAAAAASPPELASFLAIGLDQRTAENALANRKVTANLTAVIAEAGVSGCDKSVGNLLYTVATKYPANALVHRPVVIQYIVSSKIKTPAQLDAALSFLSTLGPDPLDTAKFEETCGVGVVVSTEEIQSMVTDILKENMEAIVEQRYHINVGSLCGQVRKWHPWGDAKFIKEEIDKRLTEILGPKTEADNVKPVKKKKEKPAKVEEKKTAVAAPAPPSEEELNPYSIFPQPEENLKVHTEIFFSDGNIWRAHNRKDILEKHLKATGGKVMTRFPPEPNGYLHIGHAKAMFIDFGLAKERNGHCYLRFDDTNPEAEKKEYIDHIQEIVRWMGWEPYKVTYTSDYFQELYELAVCLIKKGLAYVDHQTPEEIKEYREKQMNSPWRDRPIEESLKLFEDMRHGLVAEGKATLRMKQDMQNDNKNMADLIAYRIKFTPHPHAGDKWFIYPSYDYAHCLVDSLENITHSLCTLEFDIRRPSYYWLLVSLDQYQPYVWEYSRLNISNNVMSKRKLNKLVTEKWVDGWDDPRLLTLAGLRRRGVSSTAINSFIRGMGITRSDNSLIRLERLEYHIREELNKVAPRAMVVLHPLKVVINNLDYGTIIDLDAKKWPDAPGDDASAYYKVPFSRTVYIEQSDFRVKDSKDYYGLAPGKTVLLRYAFPIKCTEVIYGDNSDNIIEIRAEYDPSKATKPKGVLHWVAEPSPGVNPLKVEIRLFEKLFLSENPVELEDWLGDLNPRSKEVIKGAYAVPSLATAALGDKFQFERLGYFAVDSDSTAEELVFNRTVTLRDSYGKAGPK

SEQ ID NO: 7642 - DNA, 2325 bp, Brachydanio rerio
  CDS (1)..(2325)
atggcggacgtggtgtcttctttcatgtcaattggccttagtgagcagaaagctaaggaaacgttgaagaatgaaacactttcatcaacactcaagaaagccattgatctggctcaagtccagctggggtcttctgccattgacaagatcactggcactctgttgtacagtatggtgacacgacttaaagacacgaacaggcctcaatttctcacaaaatacatcatttcacgaaaaatcacaacagaactgcagctgtcagcggctttggactttgtgaaaagccaccctcagggcgatgtggatcagcacaagtttgaggtggcctgtggtgtgggaatggttgtcacacctgagcagatagaggacgcagtggaattgattatcaggaaacacaaagatcagctgttggcagagagatatcgcttcaacatggggatactcatgggtgaggccagagccactcttaaatgggctgatgggaagattgtcaagaatgaagtggatatgcaggtgttgcaccttctcggtccaaaaactgaggcggatctggaaaaaaagagcaaggcagtcaaacccaaagcaccagaaaaagatgtgaagattgagcaggcttctgcagtaaacggtgatgggaacattgagaataagtcattgatggagcagctgagaggagaagctcttaagttccataagccaggggagaattacaaaacggagggttatgttgtaacacctaacaccatgaacttgctgaagaagcacttggaagaaactggaggacaggtccgcacacgtttccctcctgagcctaatggtattctgcatattggccatgccaaagcaatcaacttcaattttggtttcgccaaggccaacaacggcatctgttttctgcggtatgacgacacaaacccagagaaagaggaggaaaaatacttcaccgccatcaaagacatggtggagtggcttggatatgaaccatatgctgttacacacgcctctgataacttccagcgtctctacaatcttgctgttgatctcattcgcaggggtcatgcatatgtgtgccaccagcgcggagaggagctcaagggtcacaacgtcccttcctctccctggagagagcgacccgtggaagagtctttggttttgtttgagcacatgaggaagggaatgtttgcagaaggggaagccactctcagaatgaagatggtcatggaagatggcaaaatggacccggtggcatatcggatcaaatacacgccacatcacaggacaggagacacttggtgcatataccccacatacgattacacgcactgtctgtgcgactccattgagaacatcacacactctctgtgcaccaaagagtttcaggccagacgatcatcatatttctggttgtgcaatgctctggatgtgtattgcccggtgcagtgggaatatggccgactgaacctcacttatactgtcgtttccaagagaaagatcatcaaattggtggaaacaggagttgttagggattgggatgatcctaggctttttaccctcacagctctcaggagacgtgggttccctccacaagccatcaacaatttctgtgcccgggtgggtgtaactgttgctcagactacaatggagccacacctgctggaggcgtgtgttcgggaggtcctaaatgacactgctcctcgtgccatggccatactcgagcctctcaaggtcacaatcatcaacctgccaactaatgcacagaaggagcttagagtcccagacttcccagccaatgaagcaaggggcagccatgtggttcccttctcaaagaccatctttattgagcagagcgacttcagagaggtgatggagaagggttataagcgcctgactccagatcagtcagtgggcttgagatatgcaggatacgtcatctctgtacagcgtgtcatcaaggatgaccgtggtaaagtatgtgagctcgaggtgacctgcgtcagctccgacactgcagagaaacccaaagcgtttattcattgggtgagcgagccactgctgtgtgaagtgcgcctctatgaaagactgtttcttcataaaaacccagaggacccggcggaagttcctgctggattcctgagtgacattaacccaaattccttaacagttatcgaaagtgccttagtggaccgctctgtgggcaaagccaaagtgtttgacaagttccagtttgagagagtgggctacttttcagtggatgctgacagcacacccgaaaagctggtgttcaacaggactgttacactcaaggaggatccaggaaagatatga

SEQ ID NO: 7643 - protein, 774 aa, Brachydanio rerio
MADVVSSFMSIGLSEQKAKETLKNETLSSTLKKAIDLAQVQLGSSAIDKITGTLLYSMVTRLKDTNRPQFLTKYIISRKITTELQLSAALDFVKSHPQGDVDQHKFEVACGVGMVVTPEQIEDAVELIIRKHKDQLLAERYRFNMGILMGEARATLKWADGKIVKNEVDMQVLHLLGPKTEADLEKKSKAVKPKAPEKDVKIEQASAVNGDGNIENKSLMEQLRGEALKFHKPGENYKTEGYVVTPNTMNLLKKHLEETGGQVRTRFPPEPNGILHIGHAKAINFNFGFAKANNGICFLRYDDTNPEKEEEKYFTAIKDMVEWLGYEPYAVTHASDNFQRLYNLAVDLIRRGHAYVCHQRGEELKGHNVPSSPWRERPVEESLVLFEHMRKGMFAEGEATLRMKMVMEDGKMDPVAYRIKYTPHHRTGDTWCIYPTYDYTHCLCDSIENITHSLCTKEFQARRSSYFWLCNALDVYCPVQWEYGRLNLTYTVVSKRKIIKLVETGVVRDWDDPRLFTLTALRRRGFPPQAINNFCARVGVTVAQTTMEPHLLEACVREVLNDTAPRAMAILEPLKVTIINLPTNAQKELRVPDFPANEARGSHVVPFSKTIFIEQSDFREVMEKGYKRLTPDQSVGLRYAGYVISVQRVIKDDRGKVCELEVTCVSSDTAEKPKAFIHWVSEPLLCEVRLYERLFLHKNPEDPAEVPAGFLSDINPNSLTVIESALVDRSVGKAKVFDKFQFERVGYFSVDADSTPEKLVFNRTVTLKEDPGKI

SEQ ID NO: 7644 - DNA, 2319 bp, Xenopus laevis
  CDS (1)..(2319)
atggctgctgagtcgctgtccctcttcacagccatcggtcttagtgagcagaaggctcgggaaaccttaaagaatgaggcgcttagcttgttgcttcgggacgcgattgtacaggcccagaaaacattgggtccatctgtcgacaaggtgaccggaactctcctgtacaatgtggcaactcgccttaaagatacgaagcggttgggctttctggttgaatacatagccagcaagaagattaccacagacctgcagttaaatgctgccctggactatgtcaaagctcatccactggatcctattgacaccggtcattttgagaaagattgtggcgtgggggtgactgttaccccagaacagatagaagaagctgtggaagctgtgattcagaaattcagagcacagttgttggccgaacgctatcgctttaacatgggcttgttaatgggggaagccaggaaccagctgaagtgggcagatgggaagattatcaagaatgaggtagatatgcaggttttgcacttacttggcccaaagactgaagctgatctagaaaagaaaccaaaggtgacaaagccaaaagctacagaaccagagaagaaaggagatgccactgtgaatggtgacgtgaaactggagtccgtatctctgatggagcagcttaggggagaggcccttaaattccacaaacccggtgagaattacaagactgaggggtacgtggttacaccgaaaaccatggagctgctgaagaaacatcttgaaatcacaggaggacagatcagaactcggttccctccagagccaaatggcattttgcacattggtcacgccaaggccatcaactttaactttggatatgcaaaggcaaatggaggcatctgctttctgcgctatgatgacaccaacccagagaaggaggaagaaaagtattttactgccattaaggatatggtagaatggcttggttacaagccctatgctgtgactcacgcctccgacaactttaaccagctgtatgagtgggcggtggaactcattagaagaggtcaagcttatgtttgccatcagaaagttgaagaaattaaaggtcacaacccaccaccttccccatggagagatcgtccagttgaagaatcccttctgctctttgaaggtatgaaaaagggaaagtttgcagagggagaagcgacactgcgaatgaagcttataatggaagatgggaaaatggatcctgtggcatatcggatcaagtacacaccacatcaccgaactggggacaaatggtgtatatatccaacctatgactacactcactgtctctgcgattctattgaacatataactcactctctgtgtaccaaggagtttcaggctaggcgatcgtcatatttctggctatgtaacaccttagatgtctactgccctgtgcagtgggaatatggacgattaaacctgcactacactgtcgtatcaaagcggaaaatcatcaaactggtcgaaactggagctgtcagggactgggatgaccctcgtctcttcacgctgacagctttacgccgcagaggattcccaccagaagccattaataacttctgtgcaagggttggggtgactgttgctcagactacaatggagccacacttgctggagtcgtgcgtcagagatgtactcaatgagacagccccaagaataatggcagtgctggaacccctgaaagtaaccataacaaatctccctgctgagaaagccatcgatgtctctgttccaaatttcccagcggatgaatccaaaggctttcatgttgttcccttctcctccaccatttacattgagcagtcggatttcagagaggtaatggagaagggatataagcgcctaaccccagatcagccggtaggcctcagacacgctggctatgttatctccttgcaaaatattgtgaaggatcaaagcggcaacgtgattgaactggaagttacgtgcacaaagacagacgtcgctgaaaagccaaaagcattcatccactgggtgtctgatcctctgacgtgtgaagtgcgtctgtacgacaggctgttcctccacaaaaccccagaagatccatctgaagttcctggtggtttcttaactgatctgaatacgaactccttgacgacaatccccagtgctttagtggaacggtctgtgaagaatgccaaagccctggacaagttccagtttgagagacttggttatttttcagtggatccagacactactccggaaaagattgtcttcaacaggactgttaccctgaaggaagatccaggaaagatgtga

SEQ ID NO: 7645 - protein, 772 aa, Xenopus laevis
MAAESLSLFTAIGLSEQKARETLKNEALSLLLRDAIVQAQKTLGPSVDKVTGTLLYNVATRLKDTKRLGFLVEYIASKKITTDLQLNAALDYVKAHPLDPIDTGHFEKDCGVGVTVTPEQIEEAVEAVIQKFRAQLLAERYRFNMGLLMGEARNQLKWADGKIIKNEVDMQVLHLLGPKTEADLEKKPKVTKPKATEPEKKGDATVNGDVKLESVSLMEQLRGEALKFHKPGENYKTEGYVVTPKTMELLKKHLEITGGQIRTRFPPEPNGILHIGHAKAINFNFGYAKANGGICFLRYDDTNPEKEEEKYFTAIKDMVEWLGYKPYAVTHASDNFNQLYEWAVELIRRGQAYVCHQKVEEIKGHNPPPSPWRDRPVEESLLLFEGMKKGKFAEGEATLRMKLIMEDGKMDPVAYRIKYTPHHRTGDKWCIYPTYDYTHCLCDSIEHITHSLCTKEFQARRSSYFWLCNTLDVYCPVQWEYGRLNLHYTVVSKRKIIKLVETGAVRDWDDPRLFTLTALRRRGFPPEAINNFCARVGVTVAQTTMEPHLLESCVRDVLNETAPRIMAVLEPLKVTITNLPAEKAIDVSVPNFPADESKGFHVVPFSSTIYIEQSDFREVMEKGYKRLTPDQPVGLRHAGYVISLQNIVKDQSGNVIELEVTCTKTDVAEKPKAFIHWVSDPLTCEVRLYDRLFLHKTPEDPSEVPGGFLTDLNTNSLTTIPSALVERSVKNAKALDKFQFERLGYFSVDPDTTPEKIVFNRTVTLKEDPGKM

SEQ ID NO: 7646 - DNA, 2361 bp, Caenorhabditis elegans
  CDS (1)..(2361)
atggcaacaaaggaggagcttctctctttgggcctctctgattcaaaagtagctgaaacgctgaaaaatgtgaagctcaccgaaacgatcggttcaattgtgaagcttgcgagcgagtctggcgagatttccaagcaaaaaggaacacttttgtaccagttggcgacaaagttgaagccacaagtcgctgctcacactccactagttgtcaagtatattatgaatgacgggattaagacagagccacagctctccgcagcgatcgagtatcttctctcgcacaccgttaaaggtatccaagtgcctgatttcgagaaatcatgcggagtcggcgttgttgtcacaatcgacgacatcgaagcggccgttaccaaggtgattggccaacaccgcgagaaaatcgtcgccgagcggtactcgttcccggccggaaagttgctcggcgagctacgagctctgcttccatgggctgatggtgcgattacgaagaaggaggtggatttgagattcttggagctgctcggaccgaagactgcggaggatttggctccgaagaagaaggagaagaagccggaaggcccgaaaccttccaaagacgctgccgctgccgccaccgctccaggaaccaaaaatcaaaaggaagctagccccgaagaattcgctgatggcgccgaaaccatggacgagctgctccgcacccgtgcgcatttccacaaagtcggagaaaacttcaagcaagacggctacgtgaccactccaaaaaccgcagagcttctcaaggctcacgtggcggctgtcggagggaaggtggtgacccgattcccgcctgaaccaaatggtgttcttcatattggacacgcgaaggcgattaacatcaattttggatatgctaaagctatgggtggtgtgtgtaatttgagatttgacgatacaaatccggaaaaggaagaggaaaagttcttctctgcaattgaggatattgttcattggcttggatatgatccggctagagttactcactcttcggataattttcagcagctttatctttgggctgttaagcttattcagaaaggactcgctttcgtatgccatcaaaaagtcgaagaaatgcgcggtttcgaagttcaactgagcccgtggcgtgagcgaccaatcgaagagaacatccaactcttcgaagacatgaaaaatggaaaattcgacgaaggagaagccacactccggctcaagttgacactggaagaaggaaaagtcgatccagtcgcctaccgtatcaaatatgttccacatcatcgaactggaaatcaatggtgcatctacccgacctacgattatacccattgcctttgtgattcaattgaaaatatcactcattctctgtgcaccaaagagttccagtcgagaagaagctcatattactggctctgtaatgctctagatatctattgtcctgttcaatgggagtacggtagactaaatgtcaactatactgtggtctcgaagcgaaagattctcaaacttatcaccacaaaaaccgtcaacgattgggatgatccacggttgttcacactgacagcactccgacggcgtggtatcccatctgaggcgattaatcgattcgttgcgaagctcggattgacaatgtcacagatggttattgatccacacgttcttgacgcaactgttagggattatttgaatattcacgcgccaagaacaatggccgtgctcgagggattgaagctgacaatcgaaaacttttccgaactcaatctcccatcatccgtcgacgttccagacttcccatctgatccgactgatccacgaaagcactcggtatccgtcgatcgggagattttcattgaaaagtccgactataagccggatgattcggacaaatccttcagaaggctgacgccgaaacaagccgtcggcctgaaacacattggattggtgctccgattcgtgaaagaagtcaaagatgccgagggtcacgtcacagaagttgtggtgaaggctgagaagttgtcggagaaggataagccgaaagcatttattcattgggttgcaaagcctgtctcgtgtgaagttcggctctatgatagactattcaagagtaagaatccagaggatgctcaactagttccaggtggattcctgtcggatatcaatccagattcattgacagttgtctacaatgctctaattgatcagtctattgcaaaatcaaaggtttatgatagattccaattcgaacgcatcggattcttctgtgtcgatcgtgattcgacgtcttcaacgttggtcttcaaccgaactgtcatgctgaaagacggaggagcttctggaaagaattga

SEQ ID NO: 7647 - protein, 786 aa, Caenorhabditis elegans
MATKEELLSLGLSDSKVAETLKNVKLTETIGSIVKLASESGEISKQKGTLLYQLATKLKPQVAAHTPLVVKYIMNDGIKTEPQLSAAIEYLLSHTVKGIQVPDFEKSCGVGVVVTIDDIEAAVTKVIGQHREKIVAERYSFPAGKLLGELRALLPWADGAITKKEVDLRFLELLGPKTAEDLAPKKKEKKPEGPKPSKDAAAAATAPGTKNQKEASPEEFADGAETMDELLRTRAHFHKVGENFKQDGYVTTPKTAELLKAHVAAVGGKVVTRFPPEPNGVLHIGHAKAININFGYAKAMGGVCNLRFDDTNPEKEEEKFFSAIEDIVHWLGYDPARVTHSSDNFQQLYLWAVKLIQKGLAFVCHQKVEEMRGFEVQLSPWRERPIEENIQLFEDMKNGKFDEGEATLRLKLTLEEGKVDPVAYRIKYVPHHRTGNQWCIYPTYDYTHCLCDSIENITHSLCTKEFQSRRSSYYWLCNALDIYCPVQWEYGRLNVNYTVVSKRKILKLITTKTVNDWDDPRLFTLTALRRRGIPSEAINRFVAKLGLTMSQMVIDPHVLDATVRDYLNIHAPRTMAVLEGLKLTIENFSELNLPSSVDVPDFPSDPTDPRKHSVSVDREIFIEKSDYKPDDSDKSFRRLTPKQAVGLKHIGLVLRFVKEVKDAEGHVTEVVVKAEKLSEKDKPKAFIHWVAKPVSCEVRLYDRLFKSKNPEDAQLVPGGFLSDINPDSLTVVYNALIDQSIAKSKVYDRFQFERIGFFCVDRDSTSSTLVFNRTVMLKDGGASGKN

SEQ ID NO: 7648 - DNA, 2385 bp, Lupinus luteus
  CDS (1)..(2385)
atgccggcgaaggatgacacctcctccgataaggagaagtctttggaactgtttctcaagatcggattagacgagcgcactgccaaaaacaccgtcgctaacaacaaagtcaccaccaatctcacttccgttatcaacgatgctggtgttaccgatggatgcagccgcactgttggaaaccttctttacacggttgcgacgaagtaccctgcaaatgccttgccacatcgcccaacattgctgcaatatattgttaattcaaaggtgaaaacaacagcacagttagacgcggcactatcttttctcagtgccacgggttcggagaatcttgatttgaacaagtttgaagaagcttgtggtgttggtgtcgaggtttcaacagaagatatcaaacatgctgttgatgaagttgttgaagagaataaggctacaattttggagctacgttatcgagtgaacgtgggtgagttacttgggcatgtccggaagaggctcccatgggctgatgcaaaagttgtcaagcaactagttgatgcaaaattatatgagatacttggtgataggacagcagcagataatgaaaagcctaaaaagaagaaagagaaacctgctaaagtagaggacaaggcagctcctgttgctacttccgaaaagccacttgaagaagatctgaatccatatttgatattccctaacccggaggacaactttaaggtgcatactgaagtaccttttagtgatggtaatattctgagatgttgcaatacaaaggcactccttgaaaaacacctgaaagcaacaggtggcaaagttttgacccgctttcctcctgaaccaaatggatatttgcatattggtcatgccaaggcaatgtttgttgattttgggttggcgaaagatagaaatggagggtgttatttgaggtttgatgatacaaatcctgaagcagaaaagaaagagtatattgatcacattgaagaaattgtccagtggatgggctgggaaccattcaagattacttacaccagtaattacttccaagaattgtatgaatttgccgtggaacttataagaaggggtcatgcttatgttgatcatcagacggcagatgagataaaggagtatagggagaagaaattaaacagtccttggagggatcgaccaatttcagaatcattgaaactctttgaggatatgaggcgtggctttatagaagaaggaaaagcgacacttagaatgaagcaagacatgcagagtgataactacaatatgtatgaccttattgcataccgtattaagtttactccacaccctcatgctggagacaaatggtgtatctatccaagctatgactatgctcactgcattgtagattctattgagaatgtcacgcattcactgtgtactcttgagtttgagacacgtcgtgcatcgtactattggttgttacatgcgttgggcatctaccaaccatatgtatgggaatattcaaggttgaatgtctcaaacacagttatgtcaaagcgtaagctaaatcgtttggtgacagagaagtgggttgatgggtgggatgatcctcgtctgatgacactagctggtttgcggcgtagaggcatgactcccactgcaatcaatgcctttgtccgaggaatgggaatcactagaagtgacggcactttgatatctgtggaacgtcttgagtatcatgttagggaagaattgaataaaacagctcctcgtgcaatggttgtcctgcatccactcaaggttgtcattactaatcttgaagccaaatcagcaattgaggttgatgcaaagaaatggcctgatgctcaagctgatgatgcttctgctttctacaagattccattttccaatgttgtatatattgaacgttcggatttccggatgcaagattcaaaagattattatggccttgctcctggcaaatctgtgatactcagatatgcatttcctataaagtgcactgaagttattctagctgatgataatgagaccattcttgaaattcgggctgagtatgatccttcaaagaagacaaagcctaagggtgtgcttcattgggtttctcaaccttctccgggagttgatccattaaaggtggaagtgaggttgtttgagaggctattcctatcagagaatcctgctgaacttgacaactggctcggggacctaaaccctcattccaaagtggaaatttcgaatgcatatggtgtgtccttgctgaaggatgcaaaactcggggacaggttccagtttgaaagattaggatattttgcagtcgaccaggactctaccccagaaaaacttgtatttaatcggactgtcacccttaaagacagctatggtaagggcggaaagtag

SEQ ID NO: 7649 - protein, 794 aa, Lupinus luteus
MPAKDDTSSDKEKSLELFLKIGLDERTAKNTVANNKVTTNLTSVINDAGVTDGCSRTVGNLLYTVATKYPANALPHRPTLLQYIVNSKVKTTAQLDAALSFLSATGSENLDLNKFEEACGVGVEVSTEDIKHAVDEVVEENKATILELRYRVNVGELLGHVRKRLPWADAKVVKQLVDAKLYEILGDRTAADNEKPKKKKEKPAKVEDKAAPVATSEKPLEEDLNPYLIFPNPEDNFKVHTEVPFSDGNILRCCNTKALLEKHLKATGGKVLTRFPPEPNGYLHIGHAKAMFVDFGLAKDRNGGCYLRFDDTNPEAEKKEYIDHIEEIVQWMGWEPFKITYTSNYFQELYEFAVELIRRGHAYVDHQTADEIKEYREKKLNSPWRDRPISESLKLFEDMRRGFIEEGKATLRMKQDMQSDNYNMYDLIAYRIKFTPHPHAGDKWCIYPSYDYAHCIVDSIENVTHSLCTLEFETRRASYYWLLHALGIYQPYVWEYSRLNVSNTVMSKRKLNRLVTEKWVDGWDDPRLMTLAGLRRRGMTPTAINAFVRGMGITRSDGTLISVERLEYHVREELNKTAPRAMVVLHPLKVVITNLEAKSAIEVDAKKWPDAQADDASAFYKIPFSNVVYIERSDFRMQDSKDYYGLAPGKSVILRYAFPIKCTEVILADDNETILEIRAEYDPSKKTKPKGVLHWVSQPSPGVDPLKVEVRLFERLFLSENPAELDNWLGDLNPHSKVEISNAYGVSLLKDAKLGDRFQFERLGYFAVDQDSTPEKLVFNRTVTLKDSYGKGGK

SEQ ID NO: 7650 - DNA, 2436 bp, Schizosaccharomyces pombe
  CDS (1)..(2436)
atggaccaggattatgaggagttacgtgccaagtttacaaaaataggattaaatgaaacaacggtaaaagatacgttaaaaaataaaaagctttcttcttcattaaataaggtcattgaggaaactaacgttggttcttcgggatgtgatagaacaattggaaatttgctatttacattggccaacgcttctttaaaacaaaaagacccgaaatccaatgctcatgaggcattcatagcttccaaaattgtatctggagacttaaaaacaaacctccaagtcaatgcggctattacctattgcaaggacaaagacacgatcgacgaatctgagttcgataaagaaactggtgttggtgtagtcttaacacctgaacaaattgaacaactcgtcggtgattatgtcgctgagaataagtcaaaaattttggagcaaagataccagctgttaaatccttctgcctctgctttacgtcagcatgctttattgaaatgggctcctcaactggaggtcaagcagacccttgataggaaattccttgaactcttgggaccaaaaaccgaacaagatgctgccgctggtaaaaaaaaaggcgcaaaagccaagaattcgaagcagaagactgttgattctgggaaagctaaggaacaaaaaattgtttctgaacagtctaagaaatataatatgtttgaggaagggtttttagcaaagctacataaaccaggtggtaatacgcagctgattcctgaaaggatgaaggagcacctgcaggctactggaggcggcgttgtaaccaggtttcctccggaaccaaatgggtacctccatattggccattccaaagcaatcgctgttaattttgggtttgctcgctatcataacggcgtttgttatttacgctttgatgatactaatccggaagctgaagaagagcgttactttgaaagcatcaaggatttggtagcctggttgggattccaaccttataagatcacctattccagtgattactttgataagttatatgagttagccgaagagctcattaagcgggacaaggcatatgtttgtcattgtaccgatgctgaaattaaaaaagctagaggtggtgaggagcgcggtcctcgttatgcttgtgttcatcgggaccgcccgatagaagaatcgcttcttgaatttcgtaatatgcgtgatggaaagtatcaaccgaaggaggctattttacgtatgaaacaagatctcagtgatggaaatcctcaaatgtgggaccttattgcctaccgtgttcttaattctcctcatcctcgtactggagacaagtggaaaatttacccaacttatgattttacccattgtttagttgattcgttcgagaacatttctcactctttgtgtacgactgagtttatattatctagagtaagttatgagtggttatgtaatgccttggaagtttattgtcctgctcagcgtgagtacggtcgtttgaacgttgtcggaaccctcatgagcaaacgaaaaataatgaaattggtaaaggaaggatacgttcatggttggaatgatcctaggctatatacccttgtagctcttcgccgccgaggtgttcctccaggtgctatccttgagtttgttagtgaagtcggtgtcactactgccgtcagcaatatagaagttgctcgatttgagaactgtgttcgaaaatttctcgaaaacagtgtaccacgtcttatgtttcttcctgatcctatcaaggttacattagaaaatctagacgactcttacagagagcaaattgagataccctttaatcctaaagatccttctatgggatctcgttctgcttttcttacaaagcatatatacattgaccgttctgattttcgtgaggaagcatcttctgactttttccgtttgacattaggtcaaccggttggcttgttccgtgcctctcatcctgtagttgccaaaagggttgtaaaaaatgatgaaggggaaccaatagaaatcatcgctgagtacgacgctagctcttcaaagaagcctaagacctttattcaatgggtgtctagggacaaagaaagtaatagtccagtacttattgctgaaacccgcctctttaataatcttttcaaatgtgataaccctgccgccctaaaagaacaagagctcgctgcacaattgaatccagagagcgaagtcgtactaaaaaattccattattgaacctggcatttatgatttaattaaatcggcaccttggcctaagactgattcatcggctggtgtcgacaaagccgaaaatcctgaaagtgtccgttttcaagctatgcgggttggatatttctgtttagatgaggatactaagaaaccaaatcatcttgtattgaatagaattgtatccctcagagaagattcggctaagaataaaaattag

SEQ ID NO: 7651 - protein, 811 aa, Schizosaccharomyces pombe
MDQDYEELRAKFTKIGLNETTVKDTLKNKKLSSSLNKVIEETNVGSSGCDRTIGNLLFTLANASLKQKDPKSNAHEAFIASKIVSGDLKTNLQVNAAITYCKDKDTIDESEFDKETGVGVVLTPEQIEQLVGDYVAENKSKILEQRYQLLNPSASALRQHALLKWAPQLEVKQTLDRKFLELLGPKTEQDAAAGKKKGAKAKNSKQKTVDSGKAKEQKIVSEQSKKYNMFEEGFLAKLHKPGGNTQLIPERMKEHLQATGGGVVTRFPPEPNGYLHIGHSKAIAVNFGFARYHNGVCYLRFDDTNPEAEEERYFESIKDLVAWLGFQPYKITYSSDYFDKLYELAEELIKRDKAYVCHCTDAEIKKARGGEERGPRYACVHRDRPIEESLLEFRNMRDGKYQPKEAILRMKQDLSDGNPQMWDLIAYRVLNSPHPRTGDKWKIYPTYDFTHCLVDSFENISHSLCTTEFILSRVSYEWLCNALEVYCPAQREYGRLNVVGTLMSKRKIMKLVKEGYVHGWNDPRLYTLVALRRRGVPPGAILEFVSEVGVTTAVSNIEVARFENCVRKFLENSVPRLMFLPDPIKVTLENLDDSYREQIEIPFNPKDPSMGSRSAFLTKHIYIDRSDFREEASSDFFRLTLGQPVGLFRASHPVVAKRVVKNDEGEPIEIIAEYDASSSKKPKTFIQWVSRDKESNSPVLIAETRLFNNLFKCDNPAALKEQELAAQLNPESEVVLKNSIIEPGIYDLIKSAPWPKTDSSAGVDKAENPESVRFQAMRVGYFCLDEDTKKPNHLVLNRIVSLREDSAKNKN

SEQ ID NO: 7652 - DNA, 2175 bp, Brassica napus
  CDS (1)..(2175)
atggaagggatcaagctctctttcccaccgaagactccgccaccgctttcagtaatcgctgctctctccctctcatcctctccggtaaccatcgactcctcctcctccgccgcaaccaccgtccctactttcgtcttctccgacgggcgaaagctgagtgggacatcagttcttctccggtacgttggtcgatcagcgaagtctcttcctgggttttacggccacgatgctttcgaatcttcacagattgatgagtgggtagattacgctcctgtcttctcctctggctcagagtttgagaatgcttgcactcgcgtcgataactaccttcaaagtggcacctttcttgttggccattctctttccattgccgatgttgctgtttggtcagctcttgctgcatccgccccaagatgggagagtttgaggaaatctaaaaagtaccacaacttggtcagacggttcaactcaaaatcgctcgagcacgcagagccactcaacaagctagctacatatactgcgaagaagccttcagggaagactgtttctgctgcaccaaggaccaaggaccaacaagcagacaacgctaacgacaaaggaaagcctgaagtggacttgcctggagcagaactcggaaaagtcaaactccggttcgctccagagccaagcggctacctccacatcggccacgccaaggccgcccttctcaacaagtacttcgccgagcggtaccaaggggaagtcatcatccgcttcgacgacaccaaccccgccaaagagagcaacgagttcgtcgaaaacctcgtcaaagacatcggtaccttggggatcaagtacgagcgcgtgacctacacctcagactacttccccgacctgatggccatggccgagaagctcatgcaagaggggaaggcttacgtggacgacacgccgagggagcagatgcagaaggagaggatggacgggatcgattccaaatgcaggagccataccatcgaggagaatcttaacctctggcgagagatgatcgctggaaacgtgagagggttgcagtgctgcgtacgcgggaagctggacatgcaagaccccaacaaagccatgcgagaccctgtttactaccgttgcaaccctatgtctcaccaccgtatagggaacaagtacaagatatatccaacgtatgactttgcttgcccctttgtggactccattgaagggataacgcatgcgcttcggtctagtgagtatcatgacaggaatgctcagtactataaggttctggaggatatggggttgaggagagttgagatttatgagtttagtaggttgaatctggtttacacgcttctgagtaagaggaagcttctatggtttgttcagcaagggttggttggtgggtgggatgatcctcgcttccctacagtgcaaggcattgttcgtagaggtttgaaaattgaggctctgattcagttcattctcgagcagggtgcttcaaagaatctaaacttgatggaatgggacaagctctggactattaacaagaagataatcgaccctgtgtgtcctagacacacggctgtgatcgaagagaggcgtgtactgttgacactaaccgatggtcctgatgagccgtttgtccggataataccaaagcacaagaagttcgaaggcgccggagagaaggcaaccactttcaccaagagcatatggatcgagggagctgatgcgagtgccatctctgttaacgaggaagtaactttgatggattggggaaacgccattgtgaaagaaatcacaaaagacgacgaaggtcgtgtcactgcgttgtctggcgttctgaatctccaaggatctgtgaagactacaaagctgaagctcacatggcttccagagactaatgagttggttaagctcacgttgacagactttgattatttaatcaccaagaagaagctagaggaagacgatgaggttgctacttttgtgaatccttacacgaagaaggaaacgtcggcacttggtgattccaatatgaggaacctgcagcgtggtgatgtgattcagcttgagaggaaaggctactacagatgtgatgtgccgtttgtcaagtcttcaaaacctatcgtcttgttctcaatcccagatggaaggcaacaccagcataaggctgctaattga

SEQ ID NO: 7653 - protein, 724 aa, Brassica napus
MEGIKLSFPPKTPPPLSVIAALSLSSSPVTIDSSSSAATTVPTFVFSDGRKLSGTSVLLRYVGRSAKSLPGFYGHDAFESSQIDEWVDYAPVFSSGSEFENACTRVDNYLQSGTFLVGHSLSIADVAVWSALAASAPRWESLRKSKKYHNLVRRFNSKSLEHAEPLNKLATYTAKKPSGKTVSAAPRTKDQQADNANDKGKPEVDLPGAELGKVKLRFAPEPSGYLHIGHAKAALLNKYFAERYQGEVIIRFDDTNPAKESNEFVENLVKDIGTLGIKYERVTYTSDYFPDLMAMAEKLMQEGKAYVDDTPREQMQKERMDGIDSKCRSHTIEENLNLWREMIAGNVRGLQCCVRGKLDMQDPNKAMRDPVYYRCNPMSHHRIGNKYKIYPTYDFACPFVDSIEGITHALRSSEYHDRNAQYYKVLEDMGLRRVEIYEFSRLNLVYTLLSKRKLLWFVQQGLVGGWDDPRFPTVQGIVRRGLKIEALIQFILEQGASKNLNLMEWDKLWTINKKIIDPVCPRHTAVIEERRVLLTLTDGPDEPFVRIIPKHKKFEGAGEKATTFTKSIWIEGADASAISVNEEVTLMDWGNAIVKEITKDDEGRVTALSGVLNLQGSVKTTKLKLTWLPETNELVKLTLTDFDYLITKKKLEEDDEVATFVNPYTKKETSALGDSNMRNLQRGDVIQLERKGYYRCDVPFVKSSKPIVLFSIPDGRQHQHKAAN

SEQ ID NO: 7654 - DNA, 2202 bp, Glycine max
  CDS (1)..(2202)
atggacatcaaaacctttgccttcgccccatcttctccgccgttatcggtaatcgccgccgccaagctcgccggaatctctcccacgattgataccgctctctctcctgactcacctccctcatttatcttctccgatgggctaaagttgcacggaccatatgctcttctacgttatatcgggcgagttgccagccttcctaatttctatgggcaaaatccatttgaatctagccagattgatgaatggctggactatgctcctatcctctcatcgggccctgcttttgagaatgcatgcaaatatatagatgagtacctggagaagcgtactcttttggttggttattcattgtcaattgcagacctagcaatctgggcaggtcttgcaggttctggaaagagatgggaaagtctaaggaagtcaaagaaatatccaaatcttgcacgatggttcaattcaatagtggaagaacatggtactgccttaaatgaagtcacatcagtatatgctggcaaaaaaggattgggagaaccaacagcaaccaagtcaaaagaacagtcagtaaacactgataaagtgaagaaggtgaatggagatgtatctgagaacaacaaaggaggaagcaaaccatcagcagaaatagatcttccagatgctgaagttggaaaagttcgcttgcgatttgcccctgaaccaagtggttatcttcatattggacactcaaaagcagctttgttgaacaaatattttgctgagcgatacaagggtcaggttattgtgcgttttgatgataccaatcctgctaaagaaagcaatgaatttgtggacaaccttattaaagatattgatacattgggtatcaaatatgaacaaattacatatacgtcagattacttccctgagttgatggagatggctgaaaaattaattcgccagggtaaagcatatgttgatgacacaccacgtgaacaaatgcaaaaagagagaatggatggcatagattctaaatgcagaaataatagtgtagaggagaatctaaaattgtggaaggaaatgattgcaggaacagagaggggcttgcagtgttgtgtccgtggcaagttggatatgcaggacccaaacaaatcacttagagatcctgtttattatcgttgcaatccaatgccccatcatagaattggatccaagtataaagtgtatccaacttatgattttgcttgtccatatgttgattctatagaaggaatcacgcatgcccttcgatctagtgaataccatgatcgcaatgcccagtattactggattcaagaggacatgggtcttagaaaagttcttatctacgaatttagccggttgaatatggtctacactcttctgagcaaacgaaagcttttgtggtttgtacaaaatgggaaagttgatggatgggatgatgcacgatttcctacagtgcaaggaattgtgcgtagaggtttgaaaattgaagccctgatacagtttattgttgagcagggggcgtccaaaaatctcaatctcatggaatgggacaagctctggaccattaataagaagattattgaccctgtctgtcctagacacactgctgtcattgcagacagacgtgtgttgttgactctcaccgatggtcctgagaaaccatttgtccgcatcatacctcggcacaagaaatatgaagctgccggagataaagctacaacatatactaaaaggatatggcttgaccttgctgatgcagtgtctttatcagcaggtgaggaagtaacattgatggattggggaaatgccatagtgaaggaaatagagaaggaccaagatggaaatatcacagggttgagtggtgttttgcatcttgaaggatctgtgaagaccacaaaattgaaactcacttggctacctgagatagatgaactagttagcctgacattagtggagtttgattatctaattacaaagaaaaagcttgaagaaggggaggatttcattgatgtggttaacccatgtaccaaaaaggagactttagcttatggagactccaacatgcgaaatcttcagcgtggagatttattgcaactggagagaaagggatatttcaggtgtgatttacccttcattcgcccctcacaaccaatcgtgctatatgcaatccctgatggcaggcaacagacaagtttgaagtaa

SEQ ID NO: 7655 - protein, 733 aa, Glycine max
MDIKTFAFAPSSPPLSVIAAAKLAGISPTIDTALSPDSPPSFIFSDGLKLHGPYALLRYIGRVASLPNFYGQNPFESSQIDEWLDYAPILSSGPAFENACKYIDEYLEKRTLLVGYSLSIADLAIWAGLAGSGKRWESLRKSKKYPNLARWFNSIVEEHGTALNEVTSVYAGKKGLGEPTATKSKEQSVNTDKVKKVNGDVSENNKGGSKPSAEIDLPDAEVGKVRLRFAPEPSGYLHIGHSKAALLNKYFAERYKGQVIVRFDDTNPAKESNEFVDNLIKDIDTLGIKYEQITYTSDYFPELMEMAEKLIRQGKAYVDDTPREQMQKERMDGIDSKCRNNSVEENLKLWKEMIAGTERGLQCCVRGKLDMQDPNKSLRDPVYYRCNPMPHHRIGSKYKVYPTYDFACPYVDSIEGITHALRSSEYHDRNAQYYWIQEDMGLRKVLIYEFSRLNMVYTLLSKRKLLWFVQNGKVDGWDDARFPTVQGIVRRGLKIEALIQFIVEQGASKNLNLMEWDKLWTINKKIIDPVCPRHTAVIADRRVLLTLTDGPEKPFVRIIPRHKKYEAAGDKATTYTKRIWLDLADAVSLSAGEEVTLMDWGNAIVKEIEKDQDGNITGLSGVLHLEGSVKTTKLKLTWLPEIDELVSLTLVEFDYLITKKKLEEGEDFIDVVNPCTKKETLAYGDSNMRNLQRGDLLQLERKGYFRCDLPFIRPSQPIVLYAIPDGRQQTSLK

SEQ ID NO: 7656 - DNA, 2385 bp, Glycine max
  CDS (1)..(2385)
atgccggcgaaggacgacggctccgacaaggagaagtgcctcgatctctttctcaaaatcggcttagacgagcgcaccgctaaaaacaccgtcgcaaacaacaaagtcaccgccaatctcactgcagtcatcgacgaggccggtgctactgatggatgcagccgaacggtcggaaatcttctttacacggttgcaacgaagtaccctgcaaatgccttgccacatcgcccaacattactacagtacattgtctcgttaaaggtgaaaacaactgcccagttagatgcagcattatcatttcttgctaccacaggctccgagaatcttgatttgaacaagtttgaagaagcttgtggtgttggtgttgaggtttcagaagaagatatcaaacaagctgttaatgaagttgtggaggagaacaaggctacaattttggagctacgttatcgaacaaatgtgggtgagttgctggggcatctgcgcaagaggctgccatggggtgatgcaaaagttgccaagcaacttgttgatgcaaaactatatgaactacttggtgatcggacagcagcagatgatgaaaagccttctagaaagaagaaggagaaacctgcaaaagtagaggataaggcagctcctgtttctacccctgaaaagtcacctgaagaagacgttaatccatttttaatattccctaatccagaggaaaatttcaaggtgcatactgaagtgccttttagtgatggtagtattttgagatgttgcaatacaagagatctgcttgacaaacacttaaaagcaacaggtggaaaagtcttgacccggtttccacccgaacctaatggatatttgcatattggccatgcaaaagcaatgtttattgattttgggttggcgaaagacagggatggaggttgctatctgaggtatgatgatacaaatcctgaagcagaaaagaaagagtatattgatcatattgaagaaattgtccagtggatgggttggaaaccatttaagattacttacacaagtgattacttccaagaattgtacgaattagcagtggagctcataaaaaagggtcatgcttatgttgatcatcagacacctgatgagataaaggagtatagggagaagaaactgaacagtccttggagagacagaccaatttcagagtcattgaaactctttgaggatatgaaaaatggcagtatcgaagaaggaaaagccacacttagaatgaagcaagacatgcagagtgataactacaatatgtatgaccttattgcatatagaattaagtttaccccacaccctcatgctggagacaaatggtgtatctatccaagttatgattatgcacactgcattgtggattctctagagaatatcacacattcactgtgtacacttgaatttgagacacgtcgtgcatcatactattggttgttgcatgcgttaggcatttaccaaccttatgtgtgggagtattcaaggttgaatgtctctaacacagttatgtcaaagcgtaagctaaatcgtctagttacagagaagtgggttgatgggtgggatgatcctcgtttgatgacactagctggtttgcggcgtagaggcatgaccccaactgcaatcaatgcttttgtccgaggaattggaataactagaagtgatggcactttgatttctgtggaacgccttgaatatcatgttagggaagaattgaacaaaacagcacctcgtgcaatggttgtcctacatccactcaaggttgtcattactaatcttgaagccaactcagcaattgaggttgatgcaaagaaatggcctgatgctcaagctgatgatgcttctgctttctacaagattccattttccaatgttgtatatattgaacattcggacttccggatgcaagattcaaaagattattatggccttgctcctgggaaatctgtgatactcagatatgcatttcctataaagtgcactgaagttattctagctgatgataatgagactattcttgaaattcgagccgagtatgatccttcaaagaagaccaagcctaagggggttctccattgggttgctcaaccttctcctggagttgatccattgaaggtggaagtcagattgtttgagaggctattcctatcagagaatcccgctgaacttgacaactggcttggcgatttgaacccaaattccaaagtgataattcccgatgcatatggtgtgtcttccatacagaatgcaaaagttggggacaatttccaatttgaaagattaggctattttgtggttgaccgggactcgacatcagaaaaacttgtttttaataggactgtcaccttaaagggcagctatagcaaaggtggaaagtag

SEQ ID NO: 7657 - protein, 794 aa, Glycine max
MPAKDDGSDKEKCLDLFLKIGLDERTAKNTVANNKVTANLTAVIDEAGATDGCSRTVGNLLYTVATKYPANALPHRPTLLQYIVSLKVKTTAQLDAALSFLATTGSENLDLNKFEEACGVGVEVSEEDIKQAVNEVVEENKATILELRYRTNVGELLGHLRKRLPWGDAKVAKQLVDAKLYELLGDRTAADDEKPSRKKKEKPAKVEDKAAPVSTPEKSPEEDVNPFLIFPNPEENFKVHTEVPFSDGSILRCCNTRDLLDKHLKATGGKVLTRFPPEPNGYLHIGHAKAMFIDFGLAKDRDGGCYLRYDDTNPEAEKKEYIDHIEEIVQWMGWKPFKITYTSDYFQELYELAVELIKKGHAYVDHQTPDEIKEYREKKLNSPWRDRPISESLKLFEDMKNGSIEEGKATLRMKQDMQSDNYNMYDLIAYRIKFTPHPHAGDKWCIYPSYDYAHCIVDSLENITHSLCTLEFETRRASYYWLLHALGIYQPYVWEYSRLNVSNTVMSKRKLNRLVTEKWVDGWDDPRLMTLAGLRRRGMTPTAINAFVRGIGITRSDGTLISVERLEYHVREELNKTAPRAMVVLHPLKVVITNLEANSAIEVDAKKWPDAQADDASAFYKIPFSNVVYIEHSDFRMQDSKDYYGLAPGKSVILRYAFPIKCTEVILADDNETILEIRAEYDPSKKTKPKGVLHWVAQPSPGVDPLKVEVRLFERLFLSENPAELDNWLGDLNPNSKVIIPDAYGVSSIQNAKVGDNFQFERLGYFVVDRDSTSEKLVFNRTVTLKGSYSKGGK

SEQ ID NO: 7658 - DNA, 2199 bp, Glycine max
  CDS (1)..(2199)
atggatatcaaaacctttgccttcgccccatcttctccgccgttatcggtaatcgccgccgccaagctcgccggaatctctcccacgattgataccgctctctctcctgactcacctccctcatttatcttctccgatgggctaaagttgcacggaccatatgctcttctacgttatatcgggcgagttgccagccttcctaatttctatgggcaaaatccatttgaatctagccagattgatgaatggctggactatgctcctatcctctcatcgggccctgcttttgagaatgcatgcaaatatatagatgagtacctggagaagcgtacttttttggttggttattcattgtcaattgcagacctagcaatctgggcaggtcttgcaggttctggaaagagatgggaaagtctaaggaagtcaaagaaatatccaaatcttgcacgatggttcaattcaatagtggaagaacatggtactgccttaaatgaagtcacatcagtatatgctggcaaaaaaggattgggtgaaccaacagcaaccaagtcaaaagaacagtcagtaaacactgataaagtgaagaaggtgaatggagatgtgtctgagaacaacaaaggaggaagcaaaccatcagcagaaatagatcttccagatgctgaagttggaaaagttcgcttgcgatttgcccctgaaccaagtggttatcttcatattggacactcaaaagcagctttgttgaacaaatattttgctgagcgataccagggtcaggttattgtgcgttttgatgataccaatcctgctaaagaaagcaatgaatttgtggacaacctgattaaagatattgatacattgggcatcaaatatgaacaaattacatatacatcagattacttccctgagttgatggaaatggctgaaaaattaattcgcgagggtaaaacatatgttgatgacactccacgtgaacaaatgcaaaaagagagaatggatggcatagaatctaaatgcagaaataatatagtagaggagaatctaaaactgtggaaggaaatgattgcaggaacagagaggggattgcagtgttgtgtccgtggcaagttggatatgcaggacccaaacaaatcacttagagatcctgtatattatcgttgcaatccaatgccccatcatagaattggatccaagtataaagtgtatccaacttatgattttgcttgtccatatgttgatgctatagaaggaatcacgcatgcccttcgatctagtgaataccatgatcgcaatgcccagtattactggattcaagaggacatgggtcttagaaaagttcttatctacgaatttagccggttgaatatggtctacactcttctgagcaaacgaaagcttttgtggtttgtacaaaatgggaaagttgatggatgggatgatgcacgatttcctacagtgcaaggaattgtgcgtagaggtttgaaaattgaagccctgatacagtttattgttgagcagggggcgtccaaaaatctcaatctcatggaatgggacaagctctggaccattaataagaagattattgaccctgtctgtcctagacacactgctgtcattgcagacagacgtgtgttgttgactctcaccgatggtcctgagaaaccatttgtccgcatcatacctcggcacaagaaatatgaagctgccggagataaagctacaacatatactaaaaggatatggcttgaccatgctgatgcagtgtctttatcagcaggtgaggaagtaacattgatggattggggaaatgccatagtgaaggaaatagagaaggaccaagatggaaatatcacagggttgagcggtgctttgcatcttgaaggatctgtgaagaccacaaaattgaaactcacttggctacctgagatagatgaactagtttgcctgacattagtggagtttgattatctaattacaaagaaaaagcttgaagaggaggatttcattgatgtgcttaacccatgtaccaaaaaggagactttagcttatggagactccaacatgcgaaatcttcagcgtggagatttattgcaactggagagaaagggatatttcaggtgtgatttacccttcattcgcccctcacaaccaatcgtgctatatgcaatccctgatggcaggcaacagacaagtttgaagtaa

SEQ ID NO: 7659 - protein, 732 aa, Glycine max
MDIKTFAFAPSSPPLSVIAAAKLAGISPTIDTALSPDSPPSFIFSDGLKLHGPYALLRYIGRVASLPNFYGQNPFESSQIDEWLDYAPILSSGPAFENACKYIDEYLEKRTFLVGYSLSIADLAIWAGLAGSGKRWESLRKSKKYPNLARWFNSIVEEHGTALNEVTSVYAGKKGLGEPTATKSKEQSVNTDKVKKVNGDVSENNKGGSKPSAEIDLPDAEVGKVRLRFAPEPSGYLHIGHSKAALLNKYFAERYQGQVIVRFDDTNPAKESNEFVDNLIKDIDTLGIKYEQITYTSDYFPELMEMAEKLIREGKTYVDDTPREQMQKERMDGIESKCRNNIVEENLKLWKEMIAGTERGLQCCVRGKLDMQDPNKSLRDPVYYRCNPMPHHRIGSKYKVYPTYDFACPYVDAIEGITHALRSSEYHDRNAQYYWIQEDMGLRKVLIYEFSRLNMVYTLLSKRKLLWFVQNGKVDGWDDARFPTVQGIVRRGLKIEALIQFIVEQGASKNLNLMEWDKLWTINKKIIDPVCPRHTAVIADRRVLLTLTDGPEKPFVRIIPRHKKYEAAGDKATTYTKRIWLDHADAVSLSAGEEVTLMDWGNAIVKEIEKDQDGNITGLSGALHLEGSVKTTKLKLTWLPEIDELVCLTLVEFDYLITKKKLEEEDFIDVLNPCTKKETLAYGDSNMRNLQRGDLLQLERKGYFRCDLPFIRPSQPIVLYAIPDGRQQTSLK

SEQ ID NO: 7660 - DNA, 2388 bp, Hordeum vulgare
  CDS (1)..(2388)
atggtcgacggggagaaggcctcggccccgcccctgctgcggctggagacgctgctcgcgctcggcctcgaccagcgcacggccgagaacgcgctggtcaatagcaaggtcaccgccaacctagccgccgtcgtagccgaggctgggataactggatgcgacaagtccgtcgggaatcttctgtacgcagttgccacgaagtacccaaataatgcacttgtccatcgtcctgctctcattagctacatcgtttcgaccaagatcaagaaccctgcacagctagatgctgctctgtcgtttcttactaataccggtcctgaatctttggatattgggaagtttgaagaagcctgtggtgtaggtgtggttgtttctattgaagagattcagtcaactgtctctgaggttctgaaggaaaacctggaagctatattggagcagcgctatcacataaatgttggtggcctatgcggacaggtcaggaagcggcacccctggggcgatgccaaggcaacaaaggaggagattgagaagaagcttgctgagatactaggtccgaagacggaagctgacaatgtaaaaccagtgaaaaagaagaaggagaaaccggcaaaagttgaggagaaaaaggttgcagtagccactgccgccccaccatctgaggaggaattgaatccttatacaatatttccccagccagcggaaaacaataaggttcatacagaaatattcttcagcgatgggaacatatggagggcgcataacacgaaggagatattagagaaacatcttaaggcaactggtggaaaagtgatgacgcgtttcccaccagaacctaatggataccttcatatcggtcatgctaaggctatgtttattgattttggattggctaaagagcgaaatggtcactgttatctcaggtttgatgacacaaatccagaagctgaaaagaaagaatatatagaccacatccaggagatagtcaagtggatggggtgggagccctataaagttacatatacaagtgattatttccaagctttatatgagcatgcagttgagttaatacggaaagggctagcctatgtggatcaccagactgcagaacaaatcaaggaatacagggaaaagaagatggatagtccatggagggacaggcccattgaagagtctttgcagttatttgaagacatgcggcgtgggttgattgctgagggtgctgcaactctccgaatgaagcaggacatgcagaatgataacaagaacatgtctgatttaatagcatatagaataaaattcactcctcatccacatgctggcgacaaatggtgtatctatccaagctatgactatgctcattgcatggtggattcacttgaaaacattacacattctttgtgcacgcttgagttcgacatacgccgcccgtcatactactggctacttgttgccttgggtttgtaccagccacatgtttgggagtattcgaggctaaacatatcacatactatgatgtccaaaagaaagttgaatcggcttgtgacagagaagtgggtagatgggtgggatgatcctcgtttgttgactttggcgggactgaggcgacggggagtatcagcaactgcgatcaattcatttatccgtggaattgggataacgagaagtgacaatagcttaattcgtgttgaccgtcttgaatatcatatcagagaagaactgaataaaacagcttctcgaaccatggttgttttgcatcctctaaaggttgtaataaccaacttggaagatggaaaagtcatagaccttgatggaaaaaagtggcctgatgctcctgctgatgaagcatcgtcctactacaaggttcctttctcaaaaattgtctacattgaaaaaactgattttcgcgtgaaagactcgaaagattactatgggctggcacctggtaaatctgccctgctgaggtatgcattcccgataaaatgcacagaggttatttatggtgataatccagatgatattgttgaaattcgagccgagtatgacccctcaaagacctccaaacctaagggtgttctgcactgggttgcccagccagcacctggagttgagccattaaaggtcgaaataagattgtttgagaaattattcttatcggagaatcctgccgaattggaagattggcttggtgatcttaacccgcactcgaaagaggttgtaaaggacgcctatgctgtaccgtcactcgccaccgcggttgtgggcgacaatttccagtttgagcggcttggctactttgctgtggacacggactcgactcccgagaagcttgtgttcaacaggactgtaaccctgcgcgactcttatgggaaggctggacccaagtga

SEQ ID NO: 7661 - protein, 795 aa, Hordeum vulgare
MVDGEKASAPPLLRLETLLALGLDQRTAENALVNSKVTANLAAVVAEAGITGCDKSVGNLLYAVATKYPNNALVHRPALISYIVSTKIKNPAQLDAALSFLTNTGPESLDIGKFEEACGVGVVVSIEEIQSTVSEVLKENLEAILEQRYHINVGGLCGQVRKRHPWGDAKATKEEIEKKLAEILGPKTEADNVKPVKKKKEKPAKVEEKKVAVATAAPPSEEELNPYTIFPQPAENNKVHTEIFFSDGNIWRAHNTKEILEKHLKATGGKVMTRFPPEPNGYLHIGHAKAMFIDFGLAKERNGHCYLRFDDTNPEAEKKEYIDHIQEIVKWMGWEPYKVTYTSDYFQALYEHAVELIRKGLAYVDHQTAEQIKEYREKKMDSPWRDRPIEESLQLFEDMRRGLIAEGAATLRMKQDMQNDNKNMSDLIAYRIKFTPHPHAGDKWCIYPSYDYAHCMVDSLENITHSLCTLEFDIRRPSYYWLLVALGLYQPHVWEYSRLNISHTMMSKRKLNRLVTEKWVDGWDDPRLLTLAGLRRRGVSATAINSFIRGIGITRSDNSLIRVDRLEYHIREELNKTASRTMVVLHPLKVVITNLEDGKVIDLDGKKWPDAPADEASSYYKVPFSKIVYIEKTDFRVKDSKDYYGLAPGKSALLRYAFPIKCTEVIYGDNPDDIVEIRAEYDPSKTSKPKGVLHWVAQPAPGVEPLKVEIRLFEKLFLSENPAELEDWLGDLNPHSKEVVKDAYAVPSLATAVVGDNFQFERLGYFAVDTDSTPEKLVFNRTVTLRDSYGKAGPK

SEQ ID NO: 7662 - DNA, 2163 bp, Hordeum vulgare
  CDS (1)..(2163)
atggagctcaaacgagcattcccccaggacagcctcccactttccatcatttcggctgctaagattgcaggtgttcctctaatcattgatccgacccttgcctcaggttcagtgcccacactacacttcagttctggggattttatacatggtgtcaacacaattctccggtacattgcacgtgctgcatctgtttccagcttctatggccaagaccatattcaggcatcacatgttgaccaatggctcgagtatgcaccactcattctgtcaggctctgaatttgaagctgcttgctcatttcttgatggatacttgtcatctcgaacctttttggttggttatggtttatcaattgctgatattgttgtgtggtcaaatctcacaggaactggtcaacgatgggaaagtctaaggaggtcaaagaaatatcagagccttgtccgctggttcaacagtgtagctgcagactatgcggatgcactagatgaagttacatctgcttatgttggaaagcgtggaattggcaaatctcctgctccaagcttgaaagaaaaggtgcctggtttgaaggagaatacgtcgggtcatgaaatagatctcccaggtgccacagttggcgaagtttgcgttcgttttgctccagagcctagcgggtatctccacattggtcatgcaaaggctgcactgttgaacaagtattttgcagaaagatataaagggcgtctaatagttcgatttgatgacacaaatccttctaaagaaagcaatgaatttgttgagaatgtcctgaaagatattgagacacttggtgttaaatacgatgtagttacatacacatcagatcattttccaaagctaatggaaatggctgaaagtttgattaagcagggaaaggcatatgttgatgatacacccaaggagcaaatgaggagtgaaaggatggatggtgtggaatctaagcgtagaaacagtactgtcgaggagaacttgtcgttgtggaaagagatggttaatggcaccaaaaggggtaccgagtgctgtgtacgtggtaaacttgacatgcaggacccaaacaaatcactccgagatcctgtttactaccgttgcaaccctgatccccatcatcgcgttggctcaaaatacaaggtctatccaacttatgactttgcttgcccatttgtggatgcactagaaggagtcactcatgctcttcgttcaagcgaataccatgatcggaatgcacagtactatcgtattcttcaagacatgggcctgcggagggtagaaatctatgagttcagcaggctgaatatggtttataccgttcttagcaagcgcaagcttctgtggttcgtccaaaacaggatggtggaggactggaccgacccacgctttcccactgtacaaggcatagtacgccgtggcttgaagattgaagcattgatccaatttatactggaacagggtgcttcaaaaaatctcaatcttatggagtgggataaactctggacaatcaacaagaagatagttgatccagtatgtggaaggcatactgctgtgctgaaagacaaatgtgtgcttttgacactcactaatggtccagaggaaccatttgttcgaatcttaccaaggcacaagaaacacgagggtgctgggaagaaggctacaacgttcgccaacagaatttggctagagtatgctgatgcatcagtcgttagcgtgggcgaggaagttactttgatggactggggaaatgctatcattagagaaatcaagacaaataatggaacagttactcaactagttggtgaactccatcttgaagggtctgtgaagatgacaaagctgaaactaacatggctatcagatattgaagatcttgtgtctctctctttggtagattttgactacctaattaataaaaagaagctggaagaagatgaggacttccttgacaatctcaatccatgcactcgacgagaagctttagctcttggggacccaaacatgcggaacgtcaagaaaggagaagttatacagctcgaaaggaaaggatattacaggtgtgatgttccatttgtccggtcgtccaaaccaattatgctttttgccattccagatggccggcagaagtccacgtcgattgttactggagcatag

SEQ ID NO: 7663 - protein, 720 aa, Hordeum vulgare
MELKRAFPQDSLPLSIISAAKIAGVPLIIDPTLASGSVPTLHFSSGDFIHGVNTILRYIARAASVSSFYGQDHIQASHVDQWLEYAPLILSGSEFEAACSFLDGYLSSRTFLVGYGLSIADIVVWSNLTGTGQRWESLRRSKKYQSLVRWFNSVAADYADALDEVTSAYVGKRGIGKSPAPSLKEKVPGLKENTSGHEIDLPGATVGEVCVRFAPEPSGYLHIGHAKAALLNKYFAERYKGRLIVRFDDTNPSKESNEFVENVLKDIETLGVKYDVVTYTSDHFPKLMEMAESLIKQGKAYVDDTPKEQMRSERMDGVESKRRNSTVEENLSLWKEMVNGTKRGTECCVRGKLDMQDPNKSLRDPVYYRCNPDPHHRVGSKYKVYPTYDFACPFVDALEGVTHALRSSEYHDRNAQYYRILQDMGLRRVEIYEFSRLNMVYTVLSKRKLLWFVQNRMVEDWTDPRFPTVQGIVRRGLKIEALIQFILEQGASKNLNLMEWDKLWTINKKIVDPVCGRHTAVLKDKCVLLTLTNGPEEPFVRILPRHKKHEGAGKKATTFANRIWLEYADASVVSVGEEVTLMDWGNAIIREIKTNNGTVTQLVGELHLEGSVKMTKLKLTWLSDIEDLVSLSLVDFDYLINKKKLEEDEDFLDNLNPCTRREALALGDPNMRNVKKGEVIQLERKGYYRCDVPFVRSSKPIMLFAIPDGRQKSTSIVTGA

SEQ ID NO: 7664 - DNA, 2388 bp, Triticum aestivum
  CDS (1)..(2388)
atggtcgacggcgagaaggccccggccccggccctgctgcagctggagacgctgctggcgctcggcctcgaccagcgcacggccgagaacgcgctggtcaatagcaaggtcaccgccaacctagccgccgtcgtagccgaggctggtataactggatgcgacaagtccgttgggaatcttctgtacgcagttgccacgaaatacccaaataatgcacttgtccatcgtcccgctctcattaactacatcgtttcgacgaagattaagaaccctgcacagctagatgctgctctgtcgtttcttaccaacactggtcctgaatctttggatattgggaagtttgaagaagcctgtggtgtaggtgtggttgtttctattgaagagattcagtcaactgttgctgaggttctaaaggaaaacatggaagctatattagagcagcggtatcacataaatgttggtggcctatgcggacaggtcaggaagcggcacccctggggcgatgctaaggcaacaaaggaggagattgagaagaagcttgctgagatactaggtccaaagacggaagctgacaatgtaaaaccagtgaaaaagaagaaggaaaaaccagcaaaagttgaggagaaaaaagttgcagtagccactgctgccccaccatctgaggaggaactgaatccttatacaatatttccccagccagaggaaaacaataaggttcatacagaaatattcttcagcgatgggaacatatggagggcacacaacacaaaggagatattagagaaacatcttaaggcaactggtggaaaagtgatgacccgtttcccgccagaacctaatggatatcttcatatcggtcatgctaaggctatgtttattgattttggattggctaaagagcgaaatggtcactgttatctcaggtttgatgacacaaatccagaagctgaaaagaaagaatatatagaccacattcaggagatagtcaagtggatgggatgggagccctataaagttacatatacaagtgattatttccaagatttatatgagcatgcagttgagttaatacggaaagggctagcctatgtggatcaccagactgcagaacaaatcaaggaatacagggaaaagaagatggatagtccatggagggataggcccattgaagagtctctgcagttatttgaagacatgcgacgcgggttgattgctgagggtgcagcaactctccgaatgaagcaggacatgcagaatgataacaagaacatgtctgatttaatagcatatagaataaaattcactcctcatccgcatgctggcgacaaatggtgtatctatccaagctatgactatgctcattgcatggtggattcacttgaaaacattacacattctttgtgcacgctcgagttcgacattcgtcgcccgtcatactactggctacttgttgccttgggcttgtaccagccatatgtttgggagtattcaaggctaaacatatcacatactatgatgtccaaaagaaagttgaatcggcttgtgacagagaagtgggtagatgggtgggatgatcctcgcttgttgactttggcaggactgaggcgacggggagtatcagcaaatgcgatcaattcatttatccgtggaattgggataacgagaagtgacaatagcttaattcgtgttgaccgtcttgaatatcatatcagagaagaactgaataaaacagcttctcgaaccatggtggttttgcatcctctaaaggttgtaataactaacttggaagatggaaaagtcatagaccttgatggaaaaaagtggcctgatgctcctgctgatgaagcttcgtcctactacaaggttcctttctcaaaaatcatctacattgaaaaaactgattttcgcgtgaaggactccaaagattactatggactggctcctggtaaatctgccctgctgaggtatgcattcccgataaaatgcacagaggttatttatggtgataatccagatgatattgttgaaattcgagccgagtatgacccttcaaagacctctaaacctaagggtgttctgcactgggttgcccagccagcacctggagttgatccgttaaaggttgaaataagattatttgagaaattattcctatctgagaatcccgccgaattggaagactggctgggtgatcttaacccgcactcaaaggaggtagtaaaggacgcctatgctgtaccttcactggccaccgcggttctgggcgacaagttccagtttgagcgacttggctacttcgctgtggacacggactcgacgcccgagaagcttgtgttcaacaggactgtaaccctgcgcgactcttatgggaaggctggacccaagtga

SEQ ID NO: 7665 - protein, 795 aa, Triticum aestivum
MVDGEKAPAPALLQLETLLALGLDQRTAENALVNSKVTANLAAVVAEAGITGCDKSVGNLLYAVATKYPNNALVHRPALINYIVSTKIKNPAQLDAALSFLTNTGPESLDIGKFEEACGVGVVVSIEEIQSTVAEVLKENMEAILEQRYHINVGGLCGQVRKRHPWGDAKATKEEIEKKLAEILGPKTEADNVKPVKKKKEKPAKVEEKKVAVATAAPPSEEELNPYTIFPQPEENNKVHTEIFFSDGNIWRAHNTKEILEKHLKATGGKVMTRFPPEPNGYLHIGHAKAMFIDFGLAKERNGHCYLRFDDTNPEAEKKEYIDHIQEIVKWMGWEPYKVTYTSDYFQDLYEHAVELIRKGLAYVDHQTAEQIKEYREKKMDSPWRDRPIEESLQLFEDMRRGLIAEGAATLRMKQDMQNDNKNMSDLIAYRIKFTPHPHAGDKWCIYPSYDYAHCMVDSLENITHSLCTLEFDIRRPSYYWLLVALGLYQPYVWEYSRLNISHTMMSKRKLNRLVTEKWVDGWDDPRLLTLAGLRRRGVSANAINSFIRGIGITRSDNSLIRVDRLEYHIREELNKTASRTMVVLHPLKVVITNLEDGKVIDLDGKKWPDAPADEASSYYKVPFSKIIYIEKTDFRVKDSKDYYGLAPGKSALLRYAFPIKCTEVIYGDNPDDIVEIRAEYDPSKTSKPKGVLHWVAQPAPGVDPLKVEIRLFEKLFLSENPAELEDWLGDLNPHSKEVVKDAYAVPSLATAVLGDKFQFERLGYFAVDTDSTPEKLVFNRTVTLRDSYGKAGPK

SEQ ID NO: 7666 - DNA, 2388 bp, Glycine max
  CDS (1)..(2388)
atgccggcgaaggacgacggctccgacaaggagaagtgcctcgatctctttctcaagatcggcttagacgagcgcacggctaaaaacacggtcgccaacaacaaagtcactgccaatctcacttccgtcatcgacgaggccggtgctactgatggatgcagccgaacggtcggaaattttctttacacggttgcgacgaagtaccctgcaaatgccttgccgcatcgcccaacattactacagtacattgtctcgttaaaggtgaaaacaactgcccagttagatgcagcattatcatttcttgctaccacaggctccgagaatcttgatttggaccggtttgaagaagcttgtggtgttggtgttgaggtttcagaagaagatatcaaacaagctgttagtgaagttgttgaggagaacaaggctacaattttggagctacgttatcgaacaaatgtgggtgagttgctggggcatgtgcgcaagaggctgccatggggtgatgcaaaaggttgccaaggcaacttgttgatgcaaaactatatgaacttacttggtgatcggacagcagcagatgatgaaaagccttctagaaagaagaaggagaaacctgctaaagtagaggataaggcagctcctgtttctacccctgaaaagtcacctgaagaagaccttaatccatttttaatattccctaatccagaggaaaatttcaaggtgcatactgaagtgccttttagtgatggtagtattttgagatgttgcaatacaagagatctgcttgacaaacacttaaaagcaacaggtggaaaagtcttgacccggtttccacccgaacctaatggatatttgcatattggccatgcaaaagcaatgtttattgattttgggttggcgaaagacagggatggaggtggcacttccaggtatgatgatacaaatcctgaagcagaaaagaaagagtatattgatcatattgaagaaattgtccagtggatgggttggaaaccatttaagattacttacacaagtgattacttccaagaattgtacgaattagcagtggagctcataaaaaagggtcatgcttatgttgatcatcagacacctgatgagataaaggagtatagggagaagaaactgaacagtccttggagagacagaccaatttcagagtcattgaaactctttgaggatatgaaaaatggcagtatcgaagaaggaaaagccactcttagaatgaagcaggacatgcagagtgataactacaatatgtatgaccttattgcatatagaattaagtttaccccacaccctcatgctggagacaaatggtgtatctatccaagttatgattatgcacactgcattgtggattctctagagaatatcacacattcactgtgtacacttgaatttgagacacgtcgtgcatcatactattggttgttgcatgcgttaggcatttaccaaccttatgtgtgggagtattcaaggttgaatgtctctaacacagttatgtcaaagcgtaagctaaatcgtctagttacagagaagtgggttgatgggtgggatgatcctcgtttgatgacactagctggtttgcggcgtagaggcatgaccccaactgcaatcaatgcttttgtccgaggaattggaataactagaagtgatggcactttgatttctgtggaacgccttgaatatcatgttagggaagaattgaacaaaacagcacctcgtgcaatggttgtcctacatccactcaaggttgtcattactaatcttgaagccaactcagcaattgaggttgatgcaaagaaatggcctgatgctcaagctgatgatgcttctgctttctacaagattccattttccaatgttgtatatattgaacattcggacttccggatgcaagattcaaaagattattatggccttgctcctgggaaatctgtgatactcagatatgcatttcctataaagtgcactgaagttattctagctgatgataatgagactattcttgaaattcgagccgagtatgatccttcaaagaagaccaagcctaagggggttctccattgggttgctcaaccttctcctggagttgatccattgaaggtggaagtcagattgtttgagaggctattcctatcagagaatcccgctgaacttgacaactggcttggcgatttgaacccaaattccaaagtgataattcccgatgcatatggtgtgtcttccatacagaatgcaaaagttggggacaatttccaatttgaaagattaggctattttgtggttgaccgggactcgacatcagaaaaacttgtttttaataggactgtcaccttaaagggcagctatagcaaaggtggaaagtag

SEQ ID NO: 7667 - protein, 795 aa, Glycine max
MPAKDDGSDKEKCLDLFLKIGLDERTAKNTVANNKVTANLTSVIDEAGATDGCSRTVGNFLYTVATKYPANALPHRPTLLQYIVSLKVKTTAQLDAALSFLATTGSENLDLDRFEEACGVGVEVSEEDIKQAVSEVVEENKATILELRYRTNVGELLGHVRKRLPWGDAKGCQGNLLMQNYMNLLGDRTAADDEKPSRKKKEKPAKVEDKAAPVSTPEKSPEEDLNPFLIFPNPEENFKVHTEVPFSDGSILRCCNTRDLLDKHLKATGGKVLTRFPPEPNGYLHIGHAKAMFIDFGLAKDRDGGGTSRYDDTNPEAEKKEYIDHIEEIVQWMGWKPFKITYTSDYFQELYELAVELIKKGHAYVDHQTPDEIKEYREKKLNSPWRDRPISESLKLFEDMKNGSIEEGKATLRMKQDMQSDNYNMYDLIAYRIKFTPHPHAGDKWCIYPSYDYAHCIVDSLENITHSLCTLEFETRRASYYWLLHALGIYQPYVWEYSRLNVSNTVMSKRKLNRLVTEKWVDGWDDPRLMTLAGLRRRGMTPTAINAFVRGIGITRSDGTLISVERLEYHVREELNKTAPRAMVVLHPLKVVITNLEANSAIEVDAKKWPDAQADDASAFYKIPFSNVVYIEHSDFRMQDSKDYYGLAPGKSVILRYAFPIKCTEVILADDNETILEIRAEYDPSKKTKPKGVLHWVAQPSPGVDPLKVEVRLFERLFLSENPAELDNWLGDLNPNSKVIIPDAYGVSSIQNAKVGDNFQFERLGYFVVDRDSTSEKLVFNRTVTLKGSYSKGGK

SEQ ID NO: 7668 - DNA, 2148 bp, Zea mays
  CDS (1)..(2148)
atggaggcagctttgtcattctccaaggacagcccaccaatttcgataatttgtgcagcaaagcttgtgggtctacccctaaccatcaatcatagcctcgctgctggctccgcacccaccctacagtttgcttctggagaatcactccatggtgtcaacccaatcatcctctacattgccagaggtgcaacaattccctccttatctggaaagaatgatattgagtttgggcatgttgttgaatggcttgaatatgcccccaccttcctttcaggctctgaatttgaaaatgcatgcttatttgttgatggattcttggcctcccggacctttctggttggtcatggcctgacaattgctgacattgcagtttggtcaaatcttgctggaattggtcagcggtgggagagtctaaggaaatcaaagaaataccaaaatcttgttcgctggttcaacagcatagattcagaatacaaagaggcactgaacgaagttgtggctgcatttgttgggaaacgaggtattggaaaatctcctgcacctagccttaaggagaaggtacatgactcaaaggacccatcagctccagaagttgatctccctggtgcaaaagttgggaaagtctgcgttcgttttgccccagagcctagtggttacctccatattgggcatgcaaaggctgcactattgaacaaatactttgctgaaagatatcaagggcgcttaatagttcgatttgatgacacaaacccttcaaaagaaagcaatgagtttgttgagaatcttttgaaagatattgagacgttggggatcaaatatgatgctgtcacatacacatctgattatttcccaaagctaatggaaatggctgagagtttgataaagcagggtaaagcatatattgatgacacaccaaaggagcaaatgaggaaagagaggatggacggtattgagtcaaggtgcagaaataataccgtggaggaaaatctctcattatggaaagagatggttaatggaactgaaaggggcatgcagtgctgtgtacggggtaaacttgacatgcaggatcctaacaagtcactcagggatcctgtttactaccgctgtaatactgatccacaccatcgtgttggttcgaagtacaaggtctatccaacatatgactttgcgtgcccatttgttgatgcattggagggggtaacacatgctcttcgttccagtgaatatcatgacagaaatgcacaatattatcgaattcttcaagacatggggttgaggagagtggaaatttatgaattcagccgattgaatatggtttacactcttctaagcaagcgaaagcttctttggtttgtacaaaacaagaaggtcgaagattggacagacccacgttttcccactgtccaaggcatagtacgtcggggcttgaaggttgaggcattgatacagtttatactccaacagggtgcttcaaaaaatctgaatctcatggagtgggataaactctggacaatcaacaagaagataattgatccagtgtgcgcaaggcatactgctgtgctaaaagaccagcgtgtcatctttactcttacaaatggtccagaggagccatttgttcgaattttaccaagacataagaaatttgagggtgctggaaagaaggctacaacctttgccaacagaatttggctcgattatgctgatgcggcagctattagcaagggtgaggaagtaacccttatggattgggggaatgctattgttaaagagatcaaggtggagagtggagtaattactgaactagttggagaactgcatcttgaggggtctgtgaaaacaacaaaattgaagatcacatggctagcagatatagaggagctagttcccctttcattggttgaatttgattacctcatcagcaagaaaaagctagaggaagacgaggacttcctcgacaatctcaacccttgcactcgacgggaaatcccagcccttggagatgcgaacatgaggaacatcaagcgtggagagatcatacagctcgagaggaaaggctactataggtgtgatgccccttttatcagatcgtccaaaccggtggtcctgtttgcgatcccagatggcaggcagcaggcctcgcttagctag

SEQ ID NO: 7669 - protein, 715 aa, Zea mays
MEAALSFSKDSPPISIICAAKLVGLPLTINHSLAAGSAPTLQFASGESLHGVNPIILYIARGATIPSLSGKNDIEFGHVVEWLEYAPTFLSGSEFENACLFVDGFLASRTFLVGHGLTIADIAVWSNLAGIGQRWESLRKSKKYQNLVRWFNSIDSEYKEALNEVVAAFVGKRGIGKSPAPSLKEKVHDSKDPSAPEVDLPGAKVGKVCVRFAPEPSGYLHIGHAKAALLNKYFAERYQGRLIVRFDDTNPSKESNEFVENLLKDIETLGIKYDAVTYTSDYFPKLMEMAESLIKQGKAYIDDTPKEQMRKERMDGIESRCRNNTVEENLSLWKEMVNGTERGMQCCVRGKLDMQDPNKSLRDPVYYRCNTDPHHRVGSKYKVYPTYDFACPFVDALEGVTHALRSSEYHDRNAQYYRILQDMGLRRVEIYEFSRLNMVYTLLSKRKLLWFVQNKKVEDWTDPRFPTVQGIVRRGLKVEALIQFILQQGASKNLNLMEWDKLWTINKKIIDPVCARHTAVLKDQRVIFTLTNGPEEPFVRILPRHKKFEGAGKKATTFANRIWLDYADAAAISKGEEVTLMDWGNAIVKEIKVESGVITELVGELHLEGSVKTTKLKITWLADIEELVPLSLVEFDYLISKKKLEEDEDFLDNLNPCTRREIPALGDANMRNIKRGEIIQLERKGYYRCDAPFIRSSKPVVLFAIPDGRQQASLS

SEQ ID NO: 7670 - DNA, 2391 bp, Zea mays
  CDS (1)..(2391)
atgggcacagggggagacggggataaggcggggccggcgctgccgctggaggcgcttttggcgctcgggctcgaccagcgcaccgccgagaacgcgctcgtcaacgccaaggtcaccgccaacctcgccgccgtcatagctgaggctggtataaaggaatgtgacaagtcaattggtaatcttctatatgcagttgccaccaagtacccaactaatgcacttgttcatcgccctgtccttattagctatgtcttgtcaacaaagataaagagccctgcacagctagatgctgccctctcatttcttactaatactggtcctgattctctagatgtggacaagtttgaagaagcatgtggtgtaggcgtggttgtttctattgaggaaattaaatctactgttactgacattcttgaggagaatatggaagctataaaggagcagcggtatcacataaatgttggtatgctatgtggacaggttaggaagagacacccctggggtgatgctaaggcagtaaaggaggaaattgacaagaggcttgcagaaatcctaggtccaaagacagaagctgacagtataaaaccagtgaaaaagaagaaggaaaaaacagcaaaagttgaggagaaaaaagttgcagttgccactactgccccaccatctgaggaggaattgaacccgtatactatatttccccaaccagaggaaaactttaaggttcatacagaaatatttttcagtgatgggaacatatggagagcacataacacaaaggaaattttggaaaaacatctcaaggcaactggaggaaaagtgatgacccgttttccaccagaacctaatggatatcttcatattggtcatgccaaggctatgtttatcgattttggtctggctaaggagcgaaatggccattgctaccttaggtttgacgacacaaatccggaagctgaaaagaaagaatacatagatcacattcaggaaatcgtccattggatgggatgggagccctacaaagtaacatacacgagtgactatttccaagctttgtatgaacatgccgttgagttaatacagaaagggctagcatatgtggatcaccagactgcagaagaaatcaaggaatacagggaaaagaagatggatagtccatggaggggtaggccaattgaagagtctctgaaattatttgaagacatgaggcgtgggttgattgcagagggtgcagcaactctccgtatgaagcaggatatgcaaaatgagaacaaaaatatgtctgacttaatagcatatagaataaaattcaccccccatccacatgctggcgacaagtggtgtgtctatccgagctatgactacgctcattgcatggtggattctcttgaaaacatcacacattcgctgtgcacacttgagtttgacatacgtcgcccttcatactactggctacttgttgccttgggcctttatcaaccatatgtgtgggaatattcgaggctaaacatatcaaatactgtgatgtctaaaagaaagttgaatcgacttgtgacagagaagtgggtagatgggtgggatgatccccgcttgttgacactggctggtctccggcgacggggagtatcatcaactgcaataaattcctttattcgtggaatcgggataacgagaagtgacaatagcttaattcgtgttgatcgtctagaatatcacatcagggaggagcttaacaaaacagcccctcgaaccatggttgttttgcgacctctaaaggtggtaataactaacttggaagaaggaaaagtactagaccttgatggcaaaatgtggcctgatgcttctgatactgatgcttcctcccactataaggttccgttctcaagaactgtctacattgagaaaactgattttcgcctaaaggactcaaaagactactatgggctagcccctggtaaatctgtcatgctaaggtatgcgttccccataaaatgcacagatgttatctctggtgatagtcctgatgatattgttgaaattcgagctgaatatgatcctttgaagacttctaaactgaagggtgttcttcactggattgctgagccagcacctggtgtagagccattgaaggtggaagtaagattattcgagaaattgttcatgtcagagaatcctgctgaattggaagattggcttggcgatcttaacccacactcgaaagaggtgataaaggatgcttatgctgtaccatcacttgccactgcggttctgggtgacaagttccagtttgagcggcttggttacttcgccgtggatactgactccacacctgagaaactcgtgttcaacagaactgttaccctccgtgattcgttcgggaaagctggacccaagtga

SEQ ID NO: 7671 - protein, 796 aa, Zea mays
MGTGGDGDKAGPALPLEALLALGLDQRTAENALVNAKVTANLAAVIAEAGIKECDKSIGNLLYAVATKYPTNALVHRPVLISYVLSTKIKSPAQLDAALSFLTNTGPDSLDVDKFEEACGVGVVVSIEEIKSTVTDILEENMEAIKEQRYHINVGMLCGQVRKRHPWGDAKAVKEEIDKRLAEILGPKTEADSIKPVKKKKEKTAKVEEKKVAVATTAPPSEEELNPYTIFPQPEENFKVHTEIFFSDGNIWRAHNTKEILEKHLKATGGKVMTRFPPEPNGYLHIGHAKAMFIDFGLAKERNGHCYLRFDDTNPEAEKKEYIDHIQEIVHWMGWEPYKVTYTSDYFQALYEHAVELIQKGLAYVDHQTAEEIKEYREKKMDSPWRGRPIEESLKLFEDMRRGLIAEGAATLRMKQDMQNENKNMSDLIAYRIKFTPHPHAGDKWCVYPSYDYAHCMVDSLENITHSLCTLEFDIRRPSYYWLLVALGLYQPYVWEYSRLNISNTVMSKRKLNRLVTEKWVDGWDDPRLLTLAGLRRRGVSSTAINSFIRGIGITRSDNSLIRVDRLEYHIREELNKTAPRTMVVLRPLKVVITNLEEGKVLDLDGKMWPDASDTDASSHYKVPFSRTVYIEKTDFRLKDSKDYYGLAPGKSVMLRYAFPIKCTDVISGDSPDDIVEIRAEYDPLKTSKLKGVLHWIAEPAPGVEPLKVEVRLFEKLFMSENPAELEDWLGDLNPHSKEVIKDAYAVPSLATAVLGDKFQFERLGYFAVDTDSTPEKLVFNRTVTLRDSFGKAGPK

SEQ ID NO: 7672 - DNA, 2148 bp, Zea mays
  CDS (1)..(2148)
atggaggcagctttgtcattctccaaggacagcccaccaatttcgataatttgtgctgcaaagattgtgggtctacccctaaccatcaatcatagcctcgctgctggctcggcacccaccctacagtttgcttctggagaatcactccatggtgtcaacccaatcatcctctacattgctagaggtgcatcaattgcctccttatctggaaagaatgatattgagtttgggcatgttgttgaatggcttgaatatgcccccaccttcctttcaggctctgaatttgaaaatgcatgcttatttgttgatggattcttggcctcccggacctttctggttggtcatggcctgacaattgctgacattgcagtttggtcaaatcttgctggaattggtcagcggtgggagagtctaaggaaatcaaagaaataccaaaatcttgttcgctggttcaacagcatagattcagaatacaaagaggcactgaacgaagttgtggctgcatttgttgggaaacgaggtattggaaaatctcctgcacctagccttaaggagaaggtacatgactcaaaggacccatcagctccagaagttgatctccctggtgcaaaagttgggaaagtctgcgttcgttttgccccagagcctagtggttacctccatattgggcatgcaaaggctgcactattgaacaaatactttgctgaaagatatcaagggcgcttaatagttcgatttgatgacacaaacccttcaaaagaaagcaatgagtttgttgagaatcttttgaaagatattgagacgttggggatcaaatatgatgctgtcacatacacatctgattatttcccaaagctaatggaaatggctgagagtttgataaagcagggtaaagcatatattgatgacacaccaaaggagcaaatgaggaaagagaggatggacggtattgagtcaaggtgcagaaataataccgtggaggaaaatctctcattatggaaagagatggttaatggaactgaaaggggcatgcagtgctgtgtacggggtaaacttgacatgcaggatcctaacaagtcactcagggatcctgtttactaccgctgtaatactgatccacaccatcgtgttggttcgaagtacaaggtctatccaacatatgactttgcgtgcccatttgttgatgcattggagggggtaacacatgctcttcgttccagtgaatatcatgacagaaatgcacaatattatcgaattcttcaagacatggggttgaggagagtagaaatttatgagttcagccgattgaatatggtttacactcttctaagcaagcgaaagcttctttggtttgtacaaaacaagaaggtcgaagattggacagacccacgttttcccactgtccaaggcatagtacgtcggggcttgaaggttgaggcattgatacagtttatactccaacagggtgcttcaaaaaatctgaatctcatggagtgggataaactctggacaatcaacaagaagataattgatccagtgtgcgcaaggcatactgctgtgctaaaagaccagcgtgtcatcttcactcttacaaatggtccagaggagccatttgttcgaattttaccaagacataagaaatttgagggtgctggaaagaaggctacaacctttgccaacagaatttggctcgattatgctgatgcggcagctattagcaagggtgaggaagtaacccttatggattgggggaatgctattgttaaagagatcaaggtggagagtggagtaattactgaactagttggagaactgcatcttgaggggtctgtgaaaacaacaaaattgaagatcacatggctagcagatatagaggagctagttcccctttcattggttgaatttgattacctcatcagcaagaaaaagctagaggaagacgaggacttcctcgacaatctcaacccttgcactcgacgggaaatcccagcccttggagatgcgaacatgaggaacatcaagcgtggagagatcatacagctcgagaggaaaggctactataggtgtgatgccccttttatcagatcgtccaaaccggtggtcctgtttgcgatcccagatggcaggcagcaggcctcgcttagctag

SEQ ID NO: 7673 - protein, 715 aa, Zea mays
MEAALSFSKDSPPISIICAAKIVGLPLTINHSLAAGSAPTLQFASGESLHGVNPIILYIARGASIASLSGKNDIEFGHVVEWLEYAPTFLSGSEFENACLFVDGFLASRTFLVGHGLTIADIAVWSNLAGIGQRWESLRKSKKYQNLVRWFNSIDSEYKEALNEVVAAFVGKRGIGKSPAPSLKEKVHDSKDPSAPEVDLPGAKVGKVCVRFAPEPSGYLHIGHAKAALLNKYFAERYQGRLIVRFDDTNPSKESNEFVENLLKDIETLGIKYDAVTYTSDYFPKLMEMAESLIKQGKAYIDDTPKEQMRKERMDGIESRCRNNTVEENLSLWKEMVNGTERGMQCCVRGKLDMQDPNKSLRDPVYYRCNTDPHHRVGSKYKVYPTYDFACPFVDALEGVTHALRSSEYHDRNAQYYRILQDMGLRRVEIYEFSRLNMVYTLLSKRKLLWFVQNKKVEDWTDPRFPTVQGIVRRGLKVEALIQFILQQGASKNLNLMEWDKLWTINKKIIDPVCARHTAVLKDQRVIFTLTNGPEEPFVRILPRHKKFEGAGKKATTFANRIWLDYADAAAISKGEEVTLMDWGNAIVKEIKVESGVITELVGELHLEGSVKTTKLKITWLADIEELVPLSLVEFDYLISKKKLEEDEDFLDNLNPCTRREIPALGDANMRNIKRGEIIQLERKGYYRCDAPFIRSSKPVVLFAIPDGRQQASLS

SEQ ID NO: 7674 - DNA, 25 bp, Artificial sequence
  primer
atgtcttctgtagaagaattgactc

SEQ ID NO: 7675 - DNA, 24 bp, Artificial sequence
  primer
tcacttggaagttgcgtccttcaa

SEQ ID NO: 7676 - protein, 834 aa, Artificial sequence
  consensus sequence
  Variant (2)..(21): Xaa in position 2 to 21 is any amino acid
  Variant (22)..(27): Xaa in position 22 to 27 is any or no amino acid
  Variant (29)..(37): Xaa in position 29 to 37 is any amino acid
  Variant (39)..(54): Xaa in position 39 to 54 is any amino acid
  Variant (55)..(59): Xaa in position 55 to 59 is any or no amino acid
  Variant (61)..(64): Xaa in position 61 to 64 is any amino acid
  Variant (66)..(66): Xaa in position 66 is any amino acid
  Variant (68)..(111): Xaa in position 68 to 111 is any amino acid
  Variant (112)..(114): Xaa in position 112 to 114 is any or no amino acid
  Variant (116)..(133): Xaa in position 116 to 133 is any amino acid
  Variant (134)..(134): Xaa in position 134 is any or no amino acid
  Variant (136)..(136): Xaa in position 136 is any amino acid
  Variant (138)..(167): Xaa in position 138 to 167 is any amino acid
  Variant (168)..(221): Xaa in position 168 to 221 is any or no amino acid
  Variant (223)..(225): Xaa in position 223 to 225 is any amino acid
  Variant (226)..(227): Xaa in position 226 to 227 is any or no amino acid
  Variant (229)..(229): Xaa in position 229 is any amino acid
  Variant (231)..(231): Xaa in position 231 is any amino acid
  Variant (241)..(241): Xaa in position 241 is any amino acid
  Variant (247)..(247): Xaa in position 247 is any amino acid
  Variant (250)..(253): Xaa in position 250 to 253 is any amino acid
  Variant (255)..(256): Xaa in position 255 to 256 is any amino acid
  Variant (258)..(261): Xaa in position 258 to 261 is any amino acid
  Variant (263)..(266): Xaa in position 263 to 266 is any amino acid
  Variant (268)..(268): Xaa in position 268 is any amino acid
  Variant (275)..(275): Xaa in position 275 is any amino acid
  Variant (277)..(283): Xaa in position 277 to 283 is any amino acid
  Variant (285)..(289): Xaa in position 285 to 289 is any amino acid
  Variant (291)..(291): Xaa in position 291 is any amino acid
  Variant (293)..(294): Xaa in position 293 to 294 is any amino acid
  Variant (296)..(297): Xaa in position 296 to 297 is any amino acid
  Variant (298)..(298): Xaa in position 298 is any or no amino acid
  Variant (301)..(301): Xaa in position 301 is any amino acid
  Variant (306)..(306): Xaa in position 306 is any amino acid
  Variant (307)..(307): Xaa in position 307 is any or no amino acid
  Variant (310)..(311): Xaa in position 310 to 311 is any amino acid
  Variant (313)..(314): Xaa in position 313 to 314 is any amino acid
  Variant (317)..(318): Xaa in position 317 to 318 is any amino acid
  Variant (320)..(320): Xaa in position 320 is any amino acid
  Variant (324)..(334): Xaa in position 324 to 334 is any amino acid
  Variant (336)..(341): Xaa in position 336 to 341 is any amino acid
  Variant (342)..(352): Xaa in position 342 to 352 is any or no amino acid
  Variant (354)..(357): Xaa in position 354 to 357 is any amino acid
  Variant (360)..(360): Xaa in position 360 is any amino acid
  Variant (362)..(363): Xaa in position 362 to 363 is any amino acid
  Variant (365)..(366): Xaa in position 365 to 366 is any amino acid
  Variant (368)..(369): Xaa in position 368 to 369 is any amino acid
  Variant (371)..(379): Xaa in position 371 to 379 is any amino acid
  Variant (381)..(381): Xaa in position 381 is any amino acid
  Variant (383)..(390): Xaa in position 383 to 390 is any amino acid
  Variant (391)..(393): Xaa in position 391 to 393 is any or no amino acid
  Variant (395)..(396): Xaa in position 395 to 396 is any amino acid
  Variant (400)..(403): Xaa in position 400 to 403 is any amino acid
  Variant (406)..(408): Xaa in position 406 to 408 is any amino acid
  Variant (410)..(410): Xaa in position 410 is any amino acid
  Variant (413)..(413): Xaa in position 413 is any amino acid
  Variant (417)..(417): Xaa in position 417 is any amino acid
  Variant (420)..(421): Xaa in position 420 to 421 is any amino acid
  Variant (424)..(425): Xaa in position 424 to 425 is any amino acid
  Variant (428)..(428): Xaa in position 428 is any amino acid
  Variant (430)..(430): Xaa in position 430 is any amino acid
  Variant (438)..(438): Xaa in position 438 is any amino acid
  Variant (441)..(443): Xaa in position 441 to 443 is any amino acid
  Variant (445)..(445): Xaa in position 445 is any amino acid
  Variant (448)..(448): Xaa in position 448 is any amino acid
  Variant (451)..(462): Xaa in position 451 to 462 is any amino acid
  Variant (464)..(465): Xaa in position 464 to 465 is any amino acid
  Variant (469)..(471): Xaa in position 469 to 471 is any amino acid
  Variant (473)..(474): Xaa in position 473 to 474 is any amino acid
  Variant (479)..(482): Xaa in position 479 to 482 is any amino acid
  Variant (484)..(487): Xaa in position 484 to 487 is any amino acid
  Variant (489)..(490): Xaa in position 489 to 490 is any amino acid
  Variant (496)..(497): Xaa in position 496 to 497 is any amino acid
  Variant (499)..(503): Xaa in position 499 to 503 is any amino acid
  Variant (507)..(510): Xaa in position 507 to 510 is any amino acid
  Variant (512)..(514): Xaa in position 512 to 514 is any amino acid
  Variant (516)..(519): Xaa in position 516 to 519 is any amino acid
  Variant (521)..(521): Xaa in position 521 is any amino acid
  Variant (523)..(537): Xaa in position 523 to 537 is any amino acid
  Variant (538)..(538): Xaa in position 538 is any or no amino acid
  Variant (540)..(541): Xaa in position 540 to 541 is any amino acid
  Variant (543)..(547): Xaa in position 543 to 547 is any amino acid
  Variant (549)..(549): Xaa in position 549 is any amino acid
  Variant (551)..(551): Xaa in position 551 is any amino acid
  Variant (554)..(557): Xaa in position 554 to 557 is any amino acid
  Variant (559)..(574): Xaa in position 559 to 574 is any amino acid
  Variant (575)..(577): Xaa in position 575 to 577 is any or no amino acid
  Variant (579)..(587): Xaa in position 579 to 587 is any amino acid
  Variant (588)..(592): Xaa in position 588 to 592 is any or no amino acid
  Variant (594)..(598): Xaa in position 594 to 598 is any amino acid
  Variant (600)..(602): Xaa in position 600 to 602 is any amino acid
  Variant (604)..(614): Xaa in position 604 to 614 is any amino acid
  Variant (615)..(615): Xaa in position 615 is any or no amino acid
  Variant (617)..(620): Xaa in position 617 to 620 is any amino acid
  Variant (621)..(623): Xaa in position 621 to 623 is any or no amino acid
  Variant (625)..(651): Xaa in position 625 to 651 is any amino acid
  Variant (652)..(662): Xaa in position 652 to 662 is any or no amino acid
  Variant (664)..(664): Xaa in position 664 is any amino acid
  Variant (666)..(669): Xaa in position 666 to 669 is any amino acid
  Variant (671)..(677): Xaa in position 671 to 677 is any amino acid
  Variant (678)..(684): Xaa in position 678 to 684 is any or no amino acid
  Variant (686)..(686): Xaa in position 686 is any amino acid
  Variant (688)..(691): Xaa in position 688 to 691 is any amino acid
  Variant (694)..(697): Xaa in position 694 to 697 is any amino acid
  Variant (699)..(702): Xaa in position 699 to 702 is any amino acid
  Variant (703)..(708): Xaa in position 703 to 708 is any or no amino acid
  Variant (710)..(712): Xaa in position 710 to 712 is any amino acid
  Variant (715)..(721): Xaa in position 715 to 721 is any amino acid
  Variant (722)..(722): Xaa in position 722 is any or no amino acid
  Variant (724)..(738): Xaa in position 724 to 738 is any amino acid
  Variant (739)..(793): Xaa in position 739 to 793 is any or no amino acid
  Variant (795)..(796): Xaa in position 795 to 796 is any amino acid
  Variant (798)..(798): Xaa in position 798 is any amino acid
  Variant (802)..(803): Xaa in position 802 to 803 is any amino acid
  Variant (805)..(812): Xaa in position 805 to 812 is any amino acid
  Variant (813)..(826): Xaa in position 813 to 826 is any or no amino acid
  Variant (828)..(828): Xaa in position 828 is any amino acid
  Variant (830)..(831): Xaa in position 830 to 831 is any amino acid
  Variant (833)..(833): Xaa in position 833 is any amino acid
LXXXXXXXXXXXXXXXXXXXXXXXXXXIXXXXXXXXXQXXXXXXXXXXXXXXXXXXXXXFXXXXGXGXXXXXXXXXXXXXXXXXXXXXXXXXXXXXXXXXXXXXXXXXXXXXXXWXXXXXXXXXXXXXXXXXXXGXKXXXXXXXXXXXXXXXXXXXXXXXXXXXXXXXXXXXXXXXXXXXXXXXXXXXXXXXXXXXXXXXXXXXXXXXXXXXXXXXXXXXXHXXXXXGXVXTRFPPEPNGXLHIGHXKAXXXXFXXAXXXXGXXXXRXDDTNPEXEXXXXXXXIXXXXXWXGXXPXXXTYXSDYFXXLYXXAXXLIXXGXAYVXXXXXXXXXXXRXXXXXXXXXXXXXXXXXRXXXXEEXLXXFXXMXXGXXXXXXXXXRXKXXXXXXXXXXXDXXAYRXXXXPHXXXGXKWXIYPXYDXXHCXXDSXEXITHSLCTXEFXXXRXSYXWLXXXXXXXXXXXXEXXRLNXXXTXXSKRKXXXXVXXXXVXXWDDPRXXTXXXXXRRGXXXXAXXXFXXXXGXTXXXXXXXXXXXXXXXXRXXLXXXXXRXMXVLXXXXVXXXXXXXXXXXXXXXXXXXPXXXXXXXXXXXXXXFXXXXXIXXXDXXXXXXXXXXXXLXXXXXXXLXXXXXXXXXXXXXXXXXXXXXXXXXXXXXXXXXXXXXXKXKXXXXWXXXXXXXXXXXXXXEXRXXXXLFXXXXPXXXXXXXXXXLXXXNPXXXXXXXXAXXXXXXXXXXXXXXXXXXXXXXXXXXXXXXXXXXXXXXXXXXXXXXXXXXXXXXXXXXXXXXXXXXXXXXQXXRXGYFXXDXXXXXXXXXXXXXXXXXXXXXXVXNXXVXL

SEQ ID NO: 7677 - protein, 58 aa, Artificial sequence
  protein pattern
  Variant (2)..(3): Xaa in position 2 to 3 is any amino acid
  Variant (7)..(7): Xaa in position 7 is Ile or Val
  Variant (8)..(10): Xaa in position 8 to 10 is any amino acid
  Variant (11)..(11): Xaa in position 11 is Pro or Ser
  Variant (13)..(13): Xaa in position 13 is any amino acid
  Variant (14)..(14): Xaa in position 14 is His, Lys or Arg
  Variant (15)..(15): Xaa in position 15 is Ala or Thr
  Variant (16)..(16): Xaa in position 16 is Ala or Gly
  Variant (17)..(18): Xaa in position 17 to 18 is any amino acid
  Variant (20)..(20): Xaa in position 20 is any amino acid
  Variant (21)..(21): Xaa in position 21 is Ile or Val
  Variant (24)..(24): Xaa in position 24 is Ser or Thr
  Variant (27)..(27): Xaa in position 27 is Phe or Tyr
  Variant (28)..(28): Xaa in position 28 is Ala or Thr
  Variant (31)..(31): Xaa in position 31 is any amino acid
  Variant (32)..(32): Xaa in position 32 is Cys or Val
  Variant (35)..(35): Xaa in position 35 is Phe, Ile, Leu or Met
  Variant (37)..(37): Xaa in position 37 is any amino acid
  Variant (38)..(38): Xaa in position 38 is Ile or Val
  Variant (39)..(39): Xaa in position 39 is Ser or Thr
  Variant (45)..(45): Xaa in position 45 is any amino acid
  Variant (48)..(49): Xaa in position 48 to 49 is any amino acid
  Variant (50)..(50): Xaa in position 50 is any or no amino acid
  Variant (52)..(52): Xaa in position 52 is any amino acid
  Variant (53)..(53): Xaa in position 53 is any or no amino acid
  Variant (56)..(56): Xaa in position 56 is any amino acid
DXXAYRXXXXXHXXXXXXWXXYPXYDXXHCXXDSXEXXXHSLCTXEFXXXRXXSYXWL

SEQ ID NO: 7678 - protein, 32 aa, Artificial sequence
  protein pattern
  Variant (2)..(8): Xaa in position 2 to 8 is any amino acid
  Variant (9)..(9): Xaa in position 9 is Ile or Val
  Variant (10)..(10): Xaa in position 10 is any amino acid
  Variant (20)..(20): Xaa in position 20 is any amino acid
  Variant (26)..(26): Xaa in position 26 is Ala, Ser or Val
  Variant (29)..(29): Xaa in position 29 is Ile or Met
  Variant (30)..(30): Xaa in position 30 is any amino acid
  Variant (31)..(31): Xaa in position 31 is Phe, Ile or Val
  Variant (32)..(32): Xaa in position 32 is Asp or Asn
HXXXXXXXXXTRFPPEPNGXLHIGHXKAXXXX

SEQ ID NO: 7679 - protein, 26 aa, Artificial sequence
  protein pattern
  Variant (2)..(2): Xaa in position 2 is His or Tyr
  Variant (3)..(3): Xaa in position 3 is Ala, Ser or Thr
  Variant (6)..(6): Xaa in position 6 is any amino acid
  Variant (8)..(8): Xaa in position 8 is Asp, Asn, Pro or Gln
  Variant (9)..(9): Xaa in position 9 is any amino acid
  Variant (11)..(13): Xaa in position 11 to 13 is any amino acid
  Variant (15)..(16): Xaa in position 15 to 16 is any amino acid
  Variant (19)..(20): Xaa in position 19 to 20 is any amino acid
  Variant (22)..(22): Xaa in position 22 is any amino acid
  Variant (23)..(23): Xaa in position 23 is Ala, Gly or Thr
  Variant (24)..(24): Xaa in position 24 is Phe or Tyr
  Variant (25)..(25): Xaa in position 25 is Ile or Val
  Variant (26)..(26): Xaa in position 26 is Cys or Asp
TXXSDXFXXLXXXAXXLIXXGXXXXX

SEQ ID NO: 7680 - protein, 21 aa, Artificial sequence
  protein pattern
  Variant (2)..(2): Xaa in position 2 is Ala or Gly
  Variant (3)..(3): Xaa in position 3 is any amino acid
  Variant (5)..(8): Xaa in position 5 to 8 is any amino acid
  Variant (10)..(10): Xaa in position 10 is any amino acid
  Variant (11)..(11): Xaa in position 11 is Cys, Gly or Thr
  Variant (12)..(13): Xaa in position 12 to 13 is any amino acid
  Variant (15)..(15): Xaa in position 15 is Phe or Tyr
FXXAXXXXGXXXXRXDDTNPE

SEQ ID NO: 7681 - protein, 18 aa, Artificial sequence
  protein pattern
  Variant (2)..(2): Xaa in position 2 is any amino acid
  Variant (3)..(3): Xaa in position 3 is Gln or Arg
  Variant (4)..(4): Xaa in position 4 is Pro, Ser or Thr
  Variant (5)..(5): Xaa in position 5 is any amino acid
  Variant (6)..(6): Xaa in position 6 is Glu, Gln or Ser
  Variant (7)..(7): Xaa in position 7 is any amino acid
  Variant (8)..(8): Xaa in position 8 is Asn or Ser
  Variant (9)..(9): Xaa in position 9 is Ile, Leu or Met
  Variant (10)..(11): Xaa in position 10 to 11 is any amino acid
  Variant (13)..(13): Xaa in position 13 is Asp, Glu or Arg
  Variant (14)..(14): Xaa in position 14 is any amino acid
  Variant (16)..(16): Xaa in position 16 is Lys or Arg
  Variant (17)..(17): Xaa in position 17 is any amino acid
RXXXXXXXXXXFXXMXXG

SEQ ID NO: 7682 - protein, 26 aa, Artificial sequence
  protein pattern
  Variant (2)..(3): Xaa in position 2 to 3 is any or no amino acid
  Variant (5)..(8): Xaa in position 5 to 8 is any amino acid
  Variant (9)..(9): Xaa in position 9 is any or no amino acid
  Variant (11)..(11): Xaa in position 11 is any amino acid
  Variant (13)..(13): Xaa in position 13 is any amino acid
  Variant (14)..(14): Xaa in position 14 is Ile, Leu or Val
  Variant (15)..(15): Xaa in position 15 is Leu or Pro
  Variant (16)..(16): Xaa in position 16 is any amino acid
  Variant (17)..(17): Xaa in position 17 is Gly or Pro
  Variant (18)..(18): Xaa in position 18 is Ile, Leu or Val
  Variant (19)..(19): Xaa in position 19 is any amino acid
  Variant (20)..(20): Xaa in position 20 is Ile, Leu or Val
  Variant (21)..(21): Xaa in position 21 is any amino acid
  Variant (22)..(22): Xaa in position 22 is Ile, Leu or Val
  Variant (23)..(23): Xaa in position 23 is any amino acid
  Variant (24)..(24): Xaa in position 24 is Asp or Asn
  Variant (25)..(25): Xaa in position 25 is any amino acid
  Variant (26)..(26): Xaa in position 26 is Asp, Glu, Pro or Ser
RXXLXXXXXRXMXXXXXXXXXXXXXX

SEQ ID NO: 7683 - protein, 15 aa, Artificial sequence
  protein pattern
  Variant (2)..(2): Xaa in position 2 is any amino acid
  Variant (3)..(4): Xaa in position 3 to 4 is any or no amino acid
  Variant (6)..(6): Xaa in position 6 is any amino acid
  Variant (7)..(7): Xaa in position 7 is Ala or Gly
  Variant (8)..(9): Xaa in position 8 to 9 is Phe or Tyr
  Variant (10)..(10): Xaa in position 10 is Ala, Cys, Ser, Thr or Val
  Variant (11)..(11): Xaa in position 11 is Leu, Met or Val
  Variant (13)..(14): Xaa in position 13 to 14 is any amino acid
  Variant (15)..(15): Xaa in position 15 is Ser or Thr
FXXXRXXXXXXDXXX

SEQ ID NO: 7684 - protein, 14 aa, Artificial sequence
  protein pattern
  Variant (2)..(2): Xaa in position 2 is any amino acid
  Variant (4)..(7): Xaa in position 4 to 7 is any amino acid
  Variant (10)..(11): Xaa in position 10 to 11 is any amino acid
  Variant (12)..(12): Xaa in position 12 is Asp, Glu or Lys
  Variant (13)..(13): Xaa in position 13 is Asp, Asn, Pro or Thr
EXRXXXXLFXXXXP

SEQ ID NO: 7685 - DNA, 1356 bp, Saccharomyces cerevisiae
  CDS (1)..(1356)
atggacggaaatgatcacaaagtcgaaaatttaggagatgtagacaaattttattccagaatacgctggaataaccaattttcatatatggccactctgccgccccacctacaaagcgaaatggaaggtcagaaatcattgctaatgcgatatgatacttataggaaggaaagttcttcttttagtggtgaaggcaagaaagttactctgcagcatgttcctacagatttttcagaagcatcacaagcagtgattagcaagaaagatcacgatacgcatgcatctgcttttgtgaataaaattttccaaccagaggttgctgaagaacttatagttaatcgatacgaaaaacttctgtcacaaaggccggaatggcatgcaccctggaaactttcacgcgttatcaatggccatcttggatgggtacgatgcgttgcaatcgatcctgttgacaacgaatggttcatcaccggaagtaatgatacgacaatgaaagtttgggatcttgcaacaggaaaattaaaaactaccttagcagggcatgtaatgacagtgagagacgttgctgtgtcagatcgacatccttatttattttctgttagtgaagataagacggtcaaatgctgggacctagagaaaaaccaaattattagagattactatggacatttatcgggggttcgtacggtgagcatacatccaacgctggatctcatagctaccgcaggccgagatagcgttatcaaactctgggatatgagaaccagaatacctgttattacactagttgggcataagggtccaatcaatcaagtacagtgtactccagtagaccctcaagtggtgagttcatcgactgatgctacggtaaggttatgggatgtagttgctgggaaaacaatgaaagttctaacacatcataagaggtctgtgagagctacagcgttgcatcctaaggagttttcggtggcttctgcgtgtactgatgacatcagatcatggggattagcagaggggtctttactcaccaattttgagtctgaaaagacaggcataatcaatactttaagcattaatcaagatgatgtattattcgctggcggtgacaatggtgtgctttccttttatgattataagtctggtcacaaataccaatcgttggccacgagagaaatggtaggctctctggaaggtgaacggagtgttctttgtagcactttcgataaaacaggtttaagattaatcactggagaagcagacaaaagcataaagatttggaaacaggatgagacggctacaaaagagtcagaaccggggctagcgtggaaccccaacttaagcgccaaaagattttag

SEQ ID NO: 7686 - protein, 451 aa, Saccharomyces cerevisiae
MDGNDHKVENLGDVDKFYSRIRWNNQFSYMATLPPHLQSEMEGQKSLLMRYDTYRKESSSFSGEGKKVTLQHVPTDFSEASQAVISKKDHDTHASAFVNKIFQPEVAEELIVNRYEKLLSQRPEWHAPWKLSRVINGHLGWVRCVAIDPVDNEWFITGSNDTTMKVWDLATGKLKTTLAGHVMTVRDVAVSDRHPYLFSVSEDKTVKCWDLEKNQIIRDYYGHLSGVRTVSIHPTLDLIATAGRDSVIKLWDMRTRIPVITLVGHKGPINQVQCTPVDPQVVSSSTDATVRLWDVVAGKTMKVLTHHKRSVRATALHPKEFSVASACTDDIRSWGLAEGSLLTNFESEKTGIINTLSINQDDVLFAGGDNGVLSFYDYKSGHKYQSLATREMVGSLEGERSVLCSTFDKTGLRLITGEADKSIKIWKQDETATKESEPGLAWNPNLSAKRF

SEQ ID NO: 7687 - DNA, 1982 bp, glycine max
  CDS (153)..(1586)
gaagaatatagtgttaaagagagcaagttctgtttaacacagacgagctgtggtagcagctagcgggtgaaggtttttgcgccgcgccttatatcacaccgtcgtccgaaagcgtcgttgccgtgaaaccctagaaagaaacgacgacgtaaatggaggtggagcccgtggagccgcagtcgctgaagaagctaagcttcaagtctctgaagcgcgctctcgatctcttctctcccatccacggacacctcgctactcccgatgccgaaagcaagaaaatacgcactagccacaaggtgagcgtggagtatggtggaatcaaaagcactgccaatcaacctcctcctcgtcaagttagttctgccacccaggatccagggtcctctaacactctggctcttccaggtcccggagattccaaggattctcagaaaggaggaccccaaaatgccttggttgttggtccaactatcccatccacaacaccgaatgatactggttttcagaacaaaagtacagcggttgtttcagcctctggttcatctgaaagaaatttatcaacatctgctttgatggaaagaatgccaagtaaatggccacgtcctgtatggcacgcaccatggaagaactacagggtcatcagcggtcacttgggatgggtgagatctgttgcagttgatcccagtaacacatggttttgtactggttctgcagatcgaactatcaagatatgggacttggcaagtggagtattgaagctcacattaacaggccacattgaacaagttagaggtcttgctgttagcaacagacatacttacatgttctctgctggtgacgataaacaagttaaatgttgggatcttgaacagaataaggttattaggtcttatcatggtcatctgagtggtgtttattgcttggctcttcatcccacaattgacgttttactaaccggaggacgtgattctgtctgccgggtttgggatatacgaagtaaaatgcagattcatgctctttcaggtcatgataacactgtctgttctgtgtttacgcggccaacggatccccaagttgttacaggttctcatgacactaccatcaagatgtgggaccttagatatggtaaaacaatgtcaactcttacaaaccataaaaaatctgttcgagcaatggcccagcatcccaaagagcaagcttttgcatctgcttcagctgacaatattaaaaagttcacccttccaaaaggagaattttgccacaatatgctctctcaacagaaaactatcatcaatgcaatggctgtcaatgaggagggtgtgatggttactggaggcgacaatggcagcatgtggttctgggattggaagagtggtcacaatttccagcaatcccaaacaattgtccagcctggttcattggacagtgaagctggtatttatgcttgtacctatgatcttactggttcgaggctcataacctgcgaagctgacaagacgataaaaatgtggaaagaagatgagagtgccactccagaaacccatccccttaacttcaggcctcctaaagacatccgtcgattctagacatgctcctcatttatctcaggcaacttattctgctaatacagagtgggtatgtgctatctggagggcttggtgtaaatttacttgttgggagattcacagttctcttcttagcaggcttttatcatcatatttgtatcacgagaaatgttaggaaaatactctcaaatactcttttgaacacaatctttcttattgattgaaaatcacaaattggtggatgctacatatttaacgaacctccttattttgtattttctgataattttcaactagtaggagagtgtggtgtcagaaagtatgtgttaaagagtgtgtaacacttctgtgtgcatcattggattgcttgtaagattattcctacatagttcgtgtgtctcaatagctttgcatttc

SEQ ID NO: 7688 - protein, 477 aa, glycine max
MEVEPVEPQSLKKLSFKSLKRALDLFSPIHGHLATPDAESKKIRTSHKVSVEYGGIKSTANQPPPRQVSSATQDPGSSNTLALPGPGDSKDSQKGGPQNALVVGPTIPSTTPNDTGFQNKSTAVVSASGSSERNLSTSALMERMPSKWPRPVWHAPWKNYRVISGHLGWVRSVAVDPSNTWFCTGSADRTIKIWDLASGVLKLTLTGHIEQVRGLAVSNRHTYMFSAGDDKQVKCWDLEQNKVIRSYHGHLSGVYCLALHPTIDVLLTGGRDSVCRVWDIRSKMQIHALSGHDNTVCSVFTRPTDPQVVTGSHDTTIKMWDLRYGKTMSTLTNHKKSVRAMAQHPKEQAFASASADNIKKFTLPKGEFCHNMLSQQKTIINAMAVNEEGVMVTGGDNGSMWFWDWKSGHNFQQSQTIVQPGSLDSEAGIYACTYDLTGSRLITCEADKTIKMWKEDESATPETHPLNFRPPKDIRRF

SEQ ID NO: 7689 - DNA, 2181 bp, Glycine max
  CDS (154)..(1587)
gaagaatatagtgttaaagagggtgaggtctgctctagcgggtgaaggtttttgcgccgcgcgcgtgttatcagactgtccgccgagacttatatcacaccgtcgaccgaaagcgtcgttgccgtgaaaccctagaaagaaacgacgacgtaaatggaggtggagcccgtggagccgcagtcgctgaagaagctaagcttcaagtctctgaagcgcgctctcgatctcttctctcccatccacggacacctcgctactcccgatgccgaaagcaagaaaatacgcactagccacaaggtgagcgtggagtatggtggaatcaaaagcactgccaatcaacctcctcctcgtcaagttagttctgccacccaggatccagggtcctctaacactctggctcttccaggtcccggagattccaaggattctcagaaaggaggaccccaaaatgccttggttgttggtccaactatcccatccacaacaccgaatgatactggttttcagaacaaaagtacagcggttgtttcagcctctggttcatctgaaagaaatttatcaacatctgctttgatggaaagaatgccaagtaaatggccacgtcctgtatggcacgcaccatggaagaactacagggtcatcagcggtcacttgggatgggtgagatctgttgcagttgatcccagtaacacatggttttgtactggttctgcagatcgaactatcaagatatgggacttggcaagtggagtattgaagctcacattaacaggccacattgaacaagttagaggtcttgctgttagcaacagacatacttacatgttctctgctggtgacgataaacaagttaaatgttgggatcttgaacagaataaggttattaggccttatcatggtcatctgagtggtgtatattgcttggctcttcatcccacaattgacgttttactaaacggaggacgtgattctgtctgccgggtttgggatatacgaagtaaaatgcagattcatgctctttcaggtcatgataacactgtctgttctgtgtttacgcggccaacggatccccaagttgttacaggttctcatgacactaccatcaagatgtgggaccttagatatggtaaaacaatgtcaactcttacaaaccataaaaaatctgttcgagcaatggcccagcatcccaaagagcaagcttttgcatctgcttcagctgacaatattaaaaagttcacccttccaaaaggagaattttgccacaatatgctctctcaacagaaaactatcatcaatgcaatggctgtcaatgaggagggtgtgatggttactggaggcgacaatggcagcatgtggttctgggattggaagagtggtcacaatttccagcaatcccaaacaattgtccagcctggttcattggacagtgaagctggtatttatgcttgtacctatgatcttactggttcgaggctcataacctgcgaagctgacaagacgataaaaatgtggaaagaagatgagagtgccactccagaaacccatccccttaacttcaggcctcctaaagacatccgtcgattctagacatgctcctcatttatctcaggcaacttattctgctaatacagagtgggtatgtgctatctggagggcttggtgtaaatttacttgttgggagattcacagttctcttcttagcaggcttttatcatcatttttgtatcacgagaaatgttaggaaaatactctcaaatactcttttgaacacaatctttcttattgattgaaaattttcacaaattggtggatgctacatatttaacgaacctccttattttgtattttctgataattttcaactagtaggagagtgtggtgtcagaaagtatgtgttaaagagtgtgtaacacttctgtgtgcatcattggattgcttgtaagattattcctacatagttcgtgtgtctcaatagctttgcatttccctaaaataaaaaaaatgtagaattgaatagaatgatgcattttagcttttggagaagttaaaagttaaagtatataaattgattttaatttattaaagaagtttgatttgttttattattttgttttcttataggtatttattgaaaaacttgtctaaattgagcattaatgtcccagttgacttgattttttt

SEQ ID NO: 7690 - protein, 477 aa, Glycine max
MEVEPVEPQSLKKLSFKSLKRALDLFSPIHGHLATPDAESKKIRTSHKVSVEYGGIKSTANQPPPRQVSSATQDPGSSNTLALPGPGDSKDSQKGGPQNALVVGPTIPSTTPNDTGFQNKSTAVVSASGSSERNLSTSALMERMPSKWPRPVWHAPWKNYRVISGHLGWVRSVAVDPSNTWFCTGSADRTIKIWDLASGVLKLTLTGHIEQVRGLAVSNRHTYMFSAGDDKQVKCWDLEQNKVIRPYHGHLSGVYCLALHPTIDVLLNGGRDSVCRVWDIRSKMQIHALSGHDNTVCSVFTRPTDPQVVTGSHDTTIKMWDLRYGKTMSTLTNHKKSVRAMAQHPKEQAFASASADNIKKFTLPKGEFCHNMLSQQKTIINAMAVNEEGVMVTGGDNGSMWFWDWKSGHNFQQSQTIVQPGSLDSEAGIYACTYDLTGSRLITCEADKTIKMWKEDESATPETHPLNFRPPKDIRRF

SEQ ID NO: 7691 - DNA, 1773 bp, Sorghum bicolor
  CDS (52)..(1491)
gcggcggaggctgttttcgctcgccgtgcgaagcaatccgcggcggcggcgatggcgacgacggcggcggcggacgggcccccggtagagccgcagtccctgaagaagctgagcctccggtcgctgaaacggtccctggacctcttcgcgcccgcgcacgccctcctcttcacgcccgatgccgagagcaagaggattcgtaccgggtgtaaggtgagggcggagtacggcgcggtgaaggacctgccgcccgagcaagggcgcggagggcagggcaagggttctgcgccgacgtcgtcgacggcgttggcactgccaggaacacaggatacaaaagatggtcacagagaaggcactagtaatgccattgtccctgtgccacttatgctgccaaaagcacctgagtctaccatacctggcaaaaatacaactatgtcaattcctggatcatctgacagattttctacatctgcactgatggaaaggatacctagtagatggccacggcctacatggcatgctccttggaagaactatcgggtcatcagtggtcacttgggatgggttcgatctattgcatttgatccagggaatgaatggttctgcactggttctgctgataggacaataaagatatgggatcttgcatcaggaaccctgaagcttacactgactggtcacattgaacaaattcgtggacttgctgtcagccaacgtcacacttatttattttctgctggtgatgacaaacaagtaaaatgttgggatcttgaacaaaacaaggttattaggtcataccatgggcatctgagtggtgtttactgcctagctctccatccaacaatcgtccgcttactgactggtggtcgagattcagtttgcagggtgtgggacatcagaacaaaagcacatgtttctgctttaacagggcatgacaacactgtctgttcagtgtttgctcggcctacggatcctcaagttgtcactggttcacatgatacaactattaaattctgggatcttgtagctgggaggactatgtgtactcttacacaccataaaaagtctgtccgagctatggcacttcatccaaaggagaaagcatttgcatcagcgtcagcagacaacataaagaagtttagccttcccagaggcgaatttctgcacaacatgctgtcgcagcagaaaacaattatcaattcaatggctgtcaatgaggatggtgtcttggcaactggaggggataatggaagcctgtggttttgggactggaagagtggccataactttcaacaagatcagactatagtccagcctggatcactggagagcgaggcatgcatatatgccctggcctatgacgccagtggatcaaggcttgtgacctgcgaggcggataagaccataaagatgtggaaggaggacttaacagcgacgccagagactcatcccatcaatttcaagcccccaaaggacatccgaagatattgatcaacactcaaatcccacaagctagcaaactagtggggatcgttggaggcttggagcctccccaattgtgcccgaccccaactcgctgcttccctgagcccaattgaaattcgcagtacacgttcacctgtatgctattcctgggaaacactgtatggatgactagttcaacattagctgtatgataggtgcatatgcagcgatgggtgtattgatgccgaatttgaaccagttgacgttgccaaattcgttttgagcaagaattgagtgttgttttgtccc

SEQ ID NO: 7692 - protein, 479 aa, Sorghum bicolor
MATTAAADGPPVEPQSLKKLSLRSLKRSLDLFAPAHALLFTPDAESKRIRTGCKVRAEYGAVKDLPPEQGRGGQGKGSAPTSSTALALPGTQDTKDGHREGTSNAIVPVPLMLPKAPESTIPGKNTTMSIPGSSDRFSTSALMERIPSRWPRPTWHAPWKNYRVISGHLGWVRSIAFDPGNEWFCTGSADRTIKIWDLASGTLKLTLTGHIEQIRGLAVSQRHTYLFSAGDDKQVKCWDLEQNKVIRSYHGHLSGVYCLALHPTIVRLLTGGRDSVCRVWDIRTKAHVSALTGHDNTVCSVFARPTDPQVVTGSHDTTIKFWDLVAGRTMCTLTHHKKSVRAMALHPKEKAFASASADNIKKFSLPRGEFLHNMLSQQKTIINSMAVNEDGVLATGGDNGSLWFWDWKSGHNFQQDQTIVQPGSLESEACIYALAYDASGSRLVTCEADKTIKMWKEDLTATPETHPINFKPPKDIRRY

SEQ ID NO: 7693 - DNA, 2125 bp, Zea mays
  CDS (427)..(1863)
ttgggaccctcgggccggccccaattacccgccttccgccatctgacgttctagggtttggcggctcctctatcctttctccatccgctagcaggcgcgaggcgccccctccgaccgacactgaatcccgcctccaacctccgctcgaaacccataccttcggtctcctccgtctgtccgtcgcccatccggccgcctcttctcccaccagccgccgctgccgcacgttagctcctcctgcatcgtcgccggacctccgctacgcccccgtgcatccttgccttggcaggcaggatctggccacctttcgccggcaacagttgggcgccgcataggtaaccgcctacccccgaggcaaggcagtaccccgtcgcccagcgtataagcgcggaaggagggcgcggaatagcgccttttctaacactaatggcaacggcggcggcggatggcccccctgtggaaccgcagtctctgaagaagctgagcctccggtcgctcaagcggtccctggacctcttcgccccggcgcacgccctcctcttcacgcccgacgccgagagcaagcggattcgtactgggtgcaaggtgagtgcggagtacggtgcggtgaaggacctcacgccggagcaggggcgcggtgggcagggcaagggtcctgcgccgccatcttcaacagctttggcattgccaggaacacaagatacaaaagatgctcacggagaaggctctaggaatgccattgtccctgcaccacttatgctgccaaaagcacctgaatctaccatacctggcaaaaatacaactctgtcaattcctggatcatctgacagattttctacatccgcactgatggaaaggatacctagtagatggccacggcctacatggcatgctccttggaagaactatcgggtcatcagtggtcacttgggatgggttcgatctattgcatttgatccagcgaatgaatggttctgcactggttctgccgataggacaataaagatatgggatcttgcatcaggaaccctgaagcttacactgactggtcatattgagcaaattcgtggacttgctgtcagccaacgtcacacttatttattttctgctggtgatgacaaacaagtaaaatgttgggatcttgaacaaaacaaggttattaggtcctaccatgggcatctgagtggtgtttactgcctagctctccatccaacaattgatatcttactgactggtggccgggattcagtttgcagggtgtgggacatcagaacaaaagcacatgtttctgctttaacagggcatgacaacactgtctgttcagtgtttgctcgtcctacggatcctcaagttgttactggttcacatgatacaactattaaattctgggatcttgtagctgggaggactatgtgtacccttactcaccataaaaagtctgtccgagctatggcgcttcatccaaaggagaaagcatttgcatcagcatcagcagacaacgtaaagaagtttaaccttcccaaaggcgaatttctgcacaacatgctgtcgcagcagaaaacaataatcaattcaatggctgtaaatgaggatggtgtcttggcaactggaggggataatggaagcctgtggttttgggactggaagagtggtcataactttcaacaagatcagactatagtccagcctggatcactggagagtgaggcatgcatatatgccctctcatatgacgtgagcggatcaaggcttgtgagctgtgaggcggataagactataaagatgtggaaagaggacttgacagcgacgccagagactcatcccatcaatttcaagcccccaaaggacatccgaagatattgatgctcaaatcccacaagtagcaagctagtggatggttggagcctccacaattgtgtgacccaaactcgcttcttccctgagcccaattgaaattttgctagggtttgctctattgtataatctgatgcctgtactccaccagtctgatgccttggtccaacgctttgaaacccttagactgtttctttgtgatctttgcgttcgatttgattataacctaccttagtaccaaaaaaaaaaaaaaaaaaactcgagaaaaaaa

SEQ ID NO: 7694 - protein, 478 aa, Zea mays
MATAAADGPPVEPQSLKKLSLRSLKRSLDLFAPAHALLFTPDAESKRIRTGCKVSAEYGAVKDLTPEQGRGGQGKGPAPPSSTALALPGTQDTKDAHGEGSRNAIVPAPLMLPKAPESTIPGKNTTLSIPGSSDRFSTSALMERIPSRWPRPTWHAPWKNYRVISGHLGWVRSIAFDPANEWFCTGSADRTIKIWDLASGTLKLTLTGHIEQIRGLAVSQRHTYLFSAGDDKQVKCWDLEQNKVIRSYHGHLSGVYCLALHPTIDILLTGGRDSVCRVWDIRTKAHVSALTGHDNTVCSVFARPTDPQVVTGSHDTTIKFWDLVAGRTMCTLTHHKKSVRAMALHPKEKAFASASADNVKKFNLPKGEFLHNMLSQQKTIINSMAVNEDGVLATGGDNGSLWFWDWKSGHNFQQDQTIVQPGSLESEACIYALSYDVSGSRLVSCEADKTIKMWKEDLTATPETHPINFKPPKDIRRY

SEQ ID NO: 7695 - DNA, 1934 bp, Zea mays subsp. mays
  CDS (274)..(1710)
ataccttcggtctcctccgtctgtccgtcgcccatccggccgcctcttctcccaccagccgccgctgccgcacgttagctcctcctgcatcgtcgccggacctccgctacgcccccgtgcatccttgccttggcaggcaggatctggccacctttcgccggcaacagttgggcgccgcataggtaaccgcctacccccgaggcaaggcagtaccccgtcgcccagcgtataagcgcggaaggagggcgcggaatagcgccttttctaacactaatggcaacggcggcggcggatggcccccctgtggaaccgcagtctctgaagaagctgagcctccggtcgctcaagcggtccctggacctcttcgccccggcgcacgccttcctcttcacgcccgacgccgagagcaagcggattcgtactgggtgcaaggtgagtgcggagtacggtgcggtgaaggacctcacgccggagcaggggcgcggtgggcagggcaagggtcctgcgccgccatcttcaacagctttggcattgccaggaacacaagatacaaaagatgctcacggagaaggctctaggaatgccattgtccctgcaccacttatgctgccaaaagcacctgaatctaccatacctggcaaaaatacaactctgtcaattcctggatcatctgacagattttctacatccgcactgatggaaaggatacctagtagatggccacggcctacatggcatgctccttggaagaactatcgggtcatcagtggtcacttgggatgggttcgatctattgcatttgatccagcgaatgaatggttctgcactggttctgccgataggacaataaagatatgggatcttgcatcaggaaccctgaagcttacactgactggtcatattgagcaaattcgtggacttgctgtcagccaacgtcacacttatttattttctgctggtgatgacaaacaagtaaaatgttgggatcttgaacaaaacaaggttattaggtcctaccatgggcatctgagtggtgtttactgcctagctctccatccaacaattgatatcttactgactggtggccgggattcagtttgcagggtgtgggacatcagaacaaaagcacatgtttctgctttaacagggcatgacaacactgtctgttcagtgtttgctcgtcctacggatcctcaagttgttactggttcacatgatacaactattaaattctgggatcttgtagctgggaggactatgtgtacccttactcaccataaaaagtctgtccgagctatggcgcttcatccaaaggagaaagcatttgcatcagcatcagcagacaacgtaaagaagtttaaccttcccaaaggcgaatttctgcacaacatgctgtcgcagcagaaaacaataatcaattcaatggctgtaaatgaggatggtgtcttggcaactggaggggataatggaagcctgtggttttgggactggaagagtggtcataactttcaacaagatcagactatagtccagcctggatcactggagagtgaggcatgcatatatgccctctcatatgacgtgagcggatcaaggcttgtgagctgtgaggcggataagactataaagatgtggaaagaggacttgacagcgacgccagagactcatcccatcaatttcaagcccccaaaggacatccgaagatattgatgctcaaatcccacaagtagcaagctagtggatggttggagcctccacaattgtgtgacccaaactcgcttcttccctgagcccaattgaaattttgctggggtttgctctattgtataatctgatgcctgtactccaccagtctgatgccttggtccaacgctttgaaacccttagactgtttctttgtgatctttgcgttcgatttgattataacctacctt

SEQ ID NO: 7696 - protein, 478 aa, Zea mays subsp. mays
MATAAADGPPVEPQSLKKLSLRSLKRSLDLFAPAHAFLFTPDAESKRIRTGCKVSAEYGAVKDLTPEQGRGGQGKGPAPPSSTALALPGTQDTKDAHGEGSRNAIVPAPLMLPKAPESTIPGKNTTLSIPGSSDRFSTSALMERIPSRWPRPTWHAPWKNYRVISGHLGWVRSIAFDPANEWFCTGSADRTIKIWDLASGTLKLTLTGHIEQIRGLAVSQRHTYLFSAGDDKQVKCWDLEQNKVIRSYHGHLSGVYCLALHPTIDILLTGGRDSVCRVWDIRTKAHVSALTGHDNTVCSVFARPTDPQVVTGSHDTTIKFWDLVAGRTMCTLTHHKKSVRAMALHPKEKAFASASADNVKKFNLPKGEFLHNMLSQQKTIINSMAVNEDGVLATGGDNGSLWFWDWKSGHNFQQDQTIVQPGSLESEACIYALSYDVSGSRLVSCEADKTIKMWKEDLTATPETHPINFKPPKDIRRY

SEQ ID NO: 7697 - DNA, 2857 bp, Viridiplantae
  CDS (62)..(1501)
  misc_feature (2839)..(2839): n is a, g, c or t
agtaccgggacaagaaaggagaagggagtagagctgtctcggagatcggcgggcggcggctatggcgatggcggcggcagcagcgggcggcgagccggtagagccgcagtcgttgaagaagctgagtctcaagtcgctgaagcgctccctcgacctcttcgcgcccacccactccctccccttcgctcccgacgccgagagcaaacggattcgcgtcagctgcaaggtgaatgcggagtacggttcggtcaagaacctgccgactgagcagggccgagcgcaggtgaagggcgccgccgctccttccaatgcgttggcgcttctaggcacacaagacacaaaagatgctcctagggaaggcactagtaatgccatcatcccttcaccgcttatgcttcctaaagcacccgaatctgcagtgcctggcaaaaatacaaccgtattatcgatccctgggtcatctgatagattctcgacatctgcactgatggaaaggttgccaagtagatggcctaaacctgtatggcatgctccctggaagaactatcgggttatcagtggtcacttgggatgggtgcgatctatagcatttgatccaggcaatgaatggttctgtactggttctgctgatagaacaataaagatatgggacctggcatcaggaacgttgaagctgacactaactggtcatattgaacaagttcgcggacttgctgtcagtcagcggcacacatatctattttctgctggtgatgacaaacaagtaaaatgttgggatcttgaacaaaataaggttattcggtcttatcatgggcatctgagtggggtttactgcctagctccccatccaacaattgatgtcttgctgacaggtggtcgagattcagtttgcagggtgtgggatatccgaacaaaggctcatgtttctgctttaactggacatgataacacagtttgttcagtgtttgctcggccaacggatccacaagttgtcactggctcacatgatacaactatcaagttctgggatcttgtagctgggaaaactatgtgtactcttacacaccataagaagtctgttcgggccatggcactgcatccaaaagagaaatcatttgcatcagcatctgccgacaacataaaaaagtggagcctgcccaaaggcgaatttctgcacaacatgctgtcccagcaaaaaacgattctgaatgcaatggctgttaatgaggatggtgtcctggcaactgcaggggacaatggaagcatgtggttttgggattggaagagtggccataattttcagcaagaacagactattgtccagcctggatcattggagagtgaagcatgtatatatgccctttcttatgataatagtggatcaaggcttgtgacatgcgaggcagataaaacaataaagatgtggaaagaagatctaacagcaacaccagaaacccaccccgtcaacttcaagccaccaaaagacatccggagatattgattgccgcataagttacaagattgatttcgaccacccaaattctactctttggttgagtgttcacctcgttgagcctttatggtggtgttcaagccctgacgtccctgttgtataatacagattgtcttgtgctagtatttattactgaatctgaagcatgttttctaagttcaaatatattttgttctatgcattgggaatttttgtgatgtatcaaaattcccccaagatacagcaccctcacagccacagacgacgcgcgaagcgatatcacgagtgagagtctaggggccatggcacagtcgatgctcatgtccggcgtcaacggcgtggcctccggcaggagcctgctgcaggcggcgcggccgtcgtcggcgtccacgcccttctcgcggctcgcgctctcctcgtcgtcctcggcggcgtactacaagcacatgccgtccctctccgtccggaccatggccctgttcggcaagaagaccaaggccgcgccggccaagaaggtcgctgcccccaagcccaagacggaggacggcatcttcggcacgtccggcgggatcggtttcaccaaggagaacgagctcttcgtcggccgtgttgccatgattggcttcgccgcatcgatcttgggagaggccatcaccggcaagggcatcctgtcccagctgaaccttgagaccggcatcccgatctacgaggcggagcccctcctcctcttcttcatcctcttcaccctcctcggcgccatcggcgcgctcggagaccgcggcaggttcgtcgacgagcagcccaccggcctcgacaaggccgtcatcgcccccggcaaaggcttccgctccgccctcggcctcagcgagggagggccgctgttcgggttcaccaagtcgaacgagctgttcgtggggcggctggcgcagctggggatcgccttctccatcatcggggagattatcacgggcaagggcgcgctggcgcagctcaacatcgagaccggggtgcccatcagcgagatcgagccactcgtgctcttcaacgtcgtcttcttcttcatcgccgccatcaaccccggcaccggcaagttcatcagcggcgaggaggacgactagagatcacgcgcgaatgctttttggccattaattgtacgtccgtccgtccgtgctttgcttgtttgttgtgtacgtgagaccttggggtgtacttaggtgtaagaaagaagttggtcgttgccttatgaaaaacaagagctagcagctaatttgccatgcaaaaaaaaaaaaaaaaaaaaaaaaaaaaaaaaaaaaaaaaaaaaaactcgagggggggcccggtacccanttcgccctatagtggctg

SEQ ID NO: 7698 - protein, 479 aa, Viridiplantae
MAMAAAAAGGEPVEPQSLKKLSLKSLKRSLDLFAPTHSLPFAPDAESKRIRVSCKVNAEYGSVKNLPTEQGRAQVKGAAAPSNALALLGTQDTKDAPREGTSNAIIPSPLMLPKAPESAVPGKNTTVLSIPGSSDRFSTSALMERLPSRWPKPVWHAPWKNYRVISGHLGWVRSIAFDPGNEWFCTGSADRTIKIWDLASGTLKLTLTGHIEQVRGLAVSQRHTYLFSAGDDKQVKCWDLEQNKVIRSYHGHLSGVYCLAPHPTIDVLLTGGRDSVCRVWDIRTKAHVSALTGHDNTVCSVFARPTDPQVVTGSHDTTIKFWDLVAGKTMCTLTHHKKSVRAMALHPKEKSFASASADNIKKWSLPKGEFLHNMLSQQKTILNAMAVNEDGVLATAGDNGSMWFWDWKSGHNFQQEQTIVQPGSLESEACIYALSYDNSGSRLVTCEADKTIKMWKEDLTATPETHPVNFKPPKDIRRY

SEQ ID NO: 7699 - DNA, 1533 bp, Magnaporthe grisea 70-15
  CDS (1)..(1533)
atggctcaagactctgtcgagggtccagctgacgccgcgctccaggctctcatcatcaagaacgcaaagcagacaagggatatctttaccgacatcacaagccgtaagcgcataaagcttgttgacccggcgacaccgaccgatggcgacctcgacagggacacattagccttgcgcttcaattccgagtatgcagacctcagggagctgccgccagctctggcagcaaggcaagttgccgctgcggggggaaggaaaaagcctggtgcgaggaaggcggcagcagcgggcccaccggcagacacacccgaagaggagaagtcccgcaagttgatagagggcatcccgacacggggagcgaatccaagatcacagaacgggactggtgccgcgcagtcgagtgcactcgtcctcaagggtcgtggcacgggcacggaaggacaaggcggacaggagcagagacaacaacaaaaacagaatgataggggaccaccggtgatcgggcagcagctcacgctggcacgggcacaggagctcaacatgcagctcaagcccgaatggcacagaccatggaagctgatgcgtgtcatctcaggacacctgggttgggtgcgggccctcgcagttgagcccgacaacaagtggttcgccagcggtgccggcgaccgcaccatcaagatttgggatctggcgagcggccggctgaggctgacgctgactggtcacatctcgactgtgcgtggtttggccgtctcgccccggcacccatacctcttctcttgcgctgaggacaagatggtcaagtgctgggacttggagacgaacaaggtcatcaggcactaccacggccatctgagtggtgtctacacacttgctctgcatccaacccttgacgtcctggtgacgggtggacgtgacggtgtggcccgtgtttgggacatgcgcactcgcagcaacattcacgtgctgagcgggcacaccggaaccgtgtcggagctagtgtgccaggaggcggatccgcaagtcattacaggcagtctggactcgacggtgcgcatgtgggaccttgccgctggcaagaccatgggagtgctcacccaccacaaaaagggtgtgcgcgcgctggccacgcacccaacagagttcacctttgcctcgggaagcgccggctctatcaagcagtggaaatgccccgagggtgcttttatgcagaattttgagggtcacaattcaatcatcaacacactgtcagtcaacgaccagaacgttttcttctcaggtgccgacaatggctccatgagcttctgggattggaagactggtcatcgcttccagtcactagacacgactgcccagcccggttcgctccaggctgagtcgggtatctttacatcgacctttgatcagtcgggcagccgtctcatttgtggcgaggcagacaagactatcaaaatatggaaggaggatatggaggcaacgccagagacccacccacttgactggaagcctacattgggtaggaggaagttttaa

SEQ ID NO: 7700 - protein, 510 aa, Magnaporthe grisea 70-15
MAQDSVEGPADAALQALIIKNAKQTRDIFTDITSRKRIKLVDPATPTDGDLDRDTLALRFNSEYADLRELPPALAARQVAAAGGRKKPGARKAAAAGPPADTPEEEKSRKLIEGIPTRGANPRSQNGTGAAQSSALVLKGRGTGTEGQGGQEQRQQQKQNDRGPPVIGQQLTLARAQELNMQLKPEWHRPWKLMRVISGHLGWVRALAVEPDNKWFASGAGDRTIKIWDLASGRLRLTLTGHISTVRGLAVSPRHPYLFSCAEDKMVKCWDLETNKVIRHYHGHLSGVYTLALHPTLDVLVTGGRDGVARVWDMRTRSNIHVLSGHTGTVSELVCQEADPQVITGSLDSTVRMWDLAAGKTMGVLTHHKKGVRALATHPTEFTFASGSAGSIKQWKCPEGAFMQNFEGHNSIINTLSVNDQNVFFSGADNGSMSFWDWKTGHRFQSLDTTAQPGSLQAESGIFTSTFDQSGSRLICGEADKTIKIWKEDMEATPETHPLDWKPTLGRRKF

SEQ ID NO: 7701 - DNA, 1374 bp, Gibberella zeae PH-1
  CDS (1)..(1374)
atggaaacgccagaagtactgcaagatgcgctgcagcttggcgctctcgccacgcaaaatgccactgtttcaagaacactatactcgcacgctcaagcaaccagcacgaagcgacagaaactatacgacgcgtctgaagatcccatcatgaaacgtcgctttcgcaacgaatacgccgatgtcgagactttaccgccctcaatcactgcgaagctcccgactaaacaacctggaaagaagactaaagctggagcgctggttcggccagccatgaagctcctcgagggcgcgcccggttcaggcaaggcgtctgcatccgcagctaggaacgaaggcacaccacagaacatgtcccttacgacacggggaacccagaacacgatgcagcaaaagcccgaatggcacgcgccatggaaactgatgagagtcatatcaggacatttgggttgggtacgcagtctggccgttgagcctggaaataagtggttcgctagtggtgctggcgaccgaactatcaagatttgggatttggcaagcggctcgttgaaattgacacttactggacacatcagcacagtacgtggccttgctgtgtctccccgtcacccctatctcttctcttgcggtgaagataagatggtcaaatgttgggatctcgagacaaacaaggttattcgccactatcacggtcatctgagtggtgtttacacactggctctgcatcctacacttgatgttcttgtcactggcggtcgagatggtgttgctcgtgtttgggatatgcgaaccaggagcaacatccatgttctatcaggccacactcagactgtctccgatcttgtttgtcaagaggcggaccctcaagttattaccggatcactggactcaacagtacgactttgggatcttgcggccggaaagaccatgggcgtgctcacccaccacaagaagggtgtccgagccctggctacccatccctcagagtttacatttgccagtggcagtaccggaagtgtgaagcaatggaagtgccccgaaggagccttcatgcaaaattttgagggccacaattccatcattaacaccatgagcgtcaatgagcagaatgtctttttcacaggaggagataatggatctatgagcttctgggactggaagactggacatagattccagtctcttgataccacagcccaacctggttctttagacgccgaggcaggcattatgagttcaacgtttgaccgctccggactacgtctgatttgcggtgaagctgacaaaacaattaaagtctggaagcaggatgagacagcgacagaagagtcgcatcctctcgaatggaagccaactctggcccggaggaaattttaa

SEQ ID NO: 7702 - protein, 457 aa, Gibberella zeae PH-1
METPEVLQDALQLGALATQNATVSRTLYSHAQATSTKRQKLYDASEDPIMKRRFRNEYADVETLPPSITAKLPTKQPGKKTKAGALVRPAMKLLEGAPGSGKASASAARNEGTPQNMSLTTRGTQNTMQQKPEWHAPWKLMRVISGHLGWVRSLAVEPGNKWFASGAGDRTIKIWDLASGSLKLTLTGHISTVRGLAVSPRHPYLFSCGEDKMVKCWDLETNKVIRHYHGHLSGVYTLALHPTLDVLVTGGRDGVARVWDMRTRSNIHVLSGHTQTVSDLVCQEADPQVITGSLDSTVRLWDLAAGKTMGVLTHHKKGVRALATHPSEFTFASGSTGSVKQWKCPEGAFMQNFEGHNSIINTMSVNEQNVFFTGGDNGSMSFWDWKTGHRFQSLDTTAQPGSLDAEAGIMSSTFDRSGLRLICGEADKTIKVWKQDETATEESHPLEWKPTLARRKF

SEQ ID NO: 7703 - DNA, 1359 bp, Aspergillus oryzae
  CDS (1)..(1359)
atggacgttattccgtcgactacgcccgaagaggccgtgcgcagatccgcgaagaggactgctgaacttttcggcgcggattatcttatggtcacaccctcgactggagatggatcgattggtgtttcttacagacggaaagtggaatatgaacatgtgaaggaactcccaccagtgctagcagagaagcaagccaaggcagcggccgggcgcacgaagcgtcccaaaatccaagcccaggcgaaggcgcccgtagatggcagcggcgcctcaatggccctggtgaagaaagctcaaggcccggctgctggtggccttggtaatgaggatcaacccaggagcctgatccagcgaccctccgcgacacgacaacagagacccgactggcacgcaccatggaaactgatgagagttatttctggacatttgggatgggtgcgaagtctggcggtggagccgaataacgagtggtttgctagtggtgctggtgaccggacgataaaaatttggaatctggcgactggtgctctgcgtctgacccttacaggccacatttccaccgttcgcggtctggctgtgtcaccccggcatccgtatcttttctcgtgcggagaggacaagatggtgaaatgttgggatctagagactaataaggtcattcgtcactaccatggtcatctaagtggtgtatatacgcttgctctacaccctcgcctcgatctgctggtcactggtggtcgagacggcgttgcccgagtctgggatatgcgaacgaggagtaacatccacgttttgtccggccataaaggaactgttgccgatgtcaagtgtcaggaagctgatccacaaataattactggttccctggacgccaccgttcgtctgtgggatcttgcagctggaaagtcaatgggtgtcctaactcaccacaagaaaggtgtccgaaaccttgctatccacccccgggaattcacatttgctagtgccagcacaggaagcatcaagcaatggaagtgtccagagggtgacttcatgcaaaacttcgagggtcataatgctgtcattaactctctcgccgtgaacgaagacaacgttctcttctccggtggtgacaacggttccatgtctttctgggactggaagaccggataccgtttccagtcgatcgataccatggctcaacccggttcgctcgatgcagaggcaggcatcatggcctcaactttcgaccggaccggcctgcgtctgatcactggtgaggcagataagaccatcaaggtatggaagccggatgatgaggctacacctgagtcgcatccggtgacttgggctcccactcttggcagacagagatattag

SEQ ID NO: 7704 - protein, 452 aa, Aspergillus oryzae
MDVIPSTTPEEAVRRSAKRTAELFGADYLMVTPSTGDGSIGVSYRRKVEYEHVKELPPVLAEKQAKAAAGRTKRPKIQAQAKAPVDGSGASMALVKKAQGPAAGGLGNEDQPRSLIQRPSATRQQRPDWHAPWKLMRVISGHLGWVRSLAVEPNNEWFASGAGDRTIKIWNLATGALRLTLTGHISTVRGLAVSPRHPYLFSCGEDKMVKCWDLETNKVIRHYHGHLSGVYTLALHPRLDLLVTGGRDGVARVWDMRTRSNIHVLSGHKGTVADVKCQEADPQIITGSLDATVRLWDLAAGKSMGVLTHHKKGVRNLAIHPREFTFASASTGSIKQWKCPEGDFMQNFEGHNAVINSLAVNEDNVLFSGGDNGSMSFWDWKTGYRFQSIDTMAQPGSLDAEAGIMASTFDRTGLRLITGEADKTIKVWKPDDEATPESHPVTWAPTLGRQRY

SEQ ID NO: 7705 - DNA, 1461 bp, Arabidopsis thaliana
  CDS (1)..(1461)
atgccggctccgacgacggagatcgaacccatcgaagcacagtcactgaaaaagctcagtctcaaatccctcaaacgatcacttgaactcttctctcccgtccatggccaattccctcctcctgacccggaagccaagcagattcgtctcagccataagatgaaagttgcgtttggaggtgtagaacctgttgtgagtcaacctccacgtcaacctgaccgcatcaatgagcagccaggaccttcaaatgctctttccctcgcagctcctgaagggtctaagagtacgcaaaagggtgcgacagagagtgctattgttgttggtccaactttactgcgtccaatactgcctagaggcttgaactatacaggttcctcagggaagagcaccaccattatacctgcaaatgtatcttcatatcaaagaaatctgtcaactgctgcattaatggagagaataccaagtagatggccccggccagagtggcatgcaccatggaagaattacagggtcattcaggggcacttgggttgggtcagatctgttgcgtttgacccgagtaatgaatggttttgtactggttcagctgatcgtaccatcaagatatgggatgtagcaactggagttctgaagctaacacttactgggcatatcgagcaagtacgaggcctcgctgtaagcaatcgacatacctatatgttctctgctggtgatgacaagcaagtcaaatgctgggaccttgagcagaataaggttatccgatcttatcatggtcacttgagtggtgtctattgcttagctctgcacccaactttggatgttttattaactggggggcgagactctgtctgcagggtgtgggatattcgtaccaagatgcaaatttttgcactctcaggacatgacaacaccgtttgttctgtatttactcgtccaacagacccacaagttgtcaccggatcccatgacacgaccattaaattttgggaccttcgatatggaaaaacaatgtcaacgctaacacatcataagaaatctgtccgagcaatgaccctccatcctaaagagaatgcctttgcttctgcatcagctgacaacaccaagaaatttagccttccaaagggagagttctgccacaacatgctttcgcaacagaaaaccataattaatgcaatggctgtaaacgaggatggtgtgatggtcactggaggtgataatggaagtatatggttctgggactggaagagtggtcacagtttccaacagtcagaaactatcgtacagcctggttccctggagagtgaagcgggtatatatgcagcgtgttatgataatacaggttcaagattggtaacatgcgaggctgataagacgataaagatgtggaaagaagatgagaatgcaactccagaaactcatcctatcaatttcaaaccaccaaaggagattaggcgcttctaa

SEQ ID NO: 7706 - protein, 486 aa, Arabidopsis thaliana
MPAPTTEIEPIEAQSLKKLSLKSLKRSLELFSPVHGQFPPPDPEAKQIRLSHKMKVAFGGVEPVVSQPPRQPDRINEQPGPSNALSLAAPEGSKSTQKGATESAIVVGPTLLRPILPRGLNYTGSSGKSTTIIPANVSSYQRNLSTAALMERIPSRWPRPEWHAPWKNYRVIQGHLGWVRSVAFDPSNEWFCTGSADRTIKIWDVATGVLKLTLTGHIEQVRGLAVSNRHTYMFSAGDDKQVKCWDLEQNKVIRSYHGHLSGVYCLALHPTLDVLLTGGRDSVCRVWDIRTKMQIFALSGHDNTVCSVFTRPTDPQVVTGSHDTTIKFWDLRYGKTMSTLTHHKKSVRAMTLHPKENAFASASADNTKKFSLPKGEFCHNMLSQQKTIINAMAVNEDGVMVTGGDNGSIWFWDWKSGHSFQQSETIVQPGSLESEAGIYAACYDNTGSRLVTCEADKTIKMWKEDENATPETHPINFKPPKEIRRF

SEQ ID NO: 7707 - DNA, 1461 bp, Arabidopsis thaliana
  CDS (1)..(1461)
atgccggctccgacgacggagatcgaacccatcgaagcacagtcactgaaaaagctcagtctcaaatccctcaaacgatcacttgaactcttctctcccgtccatggccaattccctcctcctgacccggaagccaagcagattcgtctcagccataagatgaaagttgcgtttggaggtgtagaacctgttgtgagtcaacctccacgtcaacctgaccgcatcaatgagcagccaggaccttcaaatgctcttgccctcgcagctcctgaagggtctaagagtacgcaaaagggtgcgacagagagtgctattgttgttggtccaactttactgcgtccaatactgcctaaaggcttgaactatacaggttcctcagggaagagcaccaccattatacctgcaaatgtatcttcatatcaaagaaatctgtcaactgctgcattaatggagagaataccaagtagatggccccggccagagtggcatgcaccatggaagaattacagggtcattcaggggcacttgggttgggtcagatctgttgcgtttgacccgagtaatgaatggttttgtactggttcagctgatcgtaccatcaagatatgggatgtagcaactggagttctgaagctaacacttactgggcatatcgagcaagtacgaggccttgctgtaagcaatcgacatacctatatgttctctgctggtgatgacaagcaagtcaaatgctgggaccttgaacagaataaggttatccgatcttatcatggtcacttgagtggtgtctattgcttagctctgcacccaactttggatgttttattaaccggggggcgagactctgtctgcagggtgtgggatattcgtaccaagatgcaaatttttgcactctcaggacatgacaacaccgtttgttctgtatttactcgtccaacagacccacaagttgtcaccggatcccatgacacgaccattaaattttgggaccttcgatatggaaaaacaatgtcaacgctaacacatcataagaaatctgtccgagcaatgaccctccatcctaaagagaatgcctttgcttctgcatcagctgacaacaccaagaaatttagccttccaaagggagagttctgccacaacatgctttcgcaacagaaaaccataattaatgcaatggctgtaaacgaggatggtgtgatggtcactggaggtgataatggaagtatatggttctgggactggaagagtggtcacagtttccaacagtcagaaactatcgtacagcctggttccctggagagtgaagcgggtatatatgcagcgtgttatgataatacaggttcaagattggtaacatgcgaggctgataagacgataaagatgtggaaagaagatgagaatgcaactccagaaactcatcctatcaatttcaaaccaccaaaggagattaggcgcttctaa

SEQ ID NO: 7708 - protein, 486 aa, Arabidopsis thaliana
MPAPTTEIEPIEAQSLKKLSLKSLKRSLELFSPVHGQFPPPDPEAKQIRLSHKMKVAFGGVEPVVSQPPRQPDRINEQPGPSNALALAAPEGSKSTQKGATESAIVVGPTLLRPILPKGLNYTGSSGKSTTIIPANVSSYQRNLSTAALMERIPSRWPRPEWHAPWKNYRVIQGHLGWVRSVAFDPSNEWFCTGSADRTIKIWDVATGVLKLTLTGHIEQVRGLAVSNRHTYMFSAGDDKQVKCWDLEQNKVIRSYHGHLSGVYCLALHPTLDVLLTGGRDSVCRVWDIRTKMQIFALSGHDNTVCSVFTRPTDPQVVTGSHDTTIKFWDLRYGKTMSTLTHHKKSVRAMTLHPKENAFASASADNTKKFSLPKGEFCHNMLSQQKTIINAMAVNEDGVMVTGGDNGSIWFWDWKSGHSFQQSETIVQPGSLESEAGIYAACYDNTGSRLVTCEADKTIKMWKEDENATPETHPINFKPPKEIRRF

SEQ ID NO: 7709 - DNA, 1461 bp, Arabidopsis thaliana
  CDS (1)..(1461)
atgccggctccgacgacggagatcgaacccatcgaagcacagtcactgaaaaagctcagtctcaaatccctcaaacgatcacttgaactcttctctcccgtccatggccaattccctcctcctgacccggaagccaagcagattcgtctcagccataagatgaaagttgcgtttggaggtgtagaacctgttgtgagtcaacctccacgtcaacctgaccgcatcaatgagcagccaggaccttcaaatgctctttccctcgcagctcctgaagggtctaagagtacgcaaaagggtgcgacagagagtgctattgttgttggtccaactttactgcgtccaatactgcctaaaggcttgaactatacaggttcctcagggaagagcaccaccattatacctgcaaatgtatcttcatatcaaagaaatctgtcaactgctgcattaatggagagaataccaagtagatggccccggccagagtggcatgcaccatggaagaattacagggtcattcaggggcacttgggttgggtcagatctgttgcgtttgacccgagtaatgaatggttttgtactggttcagctgatcgtaccatcaagatatgggatgtagcaactggagttctgaagctaacacttactgggcatatcgagcaagtacgaggcctcgctgtaagcaatcgacatacctatatgttctctgctggtgatgacaagcaagtcaaatgctgggaccttgagcagaataaggttatccgatcttatcatggtcacttgagtggtgtctattgcttagctctgcacccaactttggatgttttattaactggggggcgagactctgtctgcagggtgtgggatattcgtaccaagatgcaaatttttgcactctcaggacatgacaacaccgtttgttctgtatttactcgtccaacagacccacaagttgtcaccggatcccatgacacgaccattaaattttgggaccttcgatatggaaaaacaatgtcaacgctaacacatcataagaaatctgtccgagcaatgaccctccatcctaaagagaatgcctttgcttctgcatcagctgacaacaccaagaaatttagccttccaaagggagagttctgccacaacatgctttcgcaacagaaaaccataattaatgcaatggctgtaaacgaggatggtgtgatggtcactggaggtgataatggaagtatatggttctgggactggaagagtggtcacagtttccaacagtcagaaactatcgtacagcctggttccctggagagtgaagcgggtatatatgcagcgtgttatgataatacaggttcaagattggtaacatgcgaggctgataagacgataaagatgtggaaagaagatgagaatgcaactccagaaactcatcctatcaatttcaaaccaccaaaggagattaggcgcttctaa

SEQ ID NO: 7710 - protein, 486 aa, Arabidopsis thaliana
MPAPTTEIEPIEAQSLKKLSLKSLKRSLELFSPVHGQFPPPDPEAKQIRLSHKMKVAFGGVEPVVSQPPRQPDRINEQPGPSNALSLAAPEGSKSTQKGATESAIVVGPTLLRPILPKGLNYTGSSGKSTTIIPANVSSYQRNLSTAALMERIPSRWPRPEWHAPWKNYRVIQGHLGWVRSVAFDPSNEWFCTGSADRTIKIWDVATGVLKLTLTGHIEQVRGLAVSNRHTYMFSAGDDKQVKCWDLEQNKVIRSYHGHLSGVYCLALHPTLDVLLTGGRDSVCRVWDIRTKMQIFALSGHDNTVCSVFTRPTDPQVVTGSHDTTIKFWDLRYGKTMSTLTHHKKSVRAMTLHPKENAFASASADNTKKFSLPKGEFCHNMLSQQKTIINAMAVNEDGVMVTGGDNGSIWFWDWKSGHSFQQSETIVQPGSLESEAGIYAACYDNTGSRLVTCEADKTIKMWKEDENATPETHPINFKPPKEIRRF

SEQ ID NO: 7711 - DNA, 1440 bp, Arabidopsis thaliana
  CDS (1)..(1440)
atgacgatgatagctttgaacagggaggtcgaaactcagtcactgaaaaaactcagtctaaaatctgttagacgagctcgtgaaattttctcccccgtccatggccaatttcctcagcctgatcctgaaagcaaaagaattcggctctgccataagattcaagttgcatttggaggcgtagaacctgcaagtaagcctacacgtattgctgaccataacagtgaaaagacggctccattgaaagcccttgcgcttccaggtccaaaagggtccaaggaacttcgaaaaagcgcaacagagaaagctttagttgttggtccaactttaccgccaagagacttgaacaatactggtaatccaggcaaaagcacggccattcttcctgcacctggatcattttccgaaagaaatctgtcaactgctgctttaatggagagaatgcctagtagatggccccgtccagagtggcatgcaccatggaagaattacagggtgctccagggacacttgggttgggtcagatctgttgcgtttgacccaagcaatgaatggttttgcactggttcagctgatcgtaccatcaagatatgggatgtagcgactggagttctgaaactcacacttactggacatatagggcaagtacgaggcctcgctgtaagcaatagacatacctatatgttttctgctggtgatgacaagcaagtcaaatgctgggaccttgagcagaataaggttattcgatcttatcatggtcatttgcatggcgtttactgtttagctcttcatcctactcttgatgttgtactaaccggagggcgagactctgtctgcagggtatgggatatccgtacgaagatgcaaatttttgtactcccacatgacagcgatgttttttccgttttggcccgcccaactgatccacaagttattacagggtctcatgactcaaccatcaaattttgggacctccgatatggcaaatcgatggcaaccataacgaatcataagaagactgtccgagcaatggctctccatccgaaagagaatgattttgtttctgcatcagctgacaacatcaagaagtttagccttcctaagggagagttttgccacaacatgctttctctacagagagacataattaacgcagtggctgtgaatgaggatggcgtaatggtcactggaggtgataaaggtggcttatggttctgggactggaagagtggtcacaatttccaacgggcagaaactattgtacagcctggttcgctggagagtgaagcaggtatatatgcagcgtgttacgatcagacgggttcaaggctggtaacgtgtgagggagacaaaacaataaagatgtggaaggaagacgaggatgcaactcctgaaactcatcctctcaacttcaaacctcccaaagagatcagacgcttctga

SEQ ID NO: 7712 - protein, 479 aa, Arabidopsis thaliana
MTMIALNREVETQSLKKLSLKSVRRAREIFSPVHGQFPQPDPESKRIRLCHKIQVAFGGVEPASKPTRIADHNSEKTAPLKALALPGPKGSKELRKSATEKALVVGPTLPPRDLNNTGNPGKSTAILPAPGSFSERNLSTAALMERMPSRWPRPEWHAPWKNYRVLQGHLGWVRSVAFDPSNEWFCTGSADRTIKIWDVATGVLKLTLTGHIGQVRGLAVSNRHTYMFSAGDDKQVKCWDLEQNKVIRSYHGHLHGVYCLALHPTLDVVLTGGRDSVCRVWDIRTKMQIFVLPHDSDVFSVLARPTDPQVITGSHDSTIKFWDLRYGKSMATITNHKKTVRAMALHPKENDFVSASADNIKKFSLPKGEFCHNMLSLQRDIINAVAVNEDGVMVTGGDKGGLWFWDWKSGHNFQRAETIVQPGSLESEAGIYAACYDQTGSRLVTCEGDKTIKMWKEDEDATPETHPLNFKPPKEIRRF

SEQ ID NO: 7713 - DNA, 1278 bp, Ashbya gossypii
  CDS (1)..(1278)
atgaatgagcacagcgatgatgtatatgtacgtgcgaggctgcgcaaccagtttggttatatgacatgggtaccagaatatgtcgaagacagaatcagtagcaagaaaggcatactgcaacgatacgaggactaccagcagaagcaagctaaggcgcaggaggtgaagacagacagcttggtaaagtacgatggcgcaaaggacgtccctcgcaatctgctgcgcatctaccggttcgaggcggatacgtctgcgcttgcgcgctacgaggaagtggtgtcacagaagccgcaatggcatgcgccctggaaactgacacgagtgatcaacgggcacacaggctgggttcgctgcgtgtgtgtcgaccctgtcgacaacgcgtggtttgccacggggagcaacgactccaccatccgggtgtgggacctggccactggcaagctcaaggtgacgctgcagggccacatcatgacggtccgggatatatgcatctccgcgcgacacccgtatatgttttctgcgagccaggataagttggtgaagtgctgggacctggagaggaacaccgtggtccgcgacttccatggcacgctctctggcgtccactcagtcgacctgcatccatcgctcgaccttatagtatctgctggccgggactcagttgtgcgggtgtgggatatccggagccggagctgcgtcctgacgcttgcgggccaccgcggccccatcaacaaggtgcgctgtctgcccgtggacccccagatcgtcagctgctccacggacgcgaccgtgaagctctgggacctggtggccggcaaaccaatgaagaccctaacccaccacaaacgcaatgtgcgcgacctcgcgttcaacccaaccgaattttcctttgcgtccgcctgcaccgacgacattcgctcctggaagcttgtggatggtcagctactcaccaacttcaactctgaggcgctcgggatagtgaacacgctcgcctgcaaccaggacggcgtgctcttcgccggcggtgacaccggcgagctctcgttcttcgattacaagactggccataagtttcagaagctggagactacggcgatgccgggttccctggagagcgagaagggggtgctagcgagcacttttgaccgcacagggctacgtctactaacttgtgaacgggataagagcatcaagatatggaaacacatagacggagcgacccaagattcccacccgggccttccatggaaccccagcctggtcagacagcggttctga

SEQ ID NO: 7714 - protein, 425 aa, Ashbya gossypii
MNEHSDDVYVRARLRNQFGYMTWVPEYVEDRISSKKGILQRYEDYQQKQAKAQEVKTDSLVKYDGAKDVPRNLLRIYRFEADTSALARYEEVVSQKPQWHAPWKLTRVINGHTGWVRCVCVDPVDNAWFATGSNDSTIRVWDLATGKLKVTLQGHIMTVRDICISARHPYMFSASQDKLVKCWDLERNTVVRDFHGTLSGVHSVDLHPSLDLIVSAGRDSVVRVWDIRSRSCVLTLAGHRGPINKVRCLPVDPQIVSCSTDATVKLWDLVAGKPMKTLTHHKRNVRDLAFNPTEFSFASACTDDIRSWKLVDGQLLTNFNSEALGIVNTLACNQDGVLFAGGDTGELSFFDYKTGHKFQKLETTAMPGSLESEKGVLASTFDRTGLRLLTCERDKSIKIWKHIDGATQDSHPGLPWNPSLVRQRF

SEQ ID NO: 7715 - DNA, 1284 bp, Candida glabrata
  CDS (1)..(1284)
atgagtattggcgatgagttggtagatgctgatgaggtatacagacaagcaagatggaaaaatcagtttgaagttttgagcaagctgccgagagtcttacaagagcgtgtcgatgctcaaaagcctgttattgaagcaagtggtaacagtgcaactccctccaatgccagtcgggcgctggtcaggcatcaacaaaacccaggagatgttggattggttctaaataagaagtttgccgatgagcaaggccatgaatcggtaattgagagacacgataagcttttgaatcaaacacctaggtggcatgcaccatggcatttaactagggtgatacatgggcatcatgggtgggtacgatgtattgcaatggataaagttgataatgaatggtttgctacaggaagtaatgataaaaccattaagatttggaacttggcttctggtaagcttaaagtaactttaaaggctcatgatatgactgtcagagaccttgcaatctctaataggcatccatacatgttctcggtgagtgaggataaaacggtcaaatgttgggacctggaaaagaatacggcaattagaaattatcatggacatctatctggtgtgcatactgtagatatccatccaacagttgatgtggtagtaactgcagggcgtgacagtgttgtaaaagtgtgggacataaggacaagattaccagtgatgacattacctggtcataaaggacccataacaaaagtacggtgtcttccagttgacccccaggtgatcagcagttctgtagatgcgtcaataagattatgggatttagtagcaggaaaatcaatgaaggtgttaacacatcatcaaagaacggtaagagatatatcagttcatccatctgaattttcgtttgcatctgcgtgtacaaatgatatacgatcatggttgttaccaaagggagagttactaacaaactttgtctcacaagacttagatgttataaatacagtatcgattaatcaagatgatgttttgtttgctggttctgacaatggatcattaacgttctttgactataaatcaggtcataagtatcagactttcaagacaaaagaggcgcctggttctcctgaaagtgaacgaggtatcctatcaagtactttcgatggaacaggtttacgtttattgacaggtgagacagatcgaacaatcaaaatttggaaacaagatgaaactgcctctcaagacactcatcctaatttaccttggaatccaaaactagattcacaaagactttaa

SEQ ID NO: 7716 - protein, 427 aa, Candida glabrata
MSIGDELVDADEVYRQARWKNQFEVLSKLPRVLQERVDAQKPVIEASGNSATPSNASRALVRHQQNPGDVGLVLNKKFADEQGHESVIERHDKLLNQTPRWHAPWHLTRVIHGHHGWVRCIAMDKVDNEWFATGSNDKTIKIWNLASGKLKVTLKAHDMTVRDLAISNRHPYMFSVSEDKTVKCWDLEKNTAIRNYHGHLSGVHTVDIHPTVDVVVTAGRDSVVKVWDIRTRLPVMTLPGHKGPITKVRCLPVDPQVISSSVDASIRLWDLVAGKSMKVLTHHQRTVRDISVHPSEFSFASACTNDIRSWLLPKGELLTNFVSQDLDVINTVSINQDDVLFAGSDNGSLTFFDYKSGHKYQTFKTKEAPGSPESERGILSSTFDGTGLRLLTGETDRTIKIWKQDETASQDTHPNLPWNPKLDSQRL

SEQ ID NO: 7717 - DNA, 1422 bp, Cryptococcus neoformans
  CDS (1)..(1422)
atgtcaacatcactcgaaaccccctcaggggcctccgctggcccttcaattgttgccagcgggctcccccctctagctgatttagtacgagcaggaagcaaacgaactcgagtcgtgtacggtgcggagacttcagcggtggaagacgatggtctcgcaagggcaaacaaaattaagctggccacgaaactggcgattgagtacaaggacgttcaaacattaccacctatcttacaagctcagcaaaccggtccagccggacccaagcgaccaacacagccatccattgccgcttcagctaccgctggtcccaacgtcaagctcattggcggacccgaggctgagaaagcgtcctcatccacccctcaagctgttgccgagcctcgctcattagtgaagttcagacatcaagaaggatttgccgctgagggtggccaggctacttccagattgtcgcaagctttgatgaggaagaaggaagccagagaagtcaagcccgaatatcaccccgagtggaagcttacacgagttatttctggccatatgggatgggtgcgcgccgttgcaatggatccaggaaatcaatggtttgccaccggtgctggtgatcgtgttatcaagatatgggatcttgcttcgggagaactcaaactgtcattaactggacatatctctaccatccgagggttagcagtatcagatcgtcacccgtatttgttttcttgcgcggaagacaagatggtcaagtgctgggatcttgagaccaacaaggtcatccggcactatcatggtcacttttccggcgtctattccctttcagtccatcctacgttagacgtactagtcaccggtggtcgagatgcgagcgttagagtatgggacatgcgtacgcgagccaacatcttcacactcactggccatacgagtactgtgggcgatgtcaagactcaggattctgatccgcaaatcatatccggtagtatggatagcaccgttaggctatgggatcttgcggctggcaaatgcatgaacactctcactcaccacaagaagtctgttcgtgcccttgcgatccatccgacggagtacagctttgctagtgctagctcaggtggcaacaatatcaaaaaatggaaatgcccagagggcatctttgtcaacaactttgtcggtcatgaggccatcatcaacacactgagtatcaactcggagaatgtcttgttttctggagcggacaacggtactctcacattatgggattacaagactggtttgcctttccaacacctcaaggatattccccaacctggttcactcgatgccgaagcgggagtgttctgttctacatttgacaaaacgggcacgcgtctcattacaggtggagcagataagacaatcaaggtgtattccgagcaggcatag

SEQ ID NO: 7718 - protein, 473 aa, Cryptococcus neoformans
MSTSLETPSGASAGPSIVASGLPPLADLVRAGSKRTRVVYGAETSAVEDDGLARANKIKLATKLAIEYKDVQTLPPILQAQQTGPAGPKRPTQPSIAASATAGPNVKLIGGPEAEKASSSTPQAVAEPRSLVKFRHQEGFAAEGGQATSRLSQALMRKKEAREVKPEYHPEWKLTRVISGHMGWVRAVAMDPGNQWFATGAGDRVIKIWDLASGELKLSLTGHISTIRGLAVSDRHPYLFSCAEDKMVKCWDLETNKVIRHYHGHFSGVYSLSVHPTLDVLVTGGRDASVRVWDMRTRANIFTLTGHTSTVGDVKTQDSDPQIISGSMDSTVRLWDLAAGKCMNTLTHHKKSVRALAIHPTEYSFASASSGGNNIKKWKCPEGIFVNNFVGHEAIINTLSINSENVLFSGADNGTLTLWDYKTGLPFQHLKDIPQPGSLDAEAGVFCSTFDKTGTRLITGGADKTIKVYSEQA

SEQ ID NO: 7719 - DNA, 1254 bp, Debaryomyces hansenii
  CDS (1)..(1254)
atgaatttcaatatcattatcaaaataatttgtgaaaatatccagctagctcctataattaatatggtttcatacaaagaactattcaatattaatgatacggatctaatcgtaccgtctgacacattaagtgaagctgtatatgataattccaaattagattacatttttcaaaatgttaatagaagaaacagagatgaggttgaagatgagagcataaatatccaaacacaattacctaaacaacaaaatcaacagatttcgaaagacatgagcgaagtaggctccaagcaagtttcagaaattagacctgattcagattcacgatggaaattattaagagtaatggcaggtgcacatcaaggttgggttcgatcttgtactgttgatcctgtaacaaacaaatggtttgtaactggttcgtctgactctacaataaaaatatgggatttagcgagtctgaatttgaaagctacgataacagggcatataatgggagtgaggtcattggcggtttcttctagatatccatatcttttttcaggatccgaagataaaactgtgaaatgttgggacttggagagaacaaactcactgctgggatgtcaaattcgaaattatcatggacatgttggaggtatatatgctatggcgttacatccagaacttgacttgttatttactggaggtcgtgactcagttattcgagtttgggatctaaggtcaagaactgaaattatggttctaagtggccatcgaagcgatataacatctatcgcaagtcaaatcggtgatccccaaataataacaagctcaatggatgcaaccattagattatgggatattcgtaaagcaaccacacaactagcactaactcatcatagcaaaagtataaggctgatggctatgcatccacaagaaatgacaatgtgttcaggggatacatctgggaacctaaaggaatggttattaccaggcggtgaattgttaaatgaatttgggcatagtggagaaaataaaataataaacacgttatctattaacccaagtaataatactctattttcaggatacgatgatggaagaatggaattctatgattatgttagtggagatttactacaatcagatgcaactaccccagttactggatctactgagtctgccatatatgcatcaacatttgatatgctgggtttgagattaataacatgtgaaggtgacaagagtatcaaaatatggggagaagaatag

SEQ ID NO: 7720 - protein, 417 aa, Debaryomyces hansenii
MNFNIIIKIICENIQLAPIINMVSYKELFNINDTDLIVPSDTLSEAVYDNSKLDYIFQNVNRRNRDEVEDESINIQTQLPKQQNQQISKDMSEVGSKQVSEIRPDSDSRWKLLRVMAGAHQGWVRSCTVDPVTNKWFVTGSSDSTIKIWDLASLNLKATITGHIMGVRSLAVSSRYPYLFSGSEDKTVKCWDLERTNSLLGCQIRNYHGHVGGIYAMALHPELDLLFTGGRDSVIRVWDLRSRTEIMVLSGHRSDITSIASQIGDPQIITSSMDATIRLWDIRKATTQLALTHHSKSIRLMAMHPQEMTMCSGDTSGNLKEWLLPGGELLNEFGHSGENKIINTLSINPSNNTLFSGYDDGRMEFYDYVSGDLLQSDATTPVTGSTESAIYASTFDMLGLRLITCEGDKSIKIWGEE

SEQ ID NO: 7721 - DNA, 1305 bp, Kluyveromyces lactis
  CDS (1)..(1305)
atgaatacatccagccgtagctctgaaccttcgaaggtagcagatgatgtttacgttcaaactcggtggaataatgaatttaaacatgctgattatttacctgagtcgttacagaagtgcctggatcaagaaaagactgttttagaaaggtacagtgaattagttgaggtgtcgaaaactgttgcaaacgaaagctctcaagcattagtcaaacataccacaaaaccaggcgaccaactagtacgaagagtgttccaacagccacatcagcagatttcattgatggaacgttatgaaaagactcgaagttataaaccgcaatggcatgcaccatggaaactcagtaaggtaataaatggtcatactggatgggtaagatgtgtatgcgtggaccccgttgacaatgaatggtttgctactggtagcaacgatacaaccattaaaatctgggatttagctgcgggaaagttgaaaattactctaatcgggcatgtaatgagtgttcgagatattgctatctcaaagagacatccttatatgttctcagcaagcgaagataaacttgtaaaatgttgggatctagaaagaaatactgcaattagggattttcacggtcatttatctggcgtgcataccgttgatgttcatccgagccttgatataatagctactgctggtcgtgatgctgtagtaaggttgtgggatatacgatcaagatctgagataatggttctgcccggtcataaaagccctataaataaagtcaaatgccttcccgttgacccacaaataatcagttgttccggggatgcaacagttagactttgggatatcattgcagggaaggcaagcaaagttttaacgcaccatagtagaaacatcagagacttgacgctacacccagcagagtttagctttgccagtgtatctacgaacgacgtcagatcctggaaattgcccgaaggacagctattaaccaactttcaatcccagaacactgggattttgaataccgtatcaattaatcacgataatgtactattagctggtggagatgacggtactttgtgcttttacgattacaaaacaggacacaaataccaaagtatgatgacaactgaagttgctggctcacttgaaagtgagcgatcgattttatgcagcacctttgatgtcacaggaacaagactcatcacaggggaaggagacaaaagcatcaaaatatggaagcaagtccctgatgctacagaagatacattccctggcttgccgtggaatcccacgttaatatctcaaagattctaa

SEQ ID NO: 7722 - protein, 434 aa, Kluyveromyces lactis
MNTSSRSSEPSKVADDVYVQTRWNNEFKHADYLPESLQKCLDQEKTVLERYSELVEVSKTVANESSQALVKHTTKPGDQLVRRVFQQPHQQISLMERYEKTRSYKPQWHAPWKLSKVINGHTGWVRCVCVDPVDNEWFATGSNDTTIKIWDLAAGKLKITLIGHVMSVRDIAISKRHPYMFSASEDKLVKCWDLERNTAIRDFHGHLSGVHTVDVHPSLDIIATAGRDAVVRLWDIRSRSEIMVLPGHKSPINKVKCLPVDPQIISCSGDATVRLWDIIAGKASKVLTHHSRNIRDLTLHPAEFSFASVSTNDVRSWKLPEGQLLTNFQSQNTGILNTVSINHDNVLLAGGDDGTLCFYDYKTGHKYQSMMTTEVAGSLESERSILCSTFDVTGTRLITGEGDKSIKIWKQVPDATEDTFPGLPWNPTLISQRF

SEQ ID NO: 7723 - DNA, 1422 bp, Schizosaccharomyces pombe
  CDS (1)..(1422)
atgacagaagcaaaaaacatatcggatgatacagatgtactttctttgactacaaatagtcttagaacatcaaaaactctttttggagccgagtttgggtcagttaccagttttgacgatactgtagctcaaaatctcaaaagaacatacaaagaacatttagaatatggttctgttcttggaggaactgttggaaaacggaagaaccgacattacgaagaagacactattggtagtaatgctttgacggttagagcagacagtgaaaacccttcctcccaagtgatcaccaagttttcagatcctaataagaaaatagcagggcaggtttccatgcaatctttagaaaaaattaaaggagttcctgaagcagcacatagaattgccggagaatcccaggcttctctcgtaaagcgcactcttgccgaacagattcgccctgaatggcatgctccatggactcttatgcgtgttattagtggtcatttgggttgggttcgatgcgtagatgttgaacccggtaatcaatggttttgcacgggtgctggggaccgcaccatcaaaatatgggacttagcgtctggagtacttaagctaacattgactgggcatatcgccactgtgcgaggattagcagtatctccccgtcatccatatttattttcctgtggtgaagacaaaatggtaaaatgctgggacctcgaaactaataaagtgatccgccattatcacgggcatctttccggagtctatgccttaaaactccatccaacacttgacgtccttgttaccgctggtcgtgatgcagtcgctcgtgtttgggatatgcgcactcgccaaaatgtccatgttttatcgggccacaaatccactgttgcttctttagccgttcaagaattcgatcctcaagtagtcacgggttccatggattctactatcagattatgggatttagcagctgggaaaaccttgacgaccttgacacatcacaaaaaaactgttcgtgccctgtctttgcatccagatgaatttacttttgccagtggctcgtccgacaatatcaaacattggaaattccctgaaggcgcatttatgggtaattttgaaggacataatgcaatcgttaatactctttcaataaactcagataatgttatgttttctggtgctgataatggaagcatgtgcttttgggattggaagtctggtcacaaatatcaagagcttcaatctgttgttcaacctggttcattggatagcgaagctggaatctttgctagttcttttgataaaaccggtttgcgtctaattacttgtgaggctgataaaagcgtaaagatatacaaacaagtggacaatgccacacctgaaacacatcccaatttgccatggacaccatcaaatcttcgtcggcgatattaa

SEQ ID NO: 7724 - protein, 473 aa, Schizosaccharomyces pombe
MTEAKNISDDTDVLSLTTNSLRTSKTLFGAEFGSVTSFDDTVAQNLKRTYKEHLEYGSVLGGTVGKRKNRHYEEDTIGSNALTVRADSENPSSQVITKFSDPNKKIAGQVSMQSLEKIKGVPEAAHRIAGESQASLVKRTLAEQIRPEWHAPWTLMRVISGHLGWVRCVDVEPGNQWFCTGAGDRTIKIWDLASGVLKLTLTGHIATVRGLAVSPRHPYLFSCGEDKMVKCWDLETNKVIRHYHGHLSGVYALKLHPTLDVLVTAGRDAVARVWDMRTRQNVHVLSGHKSTVASLAVQEFDPQVVTGSMDSTIRLWDLAAGKTLTTLTHHKKTVRALSLHPDEFTFASGSSDNIKHWKFPEGAFMGNFEGHNAIVNTLSINSDNVMFSGADNGSMCFWDWKSGHKYQELQSVVQPGSLDSEAGIFASSFDKTGLRLITCEADKSVKIYKQVDNATPETHPNLPWTPSNLRRRY

SEQ ID NO: 7725 - DNA, 1419 bp, Yarrowia lipolytica
  CDS (1)..(1419)
atggcggactgcatcaaggtgatgccaacaccgacaggaatggcgatggctggccgtcataatcagagactacaaggaacttgtaatccacacatgcctgtcgccaaagacctgtttccagagtatggtactctcgcgaccggcgaaaatgaaccctctcgaaatatccgacgtgctcaaaaactcagggagttccagaacctcgaacttccaccatacctagcaaagcaggtggctgccaaaatggcagagaagggtttggcagtggaagccacaggaggtgtggcagtccagcgaatcgcaggaggatctcagagcggccagaaggctctgatgggagcttcttcctcggcactcacgaaacacacgccctctgcaagccaaccaactacacacgacagtctcactaatctcggagccaaccttacacagtcgaaaccggcgtggcacgcaccatgggagatctacagagtcattacaggccatcagggctgggtgagatctgtttgtgttgaaccagagaaccagtggtttgctacaggttctgcagacaagactatcaagatctgggatctggctacaggaaaattgcgactgactctcacaggacacattatgggtgttagagcattgggagtgtcgccacgacatccttacatgttttcgggaggtgaagacaagatggtcaagtgttgggatctggaaactaacaaggtcgttcgacactaccatggccatctctctgcagtctactcgctggacattcatcctactctggatgtcctagtgtctgctggtcgagacgctgtggcccgtgtgtgggacattcgtactcgtgaccctgtggttgttctcagtggacacaagtcgactatcaacagagtcaagttccaggcctctgaaccccaggtgattacagcttcggcagatgagactgtgcgactgtggaacctacaggccgggaagaccatgacaacgctcacgcatcacaagaagagtgtgcgaggcctcactttacatcccgaggagttcactttctccacggcctctgctaactccagtaagcaatggaagtgtcccgagggcgatctagtgctcaactacgacgaccagaacgctatcatcaataccctgtccgttaaccaagacaacgtcatgttttcgggaggcgacaacggctctattggcttttatgactggaagactggacatatgttccagagcacccagtctattcccatcccaggatctatcgagagtgaaaacggtattttcgactccagtttcgacaagactggtcttcgcctcatcacctgtgaggctgacaagagcatcaaaatgtggcgcgagaagcccaatgccacagcagaaagtgatcccggtctcgaatggaaacccaagatataccagacctattag

SEQ ID NO: 7726 - protein, 472 aa, Yarrowia lipolytica
MADCIKVMPTPTGMAMAGRHNQRLQGTCNPHMPVAKDLFPEYGTLATGENEPSRNIRRAQKLREFQNLELPPYLAKQVAAKMAEKGLAVEATGGVAVQRIAGGSQSGQKALMGASSSALTKHTPSASQPTTHDSLTNLGANLTQSKPAWHAPWEIYRVITGHQGWVRSVCVEPENQWFATGSADKTIKIWDLATGKLRLTLTGHIMGVRALGVSPRHPYMFSGGEDKMVKCWDLETNKVVRHYHGHLSAVYSLDIHPTLDVLVSAGRDAVARVWDIRTRDPVVVLSGHKSTINRVKFQASEPQVITASADETVRLWNLQAGKTMTTLTHHKKSVRGLTLHPEEFTFSTASANSSKQWKCPEGDLVLNYDDQNAIINTLSVNQDNVMFSGGDNGSIGFYDWKTGHMFQSTQSIPIPGSIESENGIFDSSFDKTGLRLITCEADKSIKMWREKPNATAESDPGLEWKPKIYQTY

SEQ ID NO: 7727 - DNA, 1792 bp, Triticum aestivum
  CDS (49)..(1482)
aggagaagtgagtagtagctcggagatcggcgggcggcggctatggcgatggcggcggcatcagcgggcggcgagccggtagagccgcagtcgttgaagaagctgagtctcaagtcgctgagacgctccctcgacctcttcgcgcccacccactccctccccttcgctcccgacgccgagagcaaacggattcgcgtcagctgcaaggtgaatgcggagtacggcgcggtcaagaacctgccgaccgaccaggaccgagcgcaggggaagggcgccgccgctccttccaatgcattggcgcttctaggcacacaagacacaaaagatgctcctagggaaggcactagtaatgccattatccctgcaccgcttatgcttcctaaagcacctgaatctgcagtgcctggcaaaaatacaaccgtattgtcggttcctgggtcatctgatagattctcgacatctgcactgatggaaaggttgccaagtagatggcctaaacctgtatggcatgctccctggaagaactatcgggttatcagtggccacttgggctgggtgcgatctatagcatttgatccaggcaatgaatggttctgtactggttctgctgatagaacaataaagatatgggacctggcatcaggaatgttgaagctgacactaactggtcatattgaacaagtccgtggacttgctgtcagtcagcggcacacatatttattttctgctggtgatgacaaacaagtaaaatgttgggatcttgaacaaaataaggttattcggtcttatcatgggcatctgagtggggtttactgcttagctctccatccaacaattgatgtcttgctgacaggtggtcgagattcagtttgcagggtgtgggatatccgaacaaaggctcatgtttctgctttaactggacatgataacacagtttgttcagtgtttgctcggccaacggatccacaagttgtcactggctcacatgatacaactatcaagttctgggatcttgtagctgggaaaactatgtgtactcttacacaccataagaagtctgttcgggccatggcactacatccaaaagagaaatcatttgcttcagcatctgccgacaacataaaaaagtggagtctgcccaaaggcgaatttctgcacaacatgctgtcccagcaaaaaacaattctaaatgcaatggctgttaatgaggatggtgtcctggcaactgcaggggataatggaagcatgtggttttgggattggaagagcggccacaattttcagcaagaacagactattgtccagcctggatcattggagagtgaagcatgtatatatgccctttcttatgataatagtggatcaaggcttgtgacatgcgaggcagataaaacaataaagatgtggaaagaagatttaacagcaacaccagaaacccaccctgtcaacttcaagccaccaaaagacatccggagatattgattgccacataagttacaagatttgtttcgaccacccaaattctaccctttggttgagtgttcacctcctttatggcggtgttcaagccctaacgtccctgttgtataatacagatggtgttctagtatttattgctgaatctgaagcatgttttctagttcaaatatattttgttctatgcattgggaatttttgtgatctatcaaaattgaatttctgcagctgtagtggtgtttgtaagtcactacaggttctctgtaagattgagatcttgctaatgcttcaggctaggttcaaaaaaaaaaaaaaa

SEQ ID NO: 7728 - protein, 477 aa, Triticum aestivum
MAAASAGGEPVEPQSLKKLSLKSLRRSLDLFAPTHSLPFAPDAESKRIRVSCKVNAEYGAVKNLPTDQDRAQGKGAAAPSNALALLGTQDTKDAPREGTSNAIIPAPLMLPKAPESAVPGKNTTVLSVPGSSDRFSTSALMERLPSRWPKPVWHAPWKNYRVISGHLGWVRSIAFDPGNEWFCTGSADRTIKIWDLASGMLKLTLTGHIEQVRGLAVSQRHTYLFSAGDDKQVKCWDLEQNKVIRSYHGHLSGVYCLALHPTIDVLLTGGRDSVCRVWDIRTKAHVSALTGHDNTVCSVFARPTDPQVVTGSHDTTIKFWDLVAGKTMCTLTHHKKSVRAMALHPKEKSFASASADNIKKWSLPKGEFLHNMLSQQKTILNAMAVNEDGVLATAGDNGSMWFWDWKSGHNFQQEQTIVQPGSLESEACIYALSYDNSGSRLVTCEADKTIKMWKEDLTATPETHPVNFKPPKDIRRY

SEQ ID NO: 7729 - DNA, 1434 bp, Glycine max
  CDS (1)..(1434)
atggaggtggagcccgtggagccgcagtcgctgaagaagctaagcttcaagtctctgaagcgcgctctcgatctcttctctcccatccacggacacctcgctactcccgatgccgaaagcaagaaaatacgcactagccacaaggtgagcgtggagtatggtggaatcaaaagcactgccaatcaacctcctcctcgtcaagttagttctgccacccaggatccagggtcctctaacactctggctcttccaggtcccggagattccaaggattctcagaaaggaggaccccaaaatgccttggttgttggtccaactatcccatccacaacaccgaatgatactggttttcagaacaaaagtacagcggttgtttcagcctctggttcatctgaaagaaatttatcaacatctgctttgatggaaagaatgccaagtaaatggccacgtcctgtatggcacgcaccatggaagaactacagggtcatcagcggtcacttgggatgggtgagatctgttgcagttgatcccagtaacacatggttttgtactggttctgcagatcgaactatcaagatatgggacttggcaagtggagtattgaagctcacattaacaggccacattgaacaagttagaggtcttgctgttagcaacagacatacttacatgttctctgctggtgacgataaacaagttaaatgttgggatcttgaacagaataaggttattaggtcttatcatggtcatctgagtggtgtttattgcttggctcttcatcccacaattgacgttttactaaacggaggacgtgattctgtctgccgggtttgggatatacgaagtaaaatgcagattcatgctctttcaggtcatgataacactgtctgttctgtgtttacgcggccaacggatccccaagttgttacaggttctcatgacactaccatcaagatgtgggaccttagatatggtaaaacaatgtcaactcttacaaaccataaaaaatctgttcgagcaatggcccagcatcccaaagagcaagcttttgcatctgcttcagctgacaatattaaaaagttcacccttccaaaaggagaattttgccacaatatgctctctcaacagaaaactatcatcaatgcaatggctgtcaatgaggagggtgtgatggttactggaggcgacaatggcagcatgtggttctgggattggaagagtggtcacaatttccagcaatcccaaacaattgtccagcctggttcattggacagtgaagctggtatttatgcttgtacctatgatcttactggttcgaggctcataacctgcgaagctgacaagacgataaaaatgtggaaagaagatgagagtgccactccagaaacccatccccttaacttcaggcctcctaaagacatccgtcgattctag

SEQ ID NO: 7730 - protein, 477 aa, Glycine max
MEVEPVEPQSLKKLSFKSLKRALDLFSPIHGHLATPDAESKKIRTSHKVSVEYGGIKSTANQPPPRQVSSATQDPGSSNTLALPGPGDSKDSQKGGPQNALVVGPTIPSTTPNDTGFQNKSTAVVSASGSSERNLSTSALMERMPSKWPRPVWHAPWKNYRVISGHLGWVRSVAVDPSNTWFCTGSADRTIKIWDLASGVLKLTLTGHIEQVRGLAVSNRHTYMFSAGDDKQVKCWDLEQNKVIRSYHGHLSGVYCLALHPTIDVLLNGGRDSVCRVWDIRSKMQIHALSGHDNTVCSVFTRPTDPQVVTGSHDTTIKMWDLRYGKTMSTLTNHKKSVRAMAQHPKEQAFASASADNIKKFTLPKGEFCHNMLSQQKTIINAMAVNEEGVMVTGGDNGSMWFWDWKSGHNFQQSQTIVQPGSLDSEAGIYACTYDLTGSRLITCEADKTIKMWKEDESATPETHPLNFRPPKDIRRF

SEQ ID NO: 7731 - DNA, 1437 bp, Zea mays
  CDS (1)..(1437)
atggcaacggcggcggcggatggcccccctgtggaaccgcagtctctgaagaagctgagcctccggtcgctcaagcggtccctggacctcttcgccccggcgcacgccctcctcttcacgcccgacgccgagagcaagcggattcgtactgggtgcaaggtgagtgcggagtacggtgcggtgaaggacctcacgccggagcaggggcgcggtgggcagggcaagggtcctgcgccgccatcttcaacagctttggcattgccaggaacacaagatacaaaagatgctcacggagaaggctctaggaatgccattgtccctgcaccacttatgctgccaaaagcacctgaatctaccatacctggcaaaaatacaactctgtcaattcctggatcatctgacagattttctacatccgcactgatggaaaggatacctagtagatggccacggcctacatggcatgctccttggaagaactatcgggtcatcagtggtcacttgggatgggttcgatctattgcatttgatccagcgaatgaatggttctgcactggttctgccgataggacaataaagatatgggatcttgcatcaggaaccctgaagcttacactgactggtcatattgagcaaattcgtggacttgctgtcagccaacgtcacacttatttattttctgctggtgatgacaaacaagtaaaatgttgggatcttgaacaaaacaaggttattaggtcctaccatgggcatctgagtggtgtttactgcctagctctccatccaacaattgatatcttactgactggtggccgggattcagtttgcagggtgtgggacatcagaacaaaagcacatgtttctgctttaacagggcatgacaacactgtctgttcagtgtttgctcgtcctacggatcctcaagttgttactggttcacatgatacaactattaaattctgggatcttgtagctgggaggactatgtgtacccttactcaccataaaaagtctgtccgagctatggcgcttcatccaaaggagaaagcatttgcatcagcatcagcagacaacgtaaagaagtttaaccttcccaaaggcgaatttctgcacaacatgctgtcgcagcagaaaacaataatcaattcaatggctgtaaatgaggatggtgtcttggcaactggaggggataatggaagcctgtggttttgggactggaagagtggtcataactttcaacaagatcagactatagtccagcctggatcactggagagtgaggcatgcatatatgccctctcatatgacgtgagcggatcaaggcttgtgagctgtgaggcggataagactataaagatgtggaaagaggacttgacagcgacgccagagactcatcccatcaatttcaagcccccaaaggacatccgaagatattga

SEQ ID NO: 7732 - protein, 478 aa, Zea mays; identical to SEQ ID NO: 7694

SEQ ID NO: 7733 - DNA, 24 bp, Artificial sequence
  primer
atggacggaaatgatcacaaagtc

SEQ ID NO: 7734 - DNA, 25 bp, Artificial sequence
  primer
ctaaaatcttttggcgcttaagttg

SEQ ID NO: 7735 - protein, 332 aa, Artificial sequence
  consensus sequence
  Variant (2)..(2): Xaa in position 2 is any amino acid
  Variant (9)..(10): Xaa in position 9 to 10 is any amino acid
  Variant (14)..(14): Xaa in position 14 is any amino acid
  Variant (16)..(16): Xaa in position 16 is any amino acid
  Variant (18)..(18): Xaa in position 18 is any amino acid
  Variant (23)..(27): Xaa in position 23 to 27 is any amino acid
  Variant (29)..(29): Xaa in position 29 is any amino acid
  Variant (30)..(30): Xaa in position 30 is any or no amino acid
  Variant (32)..(32): Xaa in position 32 is any amino acid
  Variant (35)..(35): Xaa in position 35 is any amino acid
  Variant (38)..(39): Xaa in position 38 to 39 is any amino acid
  Variant (41)..(41): Xaa in position 41 is any amino acid
  Variant (50)..(50): Xaa in position 50 is any amino acid
  Variant (52)..(52): Xaa in position 52 is any amino acid
  Variant (55)..(55): Xaa in position 55 is any amino acid
  Variant (62)..(64): Xaa in position 62 to 64 is any amino acid
  Variant (66)..(66): Xaa in position 66 is any amino acid
  Variant (71)..(71): Xaa in position 71 is any amino acid
  Variant (74)..(74): Xaa in position 74 is any amino acid
  Variant (76)..(76): Xaa in position 76 is any amino acid
  Variant (79)..(81): Xaa in position 79 to 81 is any amino acid
  Variant (84)..(84): Xaa in position 84 is any amino acid
  Variant (92)..(92): Xaa in position 92 is any amino acid
  Variant (94)..(94): Xaa in position 94 is any amino acid
  Variant (95)..(99): Xaa in position 95 to 99 is any or no amino acid
  Variant (103)..(103): Xaa in position 103 is any amino acid
  Variant (113)..(116): Xaa in position 113 to 116 is any amino acid
  Variant (120)..(120): Xaa in position 120 is any amino acid
  Variant (122)..(124): Xaa in position 122 to 124 is any amino acid
  Variant (126)..(126): Xaa in position 126 is any amino acid
  Variant (130)..(130): Xaa in position 130 is any amino acid
  Variant (132)..(132): Xaa in position 132 is any amino acid
  Variant (137)..(137): Xaa in position 137 is any amino acid
  Variant (139)..(145): Xaa in position 139 to 145 is any amino acid
  Variant (147)..(147): Xaa in position 147 is any amino acid
  Variant (150)..(155): Xaa in position 150 to 155 is any amino acid
  Variant (157)..(161): Xaa in position 157 to 161 is any amino acid
  Variant (165)..(168): Xaa in position 165 to 168 is any amino acid
  Variant (170)..(170): Xaa in position 170 is any amino acid
  Variant (172)..(172): Xaa in position 172 is any amino acid
  Variant (174)..(176): Xaa in position 174 to 176 is any amino acid
  Variant (180)..(181): Xaa in position 180 to 181 is any amino acid
  Variant (183)..(184): Xaa in position 183 to 184 is any amino acid
  Variant (186)..(187): Xaa in position 186 to 187 is any amino acid
  Variant (194)..(194): Xaa in position 194 is any amino acid
  Variant (197)..(200): Xaa in position 197 to 200 is any amino acid
  Variant (203)..(203): Xaa in position 203 is any amino acid
  Variant (205)..(206): Xaa in position 205 to 206 is any amino acid
  Variant (210)..(210): Xaa in position 210 is any amino acid
  Variant (212)..(215): Xaa in position 212 to 215 is any amino acid
  Variant (216)..(217): Xaa in position 216 to 217 is any or no amino acid
  Variant (219)..(222): Xaa in position 219 to 222 is any amino acid
  Variant (224)..(224): Xaa in position 224 is any amino acid
  Variant (226)..(229): Xaa in position 226 to 229 is any amino acid
  Variant (231)..(236): Xaa in position 231 to 236 is any amino acid
  Variant (237)..(238): Xaa in position 237 to 238 is any or no amino acid
  Variant (240)..(240): Xaa in position 240 is any amino acid
  Variant (242)..(245): Xaa in position 242 to 245 is any amino acid
  Variant (247)..(249): Xaa in position 247 to 249 is any amino acid
  Variant (250)..(250): Xaa in position 250 is any or no amino acid
  Variant (252)..(254): Xaa in position 252 to 254 is any amino acid
  Variant (256)..(256): Xaa in position 256 is any amino acid
  Variant (260)..(262): Xaa in position 260 to 262 is any amino acid
  Variant (264)..(264): Xaa in position 264 is any amino acid
  Variant (266)..(266): Xaa in position 266 is any amino acid
  Variant (268)..(268): Xaa in position 268 is any amino acid
  Variant (271)..(272): Xaa in position 271 to 272 is any amino acid
  Variant (274)..(276): Xaa in position 274 to 276 is any amino acid
  Variant (278)..(280): Xaa in position 278 to 280 is any amino acid
  Variant (285)..(286): Xaa in position 285 to 286 is any amino acid
  Variant (288)..(288): Xaa in position 288 is any amino acid
  Variant (289)..(289): Xaa in position 289 is any or no amino acid
  Variant (291)..(295): Xaa in position 291 to 295 is any amino acid
  Variant (297)..(298): Xaa in position 297 to 298 is any amino acid
  Variant (300)..(300): Xaa in position 300 is any amino acid
  Variant (303)..(305): Xaa in position 303 to 305 is any amino acid
  Variant (307)..(307): Xaa in position 307 is any amino acid
  Variant (310)..(310): Xaa in position 310 is any amino acid
  Variant (313)..(313): Xaa in position 313 is any amino acid
  Variant (316)..(317): Xaa in position 316 to 317 is any amino acid
  Variant (318)..(319): Xaa in position 318 to 319 is any or no amino acid
  Variant (322)..(325): Xaa in position 322 to 325 is any amino acid
  Variant (327)..(330): Xaa in position 327 to 330 is any amino acid
  Variant (331)..(331): Xaa in position 331 is any or no amino acid
PXWHAPWKXXRVIXGXHXGWVRXXXXXPXXNXWFXTGXXDXTIKIWDLAXGXLKXTLTGHIXXXRXLAVSXRHXYXFSXXXDKXVKCWDLEXNXXXXXXVIRXYHGHLSGVYXXXXHPTXDXXXTXGRDXVXRVWDXRXXXXXXXLXGHXXXXXXVXXXXXDPQXXXXSXDXTXXXWDLXXGXXMXXLTHHKKXVRXXXXHPXEXXFASXSXXXXXXKXXXXPXGXXXXNXXXXXXXXIXNXXXXNXXXXVXXXGXDNGXXXFXDXKXGHXXQXXXTXXXPGSLXXEXXIXXXXXDXXGXRLXXXEXDKXIKXWKXXXXATXXXXPXXXXXP

SEQ ID NO: 7736 - protein, 33 aa, Artificial sequence
  protein pattern
  Variant (2)..(2): Xaa in position 2 is Asn or Thr
  Variant (4)..(5): Xaa in position 4 to 5 is any or no amino acid
  Variant (7)..(8): Xaa in position 7 to 8 is any or no amino acid
  Variant (10)..(10): Xaa in position 10 is Phe, Trp or Tyr
  Variant (12)..(12): Xaa in position 12 is Trp or Tyr
  Variant (14)..(14): Xaa in position 14 is Ser or Thr
  Variant (16)..(16): Xaa in position 16 is His or Tyr
  Variant (17)..(17): Xaa in position 17 is any amino acid
  Variant (18)..(18): Xaa in position 18 is Phe or Tyr
  Variant (20)..(22): Xaa in position 20 to 22 is any amino acid
  Variant (23)..(23): Xaa in position 23 is Ser or Thr
  Variant (24)..(26): Xaa in position 24 to 26 is any amino acid
  Variant (27)..(27): Xaa in position 27 is Pro or Val
  Variant (30)..(30): Xaa in position 30 is Ile, Leu or Pro
  Variant (31)..(31): Xaa in position 31 is Asp, Glu or Gln
  Variant (32)..(32): Xaa in position 32 is Ala, Gly or Ser
DXGXXSXXFXDXKXGXXXQXXXXXXXXGSXXXE

SEQ ID NO: 7737 - protein, 15 aa, Artificial sequence
  protein pattern
  Variant (2)..(2): Xaa in position 2 is any amino acid
  Variant (8)..(10): Xaa in position 8 to 10 is any amino acid
  Variant (13)..(13): Xaa in position 13 is Ile or Leu
  Variant (14)..(14): Xaa in position 14 is any amino acid
PXWHAPWXXXRVXXG

SEQ ID NO: 7738 - protein, 33 aa, Artificial sequence
  protein pattern
  Variant (2)..(3): Xaa in position 2 to 3 is any amino acid
  Variant (5)..(5): Xaa in position 5 is any amino acid
  Variant (8)..(8): Xaa in position 8 is Ile, Leu or Val
  Variant (9)..(9): Xaa in position 9 is Cys, Ser or Thr
  Variant (10)..(10): Xaa in position 10 is Cys or Gly
  Variant (12)..(12): Xaa in position 12 is any amino acid
  Variant (15)..(15): Xaa in position 15 is Ser or Thr
  Variant (18)..(18): Xaa in position 18 is Ile, Met or Val
  Variant (20)..(21): Xaa in position 20 to 21 is any or no amino acid
  Variant (23)..(25): Xaa in position 23 to 25 is any amino acid
  Variant (26)..(26): Xaa in position 26 is Asp, Glu, Gly, Asn, Ser or Thr
  Variant (28)..(28): Xaa in position 28 is Glu or Thr
  Variant (29)..(29): Xaa in position 29 is any amino acid
  Variant (30)..(30): Xaa in position 30 is Asp or Glu
  Variant (31)..(31): Xaa in position 31 is Pro, Ser or Thr
  Variant (32)..(32): Xaa in position 32 is any amino acid
  Variant (33)..(33): Xaa in position 33 is Leu or Pro
DXXGXRLXXXEXDKXIKXWXXKXXXXAXXXXXX

SEQ ID NO: 7739 - protein, 22 aa, Artificial sequence
  protein pattern
  Variant (2)..(2): Xaa in position 2 is any amino acid
  Variant (3)..(6): Xaa in position 3 to 6 is any or no amino acid
  Variant (8)..(8): Xaa in position 8 is any or no amino acid
  Variant (10)..(10): Xaa in position 10 is Ala, Ser or Thr
  Variant (11)..(11): Xaa in position 11 is Leu, Met or Val
  Variant (12)..(12): Xaa in position 12 is Ala or Ser
  Variant (13)..(13): Xaa in position 13 is any amino acid
  Variant (15)..(15): Xaa in position 15 is any amino acid
  Variant (16)..(16): Xaa in position 16 is Asp, Glu, Gln or Ser
  Variant (17)..(17): Xaa in position 17 is Asp, Gly or Asn
  Variant (18)..(18): Xaa in position 18 is Asn or Val
  Variant (19)..(21): Xaa in position 19 to 21 is any amino acid
  Variant (22)..(22): Xaa in position 22 is Ala, Gly or Ser
SXXXXXIXNXXXXNXXXXXXXX

SEQ ID NO: 7740 - protein, 10 aa, Artificial sequence
  protein pattern
  Variant (2)..(2): Xaa in position 2 is Ala, Glu, Gln or Thr
  Variant (5)..(5): Xaa in position 5 is any amino acid
  Variant (8)..(8): Xaa in position 8 is Ala or Ser
  Variant (9)..(9): Xaa in position 9 is Ala, Gly or Asn
NXWFXTGXXD

SEQ ID NO: 7741 - DNA, 660 bp, Escherichia coli K12
  CDS (1)..(660): transl_table=11
atggatcgtattgttagttcttcacatgaccgtacatcactgcttagcacccataaggtgctgcgtaatacctattttctgctgagcctgacgctggccttttcggcgattaccgcaactgccagtacggtgctgatgctgccatctccgggtctgattctgacgctggtgggtatgtatggtttgatgttcctgacctataaaacggcgaataagccgaccgggattatctccgcattcgcctttaccggttttctgggttatatcctcggacctattctgaacacctatctgtctgccggaatgggtgacgtaatcgctatggcactgggcggaacggcgttagtgttcttctgctgctctgcatatgtgctgaccacccgcaaagatatgtcgttcctcggcggtatgctgatggcgggtattgtggtggtgctgattggtatggttgcgaatatcttcctgcagctgcctgctctgcatctggcgatcagcgcggtcttcattctgatctcctctggcgctatcttgtttgaaaccagcaacatcattcatggcggtgagacgaactatattcgtgccacggttagcctgtatgtttcgctgtacaacatcttcgtcagcctgctgagcattctgggcttcgctagccgcgattaa

SEQ ID NO: 7742 - protein, 219 aa, Escherichia coli K12
MDRIVSSSHDRTSLLSTHKVLRNTYFLLSLTLAFSAITATASTVLMLPSPGLILTLVGMYGLMFLTYKTANKPTGIISAFAFTGFLGYILGPILNTYLSAGMGDVIAMALGGTALVFFCCSAYVLTTRKDMSFLGGMLMAGIVVVLIGMVANIFLQLPALHLAISAVFILISSGAILFETSNIIHGGETNYIRATVSLYVSLYNIFVSLLSILGFASRD

SEQ ID NO: 7743 - DNA, 663 bp, Vibrio fischeri ES114
  CDS (1)..(663)
atgaataatcaaatgttcagccaaactcatacacaagagtcggctctacaaactaacaaagtattacgtaatacttatttcttattatcaatgacactactttggtctgcggtagttgctggtgtttcaatggcaatgaacctacctcgtccaggtatcatcatcatgcttgttggtttctacggcctacttttcttgacggaaaagaaccgtaacaacaacatgggtcttgtatttacgttcctatttacaggcttcttaggctacaccattggtccaatccttaacatgtacattggtgcaggtatgggtgatgtgatcttaactgcacttggcggtactgcgctttctttcatggcagcatctgcttatgcactaacaactaagcgtgacctatcgttccttaacggtgtgttaatggctggttttgttgttctattaattggtatggtagcaaacatcttcctacaaatgccattattacacctagcaatgagtggtatgtttatcctgttctcaacaggtgcaatcttgctaacaacgcaatcaatcattcgtggtggtgaaacaaactacatctcagcaacgattacgctgtatgtttctatctacaatatcttcatcagcctactaagcattcttggtatcatgcgtgatgattaa

SEQ ID NO: 7744 - protein, 220 aa, Vibrio fischeri ES114
MNNQMFSQTHTQESALQTNKVLRNTYFLLSMTLLWSAVVAGVSMAMNLPRPGIIIMLVGFYGLLFLTEKNRNNNMGLVFTFLFTGFLGYTIGPILNMYIGAGMGDVILTALGGTALSFMAASAYALTTKRDLSFLNGVLMAGFVVLLIGMVANIFLQMPLLHLAMSGMFILFSTGAILLTTQSIIRGGETNYISATITLYVSIYNIFISLLSILGIMRDD

SEQ ID NO: 7745 - DNA, 666 bp, Photobacterium profundum SS9
  CDS (1)..(666)
atgaacgatcgtatagtgaatcgtactggatcttacgatagcgtactttcaaccaataaggttttaagaaacacgtacttcctactttctctaacattgctttggtctgcggttatcgctggtaccgctatggcaatgaacttgccttacccaggaatcatcattacgttggttggtttctacggtctaatgtttttaactgaaaagaacaaagacagtagccttggtatcgtatttacattcgcattaacgggtttcatgggttataccctagggccaattctgaacatgtacattggcgcaggtatggggcacgcaattgttcctgctctaggcggtacagcccttacatttatggcttgttctgcgtatgcactaacaactaagcgtgatctatcattcttgaatggtatgttaatggctggttttgttgcgattattgttgcggttgttgcaaacatcttcctacaaataccaatgctttcattagcaatcagcggtatgtttgttctgttctcttcagcggcgattctgcttactacgcagtcaatcatccgtggtggtgaaacaaactacatttctgctaccgttacgttatatgtctctatctacaacctattcctaagcttgctacaaatcttaggcatcatgggtaacaacgattaa

SEQ ID NO: 7746 - protein, 221 aa, Photobacterium profundum SS9
MNDRIVNRTGSYDSVLSTNKVLRNTYFLLSLTLLWSAVIAGTAMAMNLPYPGIIITLVGFYGLMFLTEKNKDSSLGIVFTFALTGFMGYTLGPILNMYIGAGMGHAIVPALGGTALTFMACSAYALTTKRDLSFLNGMLMAGFVAIIVAVVANIFLQIPMLSLAISGMFVLFSSAAILLTTQSIIRGGETNYISATVTLYVSIYNLFLSLLQILGIMGNND

SEQ ID NO: 7747 - DNA, 669 bp, Idiomarina loihiensis L2TR
  CDS (1)..(669)
atgaacaatcgcagtcagacttatgtcggtcagaacgaatcgacgctggccgttaataaggtattacgcaacacctacactttattggcaatgacattagcctttagtgctattgttgctactatcagcacgatgatgaacttgccctatccgggtttcattatcactttagttgcttactttggcttactttttggtattcacaaaaccaaagatagcggcatgggcattgtactaaccttcgctctaacaggctttttaggttacacccttggccctatccttaacatggcattatcaatgcctggtggtggcgagatggttgctactgcgttaggcggtacagctctgaccttctttgcaacttcggcttatgtgttaaccacgaagaaagacatgtctaaactgggtggtctggttactgccggtattatcatggtttttgtggcgatgctggctaacctgttcttccaactgccagcattacagcttgcaatatctgctatcatgattccattgatggcaatgctgattatgtggcagaccagcgacattattaacggtggcgagcgtaattacatccttgcaacagtcactttgtatgtttcgatttataacttgttccttagcttgctacaattgctaatggcgtttagcggcgatgattaa

SEQ ID NO: 7748 - protein, 222 aa, Idiomarina loihiensis L2TR
MNNRSQTYVGQNESTLAVNKVLRNTYTLLAMTLAFSAIVATISTMMNLPYPGFIITLVAYFGLLFGIHKTKDSGMGIVLTFALTGFLGYTLGPILNMALSMPGGGEMVATALGGTALTFFATSAYVLTTKKDMSKLGGLVTAGIIMVFVAMLANLFFQLPALQLAISAIMIPLMAMLIMWQTSDIINGGERNYILATVTLYVSIYNLFLSLLQLLMAFSGDD

SEQ ID NO: 7749 - DNA, 672 bp, Azotobacter vinelandii
  CDS (1)..(672)
atgcacgaacccaacagttatgcacttcaatccgcccaggcggagcaactggaagtcagccgcgtcctgcgcaacacctacggtctgctggccctgaccctcggcttcagcggcctggtggcctacgtggcgcagcagatgcgcctgccctacccgaacatcttcgtggtcctgattggcttctacggcctgttcttcctcaccgtgaagctgcgcgactcggcctggggcctgctctcgacgttcgccctgaccggcttcatgggctacaccctgggcccgatcctcaaccactacatcggcatgcccaacggcggcgaagtggtgtcctcggccttcgccatgaccgccttggtgttcggtggcctgtccgcctacgtgctgaccacccgcaaggacatgagcttcctcagcggcttcatcaccgtcggcttcttcgtcctgctcggcgccagcctggccggcctgttcttcgagatcagcggcctgcaactggcgatcagcgccggcttcgtgctgttctcctcggcctgcatcctgttccagaccagcgccatcatccatggcggggagcgcaactacatcatggcgacgatcggcctgtacgtgtcgatctacaacctgttcgtcagcctgctgcagatcctcggcatcatgggcagcgacgactga

SEQ ID NO: 7750 - protein, 223 aa, Azotobacter vinelandii
MHEPNSYALQSAQAEQLEVSRVLRNTYGLLALTLGFSGLVAYVAQQMRLPYPNIFVVLIGFYGLFFLTVKLRDSAWGLLSTFALTGFMGYTLGPILNHYIGMPNGGEVVSSAFAMTALVFGGLSAYVLTTRKDMSFLSGFITVGFFVLLGASLAGLFFEISGLQLAISAGFVLFSSACILFQTSAIIHGGERNYIMATIGLYVSIYNLFVSLLQILGIMGSDD

SEQ ID NO: 7751 - DNA, 627 bp, Microbulbifer degradans 2-40
  CDS (1)..(627)
atgcaaagttccacacaggaagtgagtaaagtattacgcaacacatatgcattattggcaatgaccattgccttttctgcggcaatggccgttacatctatggcattaggcgtaccctacctaggcctatggatgctactaccctatatcggcttactctttcttgtagagaaaaccaagaattccgccatgggtattgtttctgtgtttgcccttaccggctggctgggctttagcattggccccatcatcagctactacattggcgtaagcggtatagagcccattcttacggccttgggcggtacagcactaaccttctttgtactttctggttacacccttgccaccaagaaagacatgagcaagtacactggctttttaatgactggcttagtagtaattctggttgccatggttgctaactggtttttacaaatttctgcacttagcctaaccattagctgcgcattcttgtttttgtcgtccatgctaattatgtggcaaaccagtgaaattattcatggcggtgagcgcaactacatttctgcaaccgttacgctatatgtatcgctgtataacatcttcagcattttgctaagctttttaggcggcagcgacgactaa

SEQ ID NO: 7752 - protein, 208 aa, Microbulbifer degradans 2-40
MQSSTQEVSKVLRNTYALLAMTIAFSAAMAVTSMALGVPYLGLWMLLPYIGLLFLVEKTKNSAMGIVSVFALTGWLGFSIGPIISYYIGVSGIEPILTALGGTALTFFVLSGYTLATKKDMSKYTGFLMTGLVVILVAMVANWFLQISALSLTISCAFLFLSSMLIMWQTSEIIHGGERNYISATVTLYVSLYNIFSILLSFLGGSDD

SEQ ID NO: 7753 - DNA, 663 bp, Klebsiella pneumoniae
  CDS (1)..(663)
ctcatggatcgcataattacatcatcgcgtgaccgttcctcgctgctcagcacgcacaaggttctgcgtaacacctacttcctgctcagcctgacgctggcgttttccgctatcaccgccaccgccagcacagtgctgatgctcccttcgccgggtctcattttgaccctcgtagggatgtacggtctgatgttcctgacctacaaaacggcgaataaacccaccgggattatttccgccttcgccttcaccgggttcctcggctatatccttgggccgatgctgaacgcgtatctttctgccggcatgggcgatttaatcggcctggcgctgggcggcacggcgctggtcttcttctgctgctcggcctacgtgctgacgacgcgtaaagacatgtcattccttggcgggatgctgatggccggcgtggtggtcgtcctgattggtatggtcgctaacctgttcctgcagctgccggcgctgcacctggcgattagcgcggtgttcatcctgatctcttcgggtgccatcctgttcgagaccagcaacattatccgcggcggtgaaaccaactatatccgcgcgacggtcagtctgtatgtctcgctgtacaacatctttgtcagcctgctgagcatcctgggcttcgccagccgggactaa

SEQ ID NO: 7754 - protein, 220 aa, Klebsiella pneumoniae
LMDRIITSSRDRSSLLSTHKVLRNTYFLLSLTLAFSAITATASTVLMLPSPGLILTLVGMYGLMFLTYKTANKPTGIISAFAFTGFLGYILGPMLNAYLSAGMGDLIGLALGGTALVFFCCSAYVLTTRKDMSFLGGMLMAGVVVVLIGMVANLFLQLPALHLAISAVFILISSGAILFETSNIIRGGETNYIRATVSLYVSLYNIFVSLLSILGFASRD

SEQ ID NO: 7755 - DNA, 873 bp, Pseudomonas aeruginosa
  CDS (1)..(873)
gattcgaactcacggaagagtctccccttcgacggttttcaagaccgttgccttaaaccactcggccacacctccgcatcgcggggcgccatagtaccggatagcaacacactgtcaaactctatcgattggccctggcagaggctttgctatcatgcccatcagtacgtcatggacccgttcccgttaaggagtacccacaccatgcaagaacagcaatatcagctgaactccgccgtcgcggaacagcgtgaagtcagcggcgttctgcgcaatacctacggcctgctggcactcaccctggccttcagcggcctggtggcctacgtttcgcagcagatgcgcctgccctatccgaacgtgttcgtggtgctgatcggcttctacggcctgttcttcctcaccgtgaagctgcgcaacagcgcctggggtctggtcagcactttcgccctgaccggcttcatgggctacacgctcggcccgatcctcaacatgtacctcggcctgcccaacggcggcagcgtcatcacttcggcgttcgccatgaccgccctggtgttcttcggcctgtccgcctatgtgctgaccacccgcaaggacatgagcttcctgtccggcttcatcaccgccggcttcttcgtcctgctgggcgccgtgctggtatcgctgttcttccagatcagtggcctgcaactggcgatcagcgccggcttcgtcctgttctcctcggcgatgatcctctaccagaccagcgcgatcatccacggcggcgaacgcaactacatcatggccaccatcagcctgtacgtgtcgatctacaacctgttcatcagcctgttgcagatcttcggcatcgccggcggcgacgactga

SEQ ID NO: 7756 - protein, 290 aa, Pseudomonas aeruginosa
DSNSRKSLPFDGFQDRCLKPLGHTSASRGAIVPDSNTLSNSIDWPWQRLCYHAHQYVMDPFPLRSTHTMQEQQYQLNSAVAEQREVSGVLRNTYGLLALTLAFSGLVAYVSQQMRLPYPNVFVVLIGFYGLFFLTVKLRNSAWGLVSTFALTGFMGYTLGPILNMYLGLPNGGSVITSAFAMTALVFFGLSAYVLTTRKDMSFLSGFITAGFFVLLGAVLVSLFFQISGLQLAISAGFVLFSSAMILYQTSAIIHGGERNYIMATISLYVSIYNLFISLLQIFGIAGGDD

SEQ ID NO: 7757 - DNA, 678 bp, Legionella pneumophila
  CDS (1)..(678)
acaatgaaccgaaatgatatcaccatacttagtcaacaaagagaatctgtgctcgcaaccaataaggtcctgcgaaatacgtatttactgctaagtttaaccttcatatttagcgcattaactgcctacgtagcctttattagtggagctcgcccaatgaatccactattgatgatagttggcgtttatggtttgatgtttctaactcaagctttaagaaatagcgtttggggtttggtaagcgtctttgcttttacagggtttttaggatataccattggcccattactcaactattacatcacaggtttttcaaatggcccacaaatagtcgctacggctttaggtggtactggaatgatctttttcgctctatcaggatatgccctgacaacgaaaaaagattttagctacctgggtggatttctttttgttggcgttatggttgccttattggcgatgatagcgggaatatttatacaaataccagctttgcaattagtgatttctgctgcttttgtattaatttcatctggattgattctattacaaaccagcgccataattcatgaaggagaaaccaattacataatggccactattggtttgtttgtttccatttataacttatttgttagcctgctgaacctgttaagcgcattctcaggtcgcgactaa

SEQ ID NO: 7758 - protein, 225 aa, Legionella pneumophila
TMNRNDITILSQQRESVLATNKVLRNTYLLLSLTFIFSALTAYVAFISGARPMNPLLMIVGVYGLMFLTQALRNSVWGLVSVFAFTGFLGYTIGPLLNYYITGFSNGPQIVATALGGTGMIFFALSGYALTTKKDFSYLGGFLFVGVMVALLAMIAGIFIQIPALQLVISAAFVLISSGLILLQTSAIIHEGETNYIMATIGLFVSIYNLFVSLLNLLSAFSGRD

SEQ ID NO: 7759 - DNA, 663 bp, Enterobacter cloacae
  CDS (1)..(663)
ctcatggatcgtataattacttcttcacgcgaccgcacatcgctactcagcacccataaggtgctgcgcaatacctatttcatgctcagcctgacgctggcgttttcggcgatcaccgcaacggccagcaccgtactgatgctgccttctccaggcctgatcctgacgctggtgggtatgtacggtctgatgttcctgacctacaaaaccgcggataaaccggtggggattctctccgcgttcgcctttaccggcttcctgggctacattctggggccaatcctgaatgcctatctgtctgccggaatgggcgacgtgattggtatggcgctgggcggtaccgcgctggtgttcttttgctgctcggcctacgtgctgaccacccgtaaggacatgtccttccttggcggtatgctgatggcgggtatcgtgattgtactggtcggtatgctggcgaacatcttcctgcaattgcctgcgctgcatctggcaatcagcgcggtgtttatcctgatttcatccggcgcaatcctgtatgaaaccagcaacatcattcacggaggtgagacgaactatatccgcgccaccgtgagcctgtatgtgtcgctgtacaacatttttgtcagcctgctgagcatcctgggcttcggcagccgcgattaa

SEQ ID NO: 7760 - protein, 220 aa, Enterobacter cloacae
LMDRIITSSRDRTSLLSTHKVLRNTYFMLSLTLAFSAITATASTVLMLPSPGLILTLVGMYGLMFLTYKTADKPVGILSAFAFTGFLGYILGPILNAYLSAGMGDVIGMALGGTALVFFCCSAYVLTTRKDMSFLGGMLMAGIVIVLVGMLANIFLQLPALHLAISAVFILISSGAILYETSNIIHGGETNYIRATVSLYVSLYNIFVSLLSILGFGSRD

SEQ ID NO: 7761 - DNA, 660 bp, Escherichia coli; identical to SEQ ID NO: 7741
  CDS (1)..(660)

SEQ ID NO: 7762 - protein, 219 aa, Escherichia coli; identical to SEQ ID NO: 7742

SEQ ID NO: 7763 - DNA, 660 bp, Salmonella typhimurium LT2
  CDS (1)..(660): transl_table=11
atggatcgtatcattacatcatcgcgtgatcgtagctcgctactgagtacgcacaaagtactgcgcaacacctattttctgttgagcctgacgctggctttatccgcaattaccgcgacagccagtacggtactgatgctgccctcccccggcctgattctgacgctggtcggtatgtatgggctgatgttcctgacctataaaaccgccaataagccggtcggtatcctgtctgcttttgcgtttaccggcttcctcggctatatcctgggcccgattcttaacgcctatctgtcagcaggcatgggcgatgtcattggcctggcgctgggtggaaccgcgttagtatttttctgctgctccgcttacgttctgaccacccgtaaggatatgtctttcctgggcggtatgttaatggccgggatcgtcgtcgtgctgattggtatggtggcgaatattttcctgcaactgcctgcattgcacctggcgattagcgcggtgtttatcctgatttcctcgggcgctatcctgtatgaaaccagtaacatcattcacggcggtgaaaccaactatattcgtgcgaccgtcagtctgtacgtttcgctgtacaacatctttgtcagcctgctcagcattctgggcttcgccagccgcgactaa

SEQ ID NO: 7764 - protein, 219 aa, Salmonella typhimurium LT2
MDRIITSSRDRSSLLSTHKVLRNTYFLLSLTLALSAITATASTVLMLPSPGLILTLVGMYGLMFLTYKTANKPVGILSAFAFTGFLGYILGPILNAYLSAGMGDVIGLALGGTALVFFCCSAYVLTTRKDMSFLGGMLMAGIVVVLIGMVANIFLQLPALHLAISAVFILISSGAILYETSNIIHGGETNYIRATVSLYVSLYNIFVSLLSILGFASRD

SEQ ID NO: 7765 - DNA, 660 bp, Shewanella oneidensis MR-1
  CDS (1)..(660): transl_table=11
atgactcagcaaaccctgtactcaacgagtgcaacaactttagaagtgaacaaacttcttaaaaatacttatttattattggccatgaccctagccttctctgcattatgtgcaggtttagcgatggcgctcaatatcagcccgctgatgtcacttggtttatctatcggtggtttagtgctgctttttgtcacgcttcggaaagccgattcagccgcaggcattttctgggtgtttgcctttacgggcatggaaggcgcctcattaggctatatgcttaaccattacgcaggaatgacaaacggctccgagttgatcatgcaagcctttgggttaacatcggtcatttttattgctctgtcagcctatgccgtcaccaccaagaaggatttctctttcatgcgtggtttcttatttgcaggactgatagtagtgattgctgccgctattattaatatttttgtcggtaacagcgtcgcgtttatggcgattaacgcaggtctggcattgttgatgacaggctttattctgttcgatactagccgaatcgtaaatggcggtgagactaattacatccgtgcaactatctccttgtacttggactttttaaacctgttcattgccattttgcatttgcttggtattggtaacgatgattga

SEQ ID NO: 7766 - protein, 219 aa, Shewanella oneidensis MR-1
MTQQTLYSTSATTLEVNKLLKNTYLLLAMTLAFSALCAGLAMALNISPLMSLGLSIGGLVLLFVTLRKADSAAGIFWVFAFTGMEGASLGYMLNHYAGMTNGSELIMQAFGLTSVIFIALSAYAVTTKKDFSFMRGFLFAGLIVVIAAAIINIFVGNSVAFMAINAGLALLMTGFILFDTSRIVNGGETNYIRATISLYLDFLNLFIAILHLLGIGNDD

SEQ ID NO: 7767 - DNA, 672 bp, Pseudomonas putida KT2440
  CDS (1)..(672): transl_table=11
atgcgcgaacaggattacgccgtccaccacggccagcaggtcgagcagcaggagatcagcaaggtcctgcgcaacacgtacagcctgctggcgcttaccctcgccttcagcggtgtcatggctttcgttgcccagcagatgcgcgtcggctacccgaacgtgttcgtggtgctaatcggcttctacgggctgttcttccttaccaacaaactgcgtgattcggcctggggcctggtgtccaccttcgcgctcaccggtttcatgggcttcatcctcggcccgatcctcaaccgttacctgggcatggccggtggcgccgaggtagtgagctccgcgtttgccatgactgcgctggtgtttggtggtctgtcggcctacgtgctgatcacccgcaaggacatgagcttcctgagtggcttcatcactgcgggcttcttcgttctgctgggtgctgtcgttgccagcttcttcttccagatcagcggcctgcaactggctatcagcgctggcttcgtgctgttctcgtcggtctgcatcctgttccagaccagcgcgatcattcatggtggcgaacgtaactacatcatggcaaccatcagcctgtatgtgtcgatctacaacctgtttgtcagcctgctgcaattgtttggcatcatgggtcgtgacgactga

SEQ ID NO: 7768 - protein, 223 aa, Pseudomonas putida KT2440
MREQDYAVHHGQQVEQQEISKVLRNTYSLLALTLAFSGVMAFVAQQMRVGYPNVFVVLIGFYGLFFLTNKLRDSAWGLVSTFALTGFMGFILGPILNRYLGMAGGAEVVSSAFAMTALVFGGLSAYVLITRKDMSFLSGFITAGFFVLLGAVVASFFFQISGLQLAISAGFVLFSSVCILFQTSAIIHGGERNYIMATISLYVSIYNLFVSLLQLFGIMGRDD

SEQ ID NO: 7769 - DNA, 663 bp, Vibrio vulnificus CMCP6
  CDS (1)..(663): transl_table=11
atgaacagtcctatgtttacccgtacttctacacaagaaagtgctctacagacaaacaaagtactacgtaacacttacgccctactttctatgactttactttggtcagctatcgttgctggtgtcgctatggtgatgaacctccctcaccccggtataatcattacattagttggcttctatggcctactattcctaacagagaagaaccgcaacaacggtcttggccttgtattcacattcgcactaaccggttttatgggttatacacttggaccaatcctaaacgcttatgtgggcgcaggaatgggtgatcttatcgtaacagcactaggcggtaccgctctttcattcttagcggcatcagcttacgcactgacaactaagcgcgacctatctatgatgggcggtttgatgctttcactatttgtagttttgattgttggtatgatcgcaagcatcttcattcagtcaacagtacttcacctagccttaagcagcttgttcattgttttctctacaatggcaatcttaatgaccactcaaagcattgttcgtggtggtgaaacaaactacatttcagcaactgtgactctatacgtatcaatttacaatatcttcgtcagcctacttcaaatcctcggcattatgaacgacgactaa

SEQ ID NO: 7770 - protein, 220 aa, Vibrio vulnificus CMCP6
MNSPMFTRTSTQESALQTNKVLRNTYALLSMTLLWSAIVAGVAMVMNLPHPGIIITLVGFYGLLFLTEKNRNNGLGLVFTFALTGFMGYTLGPILNAYVGAGMGDLIVTALGGTALSFLAASAYALTTKRDLSMMGGLMLSLFVVLIVGMIASIFIQSTVLHLALSSLFIVFSTMAILMTTQSIVRGGETNYISATVTLYVSIYNIFVSLLQILGIMNDD

SEQ ID NO: 7771 - DNA, 672 bp, Pseudomonas syringae pv. tomato str. DC3000
  CDS (1)..(672): transl_table=11
atgcgcgaacaggattacagccttaaaaccggcatgcaggccgaccagctcgaggttagtcgtgtcctgcgcaatacttatggtcttcttgctctgacgctggctttcagcggtgtcatggcgtttgtcgcgcagcagatgcgcgtcggctacccgaacattttcgtggtgctgatcggcttctacggtctgtttttcctgaccaacaagctgcgtgattcggtctggggcctggtttctacctttgccctgacaggtttcatgggtttcctgctgggcccgatcctcaaccgttatctgggcatggccggtggcgctgaagtcgtcagttccgcatttgcgatgaccgcactggttttcggcggtctgtcggcctacgtgttgatcacccgcaaggacatgagcttcctgggtggcttcatcaccgcaggcttcttcgtgttgcttggcgcggtagtggccagcatgttcttccagatcagcggcctgcaactggcgatcagcgcaggtttcgtactgttctcgtcggtctgcattctgttccagaccagcgcgatcattcagggtggcgagcgtaactacatcatggcaaccgtcagcctgtatgtgtcgatctacaacctgttcatcagcctgttgcagatattcggcatcatgagccgcgacgactga

SEQ ID NO: 7772 - protein, 223 aa, Pseudomonas syringae pv. tomato str. DC3000
MREQDYSLKTGMQADQLEVSRVLRNTYGLLALTLAFSGVMAFVAQQMRVGYPNIFVVLIGFYGLFFLTNKLRDSVWGLVSTFALTGFMGFLLGPILNRYLGMAGGAEVVSSAFAMTALVFGGLSAYVLITRKDMSFLGGFITAGFFVLLGAVVASMFFQISGLQLAISAGFVLFSSVCILFQTSAIIQGGERNYIMATVSLYVSIYNLFISLLQIFGIMSRDD

SEQ ID NO: 7773 - DNA, 669 bp, Vibrio parahaemolyticus RIMD 2210633
  CDS (1)..(669): transl_table=11
atgaacagtccaatgtttactcgttcaacaagtgttcctaatacacttgaaactaacaaagtactgaaaaacacttacttcctactgtcgatgacactgatgaccagtgctatcgcagcagtcgcgactatggcaatgcaaatttcaccaatcatggcgattgtgatgcagcttgcagcgattggtattttgttctttgttatgccaaaggcaatcaactcatcatctggtatcgtttggacattcgttttcacgactctaatgggtggtgctttaggtccaatgcttaactactacgcatcaattccaaacggtcctactatcattgctcaagctctaggtttgactggtatggtgttccttggcctatcggcttacaccatttcaagcaagaaagatttctctttcatgcgcaacttcctgatggcaggtttgatcattgtgatcgttgcagcgctgattaacatcttcgttggttcaacaatggctcacctagtaatcagcagtgtttctgcactcgtgttctctggtttcatcctattcgatacaagtcgtatcgttcgtggcgaagaaacaaactacatcagtgcaacaatttcgatgtacctaaacatccttaacttgttcactagcctactaagcattctaggcatcatgaacgacgattaa

SEQ ID NO: 7774 - protein, 222 aa, Vibrio parahaemolyticus RIMD 2210633
MNSPMFTRSTSVPNTLETNKVLKNTYFLLSMTLMTSAIAAVATMAMQISPIMAIVMQLAAIGILFFVMPKAINSSSGIVWTFVFTTLMGGALGPMLNYYASIPNGPTIIAQALGLTGMVFLGLSAYTISSKKDFSFMRNFLMAGLIIVIVAALINIFVGSTMAHLVISSVSALVFSGFILFDTSRIVRGEETNYISATISMYLNILNLFTSLLSILGIMNDD

SEQ ID NO: 7775 - DNA, 660 bp, Wigglesworthia glossinidia endosymbiont of Glossina brevipalpis
  CDS (1)..(660): transl_table=11
atgaatagaatcatagaaatttcttcaaaaagtagatcaaatttatctacaaataaagtattaagaaatacatacttgcttttatccatgacagtagcattttctgcgattgtagctacaattagtagcatttttaactttacttatttaggagccattccaactttaattggattttatggattgttgtttttagtacatcgtttatctaataaaaaatctggaattatagcaatttttctacttactggattcatgggatatactatatctcctttaattaatatgagtataaattacaacagcgggaatagcataattttatctttgataggaactactgttatatttttttcttgtgcattatttacattaaaaagcaaaagagatttatcttttttgtctagcattttaatttcaggaagcattgctttgtttatttgtatgattggaaatatttttttaaatattccatctttatcgttagcaattagcatcatgtttatgattttttcttcagttgcaataatatgggaaataaacaatattattcgtggaggagaacaaaattatataagagccactgttagcttatatgtatctatatacaatatttttgcaagttttcttggaatatttggaggatcaaaaaataattaa

SEQ ID NO: 7776 - protein, 219 aa, Wigglesworthia glossinidia endosymbiont of Glossina brevipalpis
MNRIIEISSKSRSNLSTNKVLRNTYLLLSMTVAFSAIVATISSIFNFTYLGAIPTLIGFYGLLFLVHRLSNKKSGIIAIFLLTGFMGYTISPLINMSINYNSGNSIILSLIGTTVIFFSCALFTLKSKRDLSFLSSILISGSIALFICMIGNIFLNIPSLSLAISIMFMIFSSVAIIWEINNIIRGGEQNYIRATVSLYVSIYNIFASFLGIFGGSKNN

SEQ ID NO: 7777 - DNA, 666 bp, Haemophilus ducreyi 35000HP
  CDS (1)..(666): transl_table=11
atggaaaatcgtttaattgctaacacagctcataatcagtctctgcttagcacgcataaagtcttacgcaatacttatctattactctccatgacactggctttttcagcgattgtcgcttactttgcaatggcaatgaatgcacccgcattaccttggtggggcttattaattggtttttatggcttattattcttaacgaatactaatgctaatagtgccatagggcttgcctgtgtctttgccttaactggtttcttaggttacacattaggccctattttgaaccgctatgtaggcgcaggcttaggggatgcagttatgttagcattagcttcaactgccttagtcttttttagttgttctgcttatatcttaaccaccaaaaaagatatgtcctttttatctggtatgatgatggcattattcatcgtgctattagttggcgttattgcaaatattttcttagccataccggcgctaagcctagcaatgagtgttttatttgcgctattttcaaccggtgctattctattaaccaccagcaacattattcacggcggtgaaacaaattatattcgcgcaactgtagatttatatgtttcactttacaacttattcttaagcttattacaaatttttggtgtattaagcaaggacgattaa

SEQ ID NO: 7778 - protein, 221 aa, Haemophilus ducreyi 35000HP
MENRLIANTAHNQSLLSTHKVLRNTYLLLSMTLAFSAIVAYFAMAMNAPALPWWGLLIGFYGLLFLTNTNANSAIGLACVFALTGFLGYTLGPILNRYVGAGLGDAVMLALASTALVFFSCSAYILTTKKDMSFLSGMMMALFIVLLVGVIANIFLAIPALSLAMSVLFALFSTGAILLTTSNIIHGGETNYIRATVDLYVSLYNLFLSLLQIFGVLSKDD

SEQ ID NO: 7779 - DNA, 669 bp, Vibrio vulnificus YJ016
  CDS (1)..(669): transl_table=11
atgaacagtcctatgtttacccgtacttcaagcatggaaagtactcttcaaaccaataaggtattgaaaaacacgtacttcctgctttctatgacactagtaaccagtgctattgcagcggttgcaaccatggcaatcggtatttctccaatgatggcacttgtgatgcaagttgctgctattggtattttatttttcgcactaccacgcagcattaactcatcaatgggcattgtttggacattcgtctttacgacactaatgggtggtgcacttggtccaatgctgacttactacgcttcaatcccaagcggccctactattattgctcaagctctaggtttaaccggtatggtattcctgggtctttcggcatataccatcacaagcaaaaaagatttctcttttatgcgtaacttcttaatggcaggcctgattattgtcatcgttgcagctatcatcaacatctttgttggctcaacgctaggtcagcttgttatcagtagtgtatctgcgttggttttctctggtttcatcctatttgataccagccgtatcgtccgcggtgaagaaactaactacgtaagtgcaacgatttcaatgtacctaaacattttgaacttgttcacaagcctactaagtattctcggcattatgaacgacgactaa

SEQ ID NO: 7780 - protein, 222 aa, Vibrio vulnificus YJ016
MNSPMFTRTSSMESTLQTNKVLKNTYFLLSMTLVTSAIAAVATMAIGISPMMALVMQVAAIGILFFALPRSINSSMGIVWTFVFTTLMGGALGPMLTYYASIPSGPTIIAQALGLTGMVFLGLSAYTITSKKDFSFMRNFLMAGLIIVIVAAIINIFVGSTLGQLVISSVSALVFSGFILFDTSRIVRGEETNYVSATISMYLNILNLFTSLLSILGIMNDD

SEQ ID NO: 7781 - DNA, 660 bp, Erwinia carotovora subsp. atroseptica SCRI1043
  CDS (1)..(660): transl_table=11
atggatcgtattgttgtttcctctacccgtgaaagttcactactcagcactcacaaagtgctgcgtaatacctatttcctgctgtcgctgacgctgggtttttctgccattactgcaacggcaagtactgtacttaacctgcccgcccctggcttaattctgatgctagttgggttttatggtctgatgttcctgacgcataaactggcgaacagccctgctggtattttggcgacattcgcactgactgggtttatgggttatacgctaggcccaattttaagctcactgatttcttccggtgcaggcgacattgtcatgttggcgttgggcggtacggcactggtgttcttctgctgttcagcctatgtattaacgacacgtaaggatatgtccttcttgtctggcatgatgatggcaggattcgttgtactgattgttgccgtcattgccaatctgttcctacagatcccagccttgcatctggctatcagcaccctgtttattctattttctgcgggtgccatcctgtgggaaaccagtaacatcattcacggtggcgaaaccaactacatccgggcgacggttagcctgtatgtcgcgatatacaatatcttcgttagcctgttgagcattctgggcatcatgcgtaacgactaa

SEQ ID NO: 7782 - protein, 219 aa, Erwinia carotovora subsp. atroseptica SCRI1043
MDRIVVSSTRESSLLSTHKVLRNTYFLLSLTLGFSAITATASTVLNLPAPGLILMLVGFYGLMFLTHKLANSPAGILATFALTGFMGYTLGPILSSLISSGAGDIVMLALGGTALVFFCCSAYVLTTRKDMSFLSGMMMAGFVVLIVAVIANLFLQIPALHLAISTLFILFSAGAILWETSNIIHGGETNYIRATVSLYVAIYNIFVSLLSILGIMRND

SEQ ID NO: 7783 - DNA, 672 bp, Mannheimia succiniciproducens MBEL55E
  CDS (1)..(672): transl_table=11
atggcagattcccgtattgtccttgatgcccgcgagcaatcaacttcattacttagcacacataaagtattacgtaatacttactttttattgggcatgacacttgccttctccgcattcgtcgcctatatttccatctcattaggcttgccgcatcccggtattatcgtgacgttagtcggcttttacggcttattgtttttaaccaattcgttagctaacagcggttggggaattctatccgcctttgcctttaccggttttcttggctataccttagggccgattctgaatgtttatatcggcgcagggttaagcgaaaccgtagttcttgcattgtcaggtacggccgcggtgttctttgcttgctcggcttacgtactgacgacccgcaaagatatgtcattcctttccggcatgattttctcgctctttatcgtgttattgctgggcatggtggcaagcatattcttccaaacgccggctttgcatttggcgattagcggtttgtttgtaattttctcaagtgccgcaatcttatttgaaacaagcaatattattcatggcggtgaaacaaattatatcagagcgaccgttagcctatttgtttcaatctacaacctattcttaagtttgttacaattattgggcatctttggcggtgacgattaa

SEQ ID NO: 7784 - protein, 223 aa, Mannheimia succiniciproducens MBEL55E
MADSRIVLDAREQSTSLLSTHKVLRNTYFLLGMTLAFSAFVAYISISLGLPHPGIIVTLVGFYGLLFLTNSLANSGWGILSAFAFTGFLGYTLGPILNVYIGAGLSETVVLALSGTAAVFFACSAYVLTTRKDMSFLSGMIFSLFIVLLLGMVASIFFQTPALHLAISGLFVIFSSAAILFETSNIIHGGETNYIRATVSLFVSIYNLFLSLLQLLGIFGGDD

SEQ ID NO: 7785 - DNA, 675 bp, Legionella pneumophila subsp. pneumophila str. Philadelphia 1
  CDS (1)..(675): transl_table=11
atgaaccgaaatgatatcaccatacttagtcaacaaagagaatctgtgctcgcaaccaataaggtcctgcgaaatacgtatttactgctaagtttaaccttcatatttagcgcattaactgcctacgtagcctttattagtggagctcgcccaatgaatccactattaatgatagttggcgtttatggtttgatgtttctaactcaagctttaagaaatagcgtttggggtttggtaagcgtctttgcttttacagggtttttaggatataccattggcccattactcaactattacatcacaggcttttcaaatggcccacaaatagtcgctactgctttaggtggtactggaatgatcttttttgctctatcaggatatgccctgacaacgaaaaaagattttagctacctgggtggatttctttttgttggcgttatggttgccttattggcgatgatagcgggaatatttatacaaataccagctttgcaattagtaatttctgctgcttttgtattaatttcatctggattgattctattacaaaccagcgccataattcatgaaggagaaaccaattacataatggcgacaattggtttgtttgtttccatttataacttatttgttagcctgctgaacctgttaagcgcattctcaggtcgcgactaa

SEQ ID NO: 7786 - protein, 224 aa, Legionella pneumophila subsp. pneumophila str. Philadelphia 1
MNRNDITILSQQRESVLATNKVLRNTYLLLSLTFIFSALTAYVAFISGARPMNPLLMIVGVYGLMFLTQALRNSVWGLVSVFAFTGFLGYTIGPLLNYYITGFSNGPQIVATALGGTGMIFFALSGYALTTKKDFSYLGGFLFVGVMVALLAMIAGIFIQIPALQLVISAAFVLISSGLILLQTSAIIHEGETNYIMATIGLFVSIYNLFVSLLNLLSAFSGRD

SEQ ID NO: 7787 - DNA, 678 bp, Methylococcus capsulatus str. Bath
  CDS (1)..(678): transl_table=11
atgagtattccccgtgaacaggtcttgagccgcggcgcttatgccgtcgtgccccgccacaaggttctgaccaacacctatgcgctgctgtcgctgacgctgctgttcagtgcgttcaccgctggcgtgtccatggtgctggcgctgccccaccccggcatcatcgtcaccctggtgggctatttcggcctgctgtggctgaccaacaaatatgccaacagcgcgctcggtctcctgtgggtgtttgctctgaccggcttcatgggctatacgctgggcccggttctgaacgcctacgtcacgcacttcgccaacggcacccagctggtcatgatggccatgggcggtacgggcgcagtgttcctcggcctctcggcctacgcgctgacgacccgcagggacttcagtgtcctcggcggcctgctgggcgcaggtgtgctggtcgccttcctggccggtctggtcgccgtcttcgtgcccggcctgatggggctcagcctcgccgtgtcggcgatgttcgtggttctgatggccggaatgatcctgttccagaccagcgcgatcatccacggcggcgaaaccaactacatcctcgccacggtgtcgctgtacgtgacgatcttcaacctgtttaccagtctcctgcagttgctcggcgtgttcggcagcgacgattga

SEQ ID NO: 7788 - protein, 225 aa, Methylococcus capsulatus str. Bath
MSIPREQVLSRGAYAVVPRHKVLTNTYALLSLTLLFSAFTAGVSMVLALPHPGIIVTLVGYFGLLWLTNKYANSALGLLWVFALTGFMGYTLGPVLNAYVTHFANGTQLVMMAMGGTGAVFLGLSAYALTTRRDFSVLGGLLGAGVLVAFLAGLVAVFVPGLMGLSLAVSAMFVVLMAGMILFQTSAIIHGGETNYILATVSLYVTIFNLFTSLLQLLGVFGSDD

SEQ ID NO: 7789 - DNA, 666 bp, Azoarcus sp. EbN1
  CDS (1)..(666): transl_table=11
atggaaaaccgaatcggtacgatgacgaggtcggaggcctcggtcctctcgacgaacagggtcatccgcaacacctacatgctgctgtcgttgacgctggcattctcggcgctcaccgccggcgcgtcgctcgcgctcggcctgccgcacccgggcatcatcctcacgctggtggggtatttcggcctgctgttcctgacgacgaagttccgcgacagcgggctgggcatcctgttcgtgttcgcgctcaccggcttcatgggctacacgctcggcccgatcgtgtcccactacctcgcgatgcccaacggcgggcaggtggtgatgcaggcgatgggcggtaccgcggcgattttccttggcctgtcggcgtacgcgctgaccagccgcaaggacttctcgttcatgggcggcttcctggtggtcggcatcctcgtcgccttcctcgccggcctgggcgccatcttcttcgagatgcccggcttgtcgctcgcggtgtcggcaatgttcgtactgctgatgtccggtctcatcctctacgagaccagcaacatcatccacggcggtgagacgaactacgtgatggcgacggtgactttgtacgtgtcgatctacaacctcttcacgagcctgctgcacatcctcggcgtgatgaacaacgactga

SEQ ID NO: 7790 - protein, 221 aa, Azoarcus sp. EbN1
MENRIGTMTRSEASVLSTNRVIRNTYMLLSLTLAFSALTAGASLALGLPHPGIILTLVGYFGLLFLTTKFRDSGLGILFVFALTGFMGYTLGPIVSHYLAMPNGGQVVMQAMGGTAAIFLGLSAYALTSRKDFSFMGGFLVVGILVAFLAGLGAIFFEMPGLSLAVSAMFVLLMSGLILYETSNIIHGGETNYVMATVTLYVSIYNLFTSLLHILGVMNND

SEQ ID NO: 7791 - DNA, 687 bp, Francisella tularensis subsp. tularensis Schu 4
  CDS (1)..(687): transl_table=11
atgaacaacttacaaaacaacactcgtgtgatagactccctctctcaagagtctgtactaagagcaaacaaagttcttagaaatacatactggttgctatctatgacactactatttagtgcttttacagcatttatagcaatgagcacaggtgcaacgataatgaatccattattaatgctagtagtttatattggtttattatttggtattaatgctactaaaaactcaccatggggtatagttttaacttttgcgctaacaggtcttttaggctattcgcttggtcctatacttaatatgtaccttactatgtttaaaaacggtgcagaactaatcatgatggcatttggaactactggtctgatttttctaggcttatctgtagttgcaatgagccctgcaagaaattttaatagattaggttcattctgtgcgattggtgcgattgttgcattagtagctttagtaattaatatattcctacaacttcctgctttagctttagttatatcactagtatttgcattcatatctggtggttttatattatggcaaacaaatgctattgtaagaggtgaagaaactaactacatattagctactgtaaatatttatgtgtctttattcaatatctttgtaactctattacaaatctttggtgcagtagctggcgatagagaataa

SEQ ID NO: 7792 - protein, 228 aa, Francisella tularensis subsp. tularensis Schu 4
MNNLQNNTRVIDSLSQESVLRANKVLRNTYWLLSMTLLFSAFTAFIAMSTGATIMNPLLMLVVYIGLLFGINATKNSPWGIVLTFALTGLLGYSLGPILNMYLTMFKNGAELIMMAFGTTGLIFLGLSVVAMSPARNFNRLGSFCAIGAIVALVALVINIFLQLPALALVISLVFAFISGGFILWQTNAIVRGEETNYILATVNIYVSLFNIFVTLLQIFGAVAGDRE

SEQ ID NO: 7793 - DNA, 663 bp, Azoarcus sp. EbN1
  CDS (1)..(663): transl_table=11
atgcaaaaccgtatgacgatgacgcgcaccgacgcctcggtgctgtcgaccaacaaggtcatccgcaacacctacatgttgctgtcgctaacgctggcgttctcggcgctaaccgccgggctgtcgatggccatgggtgccccgcgcctggggatcatcgttacgctcgcaggctacttcggcctgctgtttgcgaccaccaagttccgcaacagcagcctcggcatcgtgttcgtgttcgcgctgaccggcttcatgggcttcaccctcggcccgatcatctcatcctatttggcgctgcccaacggcgccagcatcgtgatgcaggcgatggccggcacagcggcgatcttcctgggtctgtcggcctacgcggtgacgagcaagaaggacttctccttcatgggcggtttcctgatggtcggcatcctggtcgccttcctggccggcctgggcgcgatcttcttcgagatcccggcgctgtcgctgaccgtgtcggcggccttcgtgctgctgatgtcgggcctcatcctgtacgagaccagcaacatcatccacggcggcgagaccaactacatcatggccacggtgtcgctgttcgtgtcgatcttcaacctcttcaccagcctgctgcacctgcttggcttcgccaacagcgactaa

SEQ ID NO: 7794 - protein, 220 aa, Azoarcus sp. EbN1
MQNRMTMTRTDASVLSTNKVIRNTYMLLSLTLAFSALTAGLSMAMGAPRLGIIVTLAGYFGLLFATTKFRNSSLGIVFVFALTGFMGFTLGPIISSYLALPNGASIVMQAMAGTAAIFLGLSAYAVTSKKDFSFMGGFLMVGILVAFLAGLGAIFFEIPALSLTVSAAFVLLMSGLILYETSNIIHGGETNYIMATVSLFVSIFNLFTSLLHLLGFANSD

SEQ ID NO: 7795 - DNA, 672 bp, Pseudomonas fluorescens Pf-5
  CDS (1)..(672): transl_table=11
atgcgcgaacaggattacgcagttaacaacggcgtgcaggccgagcagctagaggttagccgcgtcctgcgcaacacttacggcctgctggccctgaccctcgcgttcagtggggtgatggcctatgtggcacagcagatgcgtgtcggttatccgaacatcttcgtggtgctgatcggcttctacggtctgttcttcctcaccaacaaactccgtgactcggcctggggcctggtgtcggctttcgccttgaccggtttcatgggctttctgctcggcccgattctcaaccgctacctgggcatgcagggcggcgccgaagtggtcagttcggcctttgccatgacggcactggtattcggcggtctgtcggcctatgtgctgatcacccgcaaggacatgagcttcctcggcggcttcatcaccgccggtttcttcgtcctgatgggcgccgtgctggccagcctgttcttccagatcagcggcctgcaactggcgatcagcgccggcttcgtgctgttctcctcggtgtgcatcctgttccagaccagcgccatcatccacggcggcgaacgtaactacatcatggccaccatcagcctgtatgtatcgatctacaacctgttcgtcagcctgctgcaactgttcggcatcatgggtcgcgatgactga

SEQ ID NO: 7796 - protein, 223 aa, Pseudomonas fluorescens Pf-5
MREQDYAVNNGVQAEQLEVSRVLRNTYGLLALTLAFSGVMAYVAQQMRVGYPNIFVVLIGFYGLFFLTNKLRDSAWGLVSAFALTGFMGFLLGPILNRYLGMQGGAEVVSSAFAMTALVFGGLSAYVLITRKDMSFLGGFITAGFFVLMGAVLASLFFQISGLQLAISAGFVLFSSVCILFQTSAIIHGGERNYIMATISLYVSIYNLFVSLLQLFGIMGRDD

SEQ ID NO: 7797 - DNA, 669 bp, Colwellia psychrerythraea 34H
  CDS (1)..(669): transl_table=11
atgcaatctaatatgagttttcaaacggcgagtaaaagttcggcgatagaaattaataaagtattgagaaatacttacatgctgttatcaatgacacttgcatttagtgccgtaacagctggcgtttcaatggcaatgaacctatcacacggtgttgcacttgttatgatgctagtcgcgttcggtttaatgtttgtagtaaacaaaaaagctgattctgctagtggtgtttattggatttttgcttttactggtttaatgggcgcatcattgggtcctatgcttagcgcatacgctgcaatggatggtggtccggcaatgataatgcaagcacttggtggaaccgcattaatatttttcgcactgtcaggttatgcgcttacgagtaaaaaagacttctcatttatgggtggctttttaatggtaggtttgattgttgttgttgttgcaagtcttgctaacatcttctttcaaatccctgctctttcattagcggtaagtgctgcagttatcatgattatgtctggtttaattttgtatgatacaagccgtataattaatggtggcgaacgtaactacattcgcgctacggtttctttgtacttaaacatatacaacatttttgtgcatttattatcgttacttggcgtattcggcagcgatgattag

SEQ ID NO: 7798 - protein, 222 aa, Colwellia psychrerythraea 34H
MQSNMSFQTASKSSAIEINKVLRNTYMLLSMTLAFSAVTAGVSMAMNLSHGVALVMMLVAFGLMFVVNKKADSASGVYWIFAFTGLMGASLGPMLSAYAAMDGGPAMIMQALGGTALIFFALSGYALTSKKDFSFMGGFLMVGLIVVVVASLANIFFQIPALSLAVSAAVIMIMSGLILYDTSRIINGGERNYIRATVSLYLNIYNIFVHLLSLLGVFGSDD

SEQ ID NO: 7799 - DNA, 672 bp, Pseudomonas syringae pv. phaseolicola 1448A
  CDS (1)..(672): transl_table=11
atgcgcgaacaggattacagccttaaaactggcatgcaggccgaccagctagaggttagtcgtgtcctgcgcaacacttacggtcttctcgctctgacgctggcttttagtggtgtcatggcatatgtcgctcagcagatgcgcgtcggctatccgaacattttcgtggtactgatcggcttctatggtctgtttttcctgaccaataaattgcgtgattcggtctggggcctggtttcgaccttcgccctgacaggtttcatgggtttcctgctgggcccgatcctcaatcgttatctgggcatggccggtggcgctgaagtcgtcagctccgctttcgcgatgaccgcactggttttcggcggtctgtcggcttacgtgttgatcacccgcaaggacatgagcttcctgggtggcttcatcaccgcaggcttcttcgttctgcttggcgcagtagtggccagcattttcttccagatcagcggtttgcaactgtcgatcagcgcaggcttcgtgctgttctcttcggtctgcattctgttccagaccagcgcgattattcagggtggtgagcgcaattacatcatggcgacggtcagcctgtatgtatcgatctacaacctgtttataagcctgctgcagattttcggcatcatgagccgcgacgactga

SEQ ID NO: 7800 - protein, 223 aa, Pseudomonas syringae pv. phaseolicola 1448A
MREQDYSLKTGMQADQLEVSRVLRNTYGLLALTLAFSGVMAYVAQQMRVGYPNIFVVLIGFYGLFFLTNKLRDSVWGLVSTFALTGFMGFLLGPILNRYLGMAGGAEVVSSAFAMTALVFGGLSAYVLITRKDMSFLGGFITAGFFVLLGAVVASIFFQISGLQLSISAGFVLFSSVCILFQTSAIIQGGERNYIMATVSLYVSIYNLFISLLQIFGIMSRDD

SEQ ID NO: 7801 - DNA, 666 bp, Thiobacillus denitrificans ATCC 25259
  CDS (1)..(666): transl_table=11
atgaatccgcaagtcaccaccctcggccgcagccagactgcggtcacctcgaccaacaaggtcgtcaagaacacctacatgctgctggcgatgacgctggcgttttcggcactcacggccggcctgtcgatggccatgaacctgccgcatcccggcctcatcatcacgctcgtgggttacttcggcctgctgttcctgacgaccaaattccgcgacagcggcctcggcatcgccttcgtcttcgccctgaccggcttcatgggctacacgctcggaccgatcctcaacgcctacctcgcgctgccgaacggtggccaggtcgtgatgatggcgatgggcggcacggcggcgatcttcctcggcctgtcggcctacgtcatgacgacccgccgcgacttcagcttcatgggcggcttcctgatggtcggcatcctggtcgccttcctcgccggcctcggcgcgatcttcttcgaggtgcccgcgctgtcgctcgcggtctcggcgatgttcgtgctcctgatgtcgggtctcatcctctacgagaccagcaacatcatccacggcggcgagaccaactacgtgatggcgaccgtcaccctgttcgtcgcgatcttcaacctcttcacgagcctgctgcatctgctcggcttcgccagcaacgactag

SEQ ID NO: 7802 - protein, 221 aa, Thiobacillus denitrificans ATCC 25259
MNPQVTTLGRSQTAVTSTNKVVKNTYMLLAMTLAFSALTAGLSMAMNLPHPGLIITLVGYFGLLFLTTKFRDSGLGIAFVFALTGFMGYTLGPILNAYLALPNGGQVVMMAMGGTAAIFLGLSAYVMTTRRDFSFMGGFLMVGILVAFLAGLGAIFFEVPALSLAVSAMFVLLMSGLILYETSNIIHGGETNYVMATVTLFVAIFNLFTSLLHLLGFASND

SEQ ID NO: 7803 - DNA, 672 bp, Pseudomonas fluorescens PfO-1
  CDS (1)..(672): transl_table=11
atgcgcgaacaggattacgcagttcacaacagcgtgcaggctgagcagctagaggttagccgcgtcctgcgcaacacttacggtctactggcgctcaccctcgcattcagcggtgtgatggcgttcgtggcccagcagatgcgggtcggctacccgaacattttcgtggtactgatcggtttttacgggctgttcttcctcaccaacaagcttcgtgactctgcctggggcctggtgtcggcgtttgccctgaccggtttcatgggtttcctcctcggcccgatcctcaaccgttacctgggcatgcagggcggcgctgaagtggtcagctccgcgtttgcgatgactgcactggtgttcggtggtctgtcggcctacgtgctgatcacccgtaaggacatgagcttcctcggtggcttcatcaccgccggtttcttcgtcctgctgggcgcgacgctggcgagcatgttcttccagatcagcggcctgcaactggcgatcagcgcaggtttcgtgctgttctcgtcggtctgcatcctgttccagaccagcgccatcatccacggcggcgagcgcaactacatcatggcgaccatcagcctgtatgtatcgatctacaacctgttcgtcagcctgttgcagatcttcggcatcatgagccgcgacgactga

SEQ ID NO: 7804 - protein, 223 aa, Pseudomonas fluorescens PfO-1
MREQDYAVHNSVQAEQLEVSRVLRNTYGLLALTLAFSGVMAFVAQQMRVGYPNIFVVLIGFYGLFFLTNKLRDSAWGLVSAFALTGFMGFLLGPILNRYLGMQGGAEVVSSAFAMTALVFGGLSAYVLITRKDMSFLGGFITAGFFVLLGATLASMFFQISGLQLAISAGFVLFSSVCILFQTSAIIHGGERNYIMATISLYVSIYNLFVSLLQIFGIMSRDD

SEQ ID NO: 7805 - DNA, 687 bp, Francisella tularensis subsp. holarctica
  CDS (1)..(687): transl_table=11
atgaacaacttacaaaacaacactcgtgtgatagactccctctctcaagagtctgtactaggagcaaacaaagttcttagaaatacatactggttgctatctatgacactactatttagtgcttttacagcatttatagcaatgagcacaggtgcaatgataatgaatccattattaatgctagtagtttatattggtttattatttggtattaatgctactaaaaactcaccatggggtatagttttaacttttgcgctaacaggtcttttaggctattcgcttggtcctatacttaatatgtaccttactatgtttaaaaacggtgcagaactaatcatgatggcatttggaactactggtctgatttttctaggcttatctgtagttgcaatgagccctgcaagaaattttaatagattaggttcattctgtgcgattggtgcgattgttgcattagtagctttagtaattaatatattcctacaacttcctgctttagctttagttatatcactagtatttgcattcatatctggtggttttatattatggcaaacaaatgctattgtaagaggtgaagaaactaactacatattagctactgtaaatatttatgtgtctttattcaatatctttgtaactctattacaaatctttggtgcagtagctggcgatagagaataa

SEQ ID NO: 7806 - protein, 228 aa, Francisella tularensis subsp. holarctica
MNNLQNNTRVIDSLSQESVLGANKVLRNTYWLLSMTLLFSAFTAFIAMSTGAMIMNPLLMLVVYIGLLFGINATKNSPWGIVLTFALTGLLGYSLGPILNMYLTMFKNGAELIMMAFGTTGLIFLGLSVVAMSPARNFNRLGSFCAIGAIVALVALVINIFLQLPALALVISLVFAFISGGFILWQTNAIVRGEETNYILATVNIYVSLFNIFVTLLQIFGAVAGDRE

SEQ ID NO: 7807 - DNA, 654 bp, Saccharophagus degradans 2-40
  CDS (1)..(654): transl_table=11
atgcaagaactctacacacatgctgggacacaaagttccacacaggaagtgagtaaagtattacgcaacacatatgcattattggcaatgaccattgccttttctgcggcaatggccgttacatctatggcattaggcgtaccctacctaggcctatggatgctactaccctatatcggcttactctttcttgtagagaaaaccaagaattccgccatgggtattgtttctgtgtttgcccttaccggctggctgggctttagcattggccccatcatcagctactacattggcgtaagcggtatagagcccattcttacggccttgggcggtacagcactaaccttctttgtactttctggttacacccttgccaccaagaaagacatgagcaagtacactggctttttaatgactggcttagtagtaattctggttgccatggttgctaactggtttttacaaatttctgcacttagcctaaccattagctgcgcattcttgtttttgtcgtccatgctaattatgtggcaaaccagtgaaattattcatggcggtgagcgcaactacatttctgcaaccgttacgctatatgtatcgctgtataacatcttcagcattttgctaagctttttaggcggcagcgacgactaa

SEQ ID NO: 7808 - protein, 217 aa, Saccharophagus degradans 2-40
MQELYTHAGTQSSTQEVSKVLRNTYALLAMTIAFSAAMAVTSMALGVPYLGLWMLLPYIGLLFLVEKTKNSAMGIVSVFALTGWLGFSIGPIISYYIGVSGIEPILTALGGTALTFFVLSGYTLATKKDMSKYTGFLMTGLVVILVAMVANWFLQISALSLTISCAFLFLSSMLIMWQTSEIIHGGERNYISATVTLYVSLYNIFSILLSFLGGSDD

SEQ ID NO: 7809 - DNA, 663 bp, Haemophilus influenzae R2846
  CDS (1)..(663)
atgcaatcacgtcttattgtggatgctcaaaaagaatcgttactcagcacacataaagtgttgcgtaacacgtattttttactgggattaacaatggctttttcagcggttgttgcgtttatttcaatgagcttaaacttgccctatccaaatattattgtgttattggttggcttttatggcttacttttcttaaccaataaattagctgatcgccctgctggtattttggcggcttttgctttcactggatttatgggatacaccatcgggccaattttaaatatgtatgtggcacgtggaatggaagatttgattatgcttgcattcgcaggaactgctatcgtgttttttgcgtgttccgcttatgtattgactatgaaaaaagatatgtcattcttatcaagcgcaatgttcgcattatttattgtgttattgcttggtatggtggcgagtttcttcttccaaattcctgcgttatcggtcgcaattagtgcattatttgttgtgttctcaacaatgaccattttgtatgaaaccagtaatattattcacggtggagaaacaaattacattcgcgcaaccgtgaacatctatgtttcaatctacaatttattcttgagtttattaagattactttctatcttttcaagtgatgaataa

SEQ ID NO: 7810 - protein, 220 aa, Haemophilus influenzae R2846
MQSRLIVDAQKESLLSTHKVLRNTYFLLGLTMAFSAVVAFISMSLNLPYPNIIVLLVGFYGLLFLTNKLADRPAGILAAFAFTGFMGYTIGPILNMYVARGMEDLIMLAFAGTAIVFFACSAYVLTMKKDMSFLSSAMFALFIVLLLGMVASFFFQIPALSVAISALFVVFSTMTILYETSNIIHGGETNYIRATVNIYVSIYNLFLSLLRLLSIFSSDE

SEQ ID NO: 7811 - DNA, 663 bp, Vibrio sp. Ex25
  CDS (1)..(663)
atgaacagtccaatgtttacccgcacttcaacacaagaaagtgctctacaaacaaacaaagtgttgcgtaatacttacgcactactttcaatgacgcttttatggtcggcagtcgttgctggcgtagcaatggcatttaacctgccacatccaggaatcatcctaatgttggttggtttctacggcctgttattcttaacagagaaaaaccgtaacaacagccttggccttgtgtttacgttcttattcactggtttcttaggctacacgattggtccaatcttaaacatgtacatcggtgctgggatgggcgatatcgtattaaccgctctaggtggtacggcgctatctttcatggcggcatcagcttatgcactaacaacaaaacgtgacctatctatgatgggcggcttgatgctatcgctgtttgttgtgcttgttgtgggtatgattgcaagcttctttattcaatcaaccatgttacacttggcgttgagcagcttgtttatcattttctctacgatggcgatcctgatgacaacacaaagcattattcgtggcggtgaaacaaactacatctctgcgacagtgactttgtatgtatcaatctacaacatcttcatcagcctactaagcattctaggtattatgaacgacgattaa

SEQ ID NO: 7812 - protein, 220 aa, Vibrio sp. Ex25
MNSPMFTRTSTQESALQTNKVLRNTYALLSMTLLWSAVVAGVAMAFNLPHPGIILMLVGFYGLLFLTEKNRNNSLGLVFTFLFTGFLGYTIGPILNMYIGAGMGDIVLTALGGTALSFMAASAYALTTKRDLSMMGGLMLSLFVVLVVGMIASFFIQSTMLHLALSSLFIIFSTMAILMTTQSIIRGGETNYISATVTLYVSIYNIFISLLSILGIMNDD

SEQ ID NO: 7813 - DNA, 660 bp, Shewanella sp. ANA-3
  CDS (1)..(660): transl_table=11
atgactcagcaaaccttgtactcagctagtgcatccaccctagaagtgaataaacttcttaaaaatacctatttattgttggccatgaccctcgccttctcggcattgtgtgcaggcttagcgatggcactcaatatcagccctctgatgtcactcggtttatctatcggtggtttagtgctgttgttcgttaccctacgcaaagccgactccgctgcgggcatcttctgggtatttgcatttaccggtatggaaggcgcctcattaggttatatgcttaaccactacgccggcatgaccaatggctctgagcttatcatgcaagctttaggattaacctcggttatctttattgcactctcggcctatgcagtcacaacgaagaaagatttctctttcctacgtggtttcctgttcgccggattgattgtggtgatcgctgctgcgctgattaacattttcgtgggtaacagtgtggcctttatggcgattaacgcgggtcttgcgctgttaatgaccggctttatcttgttcgatactagccgtatcgtgaatggcggcgagaccaactatatccgcgccactatctccttgtatctggactttttaaacctgttcattgccattttgcatttgcttggcattggtaacgatgattaa

SEQ ID NO: 7814 - protein, 219 aa, Shewanella sp. ANA-3
MTQQTLYSASASTLEVNKLLKNTYLLLAMTLAFSALCAGLAMALNISPLMSLGLSIGGLVLLFVTLRKADSAAGIFWVFAFTGMEGASLGYMLNHYAGMTNGSELIMQALGLTSVIFIALSAYAVTTKKDFSFLRGFLFAGLIVVIAAALINIFVGNSVAFMAINAGLALLMTGFILFDTSRIVNGGETNYIRATISLYLDFLNLFIAILHLLGIGNDD

SEQ ID NO: 7815 - DNA, 660 bp, Shewanella sp. MR-7
  CDS (1)..(660): transl_table=11
atgactcagcaaaccttgtactcagcgagtgcatccaccttcgaagtgaataaacttcttaaaaatacctatttattattggccatgaccctcgccttctcggcattgtgtgcaggcttagcgatggcacttaatatcagccctctgatgtcactcggtttatctatcggtggtttagtgctgttgttcgttaccctacgcaaagccgactcggctgcgggcatcttctgggtatttgccttcaccggtatggaaggcgcctcattaggttacatgcttaaccactacgctggcatgaccaatggctctgagcttatcatgcaagctttaggattaacctcggttatctttattgcgctctcagcctatgcagtcacaacgaagaaagatttctctttcctacgtggtttcctgttcgccggattgattgtggtgatcgccgctgcgctgattaacattttcgtgggtaacagtgtggcctttatggcgattaacgcgggtcttgcgctgttaatgaccggctttatcctgttcgatactagccgtatcgtgaatggtggcgagactaactatatccgcgccactatctccttgtatctggactttttaaacctattcattgccattttgcatttgcttggcattggtaacgatgattaa

SEQ ID NO: 7816 - protein, 219 aa, Shewanella sp. MR-7
MTQQTLYSASASTFEVNKLLKNTYLLLAMTLAFSALCAGLAMALNISPLMSLGLSIGGLVLLFVTLRKADSAAGIFWVFAFTGMEGASLGYMLNHYAGMTNGSELIMQALGLTSVIFIALSAYAVTTKKDFSFLRGFLFAGLIVVIAAALINIFVGNSVAFMAINAGLALLMTGFILFDTSRIVNGGETNYIRATISLYLDFLNLFIAILHLLGIGNDD

SEQ ID NO: 7817 - DNA, 672 bp, Alkalilimnicola ehrlichei MLHE-1
  CDS (1)..(672): transl_table=11
atgacagaccgctaccaggccccagccccggcgcggccggccgagtcggtactggccaccaacaaggtcatccgcaacacctacatgctgctgtccatgacgctgctcttcagcgcggccatggccggcgtctccatggtgcttcaggtaccgcaccccggggtgatcatcaccctggtgggctatttcggcctgctgttcctggtcagctatctgcgtaacagcatctgggcactgcctgctgtattcgccctcaccggcttcatgggctttaccctggggccgattgtcagcgcctacctggccctgcccaacggggggcagatcgtcatgcaggcctttggcggcaccgccgccatcttcctgtcgctgtcggcctacgccctgacctcgcgcaaggacttcagcttcatgggcgggttcctgttcgccggcatcatcgtggcctttctggccgggctggcggcgatctttttccagatgcccatgctctcgctggcggtcagcgtgatgttcgtgctgctgatgtccggtctcatcctgtgggagaccagcaacatcatccacggcggcgagaccaactacgtcatggccaccgtcaccctgtttgtggccatcttcaacctgttcatcagcctcctgaacatcctcggcgtgatgaacagcgactga

SEQ ID NO: 7818 - protein, 223 aa, Alkalilimnicola ehrlichei MLHE-1
MTDRYQAPAPARPAESVLATNKVIRNTYMLLSMTLLFSAAMAGVSMVLQVPHPGVIITLVGYFGLLFLVSYLRNSIWALPAVFALTGFMGFTLGPIVSAYLALPNGGQIVMQAFGGTAAIFLSLSAYALTSRKDFSFMGGFLFAGIIVAFLAGLAAIFFQMPMLSLAVSVMFVLLMSGLILWETSNIIHGGETNYVMATVTLFVAIFNLFISLLNILGVMNSD

SEQ ID NO: 7819 - DNA, 669 bp, Pseudoalteromonas tunicata D2
  CDS (1)..(669): transl_table=11
atggggtttaatcatacttatagtaatgaacgttctgttcattctgttgtagaaacgaataaagttttacgcaatacctatcttctgttaggcatgacattagcatgtagtgctgtaacagccgggatctcaatggctttacaacttccttattttatggggttggtgtttagtattattgggtttggtttattgtttgttgtaaacaaaaaagccgatagcgcatctgggattggttggatttttgcttttactgcctgtatgggcgcaggccttggcccattattaaaccactacgctgcaatgccaagtggccccatgttaataatgcaagcattaggctcaactgcattagtattttttggcctttcggcttacgctatgaccactaagaaagacttctcttatcttggaggatttttaacagttggtttattagtggtaatcgtcgcaagcttagtgaatatctttttaggtagtagtacagtgtttctagccgtaaatgctgctgttatcttcattatgtctggttttatcttgtttgatacaagccgcattattaatggtggtgagactaattatattcgcgccactttgtcgctttatttaaatatctataacctgtttgtttcaatcttgcagttattaggttttgcaaataatgattaa

SEQ ID NO: 7820 - protein, 222 aa, Pseudoalteromonas tunicata D2
MGFNHTYSNERSVHSVVETNKVLRNTYLLLGMTLACSAVTAGISMALQLPYFMGLVFSIIGFGLLFVVNKKADSASGIGWIFAFTACMGAGLGPLLNHYAAMPSGPMLIMQALGSTALVFFGLSAYAMTTKKDFSYLGGFLTVGLLVVIVASLVNIFLGSSTVFLAVNAAVIFIMSGFILFDTSRIINGGETNYIRATLSLYLNIYNLFVSILQLLGFANND

SEQ ID NO: 7821 - DNA, 669 bp, Photobacterium sp. SKA34
  CDS (1)..(669): transl_table=11
atgaacgatcgtatagttaatcgtgacggcggttacgaaggcttactatctaccaacaaggttctacgtaacacctacttcctactttcgttaactttgttattttctgcaggtattgcaggtgtagcgatggcaatgaatgtaccgccagtacactggattgtattacttgtaggtttctatggtttaattttcttaaccgaacgtaaccgagagagtagcttgggcttagttttcgtcttcgcactaactggatttatgggttataccttaggtccaattctaaacatgtatgttggcgcgggtatgggtgatgttgtaatgacagccctaggcggtacagcggtaactttccttggttgttcagcttacgcactaaccactaagcgtgacctatcgttcttaaacggtatgttaatggcaggctttatcgcaattattgttgctgtggttgctaatatcttcttgaagatgccaatgctgtcacttgctattagcggtatgtttgttctgttctcatcagctgcaattctattgacaacacagtcaattgttcgtggtggtgaaacaaactacatctcagcaacagtaacgttgtacgtatcaatctacaacctgttcctaagcttgttgcaaattcttggtgttatcaatagcgataataactag

SEQ ID NO: 7822 - protein, 222 aa, Photobacterium sp. SKA34
MNDRIVNRDGGYEGLLSTNKVLRNTYFLLSLTLLFSAGIAGVAMAMNVPPVHWIVLLVGFYGLIFLTERNRESSLGLVFVFALTGFMGYTLGPILNMYVGAGMGDVVMTALGGTAVTFLGCSAYALTTKRDLSFLNGMLMAGFIAIIVAVVANIFLKMPMLSLAISGMFVLFSSAAILLTTQSIVRGGETNYISATVTLYVSIYNLFLSLLQILGVINSDNN

SEQ ID NO: 7823 - DNA, 672 bp, Oceanospirillum sp. MED92
  CDS (1)..(672): transl_table=11
atgaatacatctatacgatcatctgcaactcaaacgcaaacatcggcgttggagtccaataaggtactacgcaacacctatgcattgttgtcccttacattgctgttcagtgctatcactgcgggtgcatctttactactccagctgcctcaccccggcatcatcatctctttagtaggcttctttggtctgtattttctgaccaccaagcttcgcaatagtatatgggggctgccttcagtgtttgctctcacaggtttcatgggatacaccctggggccaatcattggtcattatctgtcgatgcccggcggcggtacgattgtgatgaatgcgatggccatgacggggcttatttttctgagcttgtcggcctatgtgttaacaacccgtaagaactttagctttatgggtggctttttgatggttggtattctgctggcgttttttgctgggctcgcagctgtatttttccagatccctgcgttagcactagcggtttcagcaatgttcgtgctgttgatgtcaggtttcattctttatgaaaccagcaatatccttcatggaggtgagaccaattacatcatggcaacggtttccctatatgtatcgatttacaatttgtttaccagtttgttacagattctaggcttcctcggaggcgatgaataa

SEQ ID NO: 7824 - protein, 223 aa, Oceanospirillum sp. MED92
MNTSIRSSATQTQTSALESNKVLRNTYALLSLTLLFSAITAGASLLLQLPHPGIIISLVGFFGLYFLTTKLRNSIWGLPSVFALTGFMGYTLGPIIGHYLSMPGGGTIVMNAMAMTGLIFLSLSAYVLTTRKNFSFMGGFLMVGILLAFFAGLAAVFFQIPALALAVSAMFVLLMSGFILYETSNILHGGETNYIMATVSLYVSIYNLFTSLLQILGFLGGDE

SEQ ID NO: 7825 - DNA, 681 bp, Oceanospirillum sp. MED92
  CDS (1)..(681): transl_table=11
atgcgtaccgttaatacttacgatactcgctctgaacaatccgttcttcagacgaataaagtcattcgcaatacttatatgcttctggcaatgacaatggtggttagcaccatcactgccggtatttcaatggcgctgcagatgccgtttattgtttacatcggcagtttcgttcttagctttgtaatgctgtttattcttaataaaaagcagaacagtgcggcagcactacccctagtatttctgtttacaggcatgatggggttcggtctcggaccgttacttaaccattatctagcaatggcaaatggtggccagatcatcatgactgctcttggaactaccgccctcacattctttggcctctctgcatacgtccttaccagcaaaaaagacttcagttttatgggcggttttctggctgcgggtatgatggttgcactgatcaccatggttgcgctcttcgtcctacctctatttggcattgaacttggtgcacttcaccttgcattttctgctttggtagtactactgatgtgtggcttcattctttacgatacaagcaatatcgtgaatggcgtttataccaactacatcatggcaactgtcagcttgtacctgaacatttacaacctattcattcatctgcttagtctagtgggtgtattaagtgacgactga

SEQ ID NO: 7826 - protein, 226 aa, Oceanospirillum sp. MED92
MRTVNTYDTRSEQSVLQTNKVIRNTYMLLAMTMVVSTITAGISMALQMPFIVYIGSFVLSFVMLFILNKKQNSAAALPLVFLFTGMMGFGLGPLLNHYLAMANGGQIIMTALGTTALTFFGLSAYVLTSKKDFSFMGGFLAAGMMVALITMVALFVLPLFGIELGALHLAFSALVVLLMCGFILYDTSNIVNGVYTNYIMATVSLYLNIYNLFIHLLSLVGVLSDD

SEQ ID NO: 7827 - DNA, 690 bp, marine gamma proteobacterium HTCC2207
  CDS (1)..(690): transl_table=11
atggaaacggacaagtacagcgcaaaatcaatttcaggcaatagtcaaagcggcattcaaagcaccgccctagaccccgcggtagtcaaagtactgcgcagcacctatatgttactgggtgtgactctggccttcagtgccattatggctggcgttgctatggcaataaatgccccttacttcggtctctggacattactgccctactttatctgcctttggatgacggagaaaaacaagaacaactcaatgggtatagtgtgggtttttgccctgaccggttggatgggtttcactcttgggccaatattgaacatgtatctcgctgtacgtggcgctgagccaattatgatggctctggggtctactgctctggtgttcttcgcctcgtctgcctatgtgatgaccacgcgtaaaaatcttaactttatgaccggattcttgatgaccgggatgctggttgcgtttgtcgctgcgatcgccaatatcttcctgcaaattccggcgctggcactgacggtaagcgcggccgttgcactgatttcaaccggtatgatcatgtggcagaccagcgccattattcatggtggcgagcgtaattatatctccgccacagtgacattattcgtgatgatctataacctgttcctcagcttgctgcacctattcggcatgggcagcgacgactaa

SEQ ID NO: 7828 - protein, 229 aa, marine gamma proteobacterium HTCC2207
METDKYSAKSISGNSQSGIQSTALDPAVVKVLRSTYMLLGVTLAFSAIMAGVAMAINAPYFGLWTLLPYFICLWMTEKNKNNSMGIVWVFALTGWMGFTLGPILNMYLAVRGAEPIMMALGSTALVFFASSAYVMTTRKNLNFMTGFLMTGMLVAFVAAIANIFLQIPALALTVSAAVALISTGMIMWQTSAIIHGGERNYISATVTLFVMIYNLFLSLLHLFGMGSDD

SEQ ID NO: 7829 - DNA, 675 bp, Rickettsiella grylli
  CDS (1)..(675)
atggcttcaagtaaaatattattaaatcctagcttagaatctgttttagcgaccaataccgtcttacggaatacctacattcttttagggttaacactgattttcagcgcatttacagcggggttggcattgattacaaatgcgccaccactcaatccattgattacactgattggatatttcggcttattatttttaactaacttcacgcggaatagttcttggggtttgttatccgtgtttagtttaactggatttatgggatatacattgggacctattttgaatcattatatccacggatttaccaatggacatgaattaattatgatgtcattgggtgcaacgggccttatctttttcgcgttgtctgcttatgcgttaaccaccaagaaagattttagtttcatggcaagttttctgatggtgggaatgattgtggcttttctagccagtataggtgcacttttcttccatattcctgcattgatgctgaccctgtctgcggtatttatattactgtcatcgggtataattttgctacaaaccagccaaattatccatgggggagaaacgaattacattatggcaacagtgacactttatgtatcactttataacatctttttaagtttattaaatttactaggggcgtttagtgggaatcgagattag

SEQ ID NO: 7830 - protein, 224 aa, Rickettsiella grylli
MASSKILLNPSLESVLATNTVLRNTYILLGLTLIFSAFTAGLALITNAPPLNPLITLIGYFGLLFLTNFTRNSSWGLLSVFSLTGFMGYTLGPILNHYIHGFTNGHELIMMSLGATGLIFFALSAYALTTKKDFSFMASFLMVGMIVAFLASIGALFFHIPALMLTLSAVFILLSSGIILLQTSQIIHGGETNYIMATVTLYVSLYNIFLSLLNLLGAFSGNRD

SEQ ID NO: 7831 - DNA, 681 bp, Oceanobacter sp. RED65
  CDS (1)..(681): transl_table=11
atggacccacaagtatatacacagcacgcaagtgcccaatcggttgataccaacaaggtattgcgtaacacgtatttgctactcagcatgacccttgtgttcagcgctctaaccgctggcgcgagcatggctatgaacttaagtcatagtgctgcgttaatcatgatgctggcatctcttgccattgtctggtttgtattaccgcgtgttgctaactcagcaatgggcctacctgttgttttcctattcacaggcctgctaggcgcatcattaggtcccatgcttaaccactaccttgccctaccaaacggtagcagcatcgtaatgcaagcgctgggcggtaccgctgccattttcctttctttgtccgcttacgtgacgacgaccaagaaagactttagcttcatgggcggtttcctattcgcaggccttatggtcgtaattgtaggtgctattggtgccatgatcgcaagctggggctttggtgtagacgtttctgcgttctctctagccatctcggcggctgtggttttactaatgtctggcttcatccttttcgatactagccgtatcgttaacggcggtgaaaccaactacatcatggcaacagttggtctatacctaacgatctacaacctgtttactagtcttttacaccttatcggtgcaatggacgaataa

SEQ ID NO: 7832 - protein, 226 aa, Oceanobacter sp. RED65
MDPQVYTQHASAQSVDTNKVLRNTYLLLSMTLVFSALTAGASMAMNLSHSAALIMMLASLAIVWFVLPRVANSAMGLPVVFLFTGLLGASLGPMLNHYLALPNGSSIVMQALGGTAAIFLSLSAYVTTTKKDFSFMGGFLFAGLMVVIVGAIGAMIASWGFGVDVSAFSLAISAAVVLLMSGFILFDTSRIVNGGETNYIMATVGLYLTIYNLFTSLLHLIGAMDE

SEQ ID NO: 7833 - DNA, 669 bp, Oceanobacter sp. RED65
  CDS (1)..(669): transl_table=11
atgaacaacgatattatcaatcaagtagatactccagttgttagtcagggcgttaagaataaggtgcttaaaaacacctatatgctgctcgcaatgacactactttttagtggtgcggttgctgccgtatccacgtctatgaatttgccgcatccggggctgctgattacgcttgtcgtattctttgggctactgtttgcgatctctaagtttcagaatagtgccatgggcattgtactcgtatttgcgttgactgggtttatggggctcaccttgggtccaatcctaaatgcatacttgagtctaccgggcggtagttcgatcgtgatgaatgccatgggggtcaccggcgcaattttcttgggtttgtctgcctatgtgctgacaacgaaaaaagattttagctttatgggcggcttccttacggtcggtattatcgttggctttttagctggtttaggcgccattttctttgagatgccggcattatcgcttgcggtttcggccatgtttgtattgctcatgtcgggtctcatcttgtatgaaaccagcaatattataaacggcggcgaaaccaattatattatggcgacaacaacactgtttgtttcaatctttaatttgtttactagcttgttgcacttgttgggttttgcgagtcaggaataa

SEQ ID NO: 7834 - protein, 222 aa, Oceanobacter sp. RED65
MNNDIINQVDTPVVSQGVKNKVLKNTYMLLAMTLLFSGAVAAVSTSMNLPHPGLLITLVVFFGLLFAISKFQNSAMGIVLVFALTGFMGLTLGPILNAYLSLPGGSSIVMNAMGVTGAIFLGLSAYVLTTKKDFSFMGGFLTVGIIVGFLAGLGAIFFEMPALSLAVSAMFVLLMSGLILYETSNIINGGETNYIMATTTLFVSIFNLFTSLLHLLGFASQE

SEQ ID NO: 7835 - DNA, 663 bp, Haemophilus influenzae
  CDS (1)..(663): transl_table=11
atgcaatcacgtcttattgtggatgctcaaaaagaatcgttactcagcacacataaagtgttgcgtaacacgtattttttactgggattaacaatggctttttcagcggttgttgcgtttatttcaatgagcttaaacttgccttatccaaatattattgtgttactagtgggtttttatggcttacttttcttaaccaataaattagctgatcgccctgctggtattttggcggcctttgctttcactggatttatgggatacaccatcgggccaattttaaatatgtatgtggcacgtggaatggaagatttgattatgcttgcattcgcaggaactgctatcgtattttttgcgtgttccgcttatgtattgactacgaaaaaagatatgtcattcttatcaagcgcaatgttcgcattatttattgtgttattgcttggtatggtggcgagtttcttcttccaaattcctgctttatcggtcgcaattagtgcattatttgtagtgttctcaacaatgaccattttgtatgaaaccagtaatattattcacggtggagaaacaaattacattcgcgcaaccgtgaacatctatgtttcaatctacaatttattcttgagtttattaagattactttctatcttttcaagtgatgaataa

SEQ ID NO: 7836 - protein, 220 aa, Haemophilus influenzae
MQSRLIVDAQKESLLSTHKVLRNTYFLLGLTMAFSAVVAFISMSLNLPYPNIIVLLVGFYGLLFLTNKLADRPAGILAAFAFTGFMGYTIGPILNMYVARGMEDLIMLAFAGTAIVFFACSAYVLTTKKDMSFLSSAMFALFIVLLLGMVASFFFQIPALSVAISALFVVFSTMTILYETSNIIHGGETNYIRATVNIYVSIYNLFLSLLRLLSIFSSDE

SEQ ID NO: 7837 - DNA, 672 bp, Vibrio cholerae
  CDS (1)..(672): transl_table=11
atgaatacgccaatgtttaccagaacttccagcttggaacgtactcttgaaaccaacaaggttttgaagaatacctacttcctgctttctatgacccttgtcaccagtgcgattgcagcaatggcgactatggctatcggcatttctcctatcgttgctttggtgatgcagttggctgccattggcattttgtttttcgtgatgccaaaagcgattaactcatcatcaggcctagtatggacgttcgtctttactggactgatgggaggagctcttggccctatgctgaatttctatgcggcgatgccaaatggcccaatcgttattgcgcaagcactcggcctgactggcatggtgtttttaggcctgtcggcttacaccattaccagcaagaaagatttctctttcatgcgtaatttcctgtttgctggcttgatcattgtgattgttgcggcattgattaacatctttgttggctcaacggtagctcatctggctatcagtagcgtttctgcactggtattttcgggtttcattctgtttgataccagccgtattgtgcgtggtgaagaaaccaactatatctcagcaacgatttctatgtacttgaatatcctgaacctgttcactagcttgttgagcattctgggtatcatgaacaataacgattaa

SEQ ID NO: 7838 - protein, 223 aa, Vibrio cholerae
MNTPMFTRTSSLERTLETNKVLKNTYFLLSMTLVTSAIAAMATMAIGISPIVALVMQLAAIGILFFVMPKAINSSSGLVWTFVFTGLMGGALGPMLNFYAAMPNGPIVIAQALGLTGMVFLGLSAYTITSKKDFSFMRNFLFAGLIIVIVAALINIFVGSTVAHLAISSVSALVFSGFILFDTSRIVRGEETNYISATISMYLNILNLFTSLLSILGIMNNND

SEQ ID NO: 7839 - DNA, 669 bp, Pseudomonas aeruginosa
  CDS (1)..(669): transl_table=11
atgcaagaacagcaatatcagctgaactccgccgtcgcggaacagcgtgaagtcagcggcgttctgcgcaatacctacggcctgctggcactcaccctggccttcagcggcctggtggcctacgtttcgcagcagatgcgcctgccctatccgaacgtgttcgtggtgctgatcggcttctacggcctgttcttcctcaccgtgaagctgcgcaacagcgcctggggtctggtcagcactttcgccctgaccggcttcatgggctacacgctcggcccgatcctcaacatgtacctcggcctgcccaacggcggcagcgtcatcacttcggcgttcgccatgaccgccctggtgttcttcggcctgtccgcctatgtgctgaccacccgcaaggacatgagcttcctgtccggcttcatcaccgccggcttcttcgtcctgctgggcgccgtgctggtatcgctgttcttccagatcagtggcctgcaactggcgatcagcgccggcttcgtcctgttctcctcggcgatgatcctctaccagaccagcgcgatcatccacggcggcgaacgcaactacatcatggccaccatcagcctgtacgtgtcgatctacaacctgttcatcagcctgttgcagatcttcggcatcgccggcggcgacgactga

SEQ ID NO: 7840 - protein, 222 aa, Pseudomonas aeruginosa
MQEQQYQLNSAVAEQREVSGVLRNTYGLLALTLAFSGLVAYVSQQMRLPYPNVFVVLIGFYGLFFLTVKLRNSAWGLVSTFALTGFMGYTLGPILNMYLGLPNGGSVITSAFAMTALVFFGLSAYVLTTRKDMSFLSGFITAGFFVLLGAVLVSLFFQISGLQLAISAGFVLFSSAMILYQTSAIIHGGERNYIMATISLYVSIYNLFISLLQIFGIAGGDD

SEQ ID NO: 7841 - DNA, 663 bp, Pasteurella multocida
  CDS (1)..(663): transl_table=11
atggaatctcgcattgttctagatagcagagaaacatctctacttaacacccacaaagtgttacgcaatacttatttcttattaggtttaaccctcgctttttcagcagtggtcgcttacatctcaatgagcctaaacttaccacgcccaggtctcattttgatgctagcaggcttctacggtttattatttttaacttataaattatccaacagtggtttagggattctttctacgttcgcatttaccggctttttaggctatacattaggaccaattttaaatgtctatgtcagtcacggtgcaggtgatattgtcgtcttagcccttgccggcacagcggctgtgttctttgcttgttcagcttatgtgttaacgacaaagaaagacatgtctttcctttctggtaccattttcgctttattcattgtccttttactcggtatggttgccagtttcttcttccaatcaccaatgctttacattgctatcagtggtttattcgtcgtgttctctactttgggtattctctacgaaaccagcaatattattcatggcggagaaaccaactatattcgtgcaacagtcagtattttcgtatcactgtataacttatttattagcttactcaatatcttctcgattttatccaatgaagattaa

SEQ ID NO: 7842 - protein, 220 aa, Pasteurella multocida
MESRIVLDSRETSLLNTHKVLRNTYFLLGLTLAFSAVVAYISMSLNLPRPGLILMLAGFYGLLFLTYKLSNSGLGILSTFAFTGFLGYTLGPILNVYVSHGAGDIVVLALAGTAAVFFACSAYVLTTKKDMSFLSGTIFALFIVLLLGMVASFFFQSPMLYIAISGLFVVFSTLGILYETSNIIHGGETNYIRATVSIFVSLYNLFISLLNIFSILSNED

SEQ ID NO: 7843 - DNA, 25 bp, Artificial sequence
  primer
atggatcgtattgttagttcttcac

SEQ ID NO: 7844 - DNA, 22 bp, Artificial sequence
  primer
ttaatcgcggctagcgaagccc

SEQ ID NO: 7845 - protein, 210 aa, Artificial sequence
  consensus sequence
  Variant (8)..(8): Xaa in position 8 is any amino acid
  Variant (11)..(12): Xaa in position 11 to 12 is any amino acid
  Variant (15)..(15): Xaa in position 15 is any amino acid
  Variant (19)..(20): Xaa in position 19 to 20 is any amino acid
  Variant (22)..(41): Xaa in position 22 to 41 is any amino acid
  Variant (42)..(42): Xaa in position 42 is any or no amino acid
  Variant (45)..(45): Xaa in position 45 is any amino acid
  Variant (47)..(56): Xaa in position 47 to 56 is any amino acid
  Variant (57)..(57): Xaa in position 57 is any or no amino acid
  Variant (59)..(62): Xaa in position 59 to 62 is any amino acid
  Variant (65)..(65): Xaa in position 65 is any amino acid
  Variant (68)..(69): Xaa in position 68 to 69 is any amino acid
  Variant (71)..(72): Xaa in position 71 to 72 is any amino acid
  Variant (76)..(76): Xaa in position 76 is any amino acid
  Variant (79)..(79): Xaa in position 79 is any amino acid
  Variant (81)..(85): Xaa in position 81 to 85 is any amino acid
  Variant (86)..(86): Xaa in position 86 is any or no amino acid
  Variant (88)..(92): Xaa in position 88 to 92 is any amino acid
  Variant (93)..(93): Xaa in position 93 is any or no amino acid
  Variant (95)..(97): Xaa in position 95 to 97 is any amino acid
  Variant (99)..(101): Xaa in position 99 to 101 is any amino acid
  Variant (103)..(105): Xaa in position 103 to 105 is any amino acid
  Variant (109)..(113): Xaa in position 109 to 113 is any amino acid
  Variant (116)..(116): Xaa in position 116 is any amino acid
  Variant (118)..(120): Xaa in position 118 to 120 is any amino acid
  Variant (122)..(125): Xaa in position 122 to 125 is any amino acid
  Variant (127)..(128): Xaa in position 127 to 128 is any amino acid
  Variant (130)..(138): Xaa in position 130 to 138 is any amino acid
  Variant (140)..(144): Xaa in position 140 to 144 is any amino acid
  Variant (145)..(150): Xaa in position 145 to 150 is any or no amino acid
  Variant (152)..(152): Xaa in position 152 is any amino acid
  Variant (154)..(155): Xaa in position 154 to 155 is any amino acid
  Variant (157)..(166): Xaa in position 157 to 166 is any amino acid
  Variant (169)..(170): Xaa in position 169 to 170 is any amino acid
  Variant (173)..(173): Xaa in position 173 is any amino acid
  Variant (175)..(176): Xaa in position 175 to 176 is any amino acid
  Variant (180)..(180): Xaa in position 180 is any amino acid
  Variant (184)..(184): Xaa in position 184 is any amino acid
  Variant (187)..(188): Xaa in position 187 to 188 is any amino acid
  Variant (192)..(194): Xaa in position 192 to 194 is any amino acid
  Variant (196)..(196): Xaa in position 196 is any amino acid
  Variant (198)..(198): Xaa in position 198 is any amino acid
  Variant (202)..(204): Xaa in position 202 to 204 is any amino acid
  Variant (206)..(208): Xaa in position 206 to 208 is any amino acid
  Variant (209)..(209): Xaa in position 209 is any or no amino acid
KVLRNTYXLLXXTLXFSAXXAXXXXXXXXXXXXXXXXXXXXXGLXFXXXXXXXXXXXGXXXXFAXTGXXGXXLGPXLNXYXXXXXXGXXXXXXAXXXTXXXFXXXSAYXXXXXKDXSXXXGXXXXGXXVXXXXXXXXXFXXXXXXXXXXXLXLXXSXXXXXXXXXXILXXTSXIXXGGEXNYIXATXXLYVXXXNXFXSLLXXXGXXXXD

SEQ ID NO: 7846 - protein, 42 aa, Artificial sequence
  protein pattern
  Variant (2)..(3): Xaa in position 2 to 3 is any amino acid
  Variant (4)..(4): Xaa in position 4 is any or no amino acid
  Variant (7)..(7): Xaa in position 7 is any amino acid
  Variant (8)..(8): Xaa in position 8 is Asp, Glu, Gln or Thr
  Variant (10)..(10): Xaa in position 10 is Asn, Gln or Ser
  Variant (11)..(11): Xaa in position 11 is any amino acid
  Variant (13)..(14): Xaa in position 13 to 14 is any amino acid
  Variant (15)..(15): Xaa in position 15 is any or no amino acid
  Variant (17)..(17): Xaa in position 17 is any or no amino acid
  Variant (19)..(19): Xaa in position 19 is any amino acid
  Variant (22)..(22): Xaa in position 22 is Ile or Val
  Variant (23)..(23): Xaa in position 23 is any amino acid
  Variant (26)..(26): Xaa in position 26 is any amino acid
  Variant (27)..(27): Xaa in position 27 is Asp, Gly, Asn, Ser or Thr
  Variant (28)..(28): Xaa in position 28 is Ile, Leu or Met
  Variant (29)..(29): Xaa in position 29 is Phe or Tyr
  Variant (30)..(30): Xaa in position 30 is Leu or Val
  Variant (31)..(31): Xaa in position 31 is Ala, Asn, Ser or Thr
  Variant (32)..(32): Xaa in position 32 is Ile or Leu
  Variant (33)..(33): Xaa in position 33 is any amino acid
  Variant (35)..(35): Xaa in position 35 is Ile or Leu
  Variant (37)..(38): Xaa in position 37 to 38 is any amino acid
  Variant (39)..(39): Xaa in position 39 is Ile or Leu
  Variant (41)..(41): Xaa in position 41 is any amino acid
  Variant (42)..(42): Xaa in position 42 is Ile or Leu
SXXXILXXTXXIXXXGXEXNYXXATXXXXXXXXNXFXXXLXX

SEQ ID NO: 7847 - protein, 23 aa, Artificial sequence
  protein pattern
  Variant (2)..(2): Xaa in position 2 is any amino acid
  Variant (3)..(3): Xaa in position 3 is any or no amino acid
  Variant (7)..(7): Xaa in position 7 is any amino acid
  Variant (10)..(10): Xaa in position 10 is Ala, Gly or Ser
  Variant (11)..(11): Xaa in position 11 is Leu or Met
  Variant (13)..(13): Xaa in position 13 is Ile, Leu or Met
  Variant (14)..(15): Xaa in position 14 to 15 is any amino acid
  Variant (17)..(17): Xaa in position 17 is Ala or Gly
  Variant (18)..(19): Xaa in position 18 to 19 is any amino acid
  Variant (21)..(22): Xaa in position 21 to 22 is any amino acid
  Variant (23)..(23): Xaa in position 23 is Ala, Ser or Thr
LXXNTYXLLXXTXXXSXXXAXXX

SEQ ID NO: 7848 - protein, 37 aa, Artificial sequence
  protein pattern
  Variant (2)..(2): Xaa in position 2 is Ala, Gly or Ser
  Variant (3)..(4): Xaa in position 3 to 4 is any amino acid
  Variant (6)..(6): Xaa in position 6 is any amino acid
  Variant (7)..(7): Xaa in position 7 is Ala, Cys, Gly, Ser or Val
  Variant (8)..(8): Xaa in position 8 is any amino acid
  Variant (10)..(10): Xaa in position 10 is Ala or Gly
  Variant (12)..(13): Xaa in position 12 to 13 is any amino acid
  Variant (14)..(14): Xaa in position 14 is any or no amino acid
  Variant (16)..(16): Xaa in position 16 is any amino acid
  Variant (18)..(18): Xaa in position 18 is any or no amino acid
  Variant (20)..(20): Xaa in position 20 is Phe, Leu or Met
  Variant (22)..(24): Xaa in position 22 to 24 is any amino acid
  Variant (25)..(25): Xaa in position 25 is Gly, Asn or Ser
  Variant (26)..(26): Xaa in position 26 is any amino acid
  Variant (27)..(27): Xaa in position 27 is Ile, Leu, Met or Val
  Variant (28)..(28): Xaa in position 28 is any amino acid
  Variant (29)..(29): Xaa in position 29 is Ala, Ser, Thr or Val
  Variant (30)..(30): Xaa in position 30 is Gly or Leu
  Variant (31)..(32): Xaa in position 31 to 32 is Phe, Ile, Leu, Met or Val
  Variant (33)..(33): Xaa in position 33 is any amino acid
  Variant (34)..(34): Xaa in position 34 is Ala, Gly, Ile, Leu or Val
  Variant (35)..(35): Xaa in position 35 is Phe, Ile, Leu, Met or Val
  Variant (36)..(36): Xaa in position 36 is Ala, Gly, Ile, Leu or Val
  Variant (37)..(37): Xaa in position 37 is Ala, Gly or Thr
TXXXFXXXSXYXXXTXKXDXSXXXXXXXXXXXXXXXX

SEQ ID NO: 7849 - protein, 24 aa, Artificial sequence
  protein pattern
  Variant (2)..(4): Xaa in position 2 to 4 is any amino acid
  Variant (5)..(5): Xaa in position 5 is any or no amino acid
  Variant (7)..(7): Xaa in position 7 is Ala, Leu or Val
  Variant (8)..(8): Xaa in position 8 is Phe or Leu
  Variant (11)..(11): Xaa in position 11 is any amino acid
  Variant (12)..(12): Xaa in position 12 is Leu or Met
  Variant (14)..(15): Xaa in position 14 to 15 is any amino acid
  Variant (16)..(16): Xaa in position 16 is Ile or Leu
  Variant (19)..(19): Xaa in position 19 is Ile, Leu, Met or Val
  Variant (20)..(20): Xaa in position 20 is Ile, Leu or Val
  Variant (21)..(21): Xaa in position 21 is Gly, Asn or Ser
  Variant (22)..(23): Xaa in position 22 to 23 is any amino acid
  Variant (24)..(24): Xaa in position 24 is Ala, Ile, Leu or Val
GXXXXFXXTGXXGXXXGPXXXXXX

SEQ ID NO: 7850 - DNA, 882 bp, Escherichia coli K12
  CDS (1)..(882): transl_table=11
atgatgcgaatcgcgctcttcctgctaacgaacctggccgtaatggtcgttttcgggctggtactgagcctgacagggatacagtcgagcagcgttcaggggctgatgatcatggccttgctgttcggttttggtggttccttcgtttcgcttctgatgtccaaatggatggcattacgatctgttggcggggaagtgatcgagcaaccgcgtaacgaaagggaacgttggctggtcaatactgtagcaacccaggctcgtcaggcggggatcgctatgccgcaagtggctatctaccatgcgccggacatcaacgcttttgcaaccggtgcgcgccgtgatgcctctctggttgctgtcagcaccggtttgctgcagaacatgagcccggatgaagccgaggcggtaattgctcacgaaatcagccacatcgccaatggtgatatggtcaccatgacgctgattcagggcgtggtgaacaccttcgttatctttatttcccgtattctggcgcagcttgccgcgggttttatgggcggaaatcgtgatgaaggtgaagagagcaacggcaacccgctgatctactttgcggttgcaacggttctggaactggtgtttggtattctggcgagcattatcaccatgtggttctcgcgtcatcgtgaattccatgctgatgccggttcggcaaaactggttggtcgcgagaaaatgattgccgcgctgcagcgcctgaaaaccagctatgaaccgcaagaagcaaccagcatgatggctctctgcattaacggtaagtcgaaatcgctcagtgagttgttcatgacccacccgccgctggataaacgaattgaagctctgcgtacgggtgaatacctgaagtaa

SEQ ID NO: 7851 - protein, 293 aa, Escherichia coli K12
MMRIALFLLTNLAVMVVFGLVLSLTGIQSSSVQGLMIMALLFGFGGSFVSLLMSKWMALRSVGGEVIEQPRNERERWLVNTVATQARQAGIAMPQVAIYHAPDINAFATGARRDASLVAVSTGLLQNMSPDEAEAVIAHEISHIANGDMVTMTLIQGVVNTFVIFISRILAQLAAGFMGGNRDEGEESNGNPLIYFAVATVLELVFGILASIITMWFSRHREFHADAGSAKLVGREKMIAALQRLKTSYEPQEATSMMALCINGKSKSLSELFMTHPPLDKRIEALRTGEYLK

SEQ ID NO: 7852 - DNA, 1044 bp, Neisseria meningitidis MC58
  CDS (1)..(1044): transl_table=11
ttgaaatgtgtttattggaatcaaacagatggtttacgattctacacggcttggcacaatagttcaaaaaccaactgcacaaactgccatttgcaagcaaatgttttgcatacctttgccgagtctgatattcacaagccggcaactttttgggacaatcccccaaaatttcaaaacatcacaccctaccaaaaaggaacatccgtgaaacgaatttttctgtttttggctaccaatatcgctgttttggtcgtaatcaacattgttttggcggttttgggcatcaacagccggggcggcacgggcagcctgttggcgtattccgccgtcgtcggcttcactggttcgattatttcgctgctgatgtccaaatttatcgccaaacaatcggtcggcgcggaagttatcgacacgccgcgcaccgaagaagaagcctggcttttgaacactgtcgaagcccaagcgcggcaatggaacctgaaaacgcccgaagtcgccatctaccactcccccgaacccaatgcctttgccacgggcgcatcgagaaacagctccctgatcgccgtcagcaccggtttgctcgaccatatgacgcgtgacgaagtggaagccgtattggcgcacgaaatggcacacgtcggcaacggcgatatggttacgctgacgctgattcaaggcgtggtcaatacctttgtcgtgttcctgtcgcgcattattgccaacctgattgcccgaaacaacgacggcagccagtcccagggaacttatttcctggtcagcatggtattccaaatcctgttcggcttccttgccagcttaattgtcatgtggttcagccgacaacgcgaataccgcgccgatgcgggcgcggcaaaactggtcggcgcgccgaaaatgatttccgccctgcaaaggctcaaaggcaacccggtcgatttgcccgaagaaatgaacgcaatgggcatcgccggagatacgcgcgactccctgctcagcacccacccttcgctggacaaccgtatcgcccgcctcaaatcgctttaa

SEQ ID NO: 7853 - protein, 347 aa, Neisseria meningitidis MC58
MKCVYWNQTDGLRFYTAWHNSSKTNCTNCHLQANVLHTFAESDIHKPATFWDNPPKFQNITPYQKGTSVKRIFLFLATNIAVLVVINIVLAVLGINSRGGTGSLLAYSAVVGFTGSIISLLMSKFIAKQSVGAEVIDTPRTEEEAWLLNTVEAQARQWNLKTPEVAIYHSPEPNAFATGASRNSSLIAVSTGLLDHMTRDEVEAVLAHEMAHVGNGDMVTLTLIQGVVNTFVVFLSRIIANLIARNNDGSQSQGTYFLVSMVFQILFGFLASLIVMWFSRQREYRADAGAAKLVGAPKMISALQRLKGNPVDLPEEMNAMGIAGDTRDSLLSTHPSLDNRIARLKSL

SEQ ID NO: 7854 - DNA, 882 bp, Escherichia coli O157:H7 EDL933
  CDS (1)..(882): transl_table=11
  misc_feature (862)..(862): r is g or a
atgatgcgaatcgcgctcttcctgctaacgaacctggccgtaatggtcgttttcgggctggtactgagcctgacagggatacagtcgagcagcgttcaggggctgatgatcatggccttgctgttcggttttggtggttccttcgtttcgcttctgatgtccaaatggatggcattacgatctgttggcggggaagtgatcgagcaaccgcgtaacgaaagggaacgttggctggtcaatactgtagcaacccaggctcgtcaggcggggatcgctatgccgcaagtggctatctaccatgcgccggacatcaacgcttttgcaaccggtgcgcgccgtgatgcctctctggttgctgtcagcaccggtttgctgcagaacatgagcccggatgaagccgaggcggtaattgctcacgaaatcagccacatcgccaatggtgatatggtcaccatgacgctgattcagggcgtggtgaacaccttcgttatctttatttcccgtatcctggcgcagcttgccgcgggttttatgggcggaaatcgtgatgaaggtgaagagagcaacggcaacccgctgatctactttgcggttgcaacggttctggaactggtgtttggtattctggcgagcattatcaccatgtggttctcgcgtcatcgtgaattccatgctgatgccggttcggcaaaactggttggtcgcgagaaaatgattgccgcgctgcagcgcctgaaaaccagctatgaaccgcaagaagcaaccagcatgatggctttctgcattaacggtaagtcgaaatcgctcagtgagttgtttatgactcacccgccgctggataaacgtattgaagctctgcgtrcgggtgaatacctgaagtaa

SEQ ID NO: 7855 - protein, 293 aa, Escherichia coli O157:H7 EDL933
  misc_feature (288)..(288): The Xaa at location 288 stands for Ala, or Thr.
MMRIALFLLTNLAVMVVFGLVLSLTGIQSSSVQGLMIMALLFGFGGSFVSLLMSKWMALRSVGGEVIEQPRNERERWLVNTVATQARQAGIAMPQVAIYHAPDINAFATGARRDASLVAVSTGLLQNMSPDEAEAVIAHEISHIANGDMVTMTLIQGVVNTFVIFISRILAQLAAGFMGGNRDEGEESNGNPLIYFAVATVLELVFGILASIITMWFSRHREFHADAGSAKLVGREKMIAALQRLKTSYEPQEATSMMAFCINGKSKSLSELFMTHPPLDKRIEALRXGEYLK

SEQ ID NO: 7856 - DNA, 879 bp, Shigella flexneri 2a str. 301
  CDS (1)..(879): transl_table=11
atgcgaatcgcgctcttcctgctaacgaacctggccgtaatggtcgttttcgggctggtactgagcctgacagggatacagtcgagcagcgttcaggggctgatgatcatggccttgctgttcggttttggtggttccttcgtttcgcttctgatgtccaaatggatggcattacgatctgttggcggggaagtgatcgagcaaccgcgtaacgaaagggaacgttggctggtcaatactgtagcaacccaggctcgtcaggcggggatcgctatgccgcaagtggctatctaccatgcgccggacatcaacgcttttgcaaccggtgcgcgccgtgatgcctctctggttgctgtcagcaccggtttgctgcagaacatgagcccggatgaagccgaggcggtaattgctcacgaaatcagccacatcgccaatggtgatatggtcaccatgacgctgattcagggcgtggtgaacaccttcgttatctttatttcccgtattctggcgcagcttgccgcgggttttatgggcggaaatcgtgatgaaggtgaagagagcaacggcaacccgctgatctactttgcggttgcaacggttctggaactggtgtttggtattctggcgagcattatcaccatgtggttctcgcgtcatcgtgaattccatgcagatgccggttcggcaaaactggttggtcgcgagaaaatgattgccgcgctgcagcgcctgaaaaccagctatgaaccgcaagaagcaaccagcatgatggctttctgcattaacggtaagtcgaaatcgctcagtgagttgttcatgactcacccgccgctggataaacgtattgaagctctgcgtacgggtgaatacctgaagtaa

SEQ ID NO: 7857 - protein, 292 aa, Shigella flexneri 2a str. 301
MRIALFLLTNLAVMVVFGLVLSLTGIQSSSVQGLMIMALLFGFGGSFVSLLMSKWMALRSVGGEVIEQPRNERERWLVNTVATQARQAGIAMPQVAIYHAPDINAFATGARRDASLVAVSTGLLQNMSPDEAEAVIAHEISHIANGDMVTMTLIQGVVNTFVIFISRILAQLAAGFMGGNRDEGEESNGNPLIYFAVATVLELVFGILASIITMWFSRHREFHADAGSAKLVGREKMIAALQRLKTSYEPQEATSMMAFCINGKSKSLSELFMTHPPLDKRIEALRTGEYLK

SEQ ID NO: 7858 - DNA, 777 bp, Vibrio vulnificus CMCP6
  CDS (1)..(777): transl_table=11
atgcagccaggaagcctctcaggtttattggtgatggctgcggtatttggttttggtggtgcatttatctccttgatgatgtcaaagggaatggcactacgctctgtcggtggaatggtgatcgagagccctcgtaacgagacagagcactggttattggaaacggtgagtcgccaagctcagcaagcgggcattggtatgccaaccgttgccatttatgattcgccggatatcaacgcgtttgcaactggggcaaagcgtgacgattcgctggtcgcggtttctacgggtctgctgcacaacatgacacgtgatgaagcagaagcggtgctggcgcatgaggtgagccatatcgccaatggtgacatggtgaccatgacgttgatgcagggtgttgtgaacaccttcgttatcttcttgtctcgctttattgccaacatggtggcttctaataacagcgatgaagaaggtgaaggttcaaacatgatggtgtatttcgcggtttctatcgcgcttgagctggtgtttggtttcctcgcgagcttcatcaccatgtggtatagccgtcatcgtgaattccatgccgatgcgggagccgcccgtctagttggtaaagagaaaatgatagcggctctagagcgtctaaaaatgagccaagaatcaaaactggatggcaccatgatggcatttggtatcaacggtaagcaatctctaacggaactgcttatgagccacccgccactcgataagcgtatcgctgcccttcgcaatttctaa

SEQ ID NO: 7859 - protein, 258 aa, Vibrio vulnificus CMCP6
MQPGSLSGLLVMAAVFGFGGAFISLMMSKGMALRSVGGMVIESPRNETEHWLLETVSRQAQQAGIGMPTVAIYDSPDINAFATGAKRDDSLVAVSTGLLHNMTRDEAEAVLAHEVSHIANGDMVTMTLMQGVVNTFVIFLSRFIANMVASNNSDEEGEGSNMMVYFAVSIALELVFGFLASFITMWYSRHREFHADAGAARLVGKEKMIAALERLKMSQESKLDGTMMAFGINGKQSLTELLMSHPPLDKRIAALRNF

SEQ ID NO: 7860 - DNA, 882 bp, Nitrosomonas europaea ATCC 19718
  CDS (1)..(882): transl_table=11
atgatgaaacggatttttctttttatagtaacgaacctggccatactgttaatgctgagcatcaccctgcgtctgcttggcgttgaccgcatactggatgccgaaggcagtgaattaaattttaatgcgctgctggttttctcggccgtactgggatttggcggctcgctcatttctcttgccatgtccaagtggagtgcaaaacacatgaccggcgccatggtcattgatgtgccttccaactcaaccgagggctggctggtggaaacggtacgtcgtcaggcaaaagcggcaggaataggcatgcctgaagtagcgatctacgattcacccgatatcaacgcatttgctaccggaatgaaccggaacaatgcgctggtggcagtcagtacgggattgttgcaaaaaatgaaccgggacgaggctgaggccgtgctggctcacgaagtcagccatgttgccaatggtgacatggtaacgcttgcattgatccagggggtcgtgaataccttcgtgatttttctctcccggatcatcggccatatcgtcgatcgcgccgttttcaaatcggaagaagggcacgggccagcttattttgtgaccagcctgatcgctcaaatggtgctgggtatccttgccacgattatcgtgatgtggttcagccgtcagcgtgaattccgcgcggatgccggcagtgcgcagatttccggaaggaacaagatggttgctgcgctgcggcggttgcagcaggagtatgaaccttctcatttgccagacaagattgctgcttttggcatctccggacaaaaaagccagatcgggcgtctgttcatgtcgcacccgcctctggaagagcgaatccaggcactgcaatctgcctga

SEQ ID NO: 7861 - protein, 293 aa, Nitrosomonas europaea ATCC 19718
MMKRIFLFIVTNLAILLMLSITLRLLGVDRILDAEGSELNFNALLVFSAVLGFGGSLISLAMSKWSAKHMTGAMVIDVPSNSTEGWLVETVRRQAKAAGIGMPEVAIYDSPDINAFATGMNRNNALVAVSTGLLQKMNRDEAEAVLAHEVSHVANGDMVTLALIQGVVNTFVIFLSRIIGHIVDRAVFKSEEGHGPAYFVTSLIAQMVLGILATIIVMWFSRQREFRADAGSAQISGRNKMVAALRRLQQEYEPSHLPDKIAAFGISGQKSQIGRLFMSHPPLEERIQALQSA

SEQ ID NO: 7862 - DNA, 882 bp, Bordetella bronchiseptica RB50
  CDS (1)..(882): transl_table=11
atgaaacgcattttcctgttcctgatcaccaacctggccgtcatggttgtgctgtcggccacgatgcgcatcctcggcgtggaccgcttcctgaccgcgcaggggctgaacctcaccggcctgctgatcttctcggccgtgatcggcttcaccggcgcgatcatttcgctgctgatgagcaagcccatggccaaatggagcaccggcgcgcgcgtcatcgaccccaacgcgccggccaaccagcgcgaagcctggctgctcgacaccgtgcaccagctggccgaccgcgccggcatcggccggcccgaggtggccatctaccagggcgaacccaacgcattcgccaccggcgcgttccgcaacgactcgctggtggcggtctcgaccggcctgctcgacagcatgaccgaagaagaagtggccgccgtgctgggccacgaggtggcgcacgtggccaacggcgacatggtcaccctcaccctgatccagggcgtggtcaacaccttcgtcgtgttcctggcgcgggtggtcggctatttcgtcgaccgcgccattctcaagaacgaacgcggcgtgggcctgggctactacgccaccgtgatcgtctgtgagatcgtcttcgggatcctggcctccatcatcgtggcctggttctcgcgccagcgcgaataccgcgccgacgcgggctcggcccacctgatgggctcgcgcgagcccatgatccgcgccctggcgcggctgggcggcctggagccgggcgaactgcccaagtcgttcgaagcctcgggcatctcgggcaagaacggcatctcggccatgttcgcctcgcaccccccgatccaggcccgcatcgcggccctgcagcacgcccgcctgggctga

SEQ ID NO: 7863 - protein, 293 aa, Bordetella bronchiseptica RB50
MKRIFLFLITNLAVMVVLSATMRILGVDRFLTAQGLNLTGLLIFSAVIGFTGAIISLLMSKPMAKWSTGARVIDPNAPANQREAWLLDTVHQLADRAGIGRPEVAIYQGEPNAFATGAFRNDSLVAVSTGLLDSMTEEEVAAVLGHEVAHVANGDMVTLTLIQGVVNTFVVFLARVVGYFVDRAILKNERGVGLGYYATVIVCEIVFGILASIIVAWFSRQREYRADAGSAHLMGSREPMIRALARLGGLEPGELPKSFEASGISGKNGISAMFASHPPIQARIAALQHARLG

SEQ ID NO: 7864 - DNA, 888 bp, Photorhabdus luminescens subsp. laumondii TTO1
  CDS (1)..(888): transl_table=11
atgatgcgaattgttttgttcctcctcactaacctcgctgttatgttggtgttcgggataatactttctttgacaggaattcaggggagtagtgtacaaggtttgatgattatggctggcctgttcggtttcggtggggcgtttgtttctctgctgatgtccaaatggatggccctgcgttctgtgggtggtcaggtcatcgaacagccagcaaacgaagttgaacattggttagttgaaactgttcgcagtcaagcggaacaagtcaatattgccatgccccaggttgcgatttatgccgcgcctgatattaacgcattcgctaccggagcgcgtcgtaatgcttctctggttgctgtcagcagcggtctattggataacatgagtagggcagaagcagaagctgttattgctcatgagattagtcatattgctaatggtgatatggtgacgatgaccttgttgcaagggatagtaaatactttcgttatctttatttcccgtctactggctcaagctgtatcaagtttcctgtctggcaatagtgacgaggaagagagtaactcctctggcaatccgattgtttacatggttgcttcaatggtgttggaaatagtatttggtattctggcgagcattatcacgatgtggttctcgcgttatcgcgaattccatgcagatgcaggttctgctaagttggtcggtcgtgagaaaatgatcgctgctttacagcgtctgaaaaccagttatgaaccgcaggaagaaggcggtatgatggcgttctgtattaatggtaaatcaaagacattcagtgagctgttcatgtctcacccgccattggacaaacgtattgaagcactgcgtagtgggcaatacctgaataaataa

SEQ ID NO: 7865 - protein, 295 aa, Photorhabdus luminescens subsp. laumondii TTO1
MMRIVLFLLTNLAVMLVFGIILSLTGIQGSSVQGLMIMAGLFGFGGAFVSLLMSKWMALRSVGGQVIEQPANEVEHWLVETVRSQAEQVNIAMPQVAIYAAPDINAFATGARRNASLVAVSSGLLDNMSRAEAEAVIAHEISHIANGDMVTMTLLQGIVNTFVIFISRLLAQAVSSFLSGNSDEEESNSSGNPIVYMVASMVLEIVFGILASIITMWFSRYREFHADAGSAKLVGREKMIAALQRLKTSYEPQEEGGMMAFCINGKSKTFSELFMSHPPLDKRIEALRSGQYLNK

SEQ ID NO: 7866 - DNA, 906 bp, Acinetobacter sp. ADP1
  CDS (1)..(906): transl_table=11
atgatgcggattggtttgtttttgctaaccaacctcgcggtactggttgtggctggcattatcttgtcactgttcggtgtcggtagttaccatggcgcgggtggcttaaatctaggcaaccttttggttatctgtttcgtgtttggtatggttggctcgctgatctcccttttgatgtccaaatggatggctaaaaaaaccaccggtacagaaattattgatccgaatgcaccccgtaaccaggctgaagcttggctattacaaactgttgcagaactttcacaacgtgctggcatccaaatgccagaagttggaattttcccatcctatcaatctaatgcctttgcaacaggctggaacaaaaacgatgccctcgtttcggtttcaacaggattaatggaacgcatgaataaagatgaattgcgtgctgtattggcgcatgaaattggtcacgttgccaatggtgacatggtgacacttgcgctgattcaaggtgtcgtcaacgcgtttgtgatgttctttgcccgtgtagtcggtgattttattgatcgaaacgtgtttggtcgccaagatggtgaagcacctggcatgggttacttcgcgattacgattgtccttgatattgtatttggtattcttgcctcagcgattgtgatgtggttctcccgccatcgtgaatatcgtgccgatgaagctggtgctcgtttagcaggtaaacaagcgatgatttctgccctattacgcttacaggcagagtcagaaatgccagatcaaatgccaaaagaaatgaaagcctttgcaattgcggaaggtaaagaacaaggttttagtcttgctgccttattccaaacccacccaagtatcgagcaacgtgttgctgcgctacagcaattaaattgtccataa

SEQ ID NO: 7867 - protein, 301 aa, Acinetobacter sp. ADP1
MMRIGLFLLTNLAVLVVAGIILSLFGVGSYHGAGGLNLGNLLVICFVFGMVGSLISLLMSKWMAKKTTGTEIIDPNAPRNQAEAWLLQTVAELSQRAGIQMPEVGIFPSYQSNAFATGWNKNDALVSVSTGLMERMNKDELRAVLAHEIGHVANGDMVTLALIQGVVNAFVMFFARVVGDFIDRNVFGRQDGEAPGMGYFAITIVLDIVFGILASAIVMWFSRHREYRADEAGARLAGKQAMISALLRLQAESEMPDQMPKEMKAFAIAEGKEQGFSLAALFQTHPSIEQRVAALQQLNCP

SEQ ID NO: 7868 - DNA, 882 bp, Erwinia carotovora subsp. atroseptica SCRI1043
  CDS (1)..(882): transl_table=11
atgatgcgtattgcgcttttcctgatcaccaacctggcggtgatgttggttttcgggctggtactcagcctgacgggaattcagtccagcagtgtccagggcttaatgataatggctgggctgtttggctttggcggtgcgtttgtttcactgctgatgtctaaatggatggcgttacggtccgttggcggtgaagtcattgaacaaccacgtaacgaaaccgaacgttggctggtagaaaccgttcgttcacagtcacagcaggctgggatcgcgatgccacaggtggcaatctatcatgcacctgacatcaatgcgttcgcaacgggagctcgtcgtgatgcatcgttggtggctgtaagcaccggtttgttgcaaaacatgagccgtgatgaggctgaagcggttatcgcgcatgaaatcagtcacatcgcaaatggcgatatggtgacgatgacgctggttcaggggatagttaacaccttcgttatctttatttctcgtctgatcgctcaggttgtttccgggtttctgtccggtaaccgcgatgaaggtgaaagcagcaacggcaacccgatggtttactttgctgtcgcaactgtgctggaactggtgtttggtattcttgccagcatcatcaccatgtggttctcacgctaccgtgaattccatgcggatgccggttccgccaagctggtggggcgtgaaaaaatgatcgctgcactgcaacgcttgaagaccagctatgagccgcaggaagagggcagcatgatggctttctgtattaacggcaaatcgaaatccttcagtgaattgtttatgtcgcacccgccgttggataagcgaatcgaagcgctgcgctccggtgagtatctgaagtaa

SEQ ID NO: 7869 - protein, 293 aa, Erwinia carotovora subsp. atroseptica SCRI1043
MMRIALFLITNLAVMLVFGLVLSLTGIQSSSVQGLMIMAGLFGFGGAFVSLLMSKWMALRSVGGEVIEQPRNETERWLVETVRSQSQQAGIAMPQVAIYHAPDINAFATGARRDASLVAVSTGLLQNMSRDEAEAVIAHEISHIANGDMVTMTLVQGIVNTFVIFISRLIAQVVSGFLSGNRDEGESSNGNPMVYFAVATVLELVFGILASIITMWFSRYREFHADAGSAKLVGREKMIAALQRLKTSYEPQEEGSMMAFCINGKSKSFSELFMSHPPLDKRIEALRSGEYLK

SEQ ID NO: 7870 - DNA, 864 bp, Desulfotalea psychrophila LSv54
  CDS (1)..(864): transl_table=11
atgtttcgtgtaggactttttttggcaacaaacctggcgattttgcttctgcttggcttggtcatgtccctgcttggcctggattcgcgcagcgcctccggccttttgttgatggcaggatgttttggtatgggcggttcccttatctcccttgccctgtcaaaatggatagcaaaaaaggccacgggcgcccatgtaatagagcagccccgcaatggcaccgaagagtggctgctgcacacggtggccagacaggcccaaacggcggggattggtatgccggaggtggccgtatatgaggctgacgacatgaatgcctttgccactgggatgcgtcgagatgccgctttggtagctgtcagcacaggacttatccgtggtatgtctcaagacgaggtcgaggccgtattggctcacgaaatgagtcatatcgccaatggtgatatggtgaccctctctcttattcagggggtgttgaatacctttgttatctttctctcccgcatggcggcgaacgtcatagataacttcctcagctccgatgaggatggtggtggccttggcttttttggctatatggcggtttccatgcttcttgagttcgtctttggtctttttgccagtatgattgtgatgtggttctctcgtaggcgggagttccgggcagactatggggcaacggaacttgcctcaaaacagaagatgattgcagctcttgcccgtctgcagcagcaacatatttcatcaagcctgccggaacaggtggcggcctttggtattcggccccgtcagggtggtctggcggagctttttcgcagccatccctctcttgaagataggatagccgctctggaggctatctag

SEQ ID NO: 7871 - protein, 287 aa, Desulfotalea psychrophila LSv54
MFRVGLFLATNLAILLLLGLVMSLLGLDSRSASGLLLMAGCFGMGGSLISLALSKWIAKKATGAHVIEQPRNGTEEWLLHTVARQAQTAGIGMPEVAVYEADDMNAFATGMRRDAALVAVSTGLIRGMSQDEVEAVLAHEMSHIANGDMVTLSLIQGVLNTFVIFLSRMAANVIDNFLSSDEDGGGLGFFGYMAVSMLLEFVFGLFASMIVMWFSRRREFRADYGATELASKQKMIAALARLQQQHISSSLPEQVAAFGIRPRQGGLAELFRSHPSLEDRIAALEAI

SEQ ID NO: 7872 - DNA, 855 bp, Mannheimia succiniciproducens MBEL55E
  CDS (1)..(855): transl_table=11
atgatgagaattcttttatttttagctactaacgccgccgtgttaattgtatttaacattatcctgagtttaacgggaattcgcggtcaggatgccatggggctgttaattatggcggcattatttggtttcaccggttctattatttccttgctgatgtctaaacgttccgctttggcggcaaccggtgcggaagtaatcgaacagccccgtaacgatacggagcgctggttactgcagactgtacattcccaagcggaaaaagccggtttaccgaaacctgacgtagcaatttatcattctaatgatgtgaatgcttttgccaccggtgccagtaaaaacaattcgcttgttgccgtcagtactgcgctgttaaataatatgacccgcgatgaagcggagggcgtattggctcatgaaatcagtcatatcaaaaatggtgacatggtcacaatgactttactgcaaggcgtgctaaatacctttgttatttttgccgcacgcatgattgcgcgaatggtcgctaataatcgcagcagcgaagaaagcaattccggtatttattttctcgtggctatggtacttgaagtggttttcggtttcctggcaagtatgattgccatgtggttttcacgtttccgggagttccgtgccgatgcgggttccgcagagttagcgggtaaacaaaaaatgattgccgccttaaaacgtttgcaggctattcatgagccacaggaaatggacggtaaattagcggcatttgccattaacggcaaacgcggtggtttcacgtcattatttttgagccatccgccgctggaaaaacgtattgaagcgctggaaacaagcaaataa

SEQ ID NO: 7873 - protein, 284 aa, Mannheimia succiniciproducens MBEL55E
MMRILLFLATNAAVLIVFNIILSLTGIRGQDAMGLLIMAALFGFTGSIISLLMSKRSALAATGAEVIEQPRNDTERWLLQTVHSQAEKAGLPKPDVAIYHSNDVNAFATGASKNNSLVAVSTALLNNMTRDEAEGVLAHEISHIKNGDMVTMTLLQGVLNTFVIFAARMIARMVANNRSSEESNSGIYFLVAMVLEVVFGFLASMIAMWFSRFREFRADAGSAELAGKQKMIAALKRLQAIHEPQEMDGKLAAFAINGKRGGFTSLFLSHPPLEKRIEALETSK

SEQ ID NO: 7874 - DNA, 885 bp, Methylococcus capsulatus str. Bath
  CDS (1)..(885): transl_table=11
atgcgcatccttttgttcctgctgaccaacgccgccgtactggtgctgatcagcatcgttttcaacgtgctcggcctgggccagttgctggcacagcagggcgtcaacctggatctcgacagcctgctggtgttctccgccgtcatgggcatgagcgggtccttcatctcgctgctgatgtccaaatggatggcgaaacagtccatgggcgtcttcgtcatcgaacggccgtccaacagtaccgagagctggctgatcgacaccgtcgcccgccaggcccggcagctcgggctcggcatgccggaagtcggcatcttcgactcccccgaaccgaacgccttcgccaccggagccagcaagaacagctcgctggtcgcggtcagcaccggcctgttgcagaacatgaacccggacgaagtcgaagccgtgctcggccatgagatgagccacgtcgccaatggcgacatggtgaccatgggcctgctccagggtgtggtcaacactttcgtatatttcttcgccacggtggccggccatctcgtcgaccgtgtgctgttccgctcggaggacgaccgcggcggctacggcccggcttattacatcacccagatgatcgcgcagatcatactgtcgatcctcgccaccatgatcgtgatgtggttctcgcgctggcgcgagttccgcgcggatgccggtggcgcccgcctggccggtcgaggcaagatgatcgatgctctgcgagcactccaacgggcacgggagccgcacgaccttcccggtcagctcgctgccttcggcatcagcggtggcggcggcctgagccggctgttcatgagccatccgccgctggaagagcgcatcgccgcgctgcagaacctgcgctga

SEQ ID NO: 7875 - protein, 294 aa, Methylococcus capsulatus str. Bath
MRILLFLLTNAAVLVLISIVFNVLGLGQLLAQQGVNLDLDSLLVFSAVMGMSGSFISLLMSKWMAKQSMGVFVIERPSNSTESWLIDTVARQARQLGLGMPEVGIFDSPEPNAFATGASKNSSLVAVSTGLLQNMNPDEVEAVLGHEMSHVANGDMVTMGLLQGVVNTFVYFFATVAGHLVDRVLFRSEDDRGGYGPAYYITQMIAQIILSILATMIVMWFSRWREFRADAGGARLAGRGKMIDALRALQRAREPHDLPGQLAAFGISGGGGLSRLFMSHPPLEERIAALQNLR

SEQ ID NO: 7876 - DNA, 840 bp, Neisseria gonorrhoeae FA 1090
  CDS (1)..(840): transl_table=11
gtgaaacgcatttttctgtttttggctaccaatatcgctgttttggtcgtaatcaacattgttttggcggttctgggcatcaacagccggggcggcgcgggcagcctgttggcgtattccgccgtcgtcggcttcactggttcgattatttcgctgctgatgtccaaatttatcgccaaacaatcggtcggtgcggaagtcatcgacacgccgcgcaccgaagaagaagcctggcttctgaacactgtcgaagcccaagcgcggcaatggaatctgaaaacgccagaagtcgccatctaccactcccccgaacccaatgcctttgccacgggcgcatcgagaaacagctccctgatcgccgtcagcaccggtttgctcgaccatatgacgcgcgacgaagtggaagccgtgttggcgcacgaaatggcgcacgtcggcaacggcgacatggttacgctgacgctgattcaaggcgtggtcaatacctttgtcgtgttcctgtcgcgcattattgccaacctgattgcccgaaacaacgacggcagccagtcccagggaacttatttcctagtcagcatggtattccaaatcctgttcggcttccttgccagcctgattgtcatgtggttcagccgccaacgcgaataccgcgccgacgcgggcgcggcaaaactggtcggcgcaccgaaaatgatttccgccctgcaaaggcttaaaggcaacccggtcgatttgcccgaagaaatgaacgcaatgggcatcgccggagatacgcgcgactccctgctcagcacccacccttcgctggacaaccgaatcgcccgcctcaaatcgctttaa

SEQ ID NO: 7877 - protein, 279 aa, Neisseria gonorrhoeae FA 1090
MKRIFLFLATNIAVLVVINIVLAVLGINSRGGAGSLLAYSAVVGFTGSIISLLMSKFIAKQSVGAEVIDTPRTEEEAWLLNTVEAQARQWNLKTPEVAIYHSPEPNAFATGASRNSSLIAVSTGLLDHMTRDEVEAVLAHEMAHVGNGDMVTLTLIQGVVNTFVVFLSRIIANLIARNNDGSQSQGTYFLVSMVFQILFGFLASLIVMWFSRQREYRADAGAAKLVGAPKMISALQRLKGNPVDLPEEMNAMGIAGDTRDSLLSTHPSLDNRIARLKSL

SEQ ID NO: 7878 - DNA, 852 bp, Haemophilus influenzae 86-028NP
  CDS (1)..(852): transl_table=11
atgatgcgaattcttcttttcttggcaaccaatatggctgtaatgctggtattggggattattttaaatgtgactggtattgcaggaaatagcactggcggcattttaattatggctttgctatttggttttgctggttcattaatttccttattcctgtctaaaacgatggcattacgttctgtagatggagaagtgattactcaacctcgtaatcaaactgaacgttggttaattgatactgttagtcgccaagcacagaaagcgggaattccgatgccagacgtggcgatttatcattcacccgatgtgaatgcttttgctacaggtgcaacgaaaagcaattctttagtggcagtgagtacgggattattaaacaacatgacggaggctgaagctgaagctgttttagcgcacgaaatttctcatatttccaatggcgatatggtgacgatggcgttattgcaaggcgtattgaatactttcgtgattttcttatctcgcgttatcgcaacggcggtagcaagttcgcgtaacaataatggagaggaaacgcgcagttcaggtatttatttcttggtttctatggtattggaaatgctctttggtgtgcttgcgagtattatcgcaatgtggttctctcgttaccgagaatttcgtgcagatgctggttccgcaagtttagtaggcaaagaaaaaatgattatggcactgcaacgtttgcaacaacttcacgaaccacaaaatctcgaaggttctttaaatgcctttatgattaatggtaaacgcagtgaactctttatgagccatccaccactcgaaaagcgtattgaagccttacgtaatctttaa

SEQ ID NO: 7879 - protein, 283 aa, Haemophilus influenzae 86-028NP
MMRILLFLATNMAVMLVLGIILNVTGIAGNSTGGILIMALLFGFAGSLISLFLSKTMALRSVDGEVITQPRNQTERWLIDTVSRQAQKAGIPMPDVAIYHSPDVNAFATGATKSNSLVAVSTGLLNNMTEAEAEAVLAHEISHISNGDMVTMALLQGVLNTFVIFLSRVIATAVASSRNNNGEETRSSGIYFLVSMVLEMLFGVLASIIAMWFSRYREFRADAGSASLVGKEKMIMALQRLQQLHEPQNLEGSLNAFMINGKRSELFMSHPPLEKRIEALRNL

SEQ ID NO: 7880 - DNA, 879 bp, Dechloromonas aromatica RCB
  CDS (1)..(879): transl_table=11
atgaaacgcatcatcctgtttctcgccaccaacctggcggtcatgctggttctcagtgtggccaccagcctgttgggcgttaacaagttcctgacagccaatggcctgaacgtcggcatgttgtttgtctttgccgcagtgatcggtttcggtggcgccttcatttcgctgctggtgtccaagaccatggccaagtggagcactggcgctcgggtcatcgagtcaccgagttcatcgacggagatgtggctggtcgatacggtggccaagctggccaagcgcgccaacctgccgatgccggaagtggctatctacgatggcgagccgaatgccttcgcgaccggcgcgaccaagaacaagtcgctggttgccgtctcgaccggcctgctgcagagcatgacccgcgatgaagccgaagccgtgctggcccatgaggtggcccacatcgccaacggcgacatggtcacgctgacgctgatccagggcgtggtgaacaccttcgtcgtcttcctgtcgcgcatcgtcggctacgtggtcgatggcttcctgcgtcgtggcgacagcgaaaacagtggcccggggattggttacatggtgaccagcatgatttgtgaagtcatcttcggcctgctggccagcatcgttgtggcctggttctcgcgtcagcgtgaattccgtgccgatgcgggggcggctggcttgatgggctcgccggtgccgatgcagaacgccttgcgtcgtctgggcaacctgcataccgaagccttgccgcaaaacatggccgcttcaggtattgccggtggcaaggggggcttcatggcgctgttttccacccacccgccgctggaagaacggattgccgcattgggaggccgttga

SEQ ID NO: 7881 - protein, 292 aa, Dechloromonas aromatica RCB
MKRIILFLATNLAVMLVLSVATSLLGVNKFLTANGLNVGMLFVFAAVIGFGGAFISLLVSKTMAKWSTGARVIESPSSSTEMWLVDTVAKLAKRANLPMPEVAIYDGEPNAFATGATKNKSLVAVSTGLLQSMTRDEAEAVLAHEVAHIANGDMVTLTLIQGVVNTFVVFLSRIVGYVVDGFLRRGDSENSGPGIGYMVTSMICEVIFGLLASIVVAWFSRQREFRADAGAAGLMGSPVPMQNALRRLGNLHTEALPQNMAASGIAGGKGGFMALFSTHPPLEERIAALGGR

SEQ ID NO: 7882 - DNA, 879 bp, Ralstonia eutropha JMP134
  CDS (1)..(879): transl_table=11
atgaaacgcgtcctgcttttcctggcgaccaacctcgccgtcatgcttgtcctcagcatcaccgccagcgtccttggcgtgaaccgcttcctgaccgccaacggtctcaacttcggcatgctgctcgcttttgccgcgctgatgggcttcggcggcgccttcatttcgctgctgatgtccaaaaccattgccaagtggtccaccagtgcgcaggtcatcacgcacccgagcacaagcaccgaactgtggctggtgcagaccgtgcagaagctgtcgcagaaggccgggttgcccatgccggaagtggcgatctacgagggcgagcccaacgcgttcgcgacgggcgcgacgaagaacagctcgctggtcgccgtttcgactggcctgctgcagtcgatgtcgcatgacgaggtggaagccgtgctggcgcacgaagtggcgcacatcgccaatggcgacatggtcacgctcacgctgatccagggcgtcgtcaacacgttcgtgatcttccttgcgcgcgtggtcggctatttcgtcgattcgatgctgcgcaagaacgacgaggagtcgagcgggcccggcattggctacatggtcacggtgatcgtctgcgaaatcgtcttcggcgtgctggccagcatcatcgtggccgccttctcgcgccgtcgcgagttccgtgccgacgccggtgcggcgagcctgatgggctcgtccacgccgatggtgggcgcattgcgccgcctcggcggactggatgccgacgggttgccgcagaacatgcaggccatgggcatagcaggtggaaagtcgtggatggagctgttctcgagccatccgccgatcgagcagcgcattgcggcgctgcagtcggcacgctga

SEQ ID NO: 7883 - protein, 292 aa, Ralstonia eutropha JMP134
MKRVLLFLATNLAVMLVLSITASVLGVNRFLTANGLNFGMLLAFAALMGFGGAFISLLMSKTIAKWSTSAQVITHPSTSTELWLVQTVQKLSQKAGLPMPEVAIYEGEPNAFATGATKNSSLVAVSTGLLQSMSHDEVEAVLAHEVAHIANGDMVTLTLIQGVVNTFVIFLARVVGYFVDSMLRKNDEESSGPGIGYMVTVIVCEIVFGVLASIIVAAFSRRREFRADAGAASLMGSSTPMVGALRRLGGLDADGLPQNMQAMGIAGGKSWMELFSSHPPIEQRIAALQSAR

SEQ ID NO: 7884 - DNA, 876 bp, Thiobacillus denitrificans ATCC 25259
  CDS (1)..(876): transl_table=11
atgaaacgcatcgtgctgttcctcgcaaccaaccttgcgatcgtgctggtgctctcgctcaccatgcgtctgctcggcgtcgagccctacctcacggccaacggcctcaacctcacgtcgctgctgattttcgccgcggtcatgggcttcggcggttcgctgatttcgctcgcgatctcgaagtggatggcgaagaaatcgatgggcgtccaggtcatcgagacaccggcgaactcgaccgagttctggctcgtcgagacggtgaggaaatacgccgacgacgccggcatcggcatgcccgaagtcggcatcttcccgtcgccagaagtcaacgccttcgccaccggcatgaacaagaacaacgcgctcgtcgcggtgtcggcgggtctgctcagcacgatgacgcgcgccgaggccgaggccgtgatcggccacgaagtcgcgcacgtcgccaatggcgacatggtcacgctcgcgctcattcagggcgtcgtcaataccttcgtgatgtttctgtcgcgcatcatcggccataccgtcgatcgcgtcgtgttcaagaacgaggaggggcacgggccggcgtttttcgtcacgatgatcgtggccgaactcgtgctcggcatcctcgcgtcgatcatcgtcatgtggttctcgcgtcagcgtgaattccgcgccgaccgcggcggtgcctcgctcgccggcaagggcgcgatgatcgccgcgctcgagcgcctgaggagtctgcatccgcatcccttgcccgacaagatggcggccttcggtatcgccggcggcggtgctgccggtctgaagcgcctgttcatgacgcacccgccgctggaggagcgcattgcggcactgcgcgccgtacagtaa

SEQ ID NO: 7885 - protein, 291 aa, Thiobacillus denitrificans ATCC 25259
MKRIVLFLATNLAIVLVLSLTMRLLGVEPYLTANGLNLTSLLIFAAVMGFGGSLISLAISKWMAKKSMGVQVIETPANSTEFWLVETVRKYADDAGIGMPEVGIFPSPEVNAFATGMNKNNALVAVSAGLLSTMTRAEAEAVIGHEVAHVANGDMVTLALIQGVVNTFVMFLSRIIGHTVDRVVFKNEEGHGPAFFVTMIVAELVLGILASIIVMWFSRQREFRADRGGASLAGKGAMIAALERLRSLHPHPLPDKMAAFGIAGGGAAGLKRLFMTHPPLEERIAALRAVQ

SEQ ID NO: 7886 - DNA, 879 bp, Ralstonia metallidurans CH34
  CDS (1)..(879): transl_table=11
atgaaacgtatctttctgttcctggcgaccaacctcgccgtcatgcttgtcctcagtgtcacggccagcctgctgggcgtgaatcgcttcctgacctcgaacggcctcaacctcggaatgttgctggcattcgcggcgttgatgggcttcggtggctcgttcatctcgttgctgatgtccaagaccatcgccaagtggtcgaccggcgcccaggtcatcacccacccgagcaccagcacggagctctggctcgtgcagaccgtcgagaagctggccacgcgcgccggcctgccgatgccagaggtggcgatctacgatggcgagcccaacgcattcgctaccggcgcgtcgaagagcagctcgctggtggctgtgtccacgggcctgctgcagtcgatgtcgcacgacgaggtcgaggccgtgctcgcgcacgaagtggcccacatcgccaatggcgacatggtcacgctgacgttgattcaaggcgtggtgaacacgttcgtgatcttcatggcacgcgtggtcggctacttcgtcgattcgtggctgcgccgcaatgacgaggagtcgagcggccccggtatcggctacatggtcaccgtggtggtctgcgagatcgtcttcggcatcctggccagcgtcatcgtcgccacgttctcgcgtcatcgcgaatatcgtgccgacgccggcgcggcgaagctgctcggcacgccgagcccgatggtggcggcattgcgccgcctgggtggtctggacgccgacggcctgccgcagaacatgcaggcgatgggtatctcgggcggcaagtcgtggctggcgctgtttgcaagccacccgccgatcgaatcgcgcatcgcggccctgcaaggcacccgctaa

SEQ ID NO: 7887 - protein, 292 aa, Ralstonia metallidurans CH34
MKRIFLFLATNLAVMLVLSVTASLLGVNRFLTSNGLNLGMLLAFAALMGFGGSFISLLMSKTIAKWSTGAQVITHPSTSTELWLVQTVEKLATRAGLPMPEVAIYDGEPNAFATGASKSSSLVAVSTGLLQSMSHDEVEAVLAHEVAHIANGDMVTLTLIQGVVNTFVIFMARVVGYFVDSWLRRNDEESSGPGIGYMVTVVVCEIVFGILASVIVATFSRHREYRADAGAAKLLGTPSPMVAALRRLGGLDADGLPQNMQAMGISGGKSWLALFASHPPIESRIAALQGTR

SEQ ID NO: 7888 - DNA, 918 bp, Myxococcus xanthus DK 1622
  CDS (1)..(918): transl_table=11
atgaagggaagcttcgccaagcgcatcacacttttcgtcctgaccaacctcgcggtggtcgcgatgctggcgatcgtcgggcagctcatcggggtggagaacctgctcgcccgccgcggcgtggggctgaacctcccgggcctgctcatcatggcggcggtgatgggcttcggcggcgccatcttctcgctgctcatctccaagcccatggccaagtggagcacgggggcgaaggtcatcacgtcgccgcgctcggaggacgagcgctggctggtggagacggtgcaccggctggcccgcgacgcgggcatcggcatgcctgacgtggccatctacgacagcccggacatgaacgccttcgccacgggcgccaggcgcaacagcgccctggtcgcggtgtccaccggcctgctccatggcatgaagcgggacgaggtggaggccgtgctcggccacgaggtggcccacgtggccaacggtgacatggtgacgctcacgctgctgcagggcgtgctcaacaccttcgtcatcttcctcagccgcgtggtgggcttcttcgtggaccgcttcctcagccgctccgacgatggcgaggagagcggcggctcggggccggcctacttcatcaccagcatcgtgctccaaatcgtgtttggcatcggcgccagcatgattgtggcctggtacagccgccggcgtgagttccgcgcggatgacggcggcgcgcagttggtggacccgggcgccatggcgcgagcgctgaaccggctgcgcatgcagcagggggagccggccatgctgccgtccaacatgcaggcgttcggcatccggggcggcgggatgatggcgctcttctccagccacccgccgctggagctgcgcatccagcgcctgatggacggcagctggaagcgctga

SEQ ID NO: 7889 - protein, 305 aa, Myxococcus xanthus DK 1622
MKGSFAKRITLFVLTNLAVVAMLAIVGQLIGVENLLARRGVGLNLPGLLIMAAVMGFGGAIFSLLISKPMAKWSTGAKVITSPRSEDERWLVETVHRLARDAGIGMPDVAIYDSPDMNAFATGARRNSALVAVSTGLLHGMKRDEVEAVLGHEVAHVANGDMVTLTLLQGVLNTFVIFLSRVVGFFVDRFLSRSDDGEESGGSGPAYFITSIVLQIVFGIGASMIVAWYSRRREFRADDGGAQLVDPGAMARALNRLRMQQGEPAMLPSNMQAFGIRGGGMMALFSSHPPLELRIQRLMDGSWKR

SEQ ID NO: 7890 - DNA, 867 bp, Haemophilus somnus 129PT
  CDS (1)..(867)
atgatgagaattttgctatttttagcaactaactttgccgttttatttgtttttaacattattttgacgttgaccggtattcaacgccaagatgtggtgggattgttgatttttgctactttatttggttttacgggatctattatttctttactgatgtcaaaatcaatggcattacgttcggtaaatggtcaagttattgaacaacctcgtaatgaaacggaacattggttgcttcaaacggtgcattcacaggcagaaagagcaggattacctatgccgacagttgccatttatcattcagcggatgtaaatgcttttgcaacaggtgcgacaaaaaagaattcacttgttgccgtgagtacaggattactaaatgctatgacaagagatgaggcggaagcggttttagctcacgaagtaagccatattaaaagcggtgatatggtaacgatgactttgttgcaaggcgtattaaatacgttcgtcatttttatttctcgaatgctggcaaaagttgttgctacagatcgtgatggaaataccagtcaaggtatatattttatgatttcaatggttcttgagcttgtgtttggtgtattggcaagtatgattgcaatgtggttttctcgctatcgtgaatttaaagctgatgcaggttcagcggaattagtgggtaaacataaaatgattgcagcgttacaacgtttgaaaacgttgcatgagccacaagaaatggaggggcagctagctgcgtttgccatcaatggaaaacgtgggggacttgcttctttattcttaagtcatcctccattggaaaaacgtattgaagcattacgtaatttagatagtttgaatggcaaataa

SEQ ID NO: 7891 - protein, 288 aa, Haemophilus somnus 129PT
MMRILLFLATNFAVLFVFNIILTLTGIQRQDVVGLLIFATLFGFTGSIISLLMSKSMALRSVNGQVIEQPRNETEHWLLQTVHSQAERAGLPMPTVAIYHSADVNAFATGATKKNSLVAVSTGLLNAMTRDEAEAVLAHEVSHIKSGDMVTMTLLQGVLNTFVIFISRMLAKVVATDRDGNTSQGIYFMISMVLELVFGVLASMIAMWFSRYREFKADAGSAELVGKHKMIAALQRLKTLHEPQEMEGQLAAFAINGKRGGLASLFLSHPPLEKRIEALRNLDSLNGK

SEQ ID NO: 7892 - DNA, 960 bp, Pseudomonas aeruginosa UCBPP-PA14
  CDS (1)..(960)
atgattatcaggagcccgttcgcccgccccggcggcctgcgaaccgcgctccgtgccttcagccgtgaggagaagctttacaccatgatgcgcatcctgttgttcctggccaccaacctggcagtcctggtgattgccagcatcaccctgaaactgctcggggtggaccgcttcaccggccagaattacggcagcctgctggtcttctgcgccgtgttcggtttcgccggttcgctggtctcgctgttcatctccaagtggatggcgaagatgagcaccggtaccgaagtcatcagccagccgcgcacccgtcacgaacagtggctgctgcagaccgtcgaagagctgtcccgcgaagccggcatcaagatgccggaggtcggcatcttccccgcctacgaggccaacgccttcgccaccggctggaacaagaacgacgcgctggtcgcggtcagccagggcctgctcgaacgtttctcgcccgatgaggtgaaagccgtcctcgcccacgagatcggccacgtcgccaacggcgacatggtcaccctggcgttgatccagggcgtggtgaacaccttcgtgatgttcttcgcgcgaatcttcggcaacttcgtcgacaaggcgatcctgaagaacgaggacggcccgggcatcggctacttcgtcgcgaccatcttcgccgaactggtgctcggcatcctcgccagcatcatcgtcatgtggttctcgcgccgccgcgagttccgcgccgacgccgccggcgcccacctggctggcaccggcgcgatgatcgccgcgctgcaacgcctgcgttcggaacagggcgtgccggtgcagatgcccgacaccctgaacgccttcggcatcaatggcggcctcaagcacggcctggccggcctgctgatgagccacccgccgctggaagatcgtatcgaagcgctgcgcgccagcgcacgctga

SEQ ID NO: 7893 - protein, 319 aa, Pseudomonas aeruginosa UCBPP-PA14
MIIRSPFARPGGLRTALRAFSREEKLYTMMRILLFLATNLAVLVIASITLKLLGVDRFTGQNYGSLLVFCAVFGFAGSLVSLFISKWMAKMSTGTEVISQPRTRHEQWLLQTVEELSREAGIKMPEVGIFPAYEANAFATGWNKNDALVAVSQGLLERFSPDEVKAVLAHEIGHVANGDMVTLALIQGVVNTFVMFFARIFGNFVDKAILKNEDGPGIGYFVATIFAELVLGILASIIVMWFSRRREFRADAAGAHLAGTGAMIAALQRLRSEQGVPVQMPDTLNAFGINGGLKHGLAGLLMSHPPLEDRIEALRASAR

SEQ ID NO: 7894 - DNA, 903 bp, Magnetococcus sp. MC-1
  CDS (1)..(903): transl_table=11
atgaaacgtattgtgctgttcctaatcaccaaccttgccatcatggcggtgttgatggtggtgcttaacgtgatctttagcctgtttgggctaaatcatggttctataggaggtattgtggtactggcgctggtctttggtatggggggatcgtttatctcgctgtttatgtccaaatggttggccaaacgctccaccggtgcggtggtgattgagcgaccacaagacgccaccgagcagtggttgctcgaaacggtgcggcggcagagtcagcaggccggtattggtatgcccgaggtggcaatttttgaatcagccgaggtcaacgcttttgccacaggggcgagccgcaacaatgctttggtggcggtgagcacggggctgctgcatggcatgcgtaaagaggaagccgaggcggtattggcccatgaggtcagccacattgccaatggtgacatggtgaccttggcgttgattcaaggggtgttgaatacctttgtgatcttgttggcccgtctcattgctggagcggtggatagcgtgttgtccagccaaagtgatgaggaagaggagcaggtcagcggtggcgaagggggcggcatggcctattttgtgacctcgctgctggctgagattgtgttgggggtgttggccagtgtggtggtgatgtggttttcgcgcaagcgtgagttccgcgccgacgccggcggggccaaactggccgggcgtgaggccatgattgccgccctggagcgtctgcaaaagagcccggtggagtctcacctgcccgctgaaaccgccgcgtttgccattgccggtaagcggggtggtttaatggcgctgtttgctacccatcatcccctggaagagcgtatcgaggcgctgcgtcacgctcggtcgtga

SEQ ID NO: 7895 - protein, 300 aa, Magnetococcus sp. MC-1
MKRIVLFLITNLAIMAVLMVVLNVIFSLFGLNHGSIGGIVVLALVFGMGGSFISLFMSKWLAKRSTGAVVIERPQDATEQWLLETVRRQSQQAGIGMPEVAIFESAEVNAFATGASRNNALVAVSTGLLHGMRKEEAEAVLAHEVSHIANGDMVTLALIQGVLNTFVILLARLIAGAVDSVLSSQSDEEEEQVSGGEGGGMAYFVTSLLAEIVLGVLASVVVMWFSRKREFRADAGGAKLAGREAMIAALERLQKSPVESHLPAETAAFAIAGKRGGLMALFATHHPLEERIEALRHARS

SEQ ID NO: 7896 - DNA, 870 bp, Xylella fastidiosa Dixon
  CDS (1)..(870): transl_table=11
atgttgactcgtattgtcttatttgccatcaccaatcttgcagtattgattttagctagcatcgtgatgtcgttgctgggtgtcaatccgacacaaatgagtgggctgttggttatggctttaattttgggcttcggtggttcgcttatctcgctattgatgtctaaagccatcgctaagcatacgactggtgcctatgtgattgagcaacccaggaatccaagtcagcgctggttactagacactgtaaggcggcaagccgagattgttggcatcggcatgcctgaggtagctatctatgagggacctgagatcaatgcttttgcaactggtgctgatcgcaacaatgcgctggtggcagtatctaccggcttgttgcagaacatgagtcaggatgaggccgaggcagtgttggggcatgagatcgcacatgttgccaacggtgacatggtgactatggcgttgctgcagggtgtgcttaatacatttgtgatcgtactagcgcgggtcgttggagggtttattgacagtctgctttccggaaatcgtggtagtggtcgtggtgttgcttactacgggattgtattggtattggaattattgtttggtctttttgcaacgataattaccatgtggttttcgcgtcgtcgtgagtttcgtgctgatgagggcggtgcatacttggccggccgcaataaaatgattgctgcattagagcggcttgggattaaccatggtcaaagtacgttaccgacgcaggtgcaagcttttggtatttatggcggtatcggtgaagggctgcgtaagcttttcttgagtcatccgcctttgagtgagcgtattgctgcgcttcgtatggctagagagtaa

SEQ ID NO: 7897 - protein, 289 aa, Xylella fastidiosa Dixon
MLTRIVLFAITNLAVLILASIVMSLLGVNPTQMSGLLVMALILGFGGSLISLLMSKAIAKHTTGAYVIEQPRNPSQRWLLDTVRRQAEIVGIGMPEVAIYEGPEINAFATGADRNNALVAVSTGLLQNMSQDEAEAVLGHEIAHVANGDMVTMALLQGVLNTFVIVLARVVGGFIDSLLSGNRGSGRGVAYYGIVLVLELLFGLFATIITMWFSRRREFRADEGGAYLAGRNKMIAALERLGINHGQSTLPTQVQAFGIYGGIGEGLRKLFLSHPPLSERIAALRMARE

SEQ ID NO: 7898 - DNA, 870 bp, Xylella fastidiosa Ann-1
  CDS (1)..(870): transl_table=11
atgttgactcgtattgtcttatttgccatcactaatcttgcagtattgattttagctagcatcgtgatgtcgttgctgggtgtcaatccgacacaaatgagtgggctgttggttatggctttaatttttggttttggtggttcgcttatctcgctattgatgtctaaagccatcgctaagcatacgactggtgcctatgtgattgagcaacccaggaatccaagtcagcgctggttactagacactgtaaggcggcaagccgagattgttggcatcggcatgcctgaggtagctatctatgagggacctgagatcaatgcttttgcaactggtgctgatcgcaacaatgcgctggtggcagtatctaccggtttgttgcagaacatgagtcaggatgaggccgaggcagtgttggggcatgagatcgcacatgttgccaacggtgacatggtgactatggcgttgctgcagggtgtgcttaatacatttgtcatcgtactagcgcgggtcgttggagggtttattgacagtctgctttccggaaatcgtggtggtggtcgtggtgttgcttactacgggattgtattggtattggaattattgtttggtctttttgcaacgataattaccatgtggttttcgcgtcgtcgtgagtttcgtgctgatgagggcggtgcatacttggccggccgcaataaaatgattgctgcattagagcggcttgggattaaccatggtcaaagtacgttaccgacgcaggtgcaagcttttggtatttatggcggtatcggtgaaggtctgcgtaagcttttcttgagtcatccgcctttgagtgagcgtattgctgcgcttcgtatggctagagagtaa

SEQ ID NO: 7899 - protein, 289 aa, Xylella fastidiosa Ann-1
MLTRIVLFAITNLAVLILASIVMSLLGVNPTQMSGLLVMALIFGFGGSLISLLMSKAIAKHTTGAYVIEQPRNPSQRWLLDTVRRQAEIVGIGMPEVAIYEGPEINAFATGADRNNALVAVSTGLLQNMSQDEAEAVLGHEIAHVANGDMVTMALLQGVLNTFVIVLARVVGGFIDSLLSGNRGGGRGVAYYGIVLVLELLFGLFATIITMWFSRRREFRADEGGAYLAGRNKMIAALERLGINHGQSTLPTQVQAFGIYGGIGEGLRKLFLSHPPLSERIAALRMARE

SEQ ID NO: 7900 - DNA, 858 bp, Vibrio sp. Ex25
  CDS (1)..(858)
atgttattcctagcaactaacctagctgtcgtgctagtgcttagtgttgttctgaatattgtttacgctaccactggaatgcaacctggcagtctttctggtttgctagttatggccgccatatttggttttggtggtgcacttatttcgttgatgatgtcaaagggcatggcactgcgctcggttggcggtatggtcattgaaagtccgcgtaacgaaactgagcattggttagtcgaaactgtgggtcgtcaagctcagcaagcgggtattggtatgccaacggtggctatttatgactcaccagatatcaatgcattcgcgacgggggcaaagcgagatgactctcttgtcgcggtttccactggccttttacacaatatgactcgtgatgaagcagaagcggtactggcccacgaagtgagccatattgcaaatggtgacatggtcacgatgacattgatgcaaggcgttgtgaacacgtttgttatcttcctatcccgttttatcgccaatattgtggcatcgaacgatgatgaagaaggtcaaggtacaaacatgatggtttacttcggtgtatctatggtgcttgagctagtgtttggtttcttggcaagctttattaccatgtggtacagccgtcatcgcgaattccatgccgacgcaggtgctgctcacttagttggtaaagagaaaatgatcgcggcattggaacgtttgaagatgagtcacgaatctcaacttgatggcacaatgatggcattcggtatcaatggcaagcagtcattgactgagctactgatgagccaccctccgctagataaacgtattgcagcgttacgtagtcagcaatactag

SEQ ID NO: 7901 - protein, 285 aa, Vibrio sp. Ex25
MLFLATNLAVVLVLSVVLNIVYATTGMQPGSLSGLLVMAAIFGFGGALISLMMSKGMALRSVGGMVIESPRNETEHWLVETVGRQAQQAGIGMPTVAIYDSPDINAFATGAKRDDSLVAVSTGLLHNMTRDEAEAVLAHEVSHIANGDMVTMTLMQGVVNTFVIFLSRFIANIVASNDDEEGQGTNMMVYFGVSMVLELVFGFLASFITMWYSRHREFHADAGAAHLVGKEKMIAALERLKMSHESQLDGTMMAFGINGKQSLTELLMSHPPLDKRIAALRSQQY

SEQ ID NO: 7902 - DNA, 864 bp, Shewanella sp. ANA-3
  CDS (1)..(864): transl_table=11
atgaagcgtatttttttattaattgcgactaacctagccgtgttgctggtagcctcaattgtgatgtctattctgggcgtgaatacgtcgactatgggtggactgcttgtgttcgctgcgatttttggattcggcggagccttcatcagcttagccatttcaaaatggatggcgaaaaagaccatgggctgtgaagtgatcaccactccccgtgatagcacagagcgttggttattagacactgttgcccgtcaagcgcagcaagctgggattaaaatgccagaagtggcaatttaccaatcgccagagatgaatgccttcgccacaggcccaagcaaagacaactcattagttgccgtgagtaccggtctgttgtatggcatgagccaagacgaagttgaaggcgtactcgcccacgaagtgagccacgttgccaacggcgacatggtgaccttgaccttaattcaaggcgtggtgaacacctttgttatcttcgcggcacgtgttgttgcgggcattatcaacaacttcgtctcgagcaacgatgaagagggtgaaggtttaggcatgttcgcctatatggcggtcgtgtttgtcctcgacatgttgtttggtatcttggcctcgatcatcgtggcttacttctcacgtatccgtgaataccgtgctgacgaaggtgcggcgcgtttagcgggcaaacataagatgattgcagcgcttgagcgtttacgccaaggccctgaaagctcggcaatgccagcacaaatgtcggcttttggtattaacggtaagcgttcaatggctgagctgatgatgagccacccgccattagagaagcgtatcgccgccttacaaactcgttaa

SEQ ID NO: 7903 - protein, 287 aa, Shewanella sp. ANA-3
MKRIFLLIATNLAVLLVASIVMSILGVNTSTMGGLLVFAAIFGFGGAFISLAISKWMAKKTMGCEVITTPRDSTERWLLDTVARQAQQAGIKMPEVAIYQSPEMNAFATGPSKDNSLVAVSTGLLYGMSQDEVEGVLAHEVSHVANGDMVTLTLIQGVVNTFVIFAARVVAGIINNFVSSNDEEGEGLGMFAYMAVVFVLDMLFGILASIIVAYFSRIREYRADEGAARLAGKHKMIAALERLRQGPESSAMPAQMSAFGINGKRSMAELMMSHPPLEKRIAALQTR

SEQ ID NO: 7904 - DNA, 864 bp, Shewanella sp. MR-7
  CDS (1)..(864): transl_table=11
atgaagcgtatttttttattaattgcgactaacctagccgtgttgctggtagcctcaattgtgatgtctattctgggcgtgaatacgtctactatgggtggactgttagtgttcgctgcaatttttggattcggcggagccttcatcagcttagccatttcaaaatggatggcgaaaaagaccatgggctgtgaagtgatcaccacgccacgtgatagcactgagcgttggttattggagacggttgcccgtcaagcgcagcaagcagggattaaaatgccagaagtggcaatttaccaatcgccagagatgaacgcttttgccactggcccaagtaaagacaactcattagttgccgtgagtaccggtctgttgtacggcatgagccaagatgaagttgaaggggttctcgcccacgaagtgagccacgtcgctaacggcgatatggtgacactgaccttaattcaaggcgtagtgaacacctttgttatctttgcagcgcgtgttgttgcgggtattatcaataacttcgtatcgagcaacgacgaagaaggcgaagggttaggcatgttcgcttatatggcggtcgtgtttgtcctcgacatgttgtttggtatcttggcctcgattatcgtggcttacttctcacgtatccgtgaataccgtgcagacgaaggtgcagcacgtttagcgggtaagcataagatgattgcagcgcttgagcgtttacgccaaggccctgaaagctcggcaatgccagcacaaatgtcagccttcggtattaacggcaagcgttcaatggctgagctgatgatgagccacccgccattagagaagcgtatcgccgctttacagacccgttaa

SEQ ID NO: 7905 - protein, 287 aa, Shewanella sp. MR-7
MKRIFLLIATNLAVLLVASIVMSILGVNTSTMGGLLVFAAIFGFGGAFISLAISKWMAKKTMGCEVITTPRDSTERWLLETVARQAQQAGIKMPEVAIYQSPEMNAFATGPSKDNSLVAVSTGLLYGMSQDEVEGVLAHEVSHVANGDMVTLTLIQGVVNTFVIFAARVVAGIINNFVSSNDEEGEGLGMFAYMAVVFVLDMLFGILASIIVAYFSRIREYRADEGAARLAGKHKMIAALERLRQGPESSAMPAQMSAFGINGKRSMAELMMSHPPLEKRIAALQTR

SEQ ID NO: 7906 - DNA, 906 bp, Alkalilimnicola ehrlichei MLHE-1
  CDS (1)..(906): transl_table=11
atgaagcgcatagggctctttctgctcactaacctggcgatcctggtggtcctgggtgtggtgttgttcatcctgcaggccgtgttcggggtgcggaccctggatgaggccggtgtgggtctggactatacggggttgctcatcatcgccgcggtgatcggtttcggcggctcgttcatctccctggccatgtccaagttcatcgccaagcggatgaccggggcccgcgttatcgaaaagccgcgcagcgaggccgagcagtggctggtggataccgtgcgccgctttgcccgccaggagggcatcggtatgccggaggtggcgatctacgacgccccggacatgaacgcctttgccaccggggcccggcgcaataactccctggtggcggtgagcaccggcctgctgcagagcatgacccgggacgaggccgaggcggtgatcggccacgagatcgcccacatcagcaacggcgatatggtcaccctgaccctgatccagggggtggtgaacacctttgtggtcttcttctcgcgcatcatcggccatttcgtcgaccgcgtggtattcaagaccgagcaagggcacggcccggcctatttcatcacctccatcttcgcccagatcgtgctgggcatcctcgcctcggtgatcgtcatgtggttctcccgtcagcgggagtaccgggccgatgccggtggcgccaagctggccgggcgcgacaagatgatagccgcgctggagcggctaaagcgctcggtggaccaggagcacctgccggaccagctggaggccttcggcatcaacggcaaccgcggtggcggcatgaaggagtggttcatgtcccacccgccgctggacgaccgcatcgccgcgctgaaggagggccgtcacctgcgcggatga

SEQ ID NO: 7907 - protein, 301 aa, Alkalilimnicola ehrlichei MLHE-1
MKRIGLFLLTNLAILVVLGVVLFILQAVFGVRTLDEAGVGLDYTGLLIIAAVIGFGGSFISLAMSKFIAKRMTGARVIEKPRSEAEQWLVDTVRRFARQEGIGMPEVAIYDAPDMNAFATGARRNNSLVAVSTGLLQSMTRDEAEAVIGHEIAHISNGDMVTLTLIQGVVNTFVVFFSRIIGHFVDRVVFKTEQGHGPAYFITSIFAQIVLGILASVIVMWFSRQREYRADAGGAKLAGRDKMIAALERLKRSVDQEHLPDQLEAFGINGNRGGGMKEWFMSHPPLDDRIAALKEGRHLRG

SEQ ID NO: 7908 - DNA, 888 bp, Pseudoalteromonas tunicata D2
  CDS (1)..(888): transl_table=11
atgtattttaatgaggtttatatgaaacgtattgtattgtttttaattaccaacttagccgtaatgcttgtgctaggtattgtattgtcgattttgatgagcgtgtttggcatcgataatcgtagtctgggtggtatcttaatggtggctactgtatttggttttggtggctcatttatttcattatatatgtccaaatggatggccaaaaaatcaactggtgcacatgtgattgagcaacctcgtaacgaaactgaaaaatggttagttgataccgtggctgcgcaagcaaaaaaagcgaatatcaagatgcctgaagtcgcaatttacgacagcccagaaatgaatgcatttgccacaggcccaagtaaaaataattcattagttgctgttagtactggtttattgcgtagtatgagtgcagatgaagccgaagcggttctcgctcatgaggtttcacatattgctaatggtgacatggtaaccttaacgcttattcaaggcgtggtgaatacctttgttatctttatctctaaggtacttgctgggattgttgataacttcttaaacagtaattctgaagaagaaaatagcggcccatcgtggacgtattttatctttgatatgattttccaaattgtgtttggtattttagcttctgtggtggttgcatactttagccgtaaacgtgagtttgcagcagataaaggcgctgcagatttagttggtgcccataagatgcgtgcggcgcttgagcgtttacaagctaatcatccgtcacaattacaaggttcaatgatggcgtttggtattgcctcaggtaaaggtttggctgatttcttttcatcacatccgccacttgaagagcgtattaacgcgctacgctaa

SEQ ID NO: 7909 - protein, 295 aa, Pseudoalteromonas tunicata D2
MYFNEVYMKRIVLFLITNLAVMLVLGIVLSILMSVFGIDNRSLGGILMVATVFGFGGSFISLYMSKWMAKKSTGAHVIEQPRNETEKWLVDTVAAQAKKANIKMPEVAIYDSPEMNAFATGPSKNNSLVAVSTGLLRSMSADEAEAVLAHEVSHIANGDMVTLTLIQGVVNTFVIFISKVLAGIVDNFLNSNSEEENSGPSWTYFIFDMIFQIVFGILASVVVAYFSRKREFAADKGAADLVGAHKMRAALERLQANHPSQLQGSMMAFGIASGKGLADFFSSHPPLEERINALR

SEQ ID NO: 7910 - DNA, 888 bp, Photobacterium sp. SKA34
  CDS (1)..(888): transl_table=11
atgaagcgtattgcattgtttttattaacaaacttagcagtaatgctggtgttcagtgttgtgttgaacattgtttatgctgtaacagggatgcaacctggtagcctttctggtttgctagttatggctgcactatttggttttggtggttcattgatttctttgatgatgtcaaagtcaatggcccttcgttctgttggtggtatggttatcgaaagcccacgtaacgaaacagaacattggttgatggaaacagtatctcgccaagcacaacaggcaggtattggtatgccaactgttgcgatttatgattcgccagatattaacgcatttgcaacaggtgctaagcgtgatgattcacttgtcgctgtttctacaggtttattgcacagtatgacacgtgatgaagctgaagcagtgcttgctcatgaagtgagtcacgttgctaatggtgacatggtaacaatgacgttaatgcaaggtgttgtgaatacctttgttattttcgtttcacgtttagttgctggcgcaatcagtggtgtgaacaatagcgatgaagaaggcgggagtggcggtagctacatcacatactttattgtatcaaccatcatggaagttctattcggtttcttagcaagtattctaacaatgtggtatagccgtcatcgtgaattctatgctgatgctggctctgcaaagcttgttggtcgtgagaaaatgatagcagcacttgagcgtttaaaagtgagccacgagccacaattagaaggttcaatgatggcgtttggtattaatggcaagaagtcattatctgaattattcatgactcacccaccactagagaaacgtattgaagcacttcgtcaaggcgaatacttaaacaagtaa

SEQ ID NO: 7911 - protein, 295 aa, Photobacterium sp. SKA34
MKRIALFLLTNLAVMLVFSVVLNIVYAVTGMQPGSLSGLLVMAALFGFGGSLISLMMSKSMALRSVGGMVIESPRNETEHWLMETVSRQAQQAGIGMPTVAIYDSPDINAFATGAKRDDSLVAVSTGLLHSMTRDEAEAVLAHEVSHVANGDMVTMTLMQGVVNTFVIFVSRLVAGAISGVNNSDEEGGSGGSYITYFIVSTIMEVLFGFLASILTMWYSRHREFYADAGSAKLVGREKMIAALERLKVSHEPQLEGSMMAFGINGKKSLSELFMTHPPLEKRIEALRQGEYLNK

SEQ ID NO: 7912 - DNA, 879 bp, marine gamma proteobacterium HTCC2207
  CDS (1)..(879): transl_table=11
ttgtttttactgaccaacctggcaattattattgttgccagcatttccctgagcctgctcggggtcaatagcatactcgcggacaatggcgtcgacctcaatctaacgtctctacttatattctgcgcggtgtttggctttattggctcttttgtctcactgctgctgtcgaaatttatggccaagatgacgaccaagacaaaaattattcagcaaccggccaatgagcaggagcgctggttggttactaccgtggccgagctcgccaagaaagcggatataggtatgccagaggtgggaattttccccgcgcagcagtccaatgcctttgccacgggctggaatcgaaacaaggctctggtagctgtcagcgccgggctactggcgcgctttgaccgagacgaggcgcgggctgttctggcccatgaaatcggccatgtggccaatggcgatatgatcaccctgagtctggttcagggcgtggtcaatacctttgttatgttcttcgcccgtttgattggtttctttgtcgatcgcgtggtgttgaaaaatcagcgaggtctgggattgggctattggattactactatagttgcagagattttcctcggcatcttggcctctactattgtgatgtggttttctcgacgccgagaattctatgccgatgcggcaggtgcctcactggccggacgcggagccatgatcaaagccttgcaaagactccagcaagagagcgcagctcaggttgaaaatcagatgccagacactatgaccgcctttggaatctcttccggctggaaaaagcgaccctcgagactgtttatgactcacccaccattggaagaacgaatcgaggcgctgcgctttggacaataa

SEQ ID NO: 7913 - protein, 292 aa, marine gamma proteobacterium HTCC2207
MFLLTNLAIIIVASISLSLLGVNSILADNGVDLNLTSLLIFCAVFGFIGSFVSLLLSKFMAKMTTKTKIIQQPANEQERWLVTTVAELAKKADIGMPEVGIFPAQQSNAFATGWNRNKALVAVSAGLLARFDRDEARAVLAHEIGHVANGDMITLSLVQGVVNTFVMFFARLIGFFVDRVVLKNQRGLGLGYWITTIVAEIFLGILASTIVMWFSRRREFYADAAGASLAGRGAMIKALQRLQQESAAQVENQMPDTMTAFGISSGWKKRPSRLFMTHPPLEERIEALRFGQ

SEQ ID NO: 7914 - DNA, 882 bp, delta proteobacterium MLMS-1
  CDS (1)..(882): transl_table=11
atgttcaaaagagtagccctgttcattgccaccaacctggcgattgttctggtactcagcattatcctcagcctgctgggggttggccggatcctggatgaatccggggtcgggctggatatgcgcagcctgatcatcttcgccgccgtcttcggcttcggcggctcctttatctcgctggccatctccaaatggacggccaaacggatgactggggcccgggtaatcacccagcccgccgacgaaaccgaggcctggctgctggagaccgtcaaaaaccaggctaaaatcgccaatatcggcatgccggaggtggcgatctttgactccccctcccccaacgcttttgccaccggcgcccgcaaggacaaggccctggtggcggtgagcaccggcctgctgcgctccatgaaccgggatgaggccgaggcggtgatggcccacgagatcagccatgtggccaacggcgacatggtcaccctggccctgatccagggggtggtcaacacctttgtcattgtggcctcacgggtggtgggtcacctggtggaccgggtggttttcaagaccgaaagcggccacggcccggcctttttcatcacctccatcctggcccaggtggtcttcggcatcctggccagcaccattgtcttctacttcagccgccagcgcgaattcaaggccgatgccggcggggcctacctggccggccgcgagaagatggtggcagccctggagaaactgcgccgcggcgccccggaaccgctgcccgatcagatggcctccttcgggatcgccggcggcgtcggccagggcctcaagcgcctcttcatgacccatccgccgctggaggagcggatcgccgccctgcaacggcggtaa

SEQ ID NO: 7915 - protein, 293 aa, delta proteobacterium MLMS-1
MFKRVALFIATNLAIVLVLSIILSLLGVGRILDESGVGLDMRSLIIFAAVFGFGGSFISLAISKWTAKRMTGARVITQPADETEAWLLETVKNQAKIANIGMPEVAIFDSPSPNAFATGARKDKALVAVSTGLLRSMNRDEAEAVMAHEISHVANGDMVTLALIQGVVNTFVIVASRVVGHLVDRVVFKTESGHGPAFFITSILAQVVFGILASTIVFYFSRQREFKADAGGAYLAGREKMVAALEKLRRGAPEPLPDQMASFGIAGGVGQGLKRLFMTHPPLEERIAALQRR

SEQ ID NO: 7916 - DNA, 882 bp, delta proteobacterium MLMS-1
  CDS (1)..(882): transl_table=11
atgttcaaaagagtagccctgttcattgccaccaacctggcgattgttctggtactcagcattatcctcagcctgctgggggttggccggatcctggatgaatccggggtcgggctggatatgcgcagcctggtcatcttcgccgccgtcttcggcttcggcggctcctttatctcgctggccatctccaaatggacggccaaacggatgaccggggcccgggtaatcacccagcccgccgacgaaaccgaggcctggctgctggagaccgtcaagaaccaggccaaaatcgccaatatcggcatgccggaggtggcgatctttgactccccctcccccaacgcttttgccaccggcgcccgcaaggacaaggccctggtggcggtgagcaccggcctgctgcgctccatgaaccgggatgaggccgaggcggtgatggcccacgagatcagccatgtggccaacggcgacatggtcaccctggccctgatccagggggtggtcaacacctttgtcattgtggcctcacgggtggtgggtcacctggtggaccgggtggttttcaagaccgaaagcggccacggcccggcctttttcatcacctccatcctggcccaggtggtcttcggcatcctggccagcaccattgtcttctacttcagccgccagcgcgaattcaaggccgatgccggcggggcctacctggccggccgcgagaagatggtggcagccctggagaaactgcgccgcggcgccccggaaccgctgcccgatcagatggcctccttcgggatcgccggcggcgtcggccagggcctcaagcgcctcttcatgacccatccgccgctggaggagcggatcgccgccctgcaacggcggtaa

SEQ ID NO: 7917 - protein, 293 aa, delta proteobacterium MLMS-1
MFKRVALFIATNLAIVLVLSIILSLLGVGRILDESGVGLDMRSLVIFAAVFGFGGSFISLAISKWTAKRMTGARVITQPADETEAWLLETVKNQAKIANIGMPEVAIFDSPSPNAFATGARKDKALVAVSTGLLRSMNRDEAEAVMAHEISHVANGDMVTLALIQGVVNTFVIVASRVVGHLVDRVVFKTESGHGPAFFITSILAQVVFGILASTIVFYFSRQREFKADAGGAYLAGREKMVAALEKLRRGAPEPLPDQMASFGIAGGVGQGLKRLFMTHPPLEERIAALQRR

SEQ ID NO: 7918 - DNA, 885 bp, Oceanobacter sp. RED65
  CDS (1)..(885): transl_table=11
atgcggattttgcttttcttagccaccaatattgccatcgtggcagtggctagcattacccttagcttgcttggcgtgggcagctatatgacggcccaaggcttggattacaccaacttgatgattttctgccttgtgttcggcatggtgggctcatttgtttcgcttttcctatcgaaatggatggccaagcgcagcatgggtgtgcgcatcattgaccaaccaagcaatgcggatgagcagtggctagtgggtaccgtcgccaagctggcagaaaaagccggtatcggcatgccagaagtaggggtgtttgccagtccgcaggccaacgccttcgccaccggttggaaccgcaatgactcgctcgtggcagtgagtacaggtcttttgaacaaaatgacgcgcgaagaagtagaagcggttttaggtcacgaaattggccacgttgccaatggtgatatggttaccctgacgctgattcagggtgtggtgaacgcctttgttatgttttttgcccgtatcatcggctcattcattgaccgagctgtatttaaaaatgagaacggccacggcataggtttttatatcgctactttctttgccgaagttattttgggtattttggccagcactattgttttctggttcagtcgtcgccgggaatatcgcgcggacattgccggtgccgagttagtcagtccagcggctatggtgagtgcattagcccgtttgcgcgcagaatatggccaacctagtgacatgccagatgagatggtagcgtttggtattagcggtgaattaaaaaatgcgctgggtggtttattcatgagccacccgcctctggagaagcgcatcgcagcattgcaagcgcgctatggccgctaa

SEQ ID NO: 7919 - protein, 294 aa, Oceanobacter sp. RED65
MRILLFLATNIAIVAVASITLSLLGVGSYMTAQGLDYTNLMIFCLVFGMVGSFVSLFLSKWMAKRSMGVRIIDQPSNADEQWLVGTVAKLAEKAGIGMPEVGVFASPQANAFATGWNRNDSLVAVSTGLLNKMTREEVEAVLGHEIGHVANGDMVTLTLIQGVVNAFVMFFARIIGSFIDRAVFKNENGHGIGFYIATFFAEVILGILASTIVFWFSRRREYRADIAGAELVSPAAMVSALARLRAEYGQPSDMPDEMVAFGISGELKNALGGLFMSHPPLEKRIAALQARYGR

SEQ ID NO: 7920 - DNA, 879 bp, Buchnera aphidicola subsp
  CDS (1)..(879): transl_table=11
atgactcgtattgttcttttcttattaactaatttagcagttatgttaatatttagtctaattcttttcctgacaggtattcaatctaatactatttatggtttattaattatgtcaggtttatttggttttagtggttctattttatcgttaattttatcaaagtggattgcgttgcgttctgtaaatggggaaatcatcactcatccacgaaatgaagtagaaagttggcttattaatactgtacgtcaacaatcaattcaaaaaggtattattatgccccaaattgcagtatatcatgcgactgatattaatgcatttgcaacaggtgcacgtcgtaattctgctctaattgctgtttctacaggattattagaaaatatgactcatcatgaagcagaagcagtaattgctcatgaaattagtcatatcgcaaatggtgacatgattactatgaccttagtacaaggtgttgttaacacttttgtgatttttatatctcgttttctttcacaaatcataagcaatgtcatgtcaagcaatcgaaatgagaataatacagaagaaaaaaactctttcgtatattttttagtttctacatttctagaattaatttttggaattttagccagtattattactatgtggttctccagacatcgtgaattttatgctgatgctagttctgcgaaaatggtaggtcgcgaaaaaatgattgctgctttgaatcgtttaaaaacaagtcatgaaccccaagaatctgatagtatgattgcattttgtatcaacggaaaatccaaatcttttttaaaattatttgcatctcatccttctttagaaaacaggatagaggcattatataatcaagaatatatgtag

SEQ ID NO: 7921 - protein, 292 aa, Buchnera aphidicola subsp
MTRIVLFLLTNLAVMLIFSLILFLTGIQSNTIYGLLIMSGLFGFSGSILSLILSKWIALRSVNGEIITHPRNEVESWLINTVRQQSIQKGIIMPQIAVYHATDINAFATGARRNSALIAVSTGLLENMTHHEAEAVIAHEISHIANGDMITMTLVQGVVNTFVIFISRFLSQIISNVMSSNRNENNTEEKNSFVYFLVSTFLELIFGILASIITMWFSRHREFYADASSAKMVGREKMIAALNRLKTSHEPQESDSMIAFCINGKSKSFLKLFASHPSLENRIEALYNQEYM

SEQ ID NO: 7922 - DNA, 879 bp, Buchnera aphidicola subsp
  CDS (1)..(879): transl_table=11
atgatacgtattattcttttcttattaactaatttagcagttatgctaacattcagtctgattcttgctgtgacaggaattcagtctgaaagtatttacggtctattgattatgtcaagtctatttggttttagtggatctatcttatcacttattatgtctaaatggattgcattgcgttctgtaaatggtagaatcattaatcatcctagcaatgaaacagaaagttggctaattgatactattcgtcaacaatctataaaaaaaaatattattatgccacaaatagcaatatatgaagctgctgatatcaatgcatttgctacaggtgctcgtcgtaatgcagctttgattgctatatcaacaggattactagaaaatatgacacgtagtgaggcagaagcagtaattgctcatgaaattagtcatgtttcaaatggtgatatgatcacaatgactttagttcaaggtgttgtaaacacttttgtaatctttatatctcgtattatttcacaagcattgagcagcttattatcgagtaatagaaatgaaaatagtgaagatgaaaaagattcatttttattttttttaatttctacatttctagaaataatttttggtgtacttgcaagtattattactatgtggttttctagacatcgagaattttatgctgacgcaagttcagcaaaattagtcggaaaagaaaaaatgatttctgccctaaatcgtttaaagtcaagtcatgagcctcaagaatcagatagcataattgcattttgtattaacggaaaatctaattcatttatagaattattcgcctcccatccatctttagaaaaaagaatacaggcgctaaaaaataaaaaatatatgtaa

SEQ ID NO: 7923 - protein, 292 aa, Buchnera aphidicola subsp
MIRIILFLLTNLAVMLTFSLILAVTGIQSESIYGLLIMSSLFGFSGSILSLIMSKWIALRSVNGRIINHPSNETESWLIDTIRQQSIKKNIIMPQIAIYEAADINAFATGARRNAALIAISTGLLENMTRSEAEAVIAHEISHVSNGDMITMTLVQGVVNTFVIFISRIISQALSSLLSSNRNENSEDEKDSFLFFLISTFLEIIFGVLASIITMWFSRHREFYADASSAKLVGKEKMISALNRLKSSHEPQESDSIIAFCINGKSNSFIELFASHPSLEKRIQALKNKKYM

SEQ ID NO: 7924 - DNA, 876 bp, Buchnera aphidicola subsp
  CDS (1)..(876): transl_table=11
atgatgcgtataattctttttttattaactaatttggccgttgtatgcgtttttggatttattttaagttttacaaaaataccacctgaaagtattagtggattactcattttctctagcatattcggatttagtgggtcaataatatcattattaatgtcaaaatggattgctttaaagtctgttaatggacaagttatttatcaaccatcaaataataccgaacaatggttaatagatactattaattctcaatctaaaaaaatgggcataaaaactccaactatagcaatatatcatgcatttgacatgaatgcttttgcaacaggtgcatataaaaattcagcattaattgctgtttctactggattactggaaaacatgagttatgatgaagcagaagcagttttagcccatgaaataaatcatatttcaaacggtgacatggtaactatgacgttagttcaaggtatagttaatactttcgttatatttatctctcgaattattgctcaatttgcatcgtctattttatctgaaaatagagaagataataattctaacaggaatacatgggtttatataatttgttcaacaattttagagctcatttttggaatttttgctagcataattacaatgtggttctcacggcatcgtgaattttatgctgatgcaggatcggcaaaattagtaggtcgcaaaaaaatgatttctgcattacaaaaattaaaattaagttatgaacctcaagaaaaaagcaacataattgcattttgtataaatggaaaacacagttcttttttaaatttatttatgtcacatccatcactagacaaaagaattcaagctttatacaatagagactacatgtaa

SEQ ID NO: 7925 - protein, 291 aa, Buchnera aphidicola subsp
MMRIILFLLTNLAVVCVFGFILSFTKIPPESISGLLIFSSIFGFSGSIISLLMSKWIALKSVNGQVIYQPSNNTEQWLIDTINSQSKKMGIKTPTIAIYHAFDMNAFATGAYKNSALIAVSTGLLENMSYDEAEAVLAHEINHISNGDMVTMTLVQGIVNTFVIFISRIIAQFASSILSENREDNNSNRNTWVYIICSTILELIFGIFASIITMWFSRHREFYADAGSAKLVGRKKMISALQKLKLSYEPQEKSNIIAFCINGKHSSFLNLFMSHPSLDKRIQALYNRDYM

SEQ ID NO: 7926 - DNA, 882 bp, Escherichia coli O157
  CDS (1)..(882): transl_table=11
atgatgcgaatcgcgctcttcctgctaacgaacctggccgtaatggtcgttttcgggctggtactgagcctgacagggatacagtcgagcagcgttcaggggctgatgatcatggccttgctgttcggttttggtggttccttcgtttcgcttctgatgtccaaatggatggcattacgatctgttggcggggaagtgatcgagcaaccgcgtaacgaaagggaacgttggctggtcaatactgtagcaacccaggctcgtcaggcggggatcgctatgccgcaagtggctatctaccatgcgccggacatcaacgcttttgcaaccggtgcgcgccgtgatgcctctctggttgctgtcagcaccggtttgctgcagaacatgagcccggatgaagccgaggcggtaattgctcacgaaatcagccacatcgccaatggtgatatggtcaccatgacgctgattcagggcgtggtgaacaccttcgttatctttatttcccgtatcctggcgcagcttgccgcgggttttatgggcggaaatcgtgatgaaggtgaagagagcaacggcaacccgctgatctactttgcggttgcaacggttctggaactggtgtttggtattctggcgagcattatcaccatgtggttctcgcgtcatcgtgaattccatgctgatgccggttcggcaaaactggttggtcgcgagaaaatgattgccgcgctgcagcgcctgaaaaccagctatgaaccgcaagaagcaaccagcatgatggctttctgcattaacggtaagtcgaaatcgctcagtgagttgtttatgactcacccgccgctggataaacgtattgaagctctgcgtacgggtgaatacctgaagtaa

SEQ ID NO: 7927 - protein, 293 aa, Escherichia coli O157
MMRIALFLLTNLAVMVVFGLVLSLTGIQSSSVQGLMIMALLFGFGGSFVSLLMSKWMALRSVGGEVIEQPRNERERWLVNTVATQARQAGIAMPQVAIYHAPDINAFATGARRDASLVAVSTGLLQNMSPDEAEAVIAHEISHIANGDMVTMTLIQGVVNTFVIFISRILAQLAAGFMGGNRDEGEESNGNPLIYFAVATVLELVFGILASIITMWFSRHREFHADAGSAKLVGREKMIAALQRLKTSYEPQEATSMMAFCINGKSKSLSELFMTHPPLDKRIEALRTGEYLK

SEQ ID NO: 7928 - DNA, 882 bp, Escherichia coli; identical to SEQ ID NO: 7850
  CDS (1)..(882): transl_table=11

SEQ ID NO: 7929 - protein, 293 aa, Escherichia coli; identical to SEQ ID NO: 7851

SEQ ID NO: 7930 - DNA, 870 bp, Haemophilus ducreyi
  CDS (1)..(870): transl_table=11
atgtcaaaaagagtgattttatttttattaactaacttagccattacttttgtacttggtatcgtattgaatattatttttcaagtgacaggtattaaaggcacaagtacgaccggtattttaatgatgtctttgttatttggttttaccggatcgttaatttcgctatttatgtcaaaatcgatggcattacgttctgtaggcgctgaagtgattcaacaaccgagaaaccaagcagaacagtggttatttaatacggtgcaacgtcaatcacaaaaagcaggtattccaatgccagatattgccatttatcattctgctgatgtcaatgcgtttgcaacgggtgcgactaaaaataattctttagtcgcggtgagtaccggtctgttagataatatgactgaagatgaagctgaggcggtcgtagcacatgaaattgcgcatattgctaatggtgatatggtcacaatgactttattgcaaggcgtgctaaacacgtttgtgatttttttatctagaatgatttcaacggcggtttcaggctcacgtgatgaaaatggcaattcaactcaaaatacattagtgttttgggtagtggatattgcactacaaatgattttcggcatattagcgacaatgattgctatgtggttttcacgttatcgagaatatcgtgcagatatgggctcggcacaattagttggcaaagagaaaatgattgccgctttagagcgcctaagacatgtacacgaaccacaagaaatgcaaggttcattatctgcatttatgatcaatggtattcgttctaaagagttgtttatgagtcatccaccgcttgaaaagcgcattgaagcattgagaaatttataa

SEQ ID NO: 7931 - protein, 289 aa, Haemophilus ducreyi
MSKRVILFLLTNLAITFVLGIVLNIIFQVTGIKGTSTTGILMMSLLFGFTGSLISLFMSKSMALRSVGAEVIQQPRNQAEQWLFNTVQRQSQKAGIPMPDIAIYHSADVNAFATGATKNNSLVAVSTGLLDNMTEDEAEAVVAHEIAHIANGDMVTMTLLQGVLNTFVIFLSRMISTAVSGSRDENGNSTQNTLVFWVVDIALQMIFGILATMIAMWFSRYREYRADMGSAQLVGKEKMIAALERLRHVHEPQEMQGSLSAFMINGIRSKELFMSHPPLEKRIEALRNL

SEQ ID NO: 7932 - DNA, 852 bp, Haemophilus influenzae
  CDS (1)..(852): transl_table=11
atgatgcgtattcttcttttcttggcaaccaatatggctgtaatgctggtattaggtattattttaagtgtgactggaattgcaggaaatagcaccggcggtattttaattatggctttgctatttggttttgctggctcattaatttccttattcctgtctaaaacgatggcattacgttctgtagatggagaggtgattactcaacctcgtaatcaaactgaacgttggttaattgataccgttagtcgccaagcgcagaaagcgggtattcctatgccagacgtggcgatttatcattcacccgatgtgaatgcttttgcgacaggtgcgacaaaaagcaattctttggtggctgtgagtacgggattattaaacaacatgacggaggctgaagctgaagctgttttagcgcacgaaatttctcatatttccaatggggatatggtgacgatggcgttattgcaaggcgtattaaatactttcgtgattttcttatctcgcgttatcgcaacggcggtagcaagttcgcgtaacaataatggagaagaaacgcgcagttcaggtatttatttcttggtttcgatggtattggaaatgctctttggtgtgcttgcaagtattatcgcaatgtggttctcgcgctaccgcgaatttcgtgcagatgcaggttccgcaagtttagtaggcaaagaaaagatgattatggcattgcaacgtttgcaacaacttcacgaaccccaaaatcttgaaggttctttaaatgcctttatgattaatggtaaacgcagtgaactctttatgagccatccaccactcgaaaagcgtattgaagccttacgtaatctttaa

SEQ ID NO: 7933 - protein, 283 aa, Haemophilus influenzae
MMRILLFLATNMAVMLVLGIILSVTGIAGNSTGGILIMALLFGFAGSLISLFLSKTMALRSVDGEVITQPRNQTERWLIDTVSRQAQKAGIPMPDVAIYHSPDVNAFATGATKSNSLVAVSTGLLNNMTEAEAEAVLAHEISHISNGDMVTMALLQGVLNTFVIFLSRVIATAVASSRNNNGEETRSSGIYFLVSMVLEMLFGVLASIIAMWFSRYREFRADAGSASLVGKEKMIMALQRLQQLHEPQNLEGSLNAFMINGKRSELFMSHPPLEKRIEALRNL

SEQ ID NO: 7934 - DNA, 840 bp, Neisseria meningitidis serogroup A
  CDS (1)..(840): transl_table=11
gtgaaacgaatttttctgtttttggctaccaatatcgctgttttggtcgtaatcaacattgttttggcggttttgggcatcaacagccagggcggcacgggcagcctgttggcgtattccgccgtcgtcggcttcactggttcgattatttcgctgctgatgtccaaattcatcgccaaacaatcggtcggcgcggaagttatcgacacgccgcgcaccgaagaagaagcctggcttttgaacactgtcgaagcccaagcgcggcaatggaacctgaaaacgcccgaagtcgccatctaccactcccccgaacccaatgcctttgccacgggcgcatcgagaaacagctccctgatcgccgtcagcaccggtttgctcgaccatatgacgcgtgacgaagtggaagccgtattggcgcacgaaatggcacacgtcggcaacggcgatatggttacgctgacgctgattcaaggcgtggtcaatacctttgtcgtgttcctgtcgcgcattattgccaacctgattgcccgaaacaacgacggcagccagtcccagggaacttatttcctggtcagcatggtattccaaatcctgttcggcttccttgccagcttaattgtcatgtggttcagccgacaacgcgaataccgcgccgacgcgggcgcggcaaaactggtcggcgcgccgaaaatgatttccgccctgcaaaggcttaaaggcaacccggtcgatttgcccgaagaaatgaacgcaatgggcatcgccggagatacgcgcgactccctgctcagcacccacccttcgctggacaaccgaatcgcccgcctcaaatcgctttaa

SEQ ID NO: 7935 - protein, 279 aa, Neisseria meningitidis serogroup A
MKRIFLFLATNIAVLVVINIVLAVLGINSQGGTGSLLAYSAVVGFTGSIISLLMSKFIAKQSVGAEVIDTPRTEEEAWLLNTVEAQARQWNLKTPEVAIYHSPEPNAFATGASRNSSLIAVSTGLLDHMTRDEVEAVLAHEMAHVGNGDMVTLTLIQGVVNTFVVFLSRIIANLIARNNDGSQSQGTYFLVSMVFQILFGFLASLIVMWFSRQREYRADAGAAKLVGAPKMISALQRLKGNPVDLPEEMNAMGIAGDTRDSLLSTHPSLDNRIARLKSL

SEQ ID NO: 7936 - DNA, 861 bp, Pasteurella multocida
  CDS (1)..(861): transl_table=11
atgatgcgaattttgctatttcttgccacgaacatggcagttttagttgtttttaacattattttaagtttgacggggatccaagcacaagatgcgacagggctattgctcatggcggcattatttggtttttctggttctttaatttctctgtttttatctaaaaccatggctctacgcgctgtgggggcggaagtgatcaaacagccacgtaatgacatggaacgttggttagtgaatacagttcgttcgcaagctgaacgcgcgaatttaccgatgcctgatgtcgcgatttatcactctgaagatgtgaatgcgtttgcgacaggaccaagtaaaaataattccttagtggccgtgagtactggcttattacgtgccatgacacaagatgaagcagaagcagtacttgcgcatgaagtggcacatattaaaaatggtgatatggtgaccatgaccttattacaaggtgtattgaacacattcgtgatttttgtgtcacgcatgatcgcgaaagtcgtgtcaagcaatcgagatggtgaaagtagcacagggatttattttcttgtgtctatggtcttggaaatcttatttggtttcttagccagcatgatcgccatgtggttctctcgctatcgagaatttcgtgcggatgcagggtctgcaaagttagtcggtaaacacaaaatgattgccgcgttacaacgtttgcaacgtttacatgaaccacaagagttagaaggacagcttgccgcttttgcgattaacggtaaacgtggtggtttagcggctttatttatgagccatccgccattagaaaaacgtattgcggcattacaacaattagatagttttaaataa

SEQ ID NO: 7937 - protein, 286 aa, Pasteurella multocida
MMRILLFLATNMAVLVVFNIILSLTGIQAQDATGLLLMAALFGFSGSLISLFLSKTMALRAVGAEVIKQPRNDMERWLVNTVRSQAERANLPMPDVAIYHSEDVNAFATGPSKNNSLVAVSTGLLRAMTQDEAEAVLAHEVAHIKNGDMVTMTLLQGVLNTFVIFVSRMIAKVVSSNRDGESSTGIYFLVSMVLEILFGFLASMIAMWFSRYREFRADAGSAKLVGKHKMIAALQRLQRLHEPQELEGQLAAFAINGKRGGLAALFMSHPPLEKRIAALQQLDSFK

SEQ ID NO: 7938 - DNA, 876 bp, Pseudomonas aeruginosa
  CDS (1)..(876)
atgatgcgcatcctgttgttcctggccaccaacctggcagtcctggtgattgccagcatcaccctgaaactgctcggggtggaccgcttcaccggccagaattacggcagcctgctggtcttctgcgccgtgttcggtttcgccggttcgctggtctcgctgttcatctccaagtggatggcgaagatgagcaccggtaccgaagtcatcagccagccgcgcacccgtcacgaacagtggctgctgcaaaccgtcgaagagctgtcccgcgaagccggcatcaagatgccggaggtcggcatcttccccgcctacgaggccaacgccttcgccaccggctggaacaagaacgacgcgctggtcgcggtcagccagggcctgctcgaacgtttctcgcccgatgaggtgaaagccgtcctcgcccacgagatcggtcacgtcgccaacggcgacatggtcaccctggcattgatccagggcgtggtgaacaccttcgtgatgttcttcgcgcggatcttcggcaacttcgtcgacaaggccatcctgaagaacgaggacggcccgggcatcggctacttcgtcgcgaccatcttcgccgaactggtgctcggcatcctcgccagcatcatcgtcatgtggttctcgcgccgccgcgagttccgcgccgacgccgccggcgcccacctggccggcaccggcgcgatgatcgccgcgctgcaacgcctgcgttcggaacagggcgtgccggtgcagatgcccgacaccctgaacgccttcggcatcaatggcggcctcaagcacggcctggccggcctgctgatgagccacccgccgctggaagatcgtatcgaagcgctgcgcgccagcgcacgctga

SEQ ID NO: 7939 - protein, 291 aa, Pseudomonas aeruginosa
MMRILLFLATNLAVLVIASITLKLLGVDRFTGQNYGSLLVFCAVFGFAGSLVSLFISKWMAKMSTGTEVISQPRTRHEQWLLQTVEELSREAGIKMPEVGIFPAYEANAFATGWNKNDALVAVSQGLLERFSPDEVKAVLAHEIGHVANGDMVTLALIQGVVNTFVMFFARIFGNFVDKAILKNEDGPGIGYFVATIFAELVLGILASIIVMWFSRRREFRADAAGAHLAGTGAMIAALQRLRSEQGVPVQMPDTLNAFGINGGLKHGLAGLLMSHPPLEDRIEALRASAR

SEQ ID NO: 7940 - DNA, 882 bp, Salmonella typhi
  CDS (1)..(882): transl_table=11
atgatgcgaatcgcgctcttcctgctgacgaacctggccgtgatggtcgttttcgggctggttctgagcctgacagggatacagtcgagcagcgtgcaaggcttgctgatcatggcgctgctgtttggttttggcggttcttttatttcattgctgatgtccaaatggatggcgttaaaatccgtaggaggggaagttattgaacagcctcgcaatgaaagagaacgctggttgatgaacaccgtagcaacgcaagcgcgccaggctggtatcgccatgccgcaggttgctatctaccatgcgccggacattaacgcgtttgcgacgggcgcacgccgtgacgcctcattggtcgctgtgagcaccggtctgttgcaaaatatgagccctgacgaggcggaagccgtcattgcgcatgaaatcagccatattgccaatggcgatatggtgacgatgacgttgattcagggggtggttaacaccttcgttatctttatttcgcgcattatcgcgcaaattgctgctggttttctgggcggcaaccgtgatgaaggcgaaggaagtaacggtaatccgctaatctatttcgccgttgcgacggtgctggaactggtcttcggtattctggcaagcattatcaccatgtggttctcccgttaccgtgagtttcatgccgatgcgggatcggcgaagctggtgggccgtgaaaaaatgattgccgcgttgcagcgcctgaaaaccagctacgagccgcaagaagcgaccagcatgatggcgttttgtattaacggtaaatcgaaatcgttaagcgagctgtttatgacgcacccaccgctggataaacgcattgaagcgctgcgtagcggcgagtacctgaaataa

SEQ ID NO: 7941 - protein, 293 aa, Salmonella typhi
MMRIALFLLTNLAVMVVFGLVLSLTGIQSSSVQGLLIMALLFGFGGSFISLLMSKWMALKSVGGEVIEQPRNERERWLMNTVATQARQAGIAMPQVAIYHAPDINAFATGARRDASLVAVSTGLLQNMSPDEAEAVIAHEISHIANGDMVTMTLIQGVVNTFVIFISRIIAQIAAGFLGGNRDEGEGSNGNPLIYFAVATVLELVFGILASIITMWFSRYREFHADAGSAKLVGREKMIAALQRLKTSYEPQEATSMMAFCINGKSKSLSELFMTHPPLDKRIEALRSGEYLK

SEQ ID NO: 7942 - DNA, 864 bp, Shewanella oneidensis
  CDS (1)..(864): transl_table=11
atgaagcgtatatttttattgatagtgaccaacctagcggtgttgctggtcgcctcaattgtgatgtcaattttgggcgtgaatacgtctactatgggtggactcttagtgttcgctgcgatttttggatttggcggagctttcatcagcttagcgatttcaaaatggatggcgaaaaaaaccatgggctgtgaagtgatcactactccccgtgatagcactgagcgttggttattggatacggttgcccgccaagcacagcaagcaggtattaaaatgccagaagtggcgatttatcagtcgccagagatgaatgcctttgccacaggtccaagcaaagacaactcgttagttgccgtgagtaccggtttgttgtatggaatgagccaagatgaaatagaaggcgtactcgcccatgaagtcagccacgtcgctaacggcgatatggtgaccttgaccttaatccaaggcgtggtaaacacctttgtgatctttgcggctcgtgtggtggcgggtatcatcaacaatttcgtatcgagcaacgatgaagaaggcgaaggtttaggtatgtttgcctacatggctgtggtgtttgttctcgatatgttgtttggtattttggcttctattattgtggcttacttctcacgcattcgtgaatatcgcgccgacgagggtgctgctcgtttagcgggcaagaataagatgattgctgcgcttgagcgtttacgtcaaggcccagaaagctcggcgatgccagcgcaaatgtctgcttttggtattaacggtaagcgttcaatggctgagctaatgatgagccacccgccattagaaaagcgtattgcggcactgcagtctcgctaa

SEQ ID NO: 7943 - protein, 287 aa, Shewanella oneidensis
MKRIFLLIVTNLAVLLVASIVMSILGVNTSTMGGLLVFAAIFGFGGAFISLAISKWMAKKTMGCEVITTPRDSTERWLLDTVARQAQQAGIKMPEVAIYQSPEMNAFATGPSKDNSLVAVSTGLLYGMSQDEIEGVLAHEVSHVANGDMVTLTLIQGVVNTFVIFAARVVAGIINNFVSSNDEEGEGLGMFAYMAVVFVLDMLFGILASIIVAYFSRIREYRADEGAARLAGKNKMIAALERLRQGPESSAMPAQMSAFGINGKRSMAELMMSHPPLEKRIAALQSR

SEQ ID NO: 7944 - DNA, 864 bp, Vibrio cholerae
  CDS (1)..(864): transl_table=11
atgaaacgtatattgttattcttagcaaccaaccttgctgtcgtattggtgcttagtgttgttttgaatattgtttatgccgtcacgggcatgcagccagggagtttgtctggtctgttggtgatggcggctgtgtttggctttggcggtgcatttatttcactgctgatgtcaaaaagtatggccctacgctcagtgggtggtgtcgtcattgatactccacgcaatgagatggaacattggctattggaaacggtacgtcgccaagcaaaccaagcgggtatcggtatgccaacggtggcgatttatgatgcgccagacatgaatgcgtttgccacgggtgcaaagcgtgatgattctctggtcgcggtctcaacgggattgctgcacaacatgacgcgtgatgaggccgaagctgtgttggcgcatgaagttagccacattgctaacggtgacatggtcaccatgacgctgatgcaaggggtggtgaacaccttcgtgatcttcttgtcgcgctttattgccaatatcgtggcttcacgtgattcggaagaaggtgaaggtagcaacatgatggtctatttcggtgtatctatggtgcttgaattggtgtttggtttcttagccagcttcatcaccatgtggtatagccgccaccgtgagttccatgccgatgcgggtgccgctcagttagtcggtaagcacaagatgattgcggcgttagaacgcctgaaaatgggtcaggagtcgcatcttgaaggttcgatgatggcgtttggcatcacaggtaaacgctctctatccgaattaatgatgactcacccaccccttgaaaaacgtatcgcagcactgcgcaatatgtaa

SEQ ID NO: 7945 - protein, 287 aa, Vibrio cholerae
MKRILLFLATNLAVVLVLSVVLNIVYAVTGMQPGSLSGLLVMAAVFGFGGAFISLLMSKSMALRSVGGVVIDTPRNEMEHWLLETVRRQANQAGIGMPTVAIYDAPDMNAFATGAKRDDSLVAVSTGLLHNMTRDEAEAVLAHEVSHIANGDMVTMTLMQGVVNTFVIFLSRFIANIVASRDSEEGEGSNMMVYFGVSMVLELVFGFLASFITMWYSRHREFHADAGAAQLVGKHKMIAALERLKMGQESHLEGSMMAFGITGKRSLSELMMTHPPLEKRIAALRNM

SEQ ID NO: 7946 - DNA, 864 bp, Vibrio parahaemolyticus
  CDS (1)..(864): transl_table=11
atgaagcgaattatgttattcctagcaactaacctagctgttgtgctggttcttagtgttgttctgaatattgtttacgcgaccactggaatgcaaccaggcagtctgtctggtttacttgtcatggcagccgtatttggctttggtggcgcattgatttcgttaatgatgtcaaagggcatggcactacgctcagttggcggcatggtgattgaaagcccacgtaacgaaacagagcattggttgcttgagacggtaggccgtcaagcgcaacaagcgggcattggtatgccaacagtagcgatttatgattctgcagacatcaacgcattcgcgacaggggctaagcgtgatgattcactggttgctgtatcgactggtcttctacacaacatgacgcgtgatgaagctgaagctgttctggcgcacgaagtgagccacattgcgaatggtgacatggtcacgatgacgctaatgcaaggtgttgtgaacacgtttgttatcttcctatcgcgttttatcgccaatatcgtggcatcgaacgacgatgaagaaggccaaggcacgaacatgatggtgtactttggtgtgtctatggtgttggaacttgtctttggtttcttagcaagcttcatcactatgtggtacagccgtcaccgtgaattccatgccgatgcaggtgcagcgcgtttagtaggtaaagagaaaatgattgctgctcttgagcgtttgaagatgagccaagaatcgaaactcgatggcacaatgatggcgttcggtatcaacggtaagcagtctctaacagagctactgatgagccacccaccactagataaacgtattgcggcgctacgcaaccagtaa

SEQ ID NO: 7947 - protein, 287 aa, Vibrio parahaemolyticus
MKRIMLFLATNLAVVLVLSVVLNIVYATTGMQPGSLSGLLVMAAVFGFGGALISLMMSKGMALRSVGGMVIESPRNETEHWLLETVGRQAQQAGIGMPTVAIYDSADINAFATGAKRDDSLVAVSTGLLHNMTRDEAEAVLAHEVSHIANGDMVTMTLMQGVVNTFVIFLSRFIANIVASNDDEEGQGTNMMVYFGVSMVLELVFGFLASFITMWYSRHREFHADAGAARLVGKEKMIAALERLKMSQESKLDGTMMAFGINGKQSLTELLMSHPPLDKRIAALRNQ

SEQ ID NO: 7948 - DNA, 867 bp, Vibrio vulnificus
  CDS (1)..(867): transl_table=11
atgaagcgagtcatgttgtttttaattaccaacttagctgtggttctagtcctcagcgtcgtgttgaacattgtttatgctgtaactggaatgcagccagggagcctctcaggtttattggtgatggctgcggtatttggttttggtggtgcatttatctccttgatgatgtcaaaggggatggcactacgctctgtcggtggaatggtgatcgagagccctcgtaacgagacagagcactggttattggaaacggtgagccgccaagctcaacaagcgggcattggtatgccaaccgttgccatttatgattcgccggacatcaacgcgtttgcaactggggcaaaacgtgacgattcgctggtcgcggtttctacgggtctgttgcacaacatgacgcgtgatgaagcagaagcggtgctggcgcatgaggtgagccatattgccaatggtgacatggtgaccatgacgttgatgcagggtgttgtgaacaccttcgttatcttcttgtctcgctttattgccaacatggtggcttctaataacagcgatgaagaaggtgaaggttcaaacatgatggtgtatttcgcggtttctatcgcgcttgagctggtgtttggtttcctcgcgagcttcatcaccatgtggtatagccgtcatcgtgaattccatgccgatgcgggagccgcccgtctagttggtaaagagaaaatgatagcggctctagagcgtctaaaaatgagccaagaatcaaaactggatggcaccatgatggcatttggtattaacggtaagcaatctctaacagaactgcttatgagccacccgccactcgataagcgtatcgctgcccttcgcaatttctaa

SEQ ID NO: 7949 - protein, 288 aa, Vibrio vulnificus
MKRVMLFLITNLAVVLVLSVVLNIVYAVTGMQPGSLSGLLVMAAVFGFGGAFISLMMSKGMALRSVGGMVIESPRNETEHWLLETVSRQAQQAGIGMPTVAIYDSPDINAFATGAKRDDSLVAVSTGLLHNMTRDEAEAVLAHEVSHIANGDMVTMTLMQGVVNTFVIFLSRFIANMVASNNSDEEGEGSNMMVYFAVSIALELVFGFLASFITMWYSRHREFHADAGAARLVGKEKMIAALERLKMSQESKLDGTMMAFGINGKQSLTELLMSHPPLDKRIAALRNF

SEQ ID NO: 7950 - DNA, 885 bp, Wigglesworthia glossinidia brevipalpis
  CDS (1)..(885): transl_table=11
atgatgcgtattttactttttatactgactaatttatctgtaatgataatatttggaataatattatttattactggaattaaatcatctagctcatttggattaataataatgtctggagtttttggttttggtggatctataatatctttattattatctaagtatatagcaataaattcagtaaatgcaaaaattataaaaaatccaaaaaatgatattgaaaattggttgtttaatacaataaagttgcaatcacaaaaagcaaatattggaactccagatatagctatttacgacgctgaagatattaatgcttttgctacaggcccaaaaaaaaattctgcattaattgcagttagtactggtttgttgaataatatgagcaaaaaagaagcagaagcagttttagctcatgaaattagtcatatttccaacggagatatgataacaatgacacttattcaaggcgtagtaaatacatttgttatattcttatctcgagttatttctaaatttatagtaaatttattttctacaaacaaagaagatgaaaattcatatgaatctgaaaattcatggtcatatttttttatttctatggctttagaagtagtatttggaattttagctagtattattactttttggttttctagaaaacgagaattttacgctgatgcaggatcagctgaaatagttggtaaaaataatatgatagctgctttacaaaaaataaaaaatacttgtgagcctaatgttggaaaagaattattagctttttgcattaatggaaaaaaatcatttaatgaaatttttatgtctcatccacctatagataaaagaatacaagcattaattcaagaaaaatatatgaaaaaataa

SEQ ID NO: 7951 - protein, 294 aa, Wigglesworthia glossinidia brevipalpis
MMRILLFILTNLSVMIIFGIILFITGIKSSSSFGLIIMSGVFGFGGSIISLLLSKYIAINSVNAKIIKNPKNDIENWLFNTIKLQSQKANIGTPDIAIYDAEDINAFATGPKKNSALIAVSTGLLNNMSKKEAEAVLAHEISHISNGDMITMTLIQGVVNTFVIFLSRVISKFIVNLFSTNKEDENSYESENSWSYFFISMALEVVFGILASIITFWFSRKREFYADAGSAEIVGKNNMIAALQKIKNTCEPNVGKELLAFCINGKKSFNEIFMSHPPIDKRIQALIQEKYMKK

SEQ ID NO: 7952 - DNA, 879 bp, Xanthomonas axonopodis pv
  CDS (1)..(879): transl_table=11
atgttcaaccgcattttcctgttcctgctgaccaatcttgcggtgctgatgctcgccggcatcgtcatgtcgttgcttggcgtcaatcccgcgcagatgagtggcctgttggtgatggccgccatcttcggtttcggcggctcgttcatttccttgctgctgtccaagttcatggccaagcgcagcaccggtgcgcaggtcatcaccgagccgcgcacgccgaccgaacgctggttgctggagaccgtgcgccgtcaggcccaggctgccggtatcggcatgccggaagtagcggtctacgagggaccggaaatcaacgcgttcgccaccggcgccaaccgcaacaacgcccttgtggcggtgtccaccggcctgctgcagaacatggaccaggatgaagccgaagcggtgcttggccacgagatcgcccacgttgccaatggcgacatggtcaccatggcactgctgcagggcgtactcaataccttcgtgatcgtgctcgcccgcgtggtcggcggcatcatcgacagcaccttgtcgggcaaccgcgaaggcggtcgtggctttgcgtactacatcatcgtgtttgcgttggagatggtgttcggcctgttcgcgaccatgattgcgatgtggttctcgcgacgccgcgaattccgcgccgatgccggtggcgcgcagctggccggccgcagcaagatgatcgctgcactggagcggctgtcgctcaaccatggccagaacaccttgccctcgcaagtgcaggcgttcggcatctccggcggggtgggcgagggcttgcgccgcctgttcctgagccatccgccgctcacagaacgcatcgctgcgctgcgcgcggccagcggtagcgccaggtaa

SEQ ID NO: 7953 - protein, 292 aa, Xanthomonas axonopodis pv
MFNRIFLFLLTNLAVLMLAGIVMSLLGVNPAQMSGLLVMAAIFGFGGSFISLLLSKFMAKRSTGAQVITEPRTPTERWLLETVRRQAQAAGIGMPEVAVYEGPEINAFATGANRNNALVAVSTGLLQNMDQDEAEAVLGHEIAHVANGDMVTMALLQGVLNTFVIVLARVVGGIIDSTLSGNREGGRGFAYYIIVFALEMVFGLFATMIAMWFSRRREFRADAGGAQLAGRSKMIAALERLSLNHGQNTLPSQVQAFGISGGVGEGLRRLFLSHPPLTERIAALRAASGSAR

SEQ ID NO: 7954 - DNA, 879 bp, Xanthomonas campestris pv
  CDS (1)..(879): transl_table=11
atgttcaaccgtgtcgtcctgtttctcttgaccaactttgcggtgctgatcctggccggcattgtgatgtcggtgctgggcgtgaatccgacacagatgagtggcctgctggtgatggccgccatcttcggcttcggcggctcgttcatttcgttgctgctgtccaagttcatggccaagcgcagcaccggcgcgcaggtgatcaccgagccgcggacgcagaccgagcgctggctggtggacacggtgcgccgccaggcccaggcggccggtatcggcatgccggaagtggccatctacgacggaccggaaatcaacgccttcgccaccggtgccaaccgcaacaatgcgctggtggcggtttccacgggcttgctgcagcacatgcgcgaagacgaggccgaggccgtgctgggccacgagattgcccacattgccaatggcgacatggtcaccatggccttgctgcagggcgtgctgaacaccttcgtgatcgtgctggcgcgcgtggtgggcggcatcatcgacagcgcgctgtctggcaatcgcgacagcgggcgtggatttgcctactacatcattgtgttcgtgctggagatggtgttcggcctgttcgccacgatgatcgcgatgtggttctcgcgccgccgcgagttccgtgccgatgccggtggcgcgcagctggccgggcgcaacaagatgatcgccgcattggagcgcctatcgctcaatcacggccagaacaccttgccctcgcaggtgcaggcgttcggcatttccggcggtgtgggtgagggcttgcgtcgcctgttcctgagccacccgccgctgaccgagcgcattgccgccttgcgtgcgtccaacggtacggcgatgtaa

SEQ ID NO: 7955 - protein, 292 aa, Xanthomonas campestris pv
MFNRVVLFLLTNFAVLILAGIVMSVLGVNPTQMSGLLVMAAIFGFGGSFISLLLSKFMAKRSTGAQVITEPRTQTERWLVDTVRRQAQAAGIGMPEVAIYDGPEINAFATGANRNNALVAVSTGLLQHMREDEAEAVLGHEIAHIANGDMVTMALLQGVLNTFVIVLARVVGGIIDSALSGNRDSGRGFAYYIIVFVLEMVFGLFATMIAMWFSRRREFRADAGGAQLAGRNKMIAALERLSLNHGQNTLPSQVQAFGISGGVGEGLRRLFLSHPPLTERIAALRASNGTAM

SEQ ID NO: 7956 - DNA, 870 bp, Xylella fastidiosa
  CDS (1)..(870): transl_table=11
atgttgactcgtattgtcttgtttgccatcaccaatcttgcagtgttgattttagctagcatcgtgatgtcgttgctgggtgtcaatccgacacaaatgagtgggctgttggttatggccttaatttttggcttcgctggttcgtttatctcgctattgatgtctaaagccatcgctaagcgtacgactggtgcctatgtgattgatcaaccccggaatctaagtgagcgctggttactagacacggtaagtcggcaagccgagattgttggcatcggcaggcctgagatagctatctatgagggagttgagatcaatgcttttgcaactggtgctgatcgcaacaatgcactggtggcagtgtctaccggtttattacagaacatgagtcaggatgaggtcgaggcagtgttggggcatgagatcgcgcatgttgctaacggtgacatggtgactatggcgttgctgcagggcgtgcttaatacatttgtgatcgtactagcgcgggtcgtcggagggtttattgacagtctgctttccggaaatcgtggcggtgctcgtggtgttgcttactacgcgattgtattggtattggaattattgtttggcctttttgcaacgatgattaccatgtggttttcgcgtcgtcgtgagtttcgtgctgatgagggcggcgcatacttggccggtcgtaataaaatgattgctgcattagagcggcttgggattaaccatggtcaaagtacgttaccgacgcaagtgcaagcttttggtatttatggcggtatcggtgaagggctgcgtaagctttttttgagtcatccgcctttgagtgagcgtattgctgcgcttcgtgtggctagacaataa

SEQ ID NO: 7957 - protein, 289 aa, Xylella fastidiosa
MLTRIVLFAITNLAVLILASIVMSLLGVNPTQMSGLLVMALIFGFAGSFISLLMSKAIAKRTTGAYVIDQPRNLSERWLLDTVSRQAEIVGIGRPEIAIYEGVEINAFATGADRNNALVAVSTGLLQNMSQDEVEAVLGHEIAHVANGDMVTMALLQGVLNTFVIVLARVVGGFIDSLLSGNRGGARGVAYYAIVLVLELLFGLFATMITMWFSRRREFRADEGGAYLAGRNKMIAALERLGINHGQSTLPTQVQAFGIYGGIGEGLRKLFLSHPPLSERIAALRVARQ

SEQ ID NO: 7958 - DNA, 870 bp, Xylella fastidiosa
  CDS (1)..(870): transl_table=11
atgttgactcgtattgtcttatttgccatcaccaatattgcagtattgattttagctagcatcgtgatgtcgttgctgggtgtcaatccgacacaaatgagtgggctgttggttatggctttaattttgggttttggtggttcgcttatctcgctattgatgtctaaagccatcgctaagcatacgactggtgcctatgtgattgagcaacccaggaatccaagtcagcgctggttactagacactgtaaggcggcaagccgagattgttggcatcggcatgcctgaggtagctatctatgagggacctgagatcaatgcttttgcaactggtgctgatcgcaacaatgcgctggtggcagtatctaccggtttgttgcagaacatgagtcaggatgaggccgaggcagtgttggggcatgagatcgcacatgttgccaacggtgacatggtgactatggcgttgctgcagggtgtgcttaatacatttgtgatcgtactagcgcgggtcgttggagggtttattgacagtctgctttccggaaatcgtggtggtggtcgtggtgttgcttactacgggattgtattggtattggaattattgtttggtctttttgcgacgataattaccatgtggttttcgcgtcgtcgtgagtttcgtgctgatgagggcggtgcatacttggccggccgcaataaaatgattgctgcattagagcggcttgggattaaccatggccaaagtacgttaccgacgcaggtgcaagcttttggtatttatggtggtatcggtgaagggctgcgtaagcttttcttgagtcatccgcctttgagtgagcgtattgctgcgcttcgtatggctagagagtaa

SEQ ID NO: 7959 - protein, 289 aa, Xylella fastidiosa
MLTRIVLFAITNIAVLILASIVMSLLGVNPTQMSGLLVMALILGFGGSLISLLMSKAIAKHTTGAYVIEQPRNPSQRWLLDTVRRQAEIVGIGMPEVAIYEGPEINAFATGADRNNALVAVSTGLLQNMSQDEAEAVLGHEIAHVANGDMVTMALLQGVLNTFVIVLARVVGGFIDSLLSGNRGGGRGVAYYGIVLVLELLFGLFATIITMWFSRRREFRADEGGAYLAGRNKMIAALERLGINHGQSTLPTQVQAFGIYGGIGEGLRKLFLSHPPLSERIAALRMARE

SEQ ID NO: 7960 - DNA, 882 bp, Yersinia pestis
  CDS (1)..(882): transl_table=11
atgatgcgtatcgctctgttccttctcaccaacctggcggtgatgctagtgttcgggttggtgttaagtctgacgggaattcagtcaagcagtgtgcaggggctgatgattatggcgggtctgtttggtttcggcggcgcatttgtttcgttactgatgtccaaatggatggctttacgttcagtaggcggggaggttattgaacggccacgtaatgaaacagaatattggttgttggaaaccgtacgtcgccagtctcaacaggtagggatcgccatgccacaagtggctatttatcaggcaccggatattaacgcctttgcgacgggggcacgtcgagatgcctctctggtggcggtcagtaccggtttattgcaaaatatgagccgtgatgaggctgaagccgtgattgcccatgaaatcagtcatgtggctaatggtgatatggtaaccatgactttgattcaaggggtcgtgaatacgttcgtgatctttatttcacgactgattgcacaaattgccgctggtttcttatcaggtgaccgagacggtgaaagtaacagccccggtaatccaatggtctattttgccgtatcaatggtactagaattagtgttcggcattcttgccagtattattaccatgtggttttcacgccatcgtgagttccatgcagatgccggttccgcaaaattggttgggcgtgaaaaaatgattgcggcattacaacggctgaaaaccagctatgaaccgcaggaagcgggtagcatgatggctttctgtattaatggtaaatctaaaacgtttagtgaattgtttatgtcacacccgcctttagataaacgtatagaggcattacgttctggtcagtatctgaagtaa

SEQ ID NO: 7961 - protein, 293 aa, Yersinia pestis
MMRIALFLLTNLAVMLVFGLVLSLTGIQSSSVQGLMIMAGLFGFGGAFVSLLMSKWMALRSVGGEVIERPRNETEYWLLETVRRQSQQVGIAMPQVAIYQAPDINAFATGARRDASLVAVSTGLLQNMSRDEAEAVIAHEISHVANGDMVTMTLIQGVVNTFVIFISRLIAQIAAGFLSGDRDGESNSPGNPMVYFAVSMVLELVFGILASIITMWFSRHREFHADAGSAKLVGREKMIAALQRLKTSYEPQEAGSMMAFCINGKSKTFSELFMSHPPLDKRIEALRSGQYLK

SEQ ID NO: 7962 - DNA, 22 bp, Artificial sequence
  primer
atgatgcgaatcgcgctcttcc

SEQ ID NO: 7963 - DNA, 24 bp, Artificial sequence
  primer
ttacttcaggtattcacccgtacg

SEQ ID NO: 7964 - protein, 313 aa, Artificial sequence
  consensus sequence
  Variant (3)..(3): Xaa in position 3 is any amino acid
  Variant (6)..(7): Xaa in position 6 to 7 is any amino acid
  Variant (10)..(10): Xaa in position 10 is any amino acid
  Variant (13)..(23): Xaa in position 13 to 23 is any amino acid
  Variant (24)..(27): Xaa in position 24 to 27 is any or no amino acid
  Variant (29)..(36): Xaa in position 29 to 36 is any amino acid
  Variant (37)..(47): Xaa in position 37 to 47 is any or no amino acid
  Variant (49)..(55): Xaa in position 49 to 55 is any amino acid
  Variant (58)..(58): Xaa in position 58 is any amino acid
  Variant (60)..(62): Xaa in position 60 to 62 is any amino acid
  Variant (65)..(66): Xaa in position 65 to 66 is any amino acid
  Variant (69)..(70): Xaa in position 69 to 70 is any amino acid
  Variant (72)..(75): Xaa in position 72 to 75 is any amino acid
  Variant (77)..(78): Xaa in position 77 to 78 is any amino acid
  Variant (81)..(82): Xaa in position 81 to 82 is any amino acid
  Variant (83)..(84): Xaa in position 83 to 84 is any or no amino acid
  Variant (86)..(89): Xaa in position 86 to 89 is any amino acid
  Variant (91)..(91): Xaa in position 91 is any amino acid
  Variant (94)..(95): Xaa in position 94 to 95 is any amino acid
  Variant (98)..(105): Xaa in position 98 to 105 is any amino acid
  Variant (107)..(107): Xaa in position 107 is any amino acid
  Variant (110)..(110): Xaa in position 110 is any amino acid
  Variant (115)..(118): Xaa in position 115 to 118 is any amino acid
  Variant (119)..(119): Xaa in position 119 is any or no amino acid
  Variant (126)..(131): Xaa in position 126 to 131 is any amino acid
  Variant (141)..(142): Xaa in position 141 to 142 is any amino acid
  Variant (144)..(145): Xaa in position 144 to 145 is any amino acid
  Variant (148)..(148): Xaa in position 148 is any amino acid
  Variant (152)..(153): Xaa in position 152 to 153 is any amino acid
  Variant (156)..(157): Xaa in position 156 to 157 is any amino acid
  Variant (159)..(160): Xaa in position 159 to 160 is any amino acid
  Variant (167)..(168): Xaa in position 167 to 168 is any amino acid
  Variant (170)..(170): Xaa in position 170 is any amino acid
  Variant (174)..(174): Xaa in position 174 is any amino acid
  Variant (179)..(179): Xaa in position 179 is any amino acid
  Variant (181)..(182): Xaa in position 181 to 182 is any amino acid
  Variant (184)..(201): Xaa in position 184 to 201 is any amino acid
  Variant (202)..(213): Xaa in position 202 to 213 is any or no amino acid
  Variant (215)..(224): Xaa in position 215 to 224 is any amino acid
  Variant (227)..(227): Xaa in position 227 is any amino acid
  Variant (231)..(231): Xaa in position 231 is any amino acid
  Variant (233)..(234): Xaa in position 233 to 234 is any amino acid
  Variant (239)..(239): Xaa in position 239 is any amino acid
  Variant (242)..(243): Xaa in position 242 to 243 is any amino acid
  Variant (246)..(246): Xaa in position 246 is any amino acid
  Variant (248)..(248): Xaa in position 248 is any amino acid
  Variant (250)..(250): Xaa in position 250 is any amino acid
  Variant (252)..(252): Xaa in position 252 is any amino acid
  Variant (254)..(256): Xaa in position 254 to 256 is any amino acid
  Variant (257)..(257): Xaa in position 257 is any or no amino acid
  Variant (260)..(260): Xaa in position 260 is any amino acid
  Variant (263)..(263): Xaa in position 263 is any amino acid
  Variant (266)..(277): Xaa in position 266 to 277 is any amino acid
  Variant (278)..(282): Xaa in position 278 to 282 is any or no amino acid
  Variant (285)..(285): Xaa in position 285 is any amino acid
  Variant (287)..(287): Xaa in position 287 is any amino acid
  Variant (289)..(292): Xaa in position 289 to 292 is any amino acid
  Variant (293)..(298): Xaa in position 293 to 298 is any or no amino acid
  Variant (300)..(302): Xaa in position 300 to 302 is any amino acid
  Variant (307)..(308): Xaa in position 307 to 308 is any amino acid
  Variant (311)..(311): Xaa in position 311 is any amino acid
RIXLFXXTNXAVXXXXXXXXXXXXXXXGXXXXXXXXXXXXXXXXXXXLXXXXXXXGFXGXXXSLXXSKXXAXXXXGXXVIXXXXPXXXXEXWLXXTVXXXXXXXXIXMPXVAIYXXXXXNAFATGXXXXXXLVAVSTGLLXXMXXDEXEAVXXHEXXHXXNGDMVTXXLXQGVXNTFVXFXXRXXXXXXXXXXXXXXXXXXXXXXXXXXXXXXYXXXXXXXXXXFGXLASXIXXWFSRXREXXADXGXAXLXGXXXXMIXALXRLXXXXXXXXXXXXXXXXXAFXIXGXXXXXXXXXXLXXXHPPLXXRIXAL

SEQ ID NO: 7965 - protein, 58 aa, Artificial sequence
  protein pattern
  Variant (6)..(7): Xaa in position 6 to 7 is any amino acid
  Variant (8)..(8): Xaa in position 8 is Lys or Arg
  Variant (9)..(9): Xaa in position 9 is Asp, Asn or Ser
  Variant (10)..(10): Xaa in position 10 is any amino acid
  Variant (11)..(11): Xaa in position 11 is Ala or Ser
  Variant (17)..(17): Xaa in position 17 is Ala, Gln, Ser or Thr
  Variant (21)..(22): Xaa in position 21 to 22 is any amino acid
  Variant (23)..(23): Xaa in position 23 is Phe or Met
  Variant (24)..(25): Xaa in position 24 to 25 is any amino acid
  Variant (26)..(26): Xaa in position 26 is Ala, Asp or Glu
  Variant (28)..(28): Xaa in position 28 is Ala, Ile or Val
  Variant (29)..(29): Xaa in position 29 is any amino acid
  Variant (30)..(30): Xaa in position 30 is Ala or Gly
  Variant (32)..(32): Xaa in position 32 is Ile, Leu, Met or Val
  Variant (33)..(33): Xaa in position 33 is Ala or Gly
  Variant (36)..(36): Xaa in position 36 is Ile, Met or Val
  Variant (37)..(37): Xaa in position 37 is Ala, Gly or Ser
  Variant (39)..(39): Xaa in position 39 is Ile or Val
  Variant (40)..(40): Xaa in position 40 is any amino acid
  Variant (45)..(45): Xaa in position 45 is Ile or Val
  Variant (47)..(47): Xaa in position 47 is Leu or Met
  Variant (48)..(48): Xaa in position 48 is Ala, Gly, Ser or Thr
  Variant (50)..(50): Xaa in position 50 is Ile, Leu, Met or Val
  Variant (53)..(53): Xaa in position 53 is Ile or Val
  Variant (54)..(54): Xaa in position 54 is Leu or Val
  Variant (56)..(56): Xaa in position 56 is Ala or Thr
AFATGXXXXXXLVAVSXGLLXXXXXXEXXXVXXHEXXHXXNGDMXTXXLXQGXXNXFV

SEQ ID NO: 7966 - protein, 26 aa, Artificial sequence
  protein pattern
  Variant (2)..(2): Xaa in position 2 is any amino acid
  Variant (3)..(3): Xaa in position 3 is any or no amino acid
  Variant (5)..(6): Xaa in position 5 to 6 is any amino acid
  Variant (7)..(7): Xaa in position 7 is any or no amino acid
  Variant (9)..(9): Xaa in position 9 is Phe or Tyr
  Variant (12)..(12): Xaa in position 12 is any amino acid
  Variant (15)..(15): Xaa in position 15 is Phe or Tyr
  Variant (16)..(16): Xaa in position 16 is any amino acid
  Variant (19)..(19): Xaa in position 19 is any amino acid
  Variant (20)..(21): Xaa in position 20 to 21 is Ala, Gly or Ser
  Variant (23)..(23): Xaa in position 23 is any amino acid
  Variant (24)..(24): Xaa in position 24 is Ile or Leu
  Variant (25)..(25): Xaa in position 25 is any amino acid
  Variant (26)..(26): Xaa in position 26 is Asp, Gly or Ser
AXXIXXXWXSRXREXXADXXXAXXXX

SEQ ID NO: 7967 - protein, 27 aa, Artificial sequence
  protein pattern
  Variant (3)..(3): Xaa in position 3 is Ile, Leu, Met or Val
  Variant (4)..(4): Xaa in position 4 is any amino acid
  Variant (7)..(9): Xaa in position 7 to 9 is any amino acid
  Variant (10)..(10): Xaa in position 10 is Ala or Ser
  Variant (11)..(13): Xaa in position 11 to 13 is any amino acid
  Variant (14)..(14): Xaa in position 14 is Asp, Gly or Asn
  Variant (15)..(15): Xaa in position 15 is Ile or Leu
  Variant (16)..(16): Xaa in position 16 is any amino acid
  Variant (19)..(19): Xaa in position 19 is Asp, Glu, Gln or Thr
  Variant (21)..(21): Xaa in position 21 is Ala or Gly
  Variant (22)..(22): Xaa in position 22 is Ile or Val
  Variant (23)..(23): Xaa in position 23 is Phe or Tyr
  Variant (24)..(24): Xaa in position 24 is any amino acid
  Variant (25)..(25): Xaa in position 25 is Ala, Gly or Ser
  Variant (26)..(26): Xaa in position 26 is any amino acid
  Variant (27)..(27): Xaa in position 27 is Asp, Glu, Pro, Gln or Ser
WLXXTVXXXXXXXXXXMPXVXXXXXXX

SEQ ID NO: 7968 - protein, 37 aa, Artificial sequence
  protein pattern
  Variant (2)..(2): Xaa in position 2 is any amino acid
  Variant (3)..(7): Xaa in position 3 to 7 is any or no amino acid
  Variant (10)..(10): Xaa in position 10 is Ala, Gly, Ser or Thr
  Variant (12)..(12): Xaa in position 12 is Ala or Ser
  Variant (13)..(13): Xaa in position 13 is Phe, Ile or Leu
  Variant (14)..(14): Xaa in position 14 is Phe, Ile, Leu or Val
  Variant (17)..(17): Xaa in position 17 is any amino acid
  Variant (18)..(18): Xaa in position 18 is Ile, Leu or Met
  Variant (21)..(22): Xaa in position 21 to 22 is any amino acid
  Variant (24)..(27): Xaa in position 24 to 27 is any amino acid
  Variant (28)..(28): Xaa in position 28 is Asp, Gly, Asn or Ser
  Variant (29)..(29): Xaa in position 29 is Ala, Cys, Gly, Thr or Val
  Variant (30)..(30): Xaa in position 30 is any amino acid
  Variant (31)..(31): Xaa in position 31 is Ile or Val
  Variant (33)..(34): Xaa in position 33 to 34 is any amino acid
  Variant (36)..(36): Xaa in position 36 is any amino acid
  Variant (37)..(37): Xaa in position 37 is Asp, Asn, Ser or Thr
LXXXXXXGFXGXXXSLXXSKXXAXXXXXXXXIXXPXX

SEQ ID NO: 7969 - protein, 16 aa, Artificial sequence
  protein pattern
  Variant (2)..(2): Xaa in position 2 is Phe, Leu or Met
  Variant (3)..(3): Xaa in position 3 is any amino acid
  Variant (4)..(4): Xaa in position 4 is Ser or Thr
  Variant (7)..(7): Xaa in position 7 is Pro or Ser
  Variant (9)..(9): Xaa in position 9 is Asp, Glu or Ser
  Variant (10)..(10): Xaa in position 10 is any amino acid
  Variant (13)..(13): Xaa in position 13 is any or no amino acid
  Variant (15)..(15): Xaa in position 15 is any or no amino acid
LXXXHPXLXXRIXAXL

SEQ ID NO: 7970 - protein, 15 aa, Artificial sequence
  protein pattern
  Variant (2)..(2): Xaa in position 2 is Ile or Val
  Variant (3)..(3): Xaa in position 3 is any amino acid
  Variant (6)..(7): Xaa in position 6 to 7 is Ala, Ile or Leu
  Variant (10)..(12): Xaa in position 10 to 12 is any or no amino acid
  Variant (14)..(14): Xaa in position 14 is any amino acid
  Variant (15)..(15): Xaa in position 15 is Ile, Leu or Val
RXXLFXXTNXXXLXX

SEQ ID NO: 7971 - DNA, 663 bp, Escherichia coli K12
  CDS (1)..(663): transl_table=11
atgaccattacgtctctggatggctatcgctggctgaagaacgatattattcgcggtaattttcaaccggatgaaaaattacgaatgagtttgctgacatcgcgttatgcacttggcgttgggccgttacgggaagctctttcgcaactggtggcggaacggctggtcacggtggtgaatcaaaaagggtatcgggtggcgtctatgtcagagcaggagctgctcgatattttcgacgcccgcgccaatatggaagcgatgttagtgagtctggcgattgcccgcggtggcgatgagtgggaggcagacgttctcgcaaaagcgcatctgctgagtaagcttgaggcctgtgacgccagcgagaaaatgcttgatgagtgggatctgcgtcatcaggcgtttcatacggcaattgtggcgggctgtggttctcactatttgctgcaaatgcgtgaacggttgtttgatctggcggcgcgttatcgatttatctggctgcggcgaacggtgctttcggtggaaatgctggaggataaacacgatcagcaccagaccctgactgcggcggtactggcgcgagataccgcgcgcgccagtgagttaatgcgccagcatttactgacgccaattcccattatccagcaggcgatggctggcaattaa

SEQ ID NO: 7972 - protein, 220 aa, Escherichia coli K12
MTITSLDGYRWLKNDIIRGNFQPDEKLRMSLLTSRYALGVGPLREALSQLVAERLVTVVNQKGYRVASMSEQELLDIFDARANMEAMLVSLAIARGGDEWEADVLAKAHLLSKLEACDASEKMLDEWDLRHQAFHTAIVAGCGSHYLLQMRERLFDLAARYRFIWLRRTVLSVEMLEDKHDQHQTLTAAVLARDTARASELMRQHLLTPIPIIQQAMAGN

SEQ ID NO: 7973 - DNA, 654 bp, Photobacterium profundum
  CDS (1)..(654)
atgtctagccctactttgactaataaaattatggaagttatacgacaagatattctgcttggagagctttctccgggccaaaagcttgtcgttgccgacttaaaagcacgctataacgtcggagcctcacccattcgcgaagcgctggttcaattatcatggaaaaaatacgtcaaattcgcccctcaaaaaggctgctgggttgcccccatttcggtagatgaacttgaagatctgtttgagactaatctgattttatctcgcgtattattagaacgagcaatcatcaatggcgacgaggcatgggaactcaatattctcactacctatcacaagttaagcaaaataaaccctgcggcttcagacgttgattttacggaatgggaagatcggcacagtgaattccacctcgctttacttgcgggcagccaatcaccagtaatgctggaactataccgtgaagtttatgagcaaattgaacgttaccgtcacgtctgggtaagccgcaatcgccactatgaagaacgttatcatgataatggtgaacatgacgcgatgatgaaagctgtgctagggcgagatacacaacgggcactcgatttacttaataatcactttaagcgagcagtcgaaatcattaaagcatacatctaa

SEQ ID NO: 7974 - protein, 217 aa, Photobacterium profundum
MSSPTLTNKIMEVIRQDILLGELSPGQKLVVADLKARYNVGASPIREALVQLSWKKYVKFAPQKGCWVAPISVDELEDLFETNLILSRVLLERAIINGDEAWELNILTTYHKLSKINPAASDVDFTEWEDRHSEFHLALLAGSQSPVMLELYREVYEQIERYRHVWVSRNRHYEERYHDNGEHDAMMKAVLGRDTQRALDLLNNHFKRAVEIIKAYI

SEQ ID NO: 7975 - DNA, 780 bp, Mesorhizobium loti MAFF303099
  CDS (1)..(780): transl_table=11
atggcgatgcaggatcagaacaattccacgaagaccgaggcggcctatcagctgctgcggcgcgatatcctgaccacccgcctcatgccgggcgcgccgctcaagctgagcgcgctgcgcggcacatacggcgtcggctggacgccgctgcgtgaagccttgtcccgacttgaagccgaacgcctggtcaccgccatcagcaatcgcggctttgccgtcgctcccgtgtcgcgcgccgagctcgaggacctggcgcgcgcaaggatggttgtcgaaatgccgctgttcctggaatcgatcgcgaacggcggcagggaatgggaggacgcggtcgtcaccgctcattaccggctctcccgctgcaagaccgcggtcgaagacccttccgatgcggccgtcgacaaatgggacgagagccacgaggccttccatgcggcgttgctgagcgcggcgacgtcgaactggctgttgcgcttccgctcgacgatcgccgatcagctgcggcggcatcaccgttttctcggcctggcgcccacattacgagcggcggccggcctcaaggacggctatggcgaggcaatggacgctttgcgcgaggcgatcgccatcgagcatcacaccgagatcatggaagcggcgctcgatcgcgacgtcgagcgggcaaaggcgctgatgacggcgcatatcggctacacgctgcacgtctatgtgcacagcgaagacaattgcgccaatccctacaccgcgcgcgccggcagtctgaaagcggtttccggatga

SEQ ID NO: 7976 - protein, 259 aa, Mesorhizobium loti MAFF303099
MAMQDQNNSTKTEAAYQLLRRDILTTRLMPGAPLKLSALRGTYGVGWTPLREALSRLEAERLVTAISNRGFAVAPVSRAELEDLARARMVVEMPLFLESIANGGREWEDAVVTAHYRLSRCKTAVEDPSDAAVDKWDESHEAFHAALLSAATSNWLLRFRSTIADQLRRHHRFLGLAPTLRAAAGLKDGYGEAMDALREAIAIEHHTEIMEAALDRDVERAKALMTAHIGYTLHVYVHSEDNCANPYTARAGSLKAVSG

SEQ ID NO: 7977 - DNA, 678 bp, Salmonella typhimurium LT2
  CDS (1)..(678): transl_table=11
atgaccgccctttcccaaccgacggccatagatggctatcgctggcttaaaaatgacattattcgcggcacttatcagccggatgagaaactgcggatgagtttattaaccgcccgctatgcgctcggcgtagggccgctgcgtgaggcgctgtcgcaactggtggcggaacggctggtcaccgtggtgaatcaaaaaggctatcgcgtggcatccatgtcagaggcggaactcctcgatatttttgacgcgcgcgccaatatggaagcgatgctggtacgcctggcgattgaacgcggcgatgatgcgtgggaggcggagatcctggcgcgagcgcatatgctcagcaaactggaagccagcgatgccagtgaacatatgctcgatgaatgggatcagcgccaccaggcgttccattccgccattgtcgccgggtgcggctcccactatctgctacagatgcgcgaacgcttatttgacctggcggcccgctaccgctttatttggttacgtgaaaccgttctgtccgtcgagatgctggaagataaacatatccagcatcacacgctaaccgaagcgatactggcgcgcgaggcggcacgcgccagcgaattaatgcgtcagcatttgctgacgccgattcccattattcgccaggcgatggcagggaaaatgtag

SEQ ID NO: 7978 - protein, 225 aa, Salmonella typhimurium LT2
MTALSQPTAIDGYRWLKNDIIRGTYQPDEKLRMSLLTARYALGVGPLREALSQLVAERLVTVVNQKGYRVASMSEAELLDIFDARANMEAMLVRLAIERGDDAWEAEILARAHMLSKLEASDASEHMLDEWDQRHQAFHSAIVAGCGSHYLLQMRERLFDLAARYRFIWLRETVLSVEMLEDKHIQHHTLTEAILAREAARASELMRQHLLTPIPIIRQAMAGKM

SEQ ID NO: 7979 - DNA, 696 bp, Pseudomonas putida KT2440
  CDS (1)..(696): transl_table=11
ttggaagcgctcgccccccgacaaaactcagcattcagcgggtatgagaggctcaagaaggacatcatccgcggggtgttcaagcccggtgaaaagctgttgatgagcaccctcaaggaacgctacgacctgggtgtgggcccgctgcgcgaagcactgtcgcaactggtggccgagcacctggtcaacgcgatcagccagaaaggctaccgggtagcgcccatgtcgctggatgagatgaacgacatctacgacgcccgcgccaacctggaagcgatgatcattgccttggccatcgagcgcggcgatgacgcctgggaggcatcggtgctggcccactcgcatacattggccaaggtggtggaagtaaaaacccgcgagcagcggctggatgtgtgggacgagcggcacaaggcgttccatactgccattgcctcgggctgcggctccaagcacctgctgcaggcacgcacctacctgttcgaccaggccgagcgctaccgccacctgtggctgacgcagacggtgttttccgaagaggcgctggcgctcaagcgccaggagcatgcggcactggtcgaggtgatcctcgcccgggatgccaaaaccgccagcgccatgatgcgctcgcacctgatgacaccggtaccgatcattgcgcagatcatgcacgccgaaggcatcggtgcccgctag

SEQ ID NO: 7980 - protein, 231 aa, Pseudomonas putida KT2440
MEALAPRQNSAFSGYERLKKDIIRGVFKPGEKLLMSTLKERYDLGVGPLREALSQLVAEHLVNAISQKGYRVAPMSLDEMNDIYDARANLEAMIIALAIERGDDAWEASVLAHSHTLAKVVEVKTREQRLDVWDERHKAFHTAIASGCGSKHLLQARTYLFDQAERYRHLWLTQTVFSEEALALKRQEHAALVEVILARDAKTASAMMRSHLMTPVPIIAQIMHAEGIGAR

SEQ ID NO: 7981 - DNA, 774 bp, Bradyrhizobium japonicum USDA 110
  CDS (1)..(774): transl_table=11
atgatactgactggcagcagagggatggcaggacggcgtcggatgcgtgagagggtcaagccagcaggtgaaacacgcgcggctgacgtgctccaccggatgcgcgcagacatcatcagttgcacgctcaagcccggcgccaagctgcggttcgaggcgctacgggacatctacgcggtgagcttttcgacgctgagggaggcgctgtcgcgcctcgtggccgaagggctcgtcatcgcggaggatcagcgcggcttcgtcgtcgcgccggtttcgatcgacgatctcaacgacctcacctatgtccgcgtgctcatcgagcgcgaatgcgttgcgctcgcgatcaagaacggcgacgacgcctgggaggcggacatcatcggcgcattccaccggatggatcgcctgcagaaccggctcggctccaattattatctctcggaagaatggggcaagctccacggcgattttcatttttcgcttgttgccgcgtgcggctcgcccaacctcctggagatccgccagaagctgttcgaacgcgcgcaccgctaccgccgcatgtcctcgcaattccggaccaaatggcgcgccaaggatgtcgagcacaagatgatcatggattcggtcgtcgcgcgcgatgccgcgaaggccgaggagctgatcgagcgccatatccgcgagacgaccgacaacgtgatcaagcacgcaggccacctcttcgtcacatccgacgaggaacgcccccgccgcacaagccgggtcgccgctgaatag

SEQ ID NO: 7982 - protein, 257 aa, Bradyrhizobium japonicum USDA 110
MILTGSRGMAGRRRMRERVKPAGETRAADVLHRMRADIISCTLKPGAKLRFEALRDIYAVSFSTLREALSRLVAEGLVIAEDQRGFVVAPVSIDDLNDLTYVRVLIERECVALAIKNGDDAWEADIIGAFHRMDRLQNRLGSNYYLSEEWGKLHGDFHFSLVAACGSPNLLEIRQKLFERAHRYRRMSSQFRTKWRAKDVEHKMIMDSVVARDAAKAEELIERHIRETTDNVIKHAGHLFVTSDEERPRRTSRVAAE

SEQ ID NO: 7983 - DNA, 711 bp, Rhodopseudomonas palustris CGA009
  CDS (1)..(711): transl_table=11
atgatgaaactcgccgctgccccagacccggagatcgccaccagcgacacgctcagcgagcgcgcggccaacctgctcgagcgcgatatcgtctcgggcgagctgccgccgggatcgaagctcggcatcgtcgagctggcgcgccgctacgagatcggcgccacgccgctgcgcgaggggctgtcgcggctgacgtcgcgcgggctgatcgtcgcgatcgggcagcgcggcttccgcgtcgccgaagtcagccgcgacgatctgctcgacatcacgcggatgcggacggtgatcgaacgcgaggcgctacggctcgcgatcgacaatggcggcgacgcctgggaggccgggatcgtcgcggcgttgcaccagatgcagcgctacgtggagcgcaacgccaacgatttccgagaaggcgcgccggagttcgatcggctgcacaaggcgtttcacaccagcctgcttgcagcctgcggctctcctcgcctgctggcagcgcattcggacctgtacgatcaggcctatcgctatcggcgggtgatgatgcgcagcattgaaagcggccggtacttcatcgccgcgcatcgcgaattggccgacctcgtgctcgcacgcgacgccgaggccgcagagaccaagctcgaccagcatctgcgcgcgacgctgactaccgtctatccgccgggcaagagccagccgccatcccgctga

SEQ ID NO: 7984 - protein, 236 aa, Rhodopseudomonas palustris CGA009
MMKLAAAPDPEIATSDTLSERAANLLERDIVSGELPPGSKLGIVELARRYEIGATPLREGLSRLTSRGLIVAIGQRGFRVAEVSRDDLLDITRMRTVIEREALRLAIDNGGDAWEAGIVAALHQMQRYVERNANDFREGAPEFDRLHKAFHTSLLAACGSPRLLAAHSDLYDQAYRYRRVMMRSIESGRYFIAAHRELADLVLARDAEAAETKLDQHLRATLTTVYPPGKSQPPSR

SEQ ID NO: 7985 - DNA, 708 bp, Dechloromonas aromatica RCB
  CDS (1)..(708): transl_table=11
atgaacaacaatgtcgtcgccgaaggcctggccgaacccaagaccctggtcgaatccgcctatcgcgccctgcgccgggacatcatcgaaggcaacctcgcccccggtgaaaagctccgcgtcgagcacctcaaggacaactacggggtcggcgccggcacactgcgcgaggcgctttccctgctcatctccgacgccctggtcgtcagccagggacagcgcggtttccgcgtcgccccggtctcgctggccgacttcgaagacatcgcccagacccgcgtgatgctcgaatgcgaggccctgcgccagtcgatcgcgatgggcgacgatgcctgggaagccgacctcgttgctgcctttcaccgcctggccaaggccgaggaaaagcggatcggcagcgaagcccgcgaggaatgggaagagcgcaaccggatctttcacgaggttctgatcgcggcctgcccctcccgctggctcaaacatttcctgtccatcctctatttccaggccgaacgctatcggcgcctgtcgctctacctgcaaccgattccccgcgatattcatgtcgaacatgaggccttgctccacgccgccatcaaccgcgaggcggacaaggctgcagccatcctgtccgagcacatcctgctgactttccgctcggtgcaggccattccggctgaacaactgaacgccaaactgcgggcatga

SEQ ID NO: 7986 - protein, 235 aa, Dechloromonas aromatica RCB
MNNNVVAEGLAEPKTLVESAYRALRRDIIEGNLAPGEKLRVEHLKDNYGVGAGTLREALSLLISDALVVSQGQRGFRVAPVSLADFEDIAQTRVMLECEALRQSIAMGDDAWEADLVAAFHRLAKAEEKRIGSEAREEWEERNRIFHEVLIAACPSRWLKHFLSILYFQAERYRRLSLYLQPIPRDIHVEHEALLHAAINREADKAAAILSEHILLTFRSVQAIPAEQLNAKLRA

SEQ ID NO: 7987 - DNA, 783 bp, Ralstonia eutropha JMP134
  CDS (1)..(783): transl_table=11
gtgccagccaaacccgccaagcccgtcaccattgatactgccgtccaggagtcgccggacctcggcgggcgcacgtgggcatccgtcctcgaacaggcggttcgcgaagacatcatcagcgggcgtctgccggcgggcagcaaactgcgcctgaaggaactggccgagcattaccaggccggtgtgatcccactgcgcgaggccctgtcccggttgtgcacgaccggctttgtactggcaatcgaccagaagggcttccgggtggcggagctgtcccccgaggaattgctcgacgtcacgcgcgtgcgccagcagatagaatgccaggctctgcgcgacgccatcaggctcgcggacatcgcttgggaaagcgatgtggtagcggcgcaccatcgcctgacgcgcatcccgatggtgttgcgcgaccaacgcggcgcgctgaacccagagtgggaagccgcacatgtggcttttcacgatgcgctgatctggggctgccactccccatggctgcggcggttctcggccgtactgcgcgaccagacggcgcgctatcggttcctctcgctcgccgtacccaaggccgaacggagccgggacgtggcggcggaacacgaggccatcgtcagcgccgtggtcgcacgcaacgctgaccgcgcctgcaaactgctgtcggaccatttccagcacaccaccgacctggtgctccagtaccttgcccggcagaaaggcggcgccgcgccgacgcgcaaacgcagggcagcggccgaagcccctgtctga

SEQ ID NO: 7988 - protein, 260 aa, Ralstonia eutropha JMP134
MPAKPAKPVTIDTAVQESPDLGGRTWASVLEQAVREDIISGRLPAGSKLRLKELAEHYQAGVIPLREALSRLCTTGFVLAIDQKGFRVAELSPEELLDVTRVRQQIECQALRDAIRLADIAWESDVVAAHHRLTRIPMVLRDQRGALNPEWEAAHVAFHDALIWGCHSPWLRRFSAVLRDQTARYRFLSLAVPKAERSRDVAAEHEAIVSAVVARNADRACKLLSDHFQHTTDLVLQYLARQKGGAAPTRKRRAAAEAPV

SEQ ID NO: 7989 - DNA, 741 bp, Rhodobacter sphaeroides 2.4.1
  CDS (1)..(741): transl_table=11
atgacgagtgctgcggagaaggcgccgcccgaagcgcggaacctgtcggaacaggcccacgaccggatccgccgcgacatcctgaggggcgagctctttcccggcgtgaagctccatatcgagggcatctcggagcgctacggcatcggcatcgccccggtgcgcgaggcgctgaaccgcctctcctcggaagggctcgtcgagcgcaagagccagcgcggcttcttcgtggcgggcatctcgatggcggggctcgaagagctggtgaagacccggatctggctcgagaccctggccctgcgcgagtccatcgcgcagggcgacgtcgcctgggaggagaatctcgtgctcgcctatcaccggctggcacggaccaatcggcgggtgcctgacgcgtccgggcgcgatctggccgaggagtgggagcatctgcacaaggccttccacatgctgctcctcgagcggtgcggctcgagctggctgctcggcttctgctcgaccatgatggatcaggcggtgcgctaccgcagcctgtcgatgaaggtccaccccaacgtccagcggcgcgagggcgcggctgcggaacatgcggccattctcgcagcggccatcgaccgcaagacggatctggcctgcgagctgctgaccgaacattaccgggccaccctcgaggcgctgcggggcgtcgtcggcggcgacgagaccgcgcctgccgccgggacgggccgcgaggccggctga

SEQ ID NO: 7990 - protein, 246 aa, Rhodobacter sphaeroides 2.4.1
MTSAAEKAPPEARNLSEQAHDRIRRDILRGELFPGVKLHIEGISERYGIGIAPVREALNRLSSEGLVERKSQRGFFVAGISMAGLEELVKTRIWLETLALRESIAQGDVAWEENLVLAYHRLARTNRRVPDASGRDLAEEWEHLHKAFHMLLLERCGSSWLLGFCSTMMDQAVRYRSLSMKVHPNVQRREGAAAEHAAILAAAIDRKTDLACELLTEHYRATLEALRGVVGGDETAPAAGTGREAG

SEQ ID NO: 7991 - DNA, 708 bp, Burkholderia sp. 383
  CDS (1)..(708): transl_table=11
atggtgcaaagagcgcaaacaccgcaacgcgcgggggccgatacgccgaaagccacactttcggagcaggcctacgaatacctgcagaacgacctgctatccggtgcctttccgccgggagaaaagctcaagccgcagacgcttcaggaacgctatggcgtcggcatcagccccattcgcgaagcgctgatgctgctcagttgcgacgggctcgtgacgaacgagggccagcgcggcttcagggttgccgaagcgtcacgggacgatctgctcgacatcctcgaggcgcgcaagaaaatcgaaggcgaactgcttgtcgacgcgatcaagcatggcgacgaggaatggggtgcgcagatcaccgcagccttctacaagctggtccatacgccgctacccgcccccgacgacatccaggcggcaaatcgctgggaactcgcccatcgacgcttccacgcatccctgatcagcgccgcccgctcagcgtggctacgtcgcatcgacgaacaactcgtgcggcattccgagcgctaccgccgcatgcgcttcaccgcaccgcttccaaaggaagcgctcgctcgcgacatcgtcagggaacaccaggagttgatggaagccgtactggatcgcgacgcaccgcgcgcgcgcaagctgctgctcgcgcacatcgacgaaaccgcacaggttgtcgcgcaactgctgccctga

SEQ ID NO: 7992 - protein, 235 aa, Burkholderia sp. 383
MVQRAQTPQRAGADTPKATLSEQAYEYLQNDLLSGAFPPGEKLKPQTLQERYGVGISPIREALMLLSCDGLVTNEGQRGFRVAEASRDDLLDILEARKKIEGELLVDAIKHGDEEWGAQITAAFYKLVHTPLPAPDDIQAANRWELAHRRFHASLISAARSAWLRRIDEQLVRHSERYRRMRFTAPLPKEALARDIVREHQELMEAVLDRDAPRARKLLLAHIDETAQVVAQLLP

SEQ ID NO: 7993 - DNA, 666 bp, Silicibacter sp. TM1040
  CDS (1)..(666): transl_table=11
atgctgttttctcgccgctcttccgacaatgaaacggttgttgccatgctcgcttcggcgatccggcgcgacatttcttttggcgtgctgcgcccggatgagaaactgaagattgaagccctgcggcaacgctatggtggctccaaccactccatgcgcgaaacgcttcggatgctggtggcagaggggatggtggaggccaccaaccaacgcggtttccgcgtcacctctgcaaccgaagacgatctcgccgatatcctgatgatgcggcttgaggtggaaaaattggcgctggagcgcgcgatcgcgcatggcggcgtcgattgggaagcacagatcgtagcggcccaccatcagatgatgcgcgcagaaaaccagctcaaccaggctccggatgacgcgaccgctcttggctgggacgaagcttgtcggggctacatcatggcgttggtatcggcgtgcggctctccgaggctgatcgagatgaccgggcggttttatgaccaatcccgccggttccgtttggcgcggctgcgggaagggcggatcgactttgacgcgcgccgggaccggcaagaggccttgaaagcggccgtgatggagcgtgacaccaaacgcgcgctgcggctgcttgaggaagacacacaggcggatttgagcggctga

SEQ ID NO: 7994 - protein, 221 aa, Silicibacter sp. TM1040
MLFSRRSSDNETVVAMLASAIRRDISFGVLRPDEKLKIEALRQRYGGSNHSMRETLRMLVAEGMVEATNQRGFRVTSATEDDLADILMMRLEVEKLALERAIAHGGVDWEAQIVAAHHQMMRAENQLNQAPDDATALGWDEACRGYIMALVSACGSPRLIEMTGRFYDQSRRFRLARLREGRIDFDARRDRQEALKAAVMERDTKRALRLLEEDTQADLSG

SEQ ID NO: 7995 - DNA, 738 bp, Mesorhizobium sp. BNC1
  CDS (1)..(738): transl_table=11
atgcacactgtttcgctaaggaccgatcaactatcggaacaggcctatcgcctgatccggaaagctatcttgcggggcgacattgagcctggctcacgcttgaaaatagatatgcttcagcgccagttttcgttctccagcagcccattgcgtgaagctctgaaccggctcgtctccgaagatcttgttgagattgataatcgccgcggctttcgggcggcggccgtttcgctgcgagatatgaaagacctgacggccttccgcctgaacatagagccgatttcgttacgcgagtcgatcgagcatggcgacgacgaatgggaggcgcaggtgcttgccgcctatcatcgccttgaccttctggaggcgcgagaggatgagcaggcgccctacagcgacgaatgggctgagcggcatagagccttccacgcagcacttatcgccgcctgtccttcctcccggcagatttcggtctgcctgaaccttttcgatcatgtagagcgctaccggcggctttcgatctgttggcgaaaatccaaacgcgaccgttcaaacgaacacagggagatcatggatgccgccttggcgcgtgatcatgaaagagcagtctcgaagctgacggagcatatcgagcggacaacgctgcatgtggcgaggatgctaaaggcgctggaaacagaaaaaactgccacaggacaggagcaggtcgaaggtctcggtcgggcaatgaaggcctga

SEQ ID NO: 7996 - protein, 245 aa, Mesorhizobium sp. BNC1
MHTVSLRTDQLSEQAYRLIRKAILRGDIEPGSRLKIDMLQRQFSFSSSPLREALNRLVSEDLVEIDNRRGFRAAAVSLRDMKDLTAFRLNIEPISLRESIEHGDDEWEAQVLAAYHRLDLLEAREDEQAPYSDEWAERHRAFHAALIAACPSSRQISVCLNLFDHVERYRRLSICWRKSKRDRSNEHREIMDAALARDHERAVSKLTEHIERTTLHVARMLKALETEKTATGQEQVEGLGRAMKA

SEQ ID NO: 7997 - DNA, 714 bp, Silicibacter sp. TM1040
  CDS (1)..(714): transl_table=11
atgtcacagagtcctaaatatccaacattttcaatttccagggatgaaatgctgttttctcgccgctcttccgacaatgaaacggttgttgccatgctcgcttcggcgatccggcgcgacatttcttttggcgtgctgcgcccggatgagaaactgaagattgaagccctgcggcaacgctatggtggctccaaccactccatgcgcgaaacgcttcggatgctggtggcagaggggatggtggaggccaccaaccaacgcggtttccgcgtcacctctgcaaccgaagacgatctcgccgatatcctgatgatgcggcttgaggtggaaaaattggcgctggagcgcgcgatcgcgcatggcggcgtcgattgggaagcacagatcgtagcggcccaccatcagatgatgcgcgcagaaaaccagctcaaccaggctccggatgacgcgaccgctcttggctgggacgaagcttgtcggggctacatcatggcgttggtatcggcgtgcggctctccgaggctgatcgagatgaccgggcggttttatgaccaatcccgccggttccgtttggcgcggctgcgggaagggcggatcgactttgacgcgcgccgggaccggcaagaggccttgaaagcggccgtgatggagcgtgacaccaaacgcgcgctgcggctgcttgaggaagacacacaggcggatttgagcggctga

SEQ ID NO: 7998 - protein, 237 aa, Silicibacter sp. TM1040
MSQSPKYPTFSISRDEMLFSRRSSDNETVVAMLASAIRRDISFGVLRPDEKLKIEALRQRYGGSNHSMRETLRMLVAEGMVEATNQRGFRVTSATEDDLADILMMRLEVEKLALERAIAHGGVDWEAQIVAAHHQMMRAENQLNQAPDDATALGWDEACRGYIMALVSACGSPRLIEMTGRFYDQSRRFRLARLREGRIDFDARRDRQEALKAAVMERDTKRALRLLEEDTQADLSG

SEQ ID NO: 7999 - DNA, 771 bp, Sulfitobacter sp. EE-36
  CDS (1)..(771): transl_table=11
atgacacttcggcaatcgaaatcggacattctattcgaccggctgcgccatgatatcctgtcactggatctgcaaccgggcatggcgctgcgcctaccggccctgtcggaacgctatgccatcggcctgacgccgctgcgcgaatgtctgaaccggctggcggctgaacagcttgtcgtgcccgagcataacaagggcttttgcgtcaccccgctgacccgtgccgatcttctggacctggaacgcagccgcgatgccatcgaaggcgcgatgctggcccattccgtcagccacgccgatgacgcgtgggaggcaggggtgatcggtgcctatcagcacctgtcgcaaacccccgtgccttcggtgatccataatgacgaggcgctggcccaatggacgcggcggcatctggcctttcatcaggcattggtggcgggggcgcggtcagaatggatggcgcggtttgcggggcagttgcaggaccagttggggcgctaccaccgttttattcaggcgggcctgcgcgatctgacccaaagcgcgcccccgctggcggccaaagcggcagaggtattctctgccggtatggcgctagagccgcatcgcgcgctctatcaggcagcgcttgatcatgatccggcggcggcgcttgcggcctttcgccatcacaccggcctgagcatcgccgccttcgaggagctttcgacgctgatgccggcccattcaccctttgcaagaaccctcggcccccaatcggagcaccccgcatga

SEQ ID NO: 8000 - protein, 256 aa, Sulfitobacter sp. EE-36
MTLRQSKSDILFDRLRHDILSLDLQPGMALRLPALSERYAIGLTPLRECLNRLAAEQLVVPEHNKGFCVTPLTRADLLDLERSRDAIEGAMLAHSVSHADDAWEAGVIGAYQHLSQTPVPSVIHNDEALAQWTRRHLAFHQALVAGARSEWMARFAGQLQDQLGRYHRFIQAGLRDLTQSAPPLAAKAAEVFSAGMALEPHRALYQAALDHDPAAALAAFRHHTGLSIAAFEELSTLMPAHSPFARTLGPQSEHPA

SEQ ID NO: 8001 - DNA, 672 bp, Oceanicola batsensis HTCC2597
  CDS (1)..(672): transl_table=11
atgatcttcagccgcggagagagcgaggacgcaaccgtcgtggccatgctggcctcggccctgaggcgcgatatctcgttcggcgtgctgctccccgaccagaaactcaggatcaatgcgctgcgacagcgctatggcgggtcgaaccattccatgcgcgagacgctgcggatgctgagcgccgaggggctggtcgaggcttcggcgcaacgcggcttccgcgtgacctcggcgaccgaggacgatctgcgcgacatagaactcgtacggctggagatcgagaagatcgccctcgcccgggcgctggatgccggcgatacgggctgggaggggcgggtggtcgccgcgcatcacgccttgcgcaaggcggaggagcgtgtcgcggccacacccgacgacctgaccgcgcttgaatgggacgaaaggtgccgggctttctcggccagcctgatctcggcctgtggcagcccgcggctgatcgacctgcagcgcaagttcttcgaccagagccggcggttccgcctcgccctgctgcgcgaggacgcgctcgatttcgccgcgcgccgcgacaggcaggaggcgctggtcgccgccgtgctggcacgcgatacagatgccgcgctcgcgatgctcgaaagggacatcgtcgcggaactcaggacggggcgctga

SEQ ID NO: 8002 - protein, 223 aa, Oceanicola batsensis HTCC2597
MIFSRGESEDATVVAMLASALRRDISFGVLLPDQKLRINALRQRYGGSNHSMRETLRMLSAEGLVEASAQRGFRVTSATEDDLRDIELVRLEIEKIALARALDAGDTGWEGRVVAAHHALRKAEERVAATPDDLTALEWDERCRAFSASLISACGSPRLIDLQRKFFDQSRRFRLALLREDALDFAARRDRQEALVAAVLARDTDAALAMLERDIVAELRTGR

SEQ ID NO: 8003 - DNA, 624 bp, Photobacterium sp. SKA34
  CDS (1)..(624): transl_table=11
atggaagtcattcgacaagatatcttgctcggtaaactgactccaggtcaaaaactcgttgtcgctgatcttaaagagcgatacaacgtaggtgcatctccaattagagaagccttggtacaattatcatggaaaaagtacgttaaatttgcaccacaaaaaggatgttgggtcgcccccgtttcaattgaagagctacaagatctttttagcgcgaataaagtcatctctcgagagctattatcgcgtgcaattacacagggtgatgaagcttgggaactcaatattttgacgacctatcacaagctcagccgcttagatcaaacccttgatgataccgacttatctgaatgggaacaaagacatagtgatttccataccgctattttaaccagtgcccactctcctgtaatgcttgatatctataatgatatctatgatcaaataaaacgctatcgccatatttgggtgagtaaaaaacgcgaagtggaagatcgctataccgatgaaggggaacacgaagccctgatgaaagcggtacttgaccgtgatgtggagcttgctcagaaaattatgctgacccactttgaaagagcggttgatgacatcaaaaaccacctataa

SEQ ID NO: 8004 - protein, 207 aa, Photobacterium sp. SKA34
MEVIRQDILLGKLTPGQKLVVADLKERYNVGASPIREALVQLSWKKYVKFAPQKGCWVAPVSIEELQDLFSANKVISRELLSRAITQGDEAWELNILTTYHKLSRLDQTLDDTDLSEWEQRHSDFHTAILTSAHSPVMLDIYNDIYDQIKRYRHIWVSKKREVEDRYTDEGEHEALMKAVLDRDVELAQKIMLTHFERAVDDIKNHL

SEQ ID NO: 8005 - DNA, 702 bp, Oceanospirillum sp. MED92
  CDS (1)..(702): transl_table=11
atggctctttcaccgcaatcaaatccgcaaaacagtgataattttgctacacaggttctcggccagttaaagcaagatattctgactgggtactttaatccgggtgaaaagctgaagatgacccgcctgaaagaacgctatcaggtaggggtcagccctttgcgggaagcgctgtcgcaacttctggtcgaacagctcgtagttgttgagaaccagcgtggcttcaaagtacatccaatctcggctgaagagatggaagatatttatcatacccgtgcagagatagaggccctgtgtgtgagtcaggccattgaccgcggtgatgatgcctgggaggccggtattctggccgctgcccatcagcttaaaaaatcagcagaactgcttgaagaagagaacccggaaaagatccagcgctgggaggcccttcatcaggcctttcacagagcgattgccgagggctgtggctcccctagcctgctccatgtccgcctgtccctttatgagaaagcttcgcgctaccgcaaccactggcttaaagagaatatgctggaccgctctatctttgatgccaaccagaaagagcatgaagcattaaccgaagcactgctcaacagggataaagaaaaggcggtagagattatccgccagcatattctcagcccttaccgactgctgaaagattcgattagcttcgattga

SEQ ID NO: 8006 - protein, 233 aa, Oceanospirillum sp. MED92
MALSPQSNPQNSDNFATQVLGQLKQDILTGYFNPGEKLKMTRLKERYQVGVSPLREALSQLLVEQLVVVENQRGFKVHPISAEEMEDIYHTRAEIEALCVSQAIDRGDDAWEAGILAAAHQLKKSAELLEEENPEKIQRWEALHQAFHRAIAEGCGSPSLLHVRLSLYEKASRYRNHWLKENMLDRSIFDANQKEHEALTEALLNRDKEKAVEIIRQHILSPYRLLKDSISFD

SEQ ID NO: 8007 - DNA, 720 bp, Rhizobium sp
  CDS (1)..(720): transl_table=11
atggaccatcagaagcaaaataacgcggctctggttcgccgcacgttgagacaacggattcttcgctgcgagctgcagccaggcgaacggatcgtcattaacgatgtctgcgaggagttcggcgttagccttggcgctgtccgcgaagctctttcaggtctggaaggtgaagggttgctgcatgcatacgccaagcgtggatttcaggtaacgggcgtatctctagaggatatgttcgacctcacgcaggcgcggatcgaagtcgaatgcgcctgtcttcgcctctccatcgcgcagggcgatctcgcctgggaaagtcaagtcgtggcagcgctttaccgactgaacggaacgccgcgggagcagcgtggatccgacgacgaaatgtcggcggcatggagtgaagcccatgcgaacttccacgtcgcgctggtcgccgggtgccgaaaccagaccctgctcggtatccggcagaccttattcgaccgcgctgagcgttatcgcaggctgtccataccggtcgatgcggatcaccgcgacgttgcggcggaacatgacgctctggcgcaggccgcccttcagagagatccggaaaatgcatgccggctgatggaaacgcatctgtcacgcaccgcgatgctcatcagcgaggccgccggccggcggctggatggcggcggcgaggaacctatcaagatggttccgagtgacgcttcctga

SEQ ID NO: 8008 - protein, 239 aa, Rhizobium sp
MDHQKQNNAALVRRTLRQRILRCELQPGERIVINDVCEEFGVSLGAVREALSGLEGEGLLHAYAKRGFQVTGVSLEDMFDLTQARIEVECACLRLSIAQGDLAWESQVVAALYRLNGTPREQRGSDDEMSAAWSEAHANFHVALVAGCRNQTLLGIRQTLFDRAERYRRLSIPVDADHRDVAAEHDALAQAALQRDPENACRLMETHLSRTAMLISEAAGRRLDGGGEEPIKMVPSDAS

SEQ ID NO: 8009 - DNA, 765 bp, Pseudomonas sp
  CDS (1)..(765): transl_table=11
atgacaaagcaagatcaagcagttctgcctcgattgattgagtcagcaagactgcccgaaggggcactggcagaattcaatgtcgggccgaaagagaagaaagccgtaaccgccatcgaatccacctatgcaaccctccgtgacgcaatcttgaggggaagctacccacagagctctaggctccacctcgagacgctcaagtcatcgctgggcgtcagcggcagcactctgcgggaagcattgacgcgcctgattggagaccgtctggtcgtcgctgaaggacagaaggggttcagggtggccccaatgtcgctttgcgatcttgatgacctgacgagtgcgcgcatcatgttggaaagcgccgccctcgtcgaaagcatcaacctcggtggggacggctgggaagaccaactcgtcaccagtttccgtcgactgacgagggcgcaggaacgagtcgaggccaatccggcagaggccttcgacgcgtgggaagcgaggaacttggagttccacaacgcactcatggccgcctctccgtccaaatggctcgcgaacttcagagaaatcctgcttcgaaactctgagcgctaccgcaggttgtccggcacgcaaggcccacttcctgccgaagtgcacgaggagcacaagacaatcttcgacgcggcgatggcccgtgatgtagatcgggcggtttcggccctctcgcagcatattcgccgctccgcgaatgtgattcgagcaaatggattgctgaggaaggtctga

SEQ ID NO: 8010 - protein, 254 aa, Pseudomonas sp
MTKQDQAVLPRLIESARLPEGALAEFNVGPKEKKAVTAIESTYATLRDAILRGSYPQSSRLHLETLKSSLGVSGSTLREALTRLIGDRLVVAEGQKGFRVAPMSLCDLDDLTSARIMLESAALVESINLGGDGWEDQLVTSFRRLTRAQERVEANPAEAFDAWEARNLEFHNALMAASPSKWLANFREILLRNSERYRRLSGTQGPLPAEVHEEHKTIFDAAMARDVDRAVSALSQHIRRSANVIRANGLLRKV

SEQ ID NO: 8011 - DNA, 732 bp, Ralstonia eutropha
  CDS (1)..(732): transl_table=11
atgacacagcaagatcaagcatttctgacgcgattggttgcgtcaaagggttggccgaagggccactggcagaacccgatgtcgggccgaaagagaagaaggccgcaactgccatcgagtccaccctacgcaacgctccgtgactgcatcttgaggggaagccacccccaaggctcaaggctccacctcgaaacactcaagtcatcactgggtgtcagcggcagcactctgcgggaagcattgacgcgcctggttggagaccgtctggtcgtcgccgaagggcagaaagggttcaaggtggccccgatgtcgctttgcgatctcgatgatctgacgagcgcgcgcatcaccttggaaaccaccgccatcgtcgagagcatcaacctcggtgggggcgactgggaagaccaactcgtcatcagcttccgtcgactggcgagagcgcaggagcgagttgaagccaatcctgcagaggccttcgatgcatgggaagcgaggaatcaggaattccacaacgcactcatggccgcctctccgtccaaatggctcgcgaacttcagagaaatcctgtttcacaactccgagcgctaccgcaggttgtccggcacgcaaggcccaatttccgttgaggtgcacgaggagcacaagacaatcttcgaggcggcgatagcccgcgatgcaaatcaggcggtttcggtcctttcgcagcacattcggcgctccgcaatgtga

SEQ ID NO: 8012 - protein, 243 aa, Ralstonia eutropha
MTQQDQAFLTRLVASKGWPKGHWQNPMSGRKRRRPQLPSSPPYATLRDCILRGSHPQGSRLHLETLKSSLGVSGSTLREALTRLVGDRLVVAEGQKGFKVAPMSLCDLDDLTSARITLETTAIVESINLGGGDWEDQLVISFRRLARAQERVEANPAEAFDAWEARNQEFHNALMAASPSKWLANFREILFHNSERYRRLSGTQGPISVEVHEEHKTIFEAAIARDANQAVSVLSQHIRRSAM

SEQ ID NO: 8013 - DNA, 666 bp, Photobacterium leiognathi
  CDS (1)..(666): transl_table=11
atgaggactcacgtgtctagcccgactttaacaaatcaggttatggaagtaattcgacaggacatcttgctcggtaaactcactcctggacaaaaattggttgtagctgatctaaaagagcgctacaacgttggtgcatctccaatccgtgaagcattagtgcaattatcatggaaaaaatacattaaattcgcaccgcaaaaaggctgctgggtagcccctgtctctattgaagagcttcaggatcttttcagtgccaataaagtaatttcacgtgaactattaacgcgtgcaattactcatggtgatgaagcatgggaattaaatatccttacggcttaccataaactcagccgaatagatcctacatcagatgagaccgatttatcagaatgggaacaacgccactgcgatttccataccgcgatcctaaccagtgagcattctcctgtgatgcttgatatctaccacgatatctatgatcaaattaagcgctatcgccatatttgggtcagtaaaatgcgtcaagtcgaagatcgctacactgatgagggtgaacatgaagcattgatgaaggccgtccttgctcgtgatcttgagcaagcgcaaaagatcatgcatacccactttgaacgtgcggtagaagatatcaaaaattatctttaa

SEQ ID NO: 8014 - protein, 221 aa, Photobacterium leiognathi
MRTHVSSPTLTNQVMEVIRQDILLGKLTPGQKLVVADLKERYNVGASPIREALVQLSWKKYIKFAPQKGCWVAPVSIEELQDLFSANKVISRELLTRAITHGDEAWELNILTAYHKLSRIDPTSDETDLSEWEQRHCDFHTAILTSEHSPVMLDIYHDIYDQIKRYRHIWVSKMRQVEDRYTDEGEHEALMKAVLARDLEQAQKIMHTHFERAVEDIKNYL

SEQ ID NO: 8015 - DNA, 22 bp, Artificial sequence
  primer
atgatcaggagtcacaccatga

SEQ ID NO: 8016 - DNA, 21 bp, Artificial sequence
  primer
ttaattgccagccatcgcctg

SEQ ID NO: 8017 - protein, 208 aa, Artificial sequence
  consensus sequence
  Variant (3)..(4): Xaa in position 3 to 4 is any amino acid
  Variant (6)..(8): Xaa in position 6 to 8 is any amino acid
  Variant (10)..(12): Xaa in position 10 to 12 is any amino acid
  Variant (14)..(17): Xaa in position 14 to 17 is any amino acid
  Variant (19)..(21): Xaa in position 19 to 21 is any amino acid
  Variant (23)..(29): Xaa in position 23 to 29 is any amino acid
  Variant (32)..(32): Xaa in position 32 is any amino acid
  Variant (34)..(35): Xaa in position 34 to 35 is any amino acid
  Variant (37)..(41): Xaa in position 37 to 41 is any amino acid
  Variant (43)..(46): Xaa in position 43 to 46 is any amino acid
  Variant (48)..(48): Xaa in position 48 is any amino acid
  Variant (50)..(51): Xaa in position 50 to 51 is any amino acid
  Variant (53)..(55): Xaa in position 53 to 55 is any amino acid
  Variant (57)..(61): Xaa in position 57 to 61 is any amino acid
  Variant (63)..(66): Xaa in position 63 to 66 is any amino acid
  Variant (68)..(70): Xaa in position 68 to 70 is any amino acid
  Variant (72)..(78): Xaa in position 72 to 78 is any amino acid
  Variant (80)..(81): Xaa in position 80 to 81 is any amino acid
  Variant (83)..(85): Xaa in position 83 to 85 is any amino acid
  Variant (88)..(96): Xaa in position 88 to 96 is any amino acid
  Variant (98)..(111): Xaa in position 98 to 111 is any amino acid
  Variant (112)..(115): Xaa in position 112 to 115 is any or no amino acid
  Variant (117)..(122): Xaa in position 117 to 122 is any amino acid
  Variant (125)..(132): Xaa in position 125 to 132 is any amino acid
  Variant (134)..(148): Xaa in position 134 to 148 is any amino acid
  Variant (152)..(167): Xaa in position 152 to 167 is any amino acid
  Variant (168)..(185): Xaa in position 168 to 185 is any or no amino acid
  Variant (187)..(190): Xaa in position 187 to 190 is any amino acid
  Variant (191)..(191): Xaa in position 191 is any or no amino acid
  Variant (193)..(195): Xaa in position 193 to 195 is any amino acid
  Variant (198)..(200): Xaa in position 198 to 200 is any amino acid
  Variant (202)..(207): Xaa in position 202 to 207 is any amino acid
DIXXGXXXPXXXLXXXXLXXXYXXXXXXXREXLXXLXXXXXVXXXXQXGXXVXXXSXXXXXDXXXXRXXXEXXXXXXXIXXGXXXWEXXXXXXXXXLXXXXXXXXXXXXXXXXXXWXXXXXXFHXXXXXXXXSXXXXXXXXXXXXXXXRYRXXXXXXXXXXXXXXXXXXXXXXXXXXXXXXXXXXHXXXXXAXXXRDXXXAXXXXXXH

SEQ ID NO: 8018 - protein, 51 aa, Artificial sequence
  protein pattern
  Variant (2)..(2): Xaa in position 2 is any or no amino acid
  Variant (4)..(8): Xaa in position 4 to 8 is any amino acid
  Variant (9)..(9): Xaa in position 9 is any or no amino acid
  Variant (11)..(13): Xaa in position 11 to 13 is any amino acid
  Variant (14)..(14): Xaa in position 14 is any or no amino acid
  Variant (16)..(16): Xaa in position 16 is any amino acid
  Variant (17)..(17): Xaa in position 17 is Phe, Ile, Leu, Met or Val
  Variant (18)..(19): Xaa in position 18 to 19 is any amino acid
  Variant (21)..(24): Xaa in position 21 to 24 is any amino acid
  Variant (25)..(25): Xaa in position 25 is Ala, Asp, Glu, Gly, Asn or Gln
  Variant (26)..(26): Xaa in position 26 is Ala, Gly, Ile, Leu or Val
  Variant (27)..(27): Xaa in position 27 is Gly or Ser
  Variant (28)..(29): Xaa in position 28 to 29 is any amino acid
  Variant (30)..(30): Xaa in position 30 is Pro, Ser or Thr
  Variant (31)..(31): Xaa in position 31 is Ile, Leu or Met
  Variant (34)..(34): Xaa in position 34 is Ala, Cys, Gly or Thr
  Variant (36)..(37): Xaa in position 36 to 37 is any amino acid
  Variant (39)..(43): Xaa in position 39 to 43 is any amino acid
  Variant (44)..(44): Xaa in position 44 is Ile or Val
  Variant (45)..(48): Xaa in position 45 to 48 is any amino acid
  Variant (49)..(49): Xaa in position 49 is Asn or Gln
  Variant (50)..(50): Xaa in position 50 is Lys or Arg
DXIXXXXXXPXXXXLXXXXLXXXXXXXXXXXREXLXXLXXXXXXXXXXXXG

SEQ ID NO: 8019 - protein, 27 aa, Artificial sequence
  protein pattern
  Variant (2)..(6): Xaa in position 2 to 6 is any amino acid
  Variant (7)..(8): Xaa in position 7 to 8 is any or no amino acid
  Variant (10)..(11): Xaa in position 10 to 11 is any amino acid
  Variant (13)..(13): Xaa in position 13 is Asp or Gly
  Variant (14)..(14): Xaa in position 14 is any amino acid
  Variant (15)..(15): Xaa in position 15 is Ala, Asp, Glu or Gly
  Variant (17)..(17): Xaa in position 17 is Glu or Gly
  Variant (18)..(18): Xaa in position 18 is any amino acid
  Variant (19)..(19): Xaa in position 19 is Ala, Asp, Glu, Gly, Asn, Gln or Ser
  Variant (20)..(20): Xaa in position 20 is Ile, Leu or Val
  Variant (21)..(26): Xaa in position 21 to 26 is any amino acid
  Variant (27)..(27): Xaa in position 27 is Leu or Met
EXXXXXXXIXXGXXXWXXXXXXXXXXX

SEQ ID NO: 8020 - protein, 27 aa, Artificial sequence
  protein pattern
  Variant (2)..(3): Xaa in position 2 to 3 is any amino acid
  Variant (4)..(4): Xaa in position 4 is Ile, Leu or Met
  Variant (5)..(7): Xaa in position 5 to 7 is any amino acid
  Variant (8)..(8): Xaa in position 8 is Ala, Ile, Leu or Val
  Variant (9)..(9): Xaa in position 9 is Ile, Leu, Met or Val
  Variant (10)..(10): Xaa in position 10 is Ala, Asp, Gly, Asn or Gln
  Variant (12)..(15): Xaa in position 12 to 15 is any amino acid
  Variant (17)..(19): Xaa in position 17 to 19 is any amino acid
  Variant (20)..(20): Xaa in position 20 is Ile, Leu or Met
  Variant (21)..(22): Xaa in position 21 to 22 is any amino acid
  Variant (24)..(26): Xaa in position 24 to 26 is any amino acid
  Variant (27)..(27): Xaa in position 27 is Ala, Pro, Ser or Thr
HXXXXXXXXXRXXXXAXXXXXXHXXXX

SEQ ID NO: 8021 - DNA, 1290 bp, Escherichia coli K12
  CDS (1)..(1290): transl_table=11
atggaaacgactcaaaccagcacgattgcgtcgaaagactctcgtagtgcctggcgcaagacagacaccatgtggatgctgggcctttacggcacggcaatcggcgcgggcgtgctgttcctgccaatcaacgccggtgttggcggtatgatcccgctgatcatcatggctatccttgcgttcccgatgacgttttttgctcaccgcggcctgactcgcttcgtactgtctggtaaaaacccgggcgaagacatcaccgaggttgtagaagaacactttggtattggcgcaggtaaactgattaccctgctctacttcttcgctatctacccgatcctgctggtttatagcgtggcaatcaccaataccgttgaaagcttcatgtctcaccagctgggtatgacgccaccgccgcgtgcgattctgtcgctgatcctgatcgtgggtatgatgaccatcgttcgcttcggtgagcagatgatcgttaaagcgatgagtattctggtattcccgtttgttggcgtactgatgctgctggctctgtacctgatcccgcagtggaacggcgctgcactggaaacgctgtctctggacactgcatctgcaaccggaaacggtctgtggatgaccctgtggctggcaattccggtaatggtgttctcgttcaaccactctccgatcatctcttctttcgccgttgcgaagcgtgaagagtacggcgatatggcagaacagaaatgctcgaagatcctggcattcgcacacatcatgatggtgctgaccgtaatgttcttcgtcttcagctgtgtactgagcctgactccggcagacctggctgcggctaaagagcagaacatctcgattctgtcttacctggctaaccactttaacgcaccggttatcgcgtggatggctccgattatcgcgattatcgctatcaccaaatccttcctcggtcactacctgggcgcacgtgaaggcttcaacggtatggtgattaaatctctgcgtggtaaaggtaagtctatcgaaatcaacaagctgaaccgtatcactgcgctgttcatgctggtaacgacctggattgttgccaccctgaacccgagcatcctgggtatgattgaaaccctgggcggtccaatcatcgcgatgatcctgttcctgatgccgatgtacgcaattcagaaagtaccggcaatgcgtaagtacagcggtcacatcagcaacgtattcgttgtcgtgatgggtctgattgcaatctccgcaatcttctactctctgttcagctaa

SEQ ID NO: 8022 - protein, 429 aa, Escherichia coli K12
METTQTSTIASKDSRSAWRKTDTMWMLGLYGTAIGAGVLFLPINAGVGGMIPLIIMAILAFPMTFFAHRGLTRFVLSGKNPGEDITEVVEEHFGIGAGKLITLLYFFAIYPILLVYSVAITNTVESFMSHQLGMTPPPRAILSLILIVGMMTIVRFGEQMIVKAMSILVFPFVGVLMLLALYLIPQWNGAALETLSLDTASATGNGLWMTLWLAIPVMVFSFNHSPIISSFAVAKREEYGDMAEQKCSKILAFAHIMMVLTVMFFVFSCVLSLTPADLAAAKEQNISILSYLANHFNAPVIAWMAPIIAIIAITKSFLGHYLGAREGFNGMVIKSLRGKGKSIEINKLNRITALFMLVTTWIVATLNPSILGMIETLGGPIIAMILFLMPMYAIQKVPAMRKYSGHISNVFVVVMGLIAISAIFYSLFS

SEQ ID NO: 8023 - DNA, 1260 bp, Vibrio fischeri ES114
  CDS (1)..(1260)
atgttaattatgcaaacaacaaatactgcatctatcggtgcaaaaaaaactaagtggacttataaagatttcacttggtgtctttctctgttcggtaccgctgtaggtgctggtgttcttttccttccaatcaaagcgggtgctggtggtttttggcctctagttattcttgctctaatcgctgcaccaatgacttggtttgctcacaagagtttggctcgtttcgttctttcagctaaaaacccagatgcagatattactgatactgtagaagagcatttcggtaaaacaggcgcgaacctaatcacttttgcctactttttcgcgatttatccgattgtacttatctacggtgttggtattacaaacacagtagactctttcatggttaaccaaatgggtatggaatctatccctcgttggttactatcaggtgttcttatcactctgatgacatgtggtgtagtatttggtaaagaactaatgctgaaagcaacttcagcaatggtttaccctcttgtattcatcttaatggctctttctgtatacctaatccctggttggaacacatctatgatgtctgttgacccagattggggttcaatgccttctgttgtttggttagcgattcctatcatcgttttctctttcaaccacagcccagtaatcagccagttctctaaagaacaacgtcgtgtatacggtgaagatgcagttgctaaaactgacatgatcactggcggtgcagcaatgatgctaatgagcttcgttatgttcttcgttttctctgtagttctttctctatctccagagcaactagcgcaagcacaagcacagaacatctctgtactttcttacctagcaaacgtacacgaatctccacttatctcttacttaggtccaatcgttgctttcgctgcgattacttcaagctacttcggtcacttcctaggtgctcacgaaggtctcgttggcctagctaaatctcgctcaaaagcaccagttgctaagctagaaaaagcatctctaatctttatcgttgttactacatggatcgtttctatcatcaacccaagtatcctaggtatgattgaaacaatgggtgctccaatgattgcagctatcctattccttatgcctatcttcgcaatgcgtaaagttccagcaatggctaagtacaaaacttcagcacctgtgcaaatctttacagcattatgtggtgttgcggcgattacttctgtaatctacggcgctctttaa

SEQ ID NO: 8024 - protein, 419 aa, Vibrio fischeri ES114
MLIMQTTNTASIGAKKTKWTYKDFTWCLSLFGTAVGAGVLFLPIKAGAGGFWPLVILALIAAPMTWFAHKSLARFVLSAKNPDADITDTVEEHFGKTGANLITFAYFFAIYPIVLIYGVGITNTVDSFMVNQMGMESIPRWLLSGVLITLMTCGVVFGKELMLKATSAMVYPLVFILMALSVYLIPGWNTSMMSVDPDWGSMPSVVWLAIPIIVFSFNHSPVISQFSKEQRRVYGEDAVAKTDMITGGAAMMLMSFVMFFVFSVVLSLSPEQLAQAQAQNISVLSYLANVHESPLISYLGPIVAFAAITSSYFGHFLGAHEGLVGLAKSRSKAPVAKLEKASLIFIVVTTWIVSIINPSILGMIETMGAPMIAAILFLMPIFAMRKVPAMAKYKTSAPVQIFTALCGVAAITSVIYGAL

SEQ ID NO: 8025 - DNA, 1296 bp, Legionella pneumophila str. Lens
  CDS (1)..(1296)
atgtcatcaaatgaatctgcagctatagtatctccgatagtcaaccaaaaactatcgcaatggaaaaaacaagatacgatttggatgttaagcctctatggcacagcaattggtgccggaactcttttccttcctatagatgctggtcttaatggcattttgcctttaatcattatgacaattctggccttccccatgacttattattctcatagggctttatgtcgttttgtcctttcaggctcgtcctcacacaatgacatcactgatgttgtagaagaacactttggctcatttgcgggtaatatgctgactatcctgtacttttttgcgatttatccaattttgcttatgtacagtgtcgcaataacaaataccacggaaagtttcctgattaatcaaatgggaattacccctccgccacgagctcttttagcaatcatattaattcttgggttaatgggtatcgtgcgtttaggacaagaaattattgtcaaatcgatgtcggtattggtatatccttttgccactattctatttctgctttcgctttatttaattccaaattggaataacgctatttttatccaaagcaattccttacatgccaatggagggcatggactattaatgactttatggttaattattccagtgatggtgttctcctttaaccattctcctatcatttcatcttttgctgtgaatcaaaagcagcaatatggtagccaagctgacgagaaaagctcattaattatgaaatacagccacttgatgatggttttctctgtgatgttttttgtatttagctgtgtgttgagcctgtcacctcaagatcttttgcaagcaaggcaacaaaatatttccattttgtcttatctggcgaatcattttaatacccctattatggcctatattgcaccggttattgcattcatagccatttcaaaatcttttctgggacattatttaggtgccaaggaaggtttaagtggaattattgttaagtcattaaaatcaacaacaggcaaaacaattaataagaattccctgcacagaatcattgaaatctttatgattctgacttgttgggttgttgctacaattaatcctaatattttaaaaatgattgaaacattaggaggccccatcatagctgtcttattatttatcatgccaatgtatgccattgctaaagtgccagccatgaaaaaatacaacaaccaaatcagtaacgtatttgttaccgtcatgggcattatttctatctcagccatcatttatggcttaatttaa

SEQ ID NO: 8026 - protein, 431 aa, Legionella pneumophila str. Lens
MSSNESAAIVSPIVNQKLSQWKKQDTIWMLSLYGTAIGAGTLFLPIDAGLNGILPLIIMTILAFPMTYYSHRALCRFVLSGSSSHNDITDVVEEHFGSFAGNMLTILYFFAIYPILLMYSVAITNTTESFLINQMGITPPPRALLAIILILGLMGIVRLGQEIIVKSMSVLVYPFATILFLLSLYLIPNWNNAIFIQSNSLHANGGHGLLMTLWLIIPVMVFSFNHSPIISSFAVNQKQQYGSQADEKSSLIMKYSHLMMVFSVMFFVFSCVLSLSPQDLLQARQQNISILSYLANHFNTPIMAYIAPVIAFIAISKSFLGHYLGAKEGLSGIIVKSLKSTTGKTINKNSLHRIIEIFMILTCWVVATINPNILKMIETLGGPIIAVLLFIMPMYAIAKVPAMKKYNNQISNVFVTVMGIISISAIIYGLI

SEQ ID NO: 8027 - DNA, 1254 bp, Photobacterium profundum SS9
  CDS (1)..(1254)
atgcaaaccacttcgaatacagcagcgactaccgcagcaaaagcaagttggacgtataaagatttcacttgggcactatcactatttggcacagcagtaggcgctggcgttcttttccttccaattaaagcgggcgctggtggcttttggcctctagttattctggctcttattgcactgccaatgacttggtttgcacataaaggtcttgctcgtttcgttctttcagcaaaaaaccctgaagcagatatcactgatactgttgaagagcacttcggtaagtctggcgctaaaatcatcactttagcttacttcttcgctatctacccgatagttctaatttatggtgtaggtattacaaacactgtagattcattccttgttaaccaaatgggtatggattcaattccacgttggttgctatctggcggtctaatcatcgcaatgacagctggtgttgtgttcggtaaagaactgatgcttaaagcaacatctgcaatggtttaccctctcgtatttattctacttgcactatctatttacttaatacctgagtggaatacatcaatggttactgttagccctgattggagcactatgccttcagttatttggctagcaattccaattattgttttctctttcaaccacagcccaatcatcagccagttctctaaagaacagcgtcgcgtttacggtgaagatgcagttaaaaagactgacatgatcactggcggtgcagcaatgatgcttatgagcttcgttatgttcttcgtattctctgttgttctttctctatcaccagagcaactagctattgcacaagaacaaaacatcagtgttctatcgtacctagcgaacattcacgaatctccgctaatttcaattcttggccctctagttgcttttgctgctatcacttcaagctacttcggtcacttccttggtgcacatgaaggtcttgttggtctagcaaaatctaccactaagatgccagttaagaaaattgagaaagtttctcttggtttcatcgttattacaacttggatggttgcggtagttaacccaagcatcctaggtatgattgaaacgatgggtgcgccgatgatcgctgcaatcctgttcctaatgcctgtttttgctatgtacaaagtacctgcaatggctaagtacaagacatctgcaccggtacaggttttcactgctctatgtggtattgctgcgattacatctgtaatctacggcgcattataa

SEQ ID NO: 8028 - protein, 417 aa, Photobacterium profundum SS9
MQTTSNTAATTAAKASWTYKDFTWALSLFGTAVGAGVLFLPIKAGAGGFWPLVILALIALPMTWFAHKGLARFVLSAKNPEADITDTVEEHFGKSGAKIITLAYFFAIYPIVLIYGVGITNTVDSFLVNQMGMDSIPRWLLSGGLIIAMTAGVVFGKELMLKATSAMVYPLVFILLALSIYLIPEWNTSMVTVSPDWSTMPSVIWLAIPIIVFSFNHSPIISQFSKEQRRVYGEDAVKKTDMITGGAAMMLMSFVMFFVFSVVLSLSPEQLAIAQEQNISVLSYLANIHESPLISILGPLVAFAAITSSYFGHFLGAHEGLVGLAKSTTKMPVKKIEKVSLGFIVITTWMVAVVNPSILGMIETMGAPMIAAILFLMPVFAMYKVPAMAKYKTSAPVQVFTALCGIAAITSVIYGAL

SEQ ID NO: 8029 - DNA, 1224 bp, Francisella tularensis subsp. tularensis Schu 4
  CDS (1)..(1224)
atgaaaagaaatgaagatttaatgtggtcccttagtctgtatggtacagctatcggtgccggtgtactatttttgccaattcaaactggaatttcaggaattataccaatattagtgatattagtatttatcttcccaatggtgtttttatcacatcgtgcattatgtagatttgtgatatctaacccaaatactaactctgatatcacagtagttgctgatgactattttggtaagcttggtggaattattttcaacattttatatctatttgctatcttgccaatattactggtttatagtgttggtataacaaatactctggctagtttttttaagtatcagtttcattacgatattcaaaatagatttcttttgagtttttttactatactttcgctagtttttatcattaactttggtcagaagcttatcatccgtgttatgagccttctagtttttccatttatcatcgctttgctagtactttcattatggatgattccatattggaatattgagatactgcaaaagagcattgagtacaatcatagtttttctggtattttgatagctatctggataattatgccaatattgatattttcttttaaccactcaccgattatctcttctttagccgtatatgcaaaaaccaaatacaaacaaaatgccgacaaaaaagcctctaagataatcgcttttagtaatattctaatgattattactgtagttatatttgtaattagctcaatgcttaccctctctccaaaagagctaataatcgcaaaagaagagaatatttctatactatcttatctagcaagtcattttaataattattctcttgattatgtagctccaatagtagctctagttgctatgagtaagtctttttttggtcattatttaggttcaaaagaaggtatagatggtctagtttataaagttacaaaaaataaaattagtgaaaaaactataaaaccaattacattatcaatagtgtttttatcatgctggctagttgcttatttaaacccaaatatcttagatatgatatctagtataggtggtctagttttagcggtgatactgtttattatgcctatttatagtatctataaaataaaatatctaaagccttataaaaacctattagcagatagttttatactttttattggcattattgcactatcatcggcaatttatgttttgttgtag

SEQ ID NO: 8030 - protein, 407 aa, Francisella tularensis subsp. tularensis Schu 4
MKRNEDLMWSLSLYGTAIGAGVLFLPIQTGISGIIPILVILVFIFPMVFLSHRALCRFVISNPNTNSDITVVADDYFGKLGGIIFNILYLFAILPILLVYSVGITNTLASFFKYQFHYDIQNRFLLSFFTILSLVFIINFGQKLIIRVMSLLVFPFIIALLVLSLWMIPYWNIEILQKSIEYNHSFSGILIAIWIIMPILIFSFNHSPIISSLAVYAKTKYKQNADKKASKIIAFSNILMIITVVIFVISSMLTLSPKELIIAKEENISILSYLASHFNNYSLDYVAPIVALVAMSKSFFGHYLGSKEGIDGLVYKVTKNKISEKTIKPITLSIVFLSCWLVAYLNPNILDMISSIGGLVLAVILFIMPIYSIYKIKYLKPYKNLLADSFILFIGIIALSSAIYVLL

SEQ ID NO: 8031 - DNA, 1284 bp, Campylobacter lari RM2100
  CDS (1)..(1284)
atgctttctctttttgggactgcagttggtgcggggattttatttttacctattaaggcaggtgttggcggtttttggccagttgttgtaatggctttgattatttttcctatggtatatttaagccatagggctttaagtcgctttgtgtgccaagcaaatggtaatgataaagacattactcatgcggctgaagagtattttggtagaaaagtaagtatttttatttctatactttatttctttgcaatttttccaatttgtttagcatactgtgtgggtataactaatacttttgagagttttatttataatcaattcttgccacttttagatccaaatggttcttttgcaagtgcaattagtgctatgtatcaaacaagtgttaatgagcaaggaaaaactatagctaatttacttcctttttatagagcagtttttgcttttgttttagtaagtatttttatgcttattatgctttttagtgaagaattaatcaccaaagtatgcgagtggcttgtatatcctttatgtgctattttattcttattttctttatatcttatcccacaatggtcttttgagagttttagtgctattcctggtacgaaagaatttatcactatagtatggttaactttaccagttctagtgttttcgtttaaccactcaccagctatttctactttttctctaagtgtaaaaagagaatatcctgaaaattcagtgcaaaaagcaaaccaaattttacttagaacttctgtaatgttgcttgcttttgttatgttttttgtggtatcttgtgtgctttctttaactccaactgagcttgctgaagctagagcgcaaaatatacctgttctttcttattttgctaataagcttgataatccatttatttcttatggtggtccactaatcgcatttttagcaatttcaagttcattttttggacattattttggtgctagagaaggcgcttatggtatagttagaaaatgttgtaaattagcaggcaatgaaaatcctgatttgaaaaaaattgcagtttattctactttagtaatgtatattgttatgttaattactgcttatataaatccaagtattttaggttttattgaaagcctaggtggtccaattattgctgcaatcttatttttaatgcctatgattgcaatttacactgtctctaaaatgaaaaaattccaaaacaaagctttggatgcatttgtatttatcacaggtattttgacaattattactgtaatttatactttttaa

SEQ ID NO: 8032 - protein, 427 aa, Campylobacter lari RM2100
MLSLFGTAVGAGILFLPIKAGVGGFWPVVVMALIIFPMVYLSHRALSRFVCQANGNDKDITHAAEEYFGRKVSIFISILYFFAIFPICLAYCVGITNTFESFIYNQFLPLLDPNGSFASAISAMYQTSVNEQGKTIANLLPFYRAVFAFVLVSIFMLIMLFSEELITKVCEWLVYPLCAILFLFSLYLIPQWSFESFSAIPGTKEFITIVWLTLPVLVFSFNHSPAISTFSLSVKREYPENSVQKANQILLRTSVMLLAFVMFFVVSCVLSLTPTELAEARAQNIPVLSYFANKLDNPFISYGGPLIAFLAISSSFFGHYFGAREGAYGIVRKCCKLAGNENPDLKKIAVYSTLVMYIVMLITAYINPSILGFIESLGGPIIAAILFLMPMIAIYTVSKMKKFQNKALDAFVFITGILTIITVIYTF

SEQ ID NO: 8033 - DNA, 1323 bp, Campylobacter coli RM2228
  CDS (1)..(1323)
atgaatactcctaagtggactcgttatgacacgagatgggttttatctctttttggaaccgctgtgggtgcggggattttatttttacctattaaggcgggtgttggtggtttttggccagttgttgtgatgactttgattatttttccaatggtgtatttaagccatagagccttaagtcgttttgtatgtcaagcaaatggtaatgataaagacattacccatgcggctgaagagtattttggtagaaaagtaagtatttttatttctgtgctttatttctttgcaatttttccaatttgtttagcgtattgtgtgggtataaccaatacttttgaaagttttatctaccatcaatttttaccccttttaaattcagagggtgtatttgcagatattattcgtgccatgtatgaggtaagcacagatgataaagaaaaagttgtagcgagtttatttcctttttatcgtttgcttttagcttttattttggtaagtatttttatgcttattatgctttttagcgaagagttaatcactaaagtatgtgaatggcttgtgtatcctttatgtgctattttatttttattttctttatatcttatcccacaatggtcatttgaaagttttagtgctattcctggaacaaaagaatttattactatagtatggctaactttaccggttttagtgttttcatttaatcactcaccagcaatttcaactttttctctaagcgtaaaaagagaatatcctgaaaattcagtacaaaaagcaaatcaaattttgtttagaacctctgtcatgttgcttgcttttgttatgttttttgtggtatcttgcgtgctttctttaactccagctgaacttgctgaagcaagagcacaaaacataccggtgctttcttattttgctaataagcttgataatccatttatttcttatggtggtccattaatcgcatttttggcaatttctagttcattctttggacattattttggcgctagagaaggtgcttatggtatagttagaaaatgctgcaaattagcaggtaatgaaaatcctgatttgaaaaaaatcgcagtttattctactttagtaatgtatattgttatgttaattactgcttatatcaatcctagtattttaggttttattgaaagtttgggcggtccaattatcgcagcaatcttatttttaatgccaattattgcaatttatacggtttcaaaaatgaaaaaattccaaaataaagctttagatgcttttgtttttattacaggtgttttaacaatcatcactgtaatttatactttttaa

SEQ ID NO: 8034 - protein, 440 aa, Campylobacter coli RM2228
MNTPKWTRYDTRWVLSLFGTAVGAGILFLPIKAGVGGFWPVVVMTLIIFPMVYLSHRALSRFVCQANGNDKDITHAAEEYFGRKVSIFISVLYFFAIFPICLAYCVGITNTFESFIYHQFLPLLNSEGVFADIIRAMYEVSTDDKEKVVASLFPFYRLLLAFILVSIFMLIMLFSEELITKVCEWLVYPLCAILFLFSLYLIPQWSFESFSAIPGTKEFITIVWLTLPVLVFSFNHSPAISTFSLSVKREYPENSVQKANQILFRTSVMLLAFVMFFVVSCVLSLTPAELAEARAQNIPVLSYFANKLDNPFISYGGPLIAFLAISSSFFGHYFGAREGAYGIVRKCCKLAGNENPDLKKIAVYSTLVMYIVMLITAYINPSILGFIESLGGPIIAAILFLMPIIAIYTVSKMKKFQNKALDAFVFITGVLTIITVIYTF

SEQ ID NO: 8035 - DNA, 1311 bp, Campylobacter upsaliensis RM3195
  CDS (1)..(1311)
atgaaatcatataaatttgacacgaggtggatgctttctctttttggcacggctgtgggagctgggattttatatttacccattaaggctgggacgggaggcgttttacccgtcatagcaatgtgttttatcattttccctatggtgtatcttagccatagagccttgagtcgttttgtttctcaggcaaatggagcagataaggacatcacgcacgctgcggaggagtattttggtagaaaaacggctttatttatttcggtgctttattttttcgcgatttttcctatatgccttgcgtattgtgtggggattagtaatacctttgaaagctttatttatcatcaatttatgcctttaacaagtgaaaatgtagccgaatttatccaaagcatttatagcgtaagcacaagtgaaaatggcaaaattatagccaaccttaccccattttatagaactttgctagtgtttattttggtaagttcgtttatgctagtaatgcttctaagcgaagagcttatcacaaaaatttgcgaatggcttgtgtatcctttatgcttgattttatttttattttcactctatcttattcctcactggaatttagaaagctttacgcaaatccctcattttaaagaatttatcaccatagtttggcttaccttacctgttttagttttttccttcaatcactccccagccatttcaacctttactctaagcgtgaaaaggcactataaagagcataaaagtatagaaaaaactaatcaaattctttttaaaacctccattatgctacttatttttgtgatgttttttgttttttcttgcgtattttctttaaatggcgaggaatttagcgatgctagagcgcaaaatatccccgtgctttcgtattttgctaataagcttgataatcctatcatcgcttatggtggtcctttggtggcgtttttagcgattacaagttcattttttgggcattattttggtgcgagagaaggtgcttatggcatagtgcgtaagtgctgcaaaatgacaggaattttaaatcctaatcaaaagctcatcaagctcatttgcggaagcgtgatgtatatcattatgctacttgtgggtttttataatcctagcgttttagattttatagaaaagcttggcggtcctattatagcggcgattttatttttaatgcctatgattgcgatttatagcatttcaaaacttaagaaatttcaaaataagcctttagatttgtttgtctttgcgacaggcttactaaccatcatcacggtaatttacagcttttaa

SEQ ID NO: 8036 - protein, 436 aa, Campylobacter upsaliensis RM3195
MKSYKFDTRWMLSLFGTAVGAGILYLPIKAGTGGVLPVIAMCFIIFPMVYLSHRALSRFVSQANGADKDITHAAEEYFGRKTALFISVLYFFAIFPICLAYCVGISNTFESFIYHQFMPLTSENVAEFIQSIYSVSTSENGKIIANLTPFYRTLLVFILVSSFMLVMLLSEELITKICEWLVYPLCLILFLFSLYLIPHWNLESFTQIPHFKEFITIVWLTLPVLVFSFNHSPAISTFTLSVKRHYKEHKSIEKTNQILFKTSIMLLIFVMFFVFSCVFSLNGEEFSDARAQNIPVLSYFANKLDNPIIAYGGPLVAFLAITSSFFGHYFGAREGAYGIVRKCCKMTGILNPNQKLIKLICGSVMYIIMLLVGFYNPSVLDFIEKLGGPIIAAILFLMPMIAIYSISKLKKFQNKPLDLFVFATGLLTIITVIYSF

SEQ ID NO: 8037 - DNA, 1296 bp, Legionella pneumophila
  CDS (1)..(1296)
atgtcatcaaatgaatctgcagctatagtatctcagatagtcaaccaaaaactatcacaatggaaaaaacaagatacgatttggatgttaagcctctatggcacagcaattggtgccggaactcttttccttcctatagatgctggtcttaatggcattttgcctttaatcattatgacaattctggccttccccatgacttattattctcatagggctttatgtcgttttgtcctttcaggctcgtcctcacacaatgacattaccgatgttgtagaagaacactttggctcatttgcgggtaagatgctgactatcctgtacttttttgcgatttatccaattttgcttatgtacagtgtcgcaataacaaataccacggaaagtttcctgattaatcaaatgggaattacccctccgccacgagctcttttagcaatcatattaattcttgggttaatgggtatcgtgcgtttaggacaagaaattattgtcaaatcgatgtcggtattggtatatccttttgcaactattctatttctgctttcgctttatttaattccaaattggaataactctatttttatccaaagcaattccttacatgccaatggagggcatggactattaatgactttatggttaattattccagtgatggtgttctcctttaaccattctcctatcatttcatcttttgctgtgaatcaaaagcagcaatatggtagccaagctgacgagaaaagctcattaattatgaaatacagtcacttgatgatggttttctctgttatgttttttgtatttagctgtgtgttgagcctgtcacctcaagatcttttgcaagcaaagcaacaaaatatttccattttgtcttatctggcgaatcattttaatacccctattatggcctatattgcaccggttattgcattcatagccatttcaaaatcttttctgggacattatttaggtgccaaagaaggtttaagtggaattattgttaaatcattaaaatcaacaacaggcaaaacaattaataagaactccctgcacagaatcattgaaatttttatgattctgacttgttgggttgttgctacaattaaccctaatattttaaaaatgattgaaactttaggaggccccattatagctgtcttattatttatcatgccaatgtatgccattgctaaagtgccagccatgaaaaaatacaacaatcaaatcagtaacgtatttgttaccgtcatgggcattatttctatctcagccatcatttatggcttaatttaa

SEQ ID NO: 8038 - protein, 431 aa, Legionella pneumophila
MSSNESAAIVSQIVNQKLSQWKKQDTIWMLSLYGTAIGAGTLFLPIDAGLNGILPLIIMTILAFPMTYYSHRALCRFVLSGSSSHNDITDVVEEHFGSFAGKMLTILYFFAIYPILLMYSVAITNTTESFLINQMGITPPPRALLAIILILGLMGIVRLGQEIIVKSMSVLVYPFATILFLLSLYLIPNWNNSIFIQSNSLHANGGHGLLMTLWLIIPVMVFSFNHSPIISSFAVNQKQQYGSQADEKSSLIMKYSHLMMVFSVMFFVFSCVLSLSPQDLLQAKQQNISILSYLANHFNTPIMAYIAPVIAFIAISKSFLGHYLGAKEGLSGIIVKSLKSTTGKTINKNSLHRIIEIFMILTCWVVATINPNILKMIETLGGPIIAVLLFIMPMYAIAKVPAMKKYNNQISNVFVTVMGIISISAIIYGLI

SEQ ID NO: 8039 - DNA, 1242 bp, Helicobacter pylori 26695
  CDS (1)..(1242): transl_table=11
atggcacaagaaaaagcagttccaagagatcctaaaaaactcaatgcgtttgatttgcgttggatggtgtccttatttggcacggcggtgggggctgggattttatttttgcctattagagccggtgggcatggggtatgggctattgtggtaatgagcgcgatcattttccctttaacttatctagggcatagagctttagcttatttcataggatctaaagacaaagaagacattaccatggtcgttcgctctcattttggcgctcaatggggttttcttatcactttgctttatttcttagcgatttatcctatttgcttggtttatggggtgggtatcactaacgtgtttgatcattttttcactaaccagttgcatttagcgccttttcatcggggattattggctgtagcgttagtttctttaatgatgttggtgatggtttttaacgctacgattgttacgcgcatttgtaacgctttagtgtatcctttatgcttgattttattgcttttttctttgtatcttatcccttattggcaaggcgctaatctttttgtggtgccgagttttaaagaatttgtgttagcgatttggctaaccttaccggtgcttgtgtttgcattcgaccatagccccatcatttcaaccttcactcaaaatgtgggaaaagaatacggcgttttcaaagaatacaaactcaatcaaattgaattagggacatcgctgatgcttttagggtttgtgatgttttttgtgttttcgtgcgtcatgtgcttgaatgctgatgattttgtgaaagcaagggaacaaaatatccccattttaagctatttggctaacactttaaacaaccctttaatcaattatgcggggcctgtggtggcttttttagcgattttttcatctttttttgggcattattatggggctaaggagggtttagaaggcattattattcaaagcttaaaattgaaaaaagcttctaaacccttgagcgttagcgtaacgatttttttatggctgactatcacgcttgtggcttatattaaccccaatatcttggattttattgaaaatttaggcggccccattatcgcgctcattctgtttgtgatgcccatgatagctttttatagtgtttctagtttgaagcgttttagaaatttcaaagtggatatttttgtgtttgtctttgggagcttgacggctttgagcgtgtttttaggactattttaa

SEQ ID NO: 8040 - protein, 413 aa, Helicobacter pylori 26695
MAQEKAVPRDPKKLNAFDLRWMVSLFGTAVGAGILFLPIRAGGHGVWAIVVMSAIIFPLTYLGHRALAYFIGSKDKEDITMVVRSHFGAQWGFLITLLYFLAIYPICLVYGVGITNVFDHFFTNQLHLAPFHRGLLAVALVSLMMLVMVFNATIVTRICNALVYPLCLILLLFSLYLIPYWQGANLFVVPSFKEFVLAIWLTLPVLVFAFDHSPIISTFTQNVGKEYGVFKEYKLNQIELGTSLMLLGFVMFFVFSCVMCLNADDFVKAREQNIPILSYLANTLNNPLINYAGPVVAFLAIFSSFFGHYYGAKEGLEGIIIQSLKLKKASKPLSVSVTIFLWLTITLVAYINPNILDFIENLGGPIIALILFVMPMIAFYSVSSLKRFRNFKVDIFVFVFGSLTALSVFLGLF

SEQ ID NO: 8041 - DNA, 1242 bp, Helicobacter pylori J99
  CDS (1)..(1242): transl_table=11
atggcacaagaaaaagcggttataagagatcctaaaaaactcaatgcgtttgatttgcgttggatagcgtctttatttggcacggcggtgggggctgggattttatttttgcctattagagccggtgggcatgggatatgggctattgtggtgatgagcgcgatcatattccctttaacttatctagggcatagagccttggcttatttcataggatctaaagataaagaagacattaccatggtcgttcgctctcattttggcgctcaatggggttttcttatcactttgctttatttcttggcgatttatcctatttgtttggcttatggggtgggtatcactaacgtgtttgatcattttttcactaaccagttgcatttagcgccttttcatcggggcttactggctgtagcgttagtctctttaatgatgttggtgatggtttttaacgctacgattgttacgcgcatttgtaacgctttagtgtatcctttatgcttgattttattgcttttttctttgtatcttatcccttattggcaaggcgctaacctttttgtggtgccgagttttaaagaatttgtgctagccatttggctaaccttaccggtgcttgtgttttcattcaaccatagccccattatttcaaccttcacccaaaatgtgggaaaagaatacggcgctttcaaagaatacaaactcaatcaaattgaattagggacatcgctgatgcttttagggtttgtgatgttttttgtgttttcgtgtgttatgtgcttgaatgctgatgattttgtgaaagcaagggaacaaaatatccccattttaagctattttgctaacaccctaaacaaccccttaatcaattatgcggggcctgtggtggcttttttagcgattttttcatctttttttgggcattattatggggctaaagagggtttagaaggcattatcattcaaagtttaaaattgaaacaagcttctaaaaccttgagcgttggcgtaacgatttttttatggctgactatcacgctggtggcttatattaaccctaatatcttggattttattgaaaatttaggcggccccattatcgcgctcattctgtttgtgatgcccatgatagctttttatagcgtttctagtttgaagcgttttagaaacttcaaagtggatatttttgtgtttgtctttgggagcttgacggctttgagcgtgtttttaggactattttaa

SEQ ID NO: 8042 - protein, 413 aa, Helicobacter pylori J99
MAQEKAVIRDPKKLNAFDLRWIASLFGTAVGAGILFLPIRAGGHGIWAIVVMSAIIFPLTYLGHRALAYFIGSKDKEDITMVVRSHFGAQWGFLITLLYFLAIYPICLAYGVGITNVFDHFFTNQLHLAPFHRGLLAVALVSLMMLVMVFNATIVTRICNALVYPLCLILLLFSLYLIPYWQGANLFVVPSFKEFVLAIWLTLPVLVFSFNHSPIISTFTQNVGKEYGAFKEYKLNQIELGTSLMLLGFVMFFVFSCVMCLNADDFVKAREQNIPILSYFANTLNNPLINYAGPVVAFLAIFSSFFGHYYGAKEGLEGIIIQSLKLKQASKTLSVGVTIFLWLTITLVAYINPNILDFIENLGGPIIALILFVMPMIAFYSVSSLKRFRNFKVDIFVFVFGSLTALSVFLGLF

SEQ ID NO: 8043 - DNA, 1254 bp, Vibrio cholerae O1 biovar eltor str. N16961
  CDS (1)..(1254): transl_table=11
atgaatactacaacagcggctacttctacagcacgttctgctagcaagtggacctacaaagatttcacctgggctctgtcccttttcggtacagcggttggtgcaggtgtcctgttcctacctattaaagcgggtgcgggtggcttctggccattagttcttctcgcactgattgccgccccaatgacttggtttgcacacaagtctctcgctcgtttcgtattatctgcaaaaaatcctgatgcagacatcactgacacggttgaagaacattttggtaaagctggcgctaacctcattacttttgcttactttttcgccatctatcctatcgttctgatctacggtgtgggcatcactaacacggtggattctttcctcgttaaccaaatcggcatggaatcgattcctcgctggttactatctggtgcactgatcacggcgatgactgctggtgtggtatttggtaaggagctgatgctgaaagccacttctgccatggtttacccactggtattcattctgctggctctctctttctatctgatccctgattggaacacttccatgatggaagtcgcacctgactggtcagcaatgcctgctatcgtatggcttgcgatcccaatcatcgtgttctctttcaaccacagcccaatcatttctcagttctctaaagagcaacgccaacagtttggtgataaagccgtacaaaaaacggacatgattactggcggtgcagcgatgatgctgatgggcttcgtgatgttcttcgtattctcggtagttctatcactgtctcctgcagagctggcgatggcaaaagagcaaaacatctctgttctgtcttacctagctaatgaacacgcttcaccgatcatctcttacttaggtccaatcgtggcatttgcagcgatcacctcaagctacttcggtcacttcttaggtgctcatgaaggtctagtcggtctggtgaaatcacgcagcaacatgcaagtcagcaagattgagaaaatctctctgggcttcatcgtcatcaccacttggattgtagcaattgtgaacccaagcatcctaggtatgattgaaaccatgggcgcaccaatgattgctgctatcttgttcctgctgcctgtatttgcaatgcacaaagtgcctgcaatggctaagttcaagacttcagcacctgtacagatttttacagttatttgtggcttggctgcgattagttctgtaatctacggcgctctttaa

SEQ ID NO: 8044 - protein, 417 aa, Vibrio cholerae O1 biovar eltor str. N16961
MNTTTAATSTARSASKWTYKDFTWALSLFGTAVGAGVLFLPIKAGAGGFWPLVLLALIAAPMTWFAHKSLARFVLSAKNPDADITDTVEEHFGKAGANLITFAYFFAIYPIVLIYGVGITNTVDSFLVNQIGMESIPRWLLSGALITAMTAGVVFGKELMLKATSAMVYPLVFILLALSFYLIPDWNTSMMEVAPDWSAMPAIVWLAIPIIVFSFNHSPIISQFSKEQRQQFGDKAVQKTDMITGGAAMMLMGFVMFFVFSVVLSLSPAELAMAKEQNISVLSYLANEHASPIISYLGPIVAFAAITSSYFGHFLGAHEGLVGLVKSRSNMQVSKIEKISLGFIVITTWIVAIVNPSILGMIETMGAPMIAAILFLLPVFAMHKVPAMAKFKTSAPVQIFTVICGLAAISSVIYGAL

SEQ ID NO: 8045 - DNA, 1254 bp, Vibrio cholerae O1 biovar eltor str. N16961
  CDS (1)..(1254): transl_table=11
gtgaaagactctcaggaagtgacccattttagtgctgcccgttcctcaaaatggactcaacatgatacctattggttactaagcctatttggtacagcagtaggtgcagggattttatttttaccgatcaatattggcttagggggattctggccgctggtgctgatggcagtattagcctttcctatgacctatctgtcccaccgtggactggcgcgttttgtactttcatcacgtcgcccaaatgccgattttactgatgtggtcgaagagcactttggccaaaatgctggacgattgatttccctactctattttttatcgatttttcctattctgcttatctacggtgttggccttaccaacacagtcgatagtttcttggttaaccaagcggacatggtatcgccgccacgcgcactactttctggtgctttagtgtttgggcttatcgctatcatgctcagtggcgagaaaatcatgctgcgcgcttttgccatcatggtttatccgctggcggcgatccttgccctactctcgctgtatttgatcccttactggtcaatgccttcgtttgattttccgcaaaccagcgattttctgcacactgtatggctggccgtaccggtagtggtgttctcattcagccatgctgcggccatttcaagttttgccaatatccagcgtcgtcattatggtgaacaagctgatcaaaagtctgagcagattctgcgccacactagcgtggtcttaattttgtttgtgttgttgtttgtcttctcttgtgtacttgccctttcgccacaagcactgcaagaagccaaagcacaaaacatttcggtgctgacttatctggccaatgtcactgacaacccatttatcgcgacgctcgggcctctggtcgccttcatcgccatcacctcttccttcctcggccacttcttaggggcgcgtgaaagtttatctggcctactgaccaaaaacttaggggtatcactacgtttggcggaacgtctcaccatcggctttttatttgtcaccatctggatcgctgcaatcctcaacccaagcattttgggcatgatggaagcgctttctggtccagtcatcgcaatgattctattcataatgccgatgattgccgtcttcaaagtgcccgccctgcgtgaacatcaaaaacgtttcagcactttcttcgtgttactggttggattgctcgccgtttctgctctgctctacagtttacttcgctaa

SEQ ID NO: 8046 - protein, 417 aa, Vibrio cholerae O1 biovar eltor str. N16961
MKDSQEVTHFSAARSSKWTQHDTYWLLSLFGTAVGAGILFLPINIGLGGFWPLVLMAVLAFPMTYLSHRGLARFVLSSRRPNADFTDVVEEHFGQNAGRLISLLYFLSIFPILLIYGVGLTNTVDSFLVNQADMVSPPRALLSGALVFGLIAIMLSGEKIMLRAFAIMVYPLAAILALLSLYLIPYWSMPSFDFPQTSDFLHTVWLAVPVVVFSFSHAAAISSFANIQRRHYGEQADQKSEQILRHTSVVLILFVLLFVFSCVLALSPQALQEAKAQNISVLTYLANVTDNPFIATLGPLVAFIAITSSFLGHFLGARESLSGLLTKNLGVSLRLAERLTIGFLFVTIWIAAILNPSILGMMEALSGPVIAMILFIMPMIAVFKVPALREHQKRFSTFFVLLVGLLAVSALLYSLLR

SEQ ID NO: 8047 - DNA, 1242 bp, Pasteurella multocida subsp. multocida str. Pm70
  CDS (1)..(1242): transl_table=11
atggcaacaaaatcttgtgtcagttggagcaagtttgatcttgtctgggcattaaatttattcggtaccgctgtgggtgcgggtgtcttatttttacccattaatgcaggaaaaggcgggttttggcccttagtatgtatgacactcctagtaggtcccatgacttacttagcacaccgcggactcactcgttttgtcctatcttctgccaaaagcggcagtgatattactgaagtcgtagaagaacattttgggcaaaccgcaggaaaattcattactttactttatttctttgcgatttttcctattctgctgatttatggtaacggaataactaacacagtcgattcatttattgtacatcaactgcatatgaactcacctaatcgcgccttattggctttcatcctcattgccggcttaatttctgttatgttaatgaacgagaagatcatgctaaaaattaccgagtttttagtctatccattagtctgtattctgctcgccttatcactctatcttattccggaatggaatacctcaatgttaacagaatttccgagtacgcaagccctattcagcaccttatggattacgatccctgtattggttttttcgtttaaccactcaccggctatttcatcttttgcccaatctcaacaacgtgaatatggtgatctcacaaacacagaaacgcatactaaccgcactttaaaaataacctcaagtattttgctggtgtttgtgatgttcttcgtttttagctgtgtattaagtttaactcctgctgaattagcacaagcaaaaacacaaaatatcagtatcttatccttcctcgccaacaaatttgataatccttatatttcttaccttggacctttcgttgccttcttggcaattactagctctttctttggtcactatctcggtgcaaaagaaggactagaagggttaattatcaaaatgtctggcaaaaaagagattaagtgtcaaaaattaaattatttcaccgcacttttcttcttgctaaccctgtggattgtcgccattattaatccaagtattcttggcttaatagaatccttcggcggaccgattattgctgcaattttatttatcatgccgatgtatgcgatccgtaaaattcccgcgatgcaacgttaccaaggacgcttttcgaatctcttcgttaccatcatgggtatgttcgccatctcagcggttgtttatggcttattttaa

SEQ ID NO: 8048 - protein, 413 aa, Pasteurella multocida subsp. multocida str. Pm70
MATKSCVSWSKFDLVWALNLFGTAVGAGVLFLPINAGKGGFWPLVCMTLLVGPMTYLAHRGLTRFVLSSAKSGSDITEVVEEHFGQTAGKFITLLYFFAIFPILLIYGNGITNTVDSFIVHQLHMNSPNRALLAFILIAGLISVMLMNEKIMLKITEFLVYPLVCILLALSLYLIPEWNTSMLTEFPSTQALFSTLWITIPVLVFSFNHSPAISSFAQSQQREYGDLTNTETHTNRTLKITSSILLVFVMFFVFSCVLSLTPAELAQAKTQNISILSFLANKFDNPYISYLGPFVAFLAITSSFFGHYLGAKEGLEGLIIKMSGKKEIKCQKLNYFTALFFLLTLWIVAIINPSILGLIESFGGPIIAAILFIMPMYAIRKIPAMQRYQGRFSNLFVTIMGMFAISAVVYGLF

SEQ ID NO: 8049 - DNA, 1251 bp, Campylobacter jejuni subsp. jejuni NCTC 11168
  CDS (1)..(1251): transl_table=11
atgaatactcctaaatggactagtcacgatacaaggtgggttttatctctttttggaacagctattggagccggcgtacttttgttgcctattagtgctgggcttggtggattgatacctttgttagttatacttgttttagcttttcctatgacttacttagctcatagaaatttatgtcgctttgtgctttcaagttctaatccaaaagatgatattacttttgttgcagaaagttattttggcaagggcggtggatttttaattacacttttgtatttttttgctattttgcctattttattggtttatagtgctaatcttacaacaactttgcttgagttcttaatcaatcagttcaatttcaatgcagatcttactcatgctgctcgttggtgggtgagttttttgattgttggagttttggttttgatttctattcttggtgaaaatgttgtaacaaaagcaatgagttttcttgtttttccttttattatatttttatttattttttcattgcttttaattccacaatggaatttatcgttatttgcaaatgttgatttttccgtaatttcaacaagtaatttttgggttactttatggcttgttattcctgtgatggtatttagttttaatcactctcctatcatttcttcacttgcttgttattgtaaaaaagaatatggtggttatgctgaacctcgcgctagaaaaattatttctttggcaattattcttatggtttttgttgtaatgttttttgttttttcttgtgctttaacctttacaccagaagattttgcatcagcaaaagatcaaaatatcaatattcttacttttatagcaaataaatttcctgaagtttctttactagcttatgttggacctattgttgcacttgtggctattagcaaaagtttcttagggcattatcttggttctcaagaaggcttaaatggtattttatataaagcaagtaatggtagaattcaaggtaaattcgctcaaactttaacagcgatcattacctttgctatcgcgtggcttgttgcgtataaaaatccaagtgttataggaattatcgaggctattggtggtcctgttttggctattttgcttttcttaatgccgctttattgtatttatcgttttgatattttggcaaggtttcgtaataaatttttagatctttttgttttggtaatggggatagttgcaatttctgctgcaattcatgatcttttataa

SEQ ID NO: 8050 - protein, 416 aa, Campylobacter jejuni subsp. jejuni NCTC 11168
MNTPKWTSHDTRWVLSLFGTAIGAGVLLLPISAGLGGLIPLLVILVLAFPMTYLAHRNLCRFVLSSSNPKDDITFVAESYFGKGGGFLITLLYFFAILPILLVYSANLTTTLLEFLINQFNFNADLTHAARWWVSFLIVGVLVLISILGENVVTKAMSFLVFPFIIFLFIFSLLLIPQWNLSLFANVDFSVISTSNFWVTLWLVIPVMVFSFNHSPIISSLACYCKKEYGGYAEPRARKIISLAIILMVFVVMFFVFSCALTFTPEDFASAKDQNINILTFIANKFPEVSLLAYVGPIVALVAISKSFLGHYLGSQEGLNGILYKASNGRIQGKFAQTLTAIITFAIAWLVAYKNPSVIGIIEAIGGPVLAILLFLMPLYCIYRFDILARFRNKFLDLFVLVMGIVAISAAIHDLL

SEQ ID NO: 8051 - DNA, 1302 bp, Yersinia pestis CO92
  CDS (1)..(1302): transl_table=11
atggacactacgcaaacaagcactcttgcctcggcaagaaaaatctcatcaagtacatggcgcaaaagtgacaccatgtggatgttgggtctgtacggtacagcgattggcgcaggtgtactctttttgcccatcaacgccggtattggtggcctgctaccactgattgttatggctatcattgctttcccaatgacctactacgctcaccgtggcctgtgccgattcgtgttatccggtaaaaatccaggtgaagatattactgaggtggttgaagaacatttcggtgtaggcgcaggtaaactgattaccctgctttacttcttcgctatctaccccattctcttggtgtacagcgtagcaattaccaataccgtggatagtttcattacacatcagatacacctgccatcaccaccacgcgccattttgtccctgattctgattgtgggcctgatggctatcgtgcgctttggtgaacagaccatcgtcaaagccatgagcatcttggtattcccgtttgttgccgtattgatgatgttggcgatatacctgatcccaaactggtcaggtgcaatattcgaaaacgtatccatggacggtaacggcacaggtagcggcctgtggatgacaatgtggctaatcattcccgtcatggtgttctctttcaaccactcaccgatcatctcagcctttgctgtagcaaagcgcgaagagtacggggtggatgcagagaaaaaatgttcacgcattttgagctttgcccacatcatgatggttatcaccgtcatgttcttcgtcttcagttgcgtactgagcctgtctcctgcggatctgatggatgcaaaaaaccaaaacatctccattttgtcttatctggcaaaccattttaatacgccagtaattgcctatatggcaccggttattgcctttattgccatcactaaatcattcctgggccactatctgggcgcccgtgaaggttttaacggtatggtcattaagtctctgcgtagtagaggcaaaaccattgagcagaacaaactgaaccgcattactgcgttgttcatgttagtcaccacctgggctgtcgcgaccttaaacccaagtatcttggggatgatcgaaacattgggcggccctatcatcgcgatgctcctgttcctgatgccgatgtatgccattcataaagtcccggccatgcgtaaatacagcggccagatcagtaacgtattcgtggtactcatgggcttgatcgccatctctgggatcttattcaacttaagcaacttgtttaattag

SEQ ID NO: 8052 - protein, 433 aa, Yersinia pestis CO92
MDTTQTSTLASARKISSSTWRKSDTMWMLGLYGTAIGAGVLFLPINAGIGGLLPLIVMAIIAFPMTYYAHRGLCRFVLSGKNPGEDITEVVEEHFGVGAGKLITLLYFFAIYPILLVYSVAITNTVDSFITHQIHLPSPPRAILSLILIVGLMAIVRFGEQTIVKAMSILVFPFVAVLMMLAIYLIPNWSGAIFENVSMDGNGTGSGLWMTMWLIIPVMVFSFNHSPIISAFAVAKREEYGVDAEKKCSRILSFAHIMMVITVMFFVFSCVLSLSPADLMDAKNQNISILSYLANHFNTPVIAYMAPVIAFIAITKSFLGHYLGAREGFNGMVIKSLRSRGKTIEQNKLNRITALFMLVTTWAVATLNPSILGMIETLGGPIIAMLLFLMPMYAIHKVPAMRKYSGQISNVFVVLMGLIAISGILFNLSNLFN

SEQ ID NO: 8053 - DNA, 1332 bp, Salmonella typhimurium LT2
  CDS (1)..(1332): transl_table=11
atgagtactactgatagcattgtatccagccaggcaaaacagtcgtcatggcgtaaatcggacacgacgtggacgctgggtttatttggtaccgccatcggcgccggggtgctgtttttccctatccgcgccgggtttggcgggcttatccccattcttctgatgctggttttagcttaccccattgcgttctattgtcaccgggcgctggcgcgtctgtgtttatccggatctaatccgtccggcaatattacggaaacggtcgaagagcactttggtaaaacgggcggggtagttatcacgttcctttacttctttgcgatttgtccgctgctgtggatttatggcgtcaccattactaacacgttcatgacgttttgggaaaaccagctgcagatgccagcgttgaatcgcggtttcgtggcgctgttcttgctgctgctgatggcctttgtgatctggtttggtaaagatctgatggttaaggtgatgagttacctggtatggccgtttatcgccagtctggtactaatctcattatcgctgattccttactggaactcggcggttatcgatcaggttgatctcagtaatatcgcgctgaccgggcacgatggcatactggttacggtgtggctgggcatctctatcatggtgttctcctttaacttttcgcccatcgtctcttccttcgtggtgtctaagcgtgaagagtatgagaaagagtttggccgcgaatttaccgagcgtaaatgttcacagatcatctcgcgcgccagtatgctgatggtcgccgtggtgatgttcttcgcctttagctgcctgtttacgctctccccgcagaacatggcggatgcgaaagcgcagaacattccggtactttcctacctggccaaccatttcgcctctttgtcggggacaaaatctacttttgcaacggtgctggagtatggcgcgtctatcatcgcgctggttgctattttcaaatctttcttcggccactacctggggacgctggaagggctgaacggcctggtgctgaaatttggttataaaggcgataaaaccaaagtctctatgggcaagcttaacaccatcagcatgatcttcattatggggtctacctgggtcgtagcttacgcaaacccgaacattctggacctgattgaagcgatgggcgcgccgattatcgcctcgctgttatgcctgctgccgatgtacgccattcgtaaagcgccgtcgctggcgaagtaccgtggtcgtctggataacgtgttcgtcaccctgattggtctgctgaccatcctgaatattgtctacaaattgttctaa

SEQ ID NO: 8054 - protein, 443 aa, Salmonella typhimurium LT2
MSTTDSIVSSQAKQSSWRKSDTTWTLGLFGTAIGAGVLFFPIRAGFGGLIPILLMLVLAYPIAFYCHRALARLCLSGSNPSGNITETVEEHFGKTGGVVITFLYFFAICPLLWIYGVTITNTFMTFWENQLQMPALNRGFVALFLLLLMAFVIWFGKDLMVKVMSYLVWPFIASLVLISLSLIPYWNSAVIDQVDLSNIALTGHDGILVTVWLGISIMVFSFNFSPIVSSFVVSKREEYEKEFGREFTERKCSQIISRASMLMVAVVMFFAFSCLFTLSPQNMADAKAQNIPVLSYLANHFASLSGTKSTFATVLEYGASIIALVAIFKSFFGHYLGTLEGLNGLVLKFGYKGDKTKVSMGKLNTISMIFIMGSTWVVAYANPNILDLIEAMGAPIIASLLCLLPMYAIRKAPSLAKYRGRLDNVFVTLIGLLTILNIVYKLF

SEQ ID NO: 8055 - DNA, 1323 bp, Yersinia pestis KIM
  CDS (1)..(1323): transl_table=11
gtgttcacaatggagattttcatggacactacgcaaacaagcactcttgcctcggcaagaaaaatctcatcaagtacatggcgcaaaagtgacaccatgtggatgttgggtctgtacggtacagcgattggcgcaggtgtactctttttgcccatcaacgccggtattggtggcctgctaccactgattgttatggctatcattgctttcccaatgacctactacgctcaccgtggcctgtgccgattcgtgttatccggtaaaaatccaggtgaagatattactgaggtggttgaagaacatttcggtgtaggcgcaggtaaactgattaccctgctttacttcttcgctatctaccccattctcttggtgtacagcgtagcaattaccaataccgtggatagtttcattacacatcagatacacctgccatcaccaccacgcgccattttgtccctgattctgattgtgggcctgatggctatcgtgcgctttggtgaacagaccatcgtcaaagccatgagcatcttggtattcccgtttgttgccgtattgatgatgttggcgatatacctgatcccaaactggtcaggtgcaatattcgaaaacgtatccatggacggtaacggcacaggtagcggcctgtggatgacaatgtggctaatcattcccgtcatggtgttctctttcaaccactcaccgatcatctcagcctttgctgtagcaaagcgcgaagagtacggggtggatgcagagaaaaaatgttcacgcattttgagctttgcccacatcatgatggttatcaccgtcatgttcttcgtcttcagttgcgtactgagcctgtctcctgcggatctgatggatgcaaaaaaccaaaacatctccattttgtcttatctggcaaaccattttaatacgccagtaattgcctatatggcaccggttattgcctttattgccatcactaaatcattcctgggccactatctgggcgcccgtgaaggttttaacggtatggtcattaagtctctgcgtagtagaggcaaaaccattgagcagaacaaactgaaccgcattactgcgttgttcatgttagtcaccacctgggctgtcgcgaccttaaacccaagtatcttggggatgatcgaaacattgggcggccctatcatcgcgatgctcctgttcctgatgccgatgtatgccattcataaagtcccggccatgcgtaaatacagcggccagatcagtaacgtattcgtggtactcatgggcttgatcgccatctctgggatcttattcaacttaagcaacttgtttaattag

SEQ ID NO: 8056 - protein, 440 aa, Yersinia pestis KIM
MFTMEIFMDTTQTSTLASARKISSSTWRKSDTMWMLGLYGTAIGAGVLFLPINAGIGGLLPLIVMAIIAFPMTYYAHRGLCRFVLSGKNPGEDITEVVEEHFGVGAGKLITLLYFFAIYPILLVYSVAITNTVDSFITHQIHLPSPPRAILSLILIVGLMAIVRFGEQTIVKAMSILVFPFVAVLMMLAIYLIPNWSGAIFENVSMDGNGTGSGLWMTMWLIIPVMVFSFNHSPIISAFAVAKREEYGVDAEKKCSRILSFAHIMMVITVMFFVFSCVLSLSPADLMDAKNQNISILSYLANHFNTPVIAYMAPVIAFIAITKSFLGHYLGAREGFNGMVIKSLRSRGKTIEQNKLNRITALFMLVTTWAVATLNPSILGMIETLGGPIIAMLLFLMPMYAIHKVPAMRKYSGQISNVFVVLMGLIAISGILFNLSNLFN

SEQ ID NO: 8057 - DNA, 1119 bp, Shigella flexneri 2a str. 301
  CDS (1)..(1119): transl_table=11
gtggtcctgtttattactgctctggtcgcctggcctttaacatattggccacataaagccttatgccagttcatcctctcatcaaaaacatcagcaggtgaagggataacgggcgcggtaacacactactatggcaagaagattggtaatctgattaccacgctgtacttcatcgccttttttgtcgtcgtgttgatatatgcagtggcaattaccaactcacttacggaacagctggcaaagcatatggttattgatcttcgcatccgtatgttggtgagtctgggtgttgtattaattctgaatctcatttttctgatgggacgtcatgccactattcgggtaatgggatttttggtattcccattgattgcctatttcttatttctttccatttaccttgtcggtagttggcaacctgatctattaacaacccaggtagagttcaatcagaatacccttcaccagatatggatatcgattcccgtgatggttttcgcctttagccatacgcccattatttctacgtttgccatagacagacgtgaaaaatatggcgaacacgctatggataaatgcaaaaaaattatgaaagtcgcttatctcatcatctgcataagtgtactgttctttgtctttagctgcctgctttctattccatcttcgtatattgaagcggctaaagaagaaggggtcaccattttatcggcgctttctatgctgccgaacgccccagcatggttgtcaatttccgggattattgtcgcagtagttgcgatgtcgaaatcattcctgggtacgtactttggcgttattgaaggtgccacagaggtcgtcaaaacaacactacagcaggttggtgtaaagaaaagtcgtgcatttaaccacgcactatcaattatgttggtatcgctgattaccttcattgtttgttgcattaacccgaacgcgatttcgatgatttacgcgatcagcggcccgctcattgccatgatacttttcatcatgcctacgctgtcaacgtatctcatcccggcgcttaaaccctggcgttccatcggaaatctgattacgctgatcgtgggtatcctgtgcgtatcggtaatgttctttagctaa

SEQ ID NO: 8058 - protein, 372 aa, Shigella flexneri 2a str. 301
MVLFITALVAWPLTYWPHKALCQFILSSKTSAGEGITGAVTHYYGKKIGNLITTLYFIAFFVVVLIYAVAITNSLTEQLAKHMVIDLRIRMLVSLGVVLILNLIFLMGRHATIRVMGFLVFPLIAYFLFLSIYLVGSWQPDLLTTQVEFNQNTLHQIWISIPVMVFAFSHTPIISTFAIDRREKYGEHAMDKCKKIMKVAYLIICISVLFFVFSCLLSIPSSYIEAAKEEGVTILSALSMLPNAPAWLSISGIIVAVVAMSKSFLGTYFGVIEGATEVVKTTLQQVGVKKSRAFNHALSIMLVSLITFIVCCINPNAISMIYAISGPLIAMILFIMPTLSTYLIPALKPWRSIGNLITLIVGILCVSVMFFS

SEQ ID NO: 8059 - DNA, 1332 bp, Shigella flexneri 2a str. 301
  CDS (1)..(1332): transl_table=11
atgagtacttcagatagcattgtatccagccagacaaaacaatcgtcctggcgtaaatcagataccacatggacgttaggcttgtttggtacggcaatcggcgccggggtgctgttcttccctatccgcgcaggttttggcggactgatcccgattcttctgatgttggtattggcataccccatcgcattttattgccaccgggcgctggcgcgtctgtgtctttctggctctaacccttccggcaacattacggaaacggtggaagagcattttggtaaaactggcggcgtggttatcacgttcctgtacttcttcgcgatttgcccactgctgtggatttatggcgttactattaccaatacctttatgacgttctgggaaaaccagctcggatttgcaccgctgaatcgcggctttgtggcgctgttcctgttgctgctgatggctttcgtcatctggtttggtaaggatctgatggttaaagtgatgagctacctggtatggccgtttatcgccagcctggtgctgatttctctgtcgctgatcccttactggaactctgcagttatcgaccaggttgacctcggttcgctgtcgttaaccggtcatgacggtatcctgatcactgtctggctggggatttccatcatggttttctcctttaacttctcgccaatcgtctcttccttcgtggtttctaaacgtgaagagtatgagaaagacttcggtcgcgacttcaccgaacgtaaatgttcccaaatcatttctcgtgccagcatgctgatggttgcagtggtgatgttctttgcctttagctgcctgtttactctgtctccggccaacatggcggaagccaaagcgcagaatattccagtgctttcttatctggctaaccactttgcgtccatgaccggtacgaaaacaacgttcgcgattacactggaatatgcggcttccatcatcgcactcgtggctatcttcaaatctttcttcggtcactatctggggacgctggaaggcttgaatggtctgattctgaagttcggttataaaggtgacaaaaccaaagtgtcgctgggtaaactgaatactctcagcatgatcttcatcatgggctccacctgggttgttgcctacgccaacccgaacatcctcgacctgattgaagccatgggcgcaccgattatcgcatccctgctgtgcctgttgccgatgtatgctatccgtaaagcgccgtctctggcgaaataccgtggtcgtctggataacgtgtttgttaccgtgattggtctgctgaccatcctgaacatcgtatacaaactgttttaa

SEQ ID NO: 8060 - protein, 443 aa, Shigella flexneri 2a str. 301
MSTSDSIVSSQTKQSSWRKSDTTWTLGLFGTAIGAGVLFFPIRAGFGGLIPILLMLVLAYPIAFYCHRALARLCLSGSNPSGNITETVEEHFGKTGGVVITFLYFFAICPLLWIYGVTITNTFMTFWENQLGFAPLNRGFVALFLLLLMAFVIWFGKDLMVKVMSYLVWPFIASLVLISLSLIPYWNSAVIDQVDLGSLSLTGHDGILITVWLGISIMVFSFNFSPIVSSFVVSKREEYEKDFGRDFTERKCSQIISRASMLMVAVVMFFAFSCLFTLSPANMAEAKAQNIPVLSYLANHFASMTGTKTTFAITLEYAASIIALVAIFKSFFGHYLGTLEGLNGLILKFGYKGDKTKVSLGKLNTLSMIFIMGSTWVVAYANPNILDLIEAMGAPIIASLLCLLPMYAIRKAPSLAKYRGRLDNVFVTVIGLLTILNIVYKLF

SEQ ID NO: 8061 - DNA, 1293 bp, Shewanella oneidensis MR-1
  CDS (1)..(1293): transl_table=11
atgcaaaaagatgcgatcagtgttctcgaaacacctcaaagcactcaagaaagcacaacaagacgcttaccttggacgcgccaagatactacttggatgctaagtttatttggtaccgctgtgggggcaggtatcttatttctacccatcaatgcgggcatgggcggtttttggcccttagtcttgatggccattatcatcggacctatgacctatttggctcaccgtggtctttcgcgcttcgtatgctcatctagcattcccggcagtgatattacccaagtagtggaagagcactttgggattggcgcaggtaaagcaattactttgctttatttcttagcgatttatcctatcgtgttgatctatggcgttgggatcaccaatactgtcgatagctttatcgttaatcaattaggcatggcatcaccaccgcgttttctgctttcgggtatcttgattttcggcatgatggccgtgatggtggcgggtgagcaatttatgctgaaggtgactcagctgctggtgtatccgctggtggggattttggcctttatgtctgtgtatcttattcctgaatggaaaatggatgcactgcaggttgtgcctgaaacaggtgcttttttagggactgtgtggttaaccattcctgtattggtgttcgcctttaaccattctccggcgatttcacaattttcggtttccttaaaacgtgaccatggcgcgaatgccgcacgtaaggccgatgtgatcctgcgtaatacttcgatgatgttagtcggatttgtgatgctgtttgtgttctcctgcgtcttgtcgctgtcgcctgaacaattggccgaagcgaaggcaaagaacctgccgattttgtcttatctagcaaacgtgcatgacagcggttttgtcagctattttggtcctttcattgcctttatcgcgattgtgtcttccttctttggtcactatatgggcgctactgaaggtatgaagggcattattgttaagcaattacgctcaagcaaaaagcaagtcagcgaggataagctgaacaagtttatcttagtgtttatgtttgccacgatttggggcgttgcgattaaaaacccaagcattctggggatgattgaggcgctgggcggcccggtgattgcggcaattttgtacttaatgccaatgtatgcggtgtataaagtaccggcacttaaagcataccgtcaccgtatcagcaatgtgtttgtggtgattgctggtttactggcgatgacggcgattctatttggtctactcagttaa

SEQ ID NO: 8062 - protein, 430 aa, Shewanella oneidensis MR-1
MQKDAISVLETPQSTQESTTRRLPWTRQDTTWMLSLFGTAVGAGILFLPINAGMGGFWPLVLMAIIIGPMTYLAHRGLSRFVCSSSIPGSDITQVVEEHFGIGAGKAITLLYFLAIYPIVLIYGVGITNTVDSFIVNQLGMASPPRFLLSGILIFGMMAVMVAGEQFMLKVTQLLVYPLVGILAFMSVYLIPEWKMDALQVVPETGAFLGTVWLTIPVLVFAFNHSPAISQFSVSLKRDHGANAARKADVILRNTSMMLVGFVMLFVFSCVLSLSPEQLAEAKAKNLPILSYLANVHDSGFVSYFGPFIAFIAIVSSFFGHYMGATEGMKGIIVKQLRSSKKQVSEDKLNKFILVFMFATIWGVAIKNPSILGMIEALGGPVIAAILYLMPMYAVYKVPALKAYRHRISNVFVVIAGLLAMTAILFGLLS

SEQ ID NO: 8063 - DNA, 1281 bp, Pseudomonas putida KT2440
  CDS (1)..(1281): transl_table=11
atgaatgagcaggccccaagcgttgaacaacgctttgcagaatcgacccccgccgccctcggcacctgggcgcgtcacgacaccacctggatgctgggcctgttcggcacagccatcggcgccgggacactgttcctgccgatcaacgccggccttggcggcttctggccgctgctgatcctggccgtgctggcctttccgatgacctatttcgcccatcgcgggctgacccgtttcgtcctttccgggcgcgatggcagcgacatcaccgaagtggtcaaggagcatttcggcatcaccgccggtgcctcgatcaccgtgctgtacttcttcgccatcttcccgatcctgcttatctacagcgtggcgctgaccaacaccgtgtccagcttcatggagcaccagctgcacatgcagccgccgccacgggcaatcctgtcattcgtgctgatcctcggtctgctggccatcgtgcgctgcggggagcaggccacggtcaaggtcatgagcctgctggtctacccgttcatcgtcgctctggcgttgctgggcctgtacctggtgccgcactggaccggtggcattctcgacagcgccacagaggtgccgccggcctcggccttcctgcacaccctgtggctggccattccggtgatggtgttctcgttcaaccattcgccgatcatctcggcctttgccgtcgaccagaagcgccgttacggcgcgcacgccgacgagcgcagcggccagatcctgcgtcgtgcccacctgttgatggtggtgatggtgctgttcttcgtgttcagctgcgtgctcaccctgagcagcgcccagctggccgaagccaaggcgcagaacctgtcgatcctgtcgtacctggccaaccacttcagcaacccgaccatcgcgttcgctgcgccgttgatcgccttcgtggccatcgccaagtcgttcctcggccactacatcggcgccagcgaaggcctgaagggcatcatcgccaagaccggtgcgcgcccaggcgccaaggccctggaccgcgtggttgccgcactgatgctggtggtgtgctggatcgtcgccacgctcaacccgagcattctcggcatgatcgagtcgctcggcggcccgattctcgcggtgctgttgttcctgatgccgatgtacgccattcgccgtgtgccatcgatgcgcaagtacagcggtgcggcctccaacgtgttcgtcgttgtggtcggcctggttgcgctgacttccgtggtgtacggccttgtaagctga

SEQ ID NO: 8064 - protein, 426 aa, Pseudomonas putida KT2440
MNEQAPSVEQRFAESTPAALGTWARHDTTWMLGLFGTAIGAGTLFLPINAGLGGFWPLLILAVLAFPMTYFAHRGLTRFVLSGRDGSDITEVVKEHFGITAGASITVLYFFAIFPILLIYSVALTNTVSSFMEHQLHMQPPPRAILSFVLILGLLAIVRCGEQATVKVMSLLVYPFIVALALLGLYLVPHWTGGILDSATEVPPASAFLHTLWLAIPVMVFSFNHSPIISAFAVDQKRRYGAHADERSGQILRRAHLLMVVMVLFFVFSCVLTLSSAQLAEAKAQNLSILSYLANHFSNPTIAFAAPLIAFVAIAKSFLGHYIGASEGLKGIIAKTGARPGAKALDRVVAALMLVVCWIVATLNPSILGMIESLGGPILAVLLFLMPMYAIRRVPSMRKYSGAASNVFVVVVGLVALTSVVYGLVS

SEQ ID NO: 8065 - DNA, 1254 bp, Vibrio vulnificus CMCP6
  CDS (1)..(1254): transl_table=11
atgaaaacaacttcaactgcggctcctgccgtacaatcttctagtaagtttacttacaaagatttcacttggtgtctgtcccttttcggtacagcggtaggtgctggtgtacttttccttccaattaaagcgggtgctggcggcttctggccattagttatgctagcgctacttgcagcaccaatgacttggttcgctcacaaatctctcgctcgtttcgttctttctgctaagaaccctgaagcggacatcactgacactgtagaagagcactttggtaagactggcgcaaaccttattacttttgcctatttcttcgctatctacccaatcgttctgatttacggtgttggtatcacaaacacagtagactctttccttgttaaccaaatgggtatggaatccattccacgtccactgctatctggcgcattgatccttgcaatgaccgctggtgtggtatttggtaaagaactgatgctaaaagcaacgtctgcaatggtttacccactagtattcgttcttcttgcactttctgtctacttgatcccagattggaacacgtcgatgatgcaagtggcacctgattggtcttctatgcctgttgtcgtatggctagctatcccgatcatcgtgttctcattcaaccacagcccaatcatctctcagttctctaaagaacaacgcctacagcatggtgacaaagcggttcagaaaaccgatgcgatcactggcggtgcagcgatgatgctaatgggctttgtgatgttcttcgtattctctgttgtgctgtctatgtctccagagcaactggcttctgcgaaagagcaaaacatctctgtactttcttacctagcgaacgtgcatgagtctccactgatctcttaccttggtccactggttgcgtttgcagcgatcacttctagctacttcggtcacttccttggtgcgcatgaaggtctagttggtctgatcaaatctcgctcaaacagccctatcagcaagatcgagaaagcgtcgctactgttcatcgttatcactacttggatcgtggctatcgttaacccaagtatcctaggcatgattgaaacaatgggcgcaccaatgattgcggcaatcctgttcctaatgcctgtatttgcaatgcaaaaagtgccagcgatggcgaagtataaaacttcagcagctgtgcagattttcacagttatctgtggtcttgcttctattacttctgtaatctacggcgctctttaa

SEQ ID NO: 8066 - protein, 417 aa, Vibrio vulnificus CMCP6
MKTTSTAAPAVQSSSKFTYKDFTWCLSLFGTAVGAGVLFLPIKAGAGGFWPLVMLALLAAPMTWFAHKSLARFVLSAKNPEADITDTVEEHFGKTGANLITFAYFFAIYPIVLIYGVGITNTVDSFLVNQMGMESIPRPLLSGALILAMTAGVVFGKELMLKATSAMVYPLVFVLLALSVYLIPDWNTSMMQVAPDWSSMPVVVWLAIPIIVFSFNHSPIISQFSKEQRLQHGDKAVQKTDAITGGAAMMLMGFVMFFVFSVVLSMSPEQLASAKEQNISVLSYLANVHESPLISYLGPLVAFAAITSSYFGHFLGAHEGLVGLIKSRSNSPISKIEKASLLFIVITTWIVAIVNPSILGMIETMGAPMIAAILFLMPVFAMQKVPAMAKYKTSAAVQIFTVICGLASITSVIYGAL

SEQ ID NO: 8067 - DNA, 1173 bp, Vibrio vulnificus CMCP6
  CDS (1)..(1173): transl_table=11
ttgagtttatttggcaccgccgtgggggctggcattctctttctgcctatcaacctaggaatcggcggcttttggcctttggtactgttagcgcttttggcgtttcccatgacattttggggtcatcgtgcacttgcgcggtttgtgctctcgtcaaaacaagccgatgcggactttaccgatgtcgtcgaggagcactttggagcgaaagcaggtcgtctgatttccttgctctatttcttgtcgatattccccattctgctcatttatggcgtgggcatcaccaacacggttgacagctttatggtcaatcaagcgggaatggagtcattacctcgagtgctgctgtctggtgttttggttttcagcctaattgccatcatgctcggcggtgaaaagctgatgctgcgtgcgtttgcagccatggtttacccactcgccaccatactggcgtttttgtcgctttatctcatcccaagttggcaactgccttctttggctctgccttctgccggcgattttctacaaacggtctggttagccgtgcctgtggtgatcttctcatttagccatgccgcagccatttccagcttcgttggcgtgcaaaaacgccattacggcgagcaggcgaatggtaaatcagaacagattcttcagcgtaccagcatcatgttgattgcttttgtactgctgtttgttttctcctgcgtgctctctttaagcccagagcaattggcgcaagcaaaagcgcaaaatgtgtcggtactttcttatttagccaacgcaacggagaacccatttattgcgacttttggtcctctggttgcctttatcgccattacgtcgtcattccttggccattttttaggtgcacgagaaagccttaacggattgctaaccaagcacacatcaatgcctattcaacgcgccgataaaatgaccatcgtcagcttgtttatctcaatttggattgcggcggtgatcaacccgagcattctcggcatgatggaaaccttatctggcccagtcatcgctatgatcctgtttatcatgccggtttacgccatttaccgagttgattcattaaaaatatatcgtggtaaagccacgactgtgtttgttttgctgacagggctactggccgtttctgcgttgctgttcgcgattgtctaa

SEQ ID NO: 8068 - protein, 390 aa, Vibrio vulnificus CMCP6
MSLFGTAVGAGILFLPINLGIGGFWPLVLLALLAFPMTFWGHRALARFVLSSKQADADFTDVVEEHFGAKAGRLISLLYFLSIFPILLIYGVGITNTVDSFMVNQAGMESLPRVLLSGVLVFSLIAIMLGGEKLMLRAFAAMVYPLATILAFLSLYLIPSWQLPSLALPSAGDFLQTVWLAVPVVIFSFSHAAAISSFVGVQKRHYGEQANGKSEQILQRTSIMLIAFVLLFVFSCVLSLSPEQLAQAKAQNVSVLSYLANATENPFIATFGPLVAFIAITSSFLGHFLGARESLNGLLTKHTSMPIQRADKMTIVSLFISIWIAAVINPSILGMMETLSGPVIAMILFIMPVYAIYRVDSLKIYRGKATTVFVLLTGLLAVSALLFAIV

SEQ ID NO: 8069 - DNA, 1281 bp, Lactobacillus plantarum WCFS1
  CDS (1)..(1281): transl_table=11
atgacaaatatatttaagggttggagaaaaaatgatactttttggatgctgagtttgttcggaacggcgattggggccggcgtgctattcttaccgattggagttggcacggcaggtattcttggtatcatcatgatacttattttggctttgccaaccacattttttgctcacaggggcctgagtaggtttgtcttgtcggctaaaaatgatggtgatgacattactgatgttgttgaacaacattttggctttaagattggattgctttttaccattatttatttcttctccatttatccaatcttattagtttattctgtttctattacgaatactgtatcgaaatttattaccgaccaaatgcacatgcaaacaccacctcgttggctgttgtcgctagtacttgttgggattctcattggaattgctcgctttggtacctctttgattaccaaagttatgagtggcctggcctttccatttattattgtaatcgttctgttttccttttatcttattccgcattggaacggcgcaatcctctcaacattttccagttctgtatctgggggacatttggttggcactttaggaaacttgtggttacttattcctgttatgatcttttcgtttaaccattctccgatcatctcttcattttccgttgccgaacgtaaagaatatagtggggaaggtaaggacaaagtcgataaaaagatttcgacaattctattgtcggccgaaacgttgatggtcattgtcgcaatgttctttgttattagttgtacattggcgttgactccagaccaaatccttgaagctaaaaatgaaaatgtttcaatccttgattacgttgcgactgctttcaataatccaattattaaatatgtttctcccgtaattgcttttattgcaatcgccaagtcctttttaggacattatctaggaacgagtgaaggcttacgtgggattattcgtaagatggaagaaaaatctaacaagacgctttcaagtcgaactgtttcgacaattgttgatcttgttctgctactaagtgcctggatagttgcctgggtcaatccttccattatgggaatgattgaaaccatcattggaccaatcattgcgtttatcttgttcttgatgccaatgtatgccattcataaaagtcctaagttacagcaatatgccggcaaacacagcaatgtctttgttgtggtaattggattaatcgcagttagtggtatcctgttcaatatcatcaaattgtttatttag

SEQ ID NO: 8070 - protein, 426 aa, Lactobacillus plantarum WCFS1
MTNIFKGWRKNDTFWMLSLFGTAIGAGVLFLPIGVGTAGILGIIMILILALPTTFFAHRGLSRFVLSAKNDGDDITDVVEQHFGFKIGLLFTIIYFFSIYPILLVYSVSITNTVSKFITDQMHMQTPPRWLLSLVLVGILIGIARFGTSLITKVMSGLAFPFIIVIVLFSFYLIPHWNGAILSTFSSSVSGGHLVGTLGNLWLLIPVMIFSFNHSPIISSFSVAERKEYSGEGKDKVDKKISTILLSAETLMVIVAMFFVISCTLALTPDQILEAKNENVSILDYVATAFNNPIIKYVSPVIAFIAIAKSFLGHYLGTSEGLRGIIRKMEEKSNKTLSSRTVSTIVDLVLLLSAWIVAWVNPSIMGMIETIIGPIIAFILFLMPMYAIHKSPKLQQYAGKHSNVFVVVIGLIAVSGILFNIIKLFI

SEQ ID NO: 8071 - DNA, 1278 bp, Pseudomonas syringae pv. tomato str. DC3000
  CDS (1)..(1278): transl_table=11
atgaatgatcaggctaacggcgtcgtagaacgcctggatgtagctcccgagagcatcgcctcttggaaccgtaatgacaccacctggatgctcggattgttcggtaccgccattggcgcaggtacgctgttcttgcccatcaacgcaggcatcggcggtttctggccactgctggctctcgcgctgctggcattcccgatgacgttttatgcacaccgtggcctgacccgcttcgtactgtccgggcgtgagggtgccgacatcacggaagtggtcgaacagcatttcggcaaaagcgccggggcaatgatcaccttgctgtacttcttcgcgatcttcccgatcctgttgatttacagcgtggccctcaccaataccgtgggcagctttcttgaacaccaattgcacatagcgccgccgccgcgtgccgtgctggcgttcttgctgatcatgggcctgctggcgctggttcgctgtggcgagcggttcatcgtcaaggccatgagcgtgatggtttatccgtttatcgtcgcgctgctgtttctggccatgtttctgattccacactggaccggcggtatcttgagcaccgcaaccaccttgcctgagccctcggcgtttttgtcgaccctttggctggcgattccggtgatggtgttttctttcaaccatgcgccgatcatctcggcttttgcggtcgatcagaaacgccagtacggcgagaatgccgaggtgcgcagttcgcagattctggcacgcgcccacgttttgatggtggtgatggtgctgttcttcgtgttcagctgcgtgctgaccctttcgcccgctgaactggctgaagccaaggcgcagaacatctcgatcctgtcttacctggccaaccacttcaacaacccgaccattgcattcgtcgcgccgctgattgcgtttgtggcgatttccaaatcgtttctcggccactacatcggcgccagcgagggcttgaaagggctggttctgaaatcgggacgtcgtccggcgcccaaggtactggaccgtatgaccgccgcgttcatgctggtggtgtgctggatagtggcaacgctcgacccaagtattctggggatgatcgagaacctgggcgggccagtgatttcggtgttgctgtttctgatgccgatgtatgcgatctacaaggtgccttccatgcgcaaatatgcaggtgcatggtccaactactttgtcattgccgcaggtctggtggctatttcggcgctgatcttctcgctgacgcgctga

SEQ ID NO: 8072 - protein, 425 aa, Pseudomonas syringae pv. tomato str. DC3000
MNDQANGVVERLDVAPESIASWNRNDTTWMLGLFGTAIGAGTLFLPINAGIGGFWPLLALALLAFPMTFYAHRGLTRFVLSGREGADITEVVEQHFGKSAGAMITLLYFFAIFPILLIYSVALTNTVGSFLEHQLHIAPPPRAVLAFLLIMGLLALVRCGERFIVKAMSVMVYPFIVALLFLAMFLIPHWTGGILSTATTLPEPSAFLSTLWLAIPVMVFSFNHAPIISAFAVDQKRQYGENAEVRSSQILARAHVLMVVMVLFFVFSCVLTLSPAELAEAKAQNISILSYLANHFNNPTIAFVAPLIAFVAISKSFLGHYIGASEGLKGLVLKSGRRPAPKVLDRMTAAFMLVVCWIVATLDPSILGMIENLGGPVISVLLFLMPMYAIYKVPSMRKYAGAWSNYFVIAAGLVAISALIFSLTR

SEQ ID NO: 8073 - DNA, 1254 bp, Vibrio parahaemolyticus RIMD 2210633
  CDS (1)..(1254): transl_table=11
atgaatacaactacttctgcggtttctaccgcacaatcgtctagtaagtttacttacaaagacttcacctggtgtctgtctctgttcggcacggcagtaggtgcaggtgtacttttccttcctattaaagctggtgcgggtggtttttggccattagtaatcctagctctaatcgcggcaccaatgacttggttcgcacacaaatctctagctcgcttcgttctttcagctaagaacccagaagcagacatcactgacacagtagaagaacacttcggtaaaactggcgcaaaccttattacgttcgcatacttcttcgctatttacccaatcgtacttatctacggtgttggtatcacaaacacggttgactctttcctagttaaccaaatgggcatggaatcgattcctcgctggctactttctggtgcgcttatcgcagcaatgacagcaggcgtagtattcggtaaagaactgatgctgaaagcaacttcagcaatggtttaccctctagtgttcatcctattggcgttgtctttctacctaatccctgagtggaacacatctatgattgaagtggctccagactgggctgcaatgccaactatcgtttggttagcaattcctatcatcgtattctcattcaaccacagcccaatcatttctcagttctctaaagagcaacgcatgcaatacggcgacgaagcttacaagaaaacagacatgatcactggcggtgcagcgatgatgctaatgggctttgttatgttcttcgtattctctgtagtactttctctatctccagagcaactagcatctgcgaaagaacaaaacatctctgtactttcttacctagcgaacatccacgaatctccactgatctcatacatgggtccattggttgcattcgcggcgatcacttctagctacttcggtcacttcctaggtgcacacgaaggtctagtaggtctaatcaaatctcgctcacaatctccagtaagcaagatcgaaaaaggttctctactgttcatcgttatcactacttggattgtggctatcgttaacccaagcatcctaggcatgatcgaaacaatgggcgcgccaatgattgcggcaatcctattcttgatgcctgtattcgcgatgcaaaaagttccagcaatggcgaagtacaaaacttcagcacctgtgcaaattttcacagcaatctgtggtcttgcagcaattacttctgtaatctacggcgctctttaa

SEQ ID NO: 8074 - protein, 417 aa, Vibrio parahaemolyticus RIMD 2210633
MNTTTSAVSTAQSSSKFTYKDFTWCLSLFGTAVGAGVLFLPIKAGAGGFWPLVILALIAAPMTWFAHKSLARFVLSAKNPEADITDTVEEHFGKTGANLITFAYFFAIYPIVLIYGVGITNTVDSFLVNQMGMESIPRWLLSGALIAAMTAGVVFGKELMLKATSAMVYPLVFILLALSFYLIPEWNTSMIEVAPDWAAMPTIVWLAIPIIVFSFNHSPIISQFSKEQRMQYGDEAYKKTDMITGGAAMMLMGFVMFFVFSVVLSLSPEQLASAKEQNISVLSYLANIHESPLISYMGPLVAFAAITSSYFGHFLGAHEGLVGLIKSRSQSPVSKIEKGSLLFIVITTWIVAIVNPSILGMIETMGAPMIAAILFLMPVFAMQKVPAMAKYKTSAPVQIFTAICGLAAITSVIYGAL

SEQ ID NO: 8075 - DNA, 1257 bp, Vibrio parahaemolyticus RIMD 2210633
  CDS (1)..(1257): transl_table=11
gtgaaagaatctcgaaatacgttaaattctagtgaattaaacacaacaacctcttggtcaaaacatgacacacattgggtacttagcctattcgggaccgccgttggtgccggtattttgtttctgccaatcaacttgggcattggtggattttggccactagtcgcaatggcgtttttggcatttccaatgacttacctcgcccatcgcggtttagcgcgctttgtattgtcttctaagatcaaaaatgccgactttaccgatgtggttgaagaacactttggcgcaaaagcgggacgttcaatctctctgctttatttcctatcgatttttcctatcctgttaatttacggcgtgggcatcaccaatactgtagacagctttatggtgaaccaagcgggaatggaagccttaccacgcgagctactttcgggcgtattagtgttcgctttgattgccattatgatggcgggcgaaaaagtgatgctgcgcgcgtttgccgttatggtgtacccacttgttgcgattctagctttcctctcattctacttaatgccgaactggacaatgcccgtgcttgatacaccggacatgggtgcgtttgcgagcacaatgtggttagccgttcctgttgtgattttctcgtttagccatgcagcagcgatctctagctttgccaatgttcagcgccgacactacggcgatgatgccgatgcaaaagccgaactgattttacgttgcacgagcatcatgcttatcgcattcgtactattgtttgttttctcgtgcgtattagcactttcgccagagcaacttgcacaggcaaaagcgcaaaacgtatccgtactctcttaccttgcaaacgcaacggataacccattcatcgcaacacttggtcctttggtggcgtttgtcgcgatcacttcttctttccttggtcatttcttaggcgcacgtgaaagcttgaacggcttaatcacaaagcactcaaatttgtctgaaacacgtgttgatcgtattagcgtagtggttcttttcttgtcaatttgggctgcagcaatcatgaacccaagtattttaggcatgatggaagcgttatctgggccagttatcgcaatgatcttgttcattatgccgatgttggcggtacataagattgagtcgatgaagcagtatcgtggaaagctctctacctattttgttctgatcacaggtattgttgcggtaagtgctttggtttttagcttactcagctaa

SEQ ID NO: 8076 - protein, 418 aa, Vibrio parahaemolyticus RIMD 2210633
MKESRNTLNSSELNTTTSWSKHDTHWVLSLFGTAVGAGILFLPINLGIGGFWPLVAMAFLAFPMTYLAHRGLARFVLSSKIKNADFTDVVEEHFGAKAGRSISLLYFLSIFPILLIYGVGITNTVDSFMVNQAGMEALPRELLSGVLVFALIAIMMAGEKVMLRAFAVMVYPLVAILAFLSFYLMPNWTMPVLDTPDMGAFASTMWLAVPVVIFSFSHAAAISSFANVQRRHYGDDADAKAELILRCTSIMLIAFVLLFVFSCVLALSPEQLAQAKAQNVSVLSYLANATDNPFIATLGPLVAFVAITSSFLGHFLGARESLNGLITKHSNLSETRVDRISVVVLFLSIWAAAIMNPSILGMMEALSGPVIAMILFIMPMLAVHKIESMKQYRGKLSTYFVLITGIVAVSALVFSLLS

SEQ ID NO: 8077 - DNA, 1230 bp, Salmonella enterica subsp. enterica serovar Typhi Ty2
  CDS (1)..(1230): transl_table=11
atgtctaaaatttggtcaaaagatgagactctctggagttttgcattatacggaacggctgtaggcgcaggcactcttttccttcccatccagttgggatcggcaggcgcaatcgtgctatttattaccgcgctggtcgcctggcctctaacatactggccgcataaggcgctgtgtcagtttattctttcctcaaagacttctgcaggtgagggaattactggcgccgttactcattattacggcaagaaaatcggcagtattattaccacgctttatttcattgcgttttttgtcgtggtattaatttatgctgtggcgattaccaattccctgacagagcaattagcgaagcatattcagatagatattcgcatccggatggcagttagcttcggcgtagtacttatcctgaatatgattttcttaatgggaagacatgccactcttcgcgtaatgggctttttagtctttccacttatcgcttacttcttgttcctttcgctctacttaaccggaagctggcaaccctcgttactgaccgggcagatgtctttggatagtcacacgttgcaccaggtatggatttctattccggtgatggtttttgcttttagccatacgcccattatttcgacgtttgccatcgacagacgggaaaattttggcgatcaggccatggataaatgcaaaaagatcatgaaggtcgcctacctgattatctgcctgagtgtgctgttctttgtctttagctgcctgctctccattccgccgtcatacattgaagacgcgcgcaacgaaggcgttaccatcctttccgcgctctcgatgatgcccaatgcgccggcctggctctctatttccggtattatcgttgccgtcgtggccatgtcgaaatctttcctcggcacctatttcggcgtcatcgagggcgcaaccgaaatggtaagaaccaccctacagcaggttggcgtgaaaaaaagccgggcgttcaatcgcgcgctgtctatcatgctggtttccgggattacgtttattatttgctgtattaacccgaatgccatctctatgatttatgccattagcggcccgctcattgcgatgattctgtttattatgcccacgttgtcaacgtacctgataccggcattgaaaccctaccgttcaataggtaatttcattacgttggtcgtcggtttactttgcgtatcggtgatgtttttcggctaa

SEQ ID NO: 8078 - protein, 409 aa, Salmonella enterica subsp. enterica serovar Typhi Ty2
MSKIWSKDETLWSFALYGTAVGAGTLFLPIQLGSAGAIVLFITALVAWPLTYWPHKALCQFILSSKTSAGEGITGAVTHYYGKKIGSIITTLYFIAFFVVVLIYAVAITNSLTEQLAKHIQIDIRIRMAVSFGVVLILNMIFLMGRHATLRVMGFLVFPLIAYFLFLSLYLTGSWQPSLLTGQMSLDSHTLHQVWISIPVMVFAFSHTPIISTFAIDRRENFGDQAMDKCKKIMKVAYLIICLSVLFFVFSCLLSIPPSYIEDARNEGVTILSALSMMPNAPAWLSISGIIVAVVAMSKSFLGTYFGVIEGATEMVRTTLQQVGVKKSRAFNRALSIMLVSGITFIICCINPNAISMIYAISGPLIAMILFIMPTLSTYLIPALKPYRSIGNFITLVVGLLCVSVMFFG

SEQ ID NO: 8079 - DNA, 1320 bp, Bacillus cereus ATCC 14579
  CDS (1)..(1320): transl_table=11
atgaatgggaatactgctaaaaaaatagaattgcaatctgaaaatactgtgattacaaacgagaaatatttggatcctaaaaagtggcataagcaagatactacgtgggcattgagcctttttgggacagcaattggagcaggagtactctttttaccaattaatgcaggttcaggtggtttattatcattattactcattacattacttgcctatccagttatgtattactcacatagggcgcttgctaaaatgatatatgcttccaattctgccgatgagggaattacggggacaataagagagtatttcggaaatacagcgagtattatttttaacatcgtatacttcgtctcaatttatacaattgtcttgatgtattcagttgcacttacaaatactgcaagtagttttattgtgaatcaattacatatgaaagagccctcaagagccattttatcgcttgtcttagtactgggtcttatcgctatactaaattttggtcaagatatcactgtaaaaattatgagcttgctagtataccctttcatagcttctctactatttatcgcaatatccctaattcctcagtggaacacatcaatgcttagtttttcagatgtctctactgcttcaaccggaacaggatatttgggaacgatatggatgatactacctatcatagtgttttcatttaaccattctccaatgatttcgtcttttgtgataaaacaaagatctacgtatgggatagaagcaactgatgctaaatgtgctcaaatacaaaagatttgttatatcatgacgttcgttgttgttatgttcttcgtttggagcagcgcactgagtttgactccagatgatttaaaagtggcaaaagagcagaacttatcaatcctatcctatctcgctaatgaacttaattcgccagtaattacgattgcagctcctattattgcttttatggctataacaaagtctttccttggtcattatataggatcatatgaagtaatgcgtgatatgattatcaaatttggtaaaacacgtggaaaagatatagaagaaaaaacagttaagacagtaattcttacttttgtcgtattaacatgctggtatgttgcttatgcaaatccaagtattcttgggctcattgacgctctaagcggtccattagttgctgctatcttatgtctattaccaatgtatgcgatccgtaaagtaccggtattagctaaatatagaggtaaaatgagcaatgtatttgttattattgtaggagtacttacaatcttagcaagtattaaatctttattctaa

SEQ ID NO: 8080 - protein, 439 aa, Bacillus cereus ATCC 14579
MNGNTAKKIELQSENTVITNEKYLDPKKWHKQDTTWALSLFGTAIGAGVLFLPINAGSGGLLSLLLITLLAYPVMYYSHRALAKMIYASNSADEGITGTIREYFGNTASIIFNIVYFVSIYTIVLMYSVALTNTASSFIVNQLHMKEPSRAILSLVLVLGLIAILNFGQDITVKIMSLLVYPFIASLLFIAISLIPQWNTSMLSFSDVSTASTGTGYLGTIWMILPIIVFSFNHSPMISSFVIKQRSTYGIEATDAKCAQIQKICYIMTFVVVMFFVWSSALSLTPDDLKVAKEQNLSILSYLANELNSPVITIAAPIIAFMAITKSFLGHYIGSYEVMRDMIIKFGKTRGKDIEEKTVKTVILTFVVLTCWYVAYANPSILGLIDALSGPLVAAILCLLPMYAIRKVPVLAKYRGKMSNVFVIIVGVLTILASIKSLF

SEQ ID NO: 8081 - DNA, 1320 bp, Bacillus cereus ATCC 14579
  CDS (1)..(1320): transl_table=11
atgaacgggaatactgcaaagaaaatagaagttcaagctgaaaataccgcactaaaaaatgagcaatatgcagatccgaaaaagtggcataagcaggatactacatgggcactcagtctatttggaactgcaattggagcaggggtgctctttttaccgattaatgcaggttcaggtggtttattatctttactactaattacattgcttgcatatccagttatgtactactcacatagggcacttgctaaaatgatatacgcttctaattctgctgatgaggggatcacaggtacaattagagagtatttcggaaataaagcgagtatcatttttaacatcgtatatttcggttcaatttatacaatcgtactaatgtattcggttgcgcttacaaacactgcaagtagttttatcgtgcatcaattgcacatgccagaacctccaagagctattttatcacttgtattagttcttggtcttatcgctatactgaattttggtcaagatattactgtaaaggtaatgagtatgttagtgtatcctttcatagtttctctactgtttatcgcaatatctttaattccacagtggaatacgtcaatgcttagtttttcagctgtttcaactgcttcaacaggaacaggctattttgggacgatattgatgattctaccaatcatcgtattctcatttaatcattcacctatgatttcatcatttgttgtgaaacagagagctacgtatggaatcgaagccactgatgctaaatgtgcgcaaatacaaaaggtttgttatatcatgacattcgctgttgttatgttcttcgtttggagtagcgcattgagcttgactccagatgatataaaaatggcaaaagaacaaaacttatcaattctttcatatcttgctaatgagcttaattcgcctgtaatcactattgcagctccaattattgcttttgtggctattacaaagtctttccttggccattatataggagcatttgaagtaatgcgtgacatgattattaagtttggtaaatcacgtggaaaagatattgaagaaaaaacaattaagacaataattcttacttttgttgtattatcatgctggtttgttgcttatacaaatccaagtattcttggacttattgattctctaagcggtcctttagttgctgctatcttatgtctattaccgatgtatgcgattcaaaaagtgccagtactagctaaatacaaagggaaaatgagcaacgtatttgttattattgtaggtgtacttactgtcttagcaagtattaagtcattattctaa

SEQ ID NO: 8082 - protein, 439 aa, Bacillus cereus ATCC 14579
MNGNTAKKIEVQAENTALKNEQYADPKKWHKQDTTWALSLFGTAIGAGVLFLPINAGSGGLLSLLLITLLAYPVMYYSHRALAKMIYASNSADEGITGTIREYFGNKASIIFNIVYFGSIYTIVLMYSVALTNTASSFIVHQLHMPEPPRAILSLVLVLGLIAILNFGQDITVKVMSMLVYPFIVSLLFIAISLIPQWNTSMLSFSAVSTASTGTGYFGTILMILPIIVFSFNHSPMISSFVVKQRATYGIEATDAKCAQIQKVCYIMTFAVVMFFVWSSALSLTPDDIKMAKEQNLSILSYLANELNSPVITIAAPIIAFVAITKSFLGHYIGAFEVMRDMIIKFGKSRGKDIEEKTIKTIILTFVVLSCWFVAYTNPSILGLIDSLSGPLVAAILCLLPMYAIQKVPVLAKYKGKMSNVFVIIVGVLTVLASIKSLF

SEQ ID NO: 8083 - DNA, 1320 bp, Bacillus anthracis str. Ames
  CDS (1)..(1320): transl_table=11
atgaatgggaatactgcaaaaaacatagaatttcaagttgataatactacagtaaaaaatgagaaatatctagaccctaaaaagtggcataaacaggatactacctgggcattgagtctatttggaacagcaattggagcaggagtacttttcttacctattaatgcaggttcaggtggtttattatcgttgctgttaattaccatactggcatatcctgttatgtattactcacatagggcgcttgctaaaatgatatacgcttcaaattctgccgacgaggggattacaggtacaataagagaatatttcggaaataaagcaagtatcatttttaacatcgtatatttcgtctcaatttatacgatcgtgctgatgtattcggttgcacttacaaatactgcaagtagttttattgtacaccaattgcacatgccggagcctccaagggctattttatcacttgtattagtaatcggtcttatcactatactaaattttggtcaggatattactgtaaagataatgagcatgctagtatatcctttcattgcttcgctactttttattgcaatatctttaattccacaatggaatacttcaatgctaagtttttcaagtgtttctactgcttcaactggaacagggtatttcggaacgatttggatgatactaccaatcatcgtattctcgtttaatcattcacctatgatttcgtcattcgttatgaaacagagagctacgtatggaatagatgctactgatgccaagtgtgctcaaatacaaaaagtctgttatatcatgacattcgctgttgttatgttctttgtttggagcagtactttaagtttgactccagatgatcttaaggtggcgaaagaacagaatttgtcaattctatcatatcttgctaatgagcttaattcaccagtaatcactattgcggctcctattattgcgtttgtggctattacaaagtctttccttggtcattatataggagcgtatgaggtaatgcgtgacatgattatcaagtccggtaaaaaacgtgggaaagatataggagaaaaaacagttaagacaatgattcttacttttgttgtactaacatgctggtatgttgcttatacaaatccaagtattcttggaatcattgatgcccttagcggtccgttagtcgctgccatcttatgtctattaccgatgtatgcgattcgtaaagtaccagtgctagcaaaatacagagggaaaatgagcaatgtatttgtaattattatagggatacttactgttctagcaagtattaagtcattattctaa

SEQ ID NO: 8084 - protein, 439 aa, Bacillus anthracis str. Ames
MNGNTAKNIEFQVDNTTVKNEKYLDPKKWHKQDTTWALSLFGTAIGAGVLFLPINAGSGGLLSLLLITILAYPVMYYSHRALAKMIYASNSADEGITGTIREYFGNKASIIFNIVYFVSIYTIVLMYSVALTNTASSFIVHQLHMPEPPRAILSLVLVIGLITILNFGQDITVKIMSMLVYPFIASLLFIAISLIPQWNTSMLSFSSVSTASTGTGYFGTIWMILPIIVFSFNHSPMISSFVMKQRATYGIDATDAKCAQIQKVCYIMTFAVVMFFVWSSTLSLTPDDLKVAKEQNLSILSYLANELNSPVITIAAPIIAFVAITKSFLGHYIGAYEVMRDMIIKSGKKRGKDIGEKTVKTMILTFVVLTCWYVAYTNPSILGIIDALSGPLVAAILCLLPMYAIRKVPVLAKYRGKMSNVFVIIIGILTVLASIKSLF

SEQ ID NO: 8085 - DNA, 1320 bp, Bacillus anthracis str. Ames
  CDS (1)..(1320): transl_table=11
atgaacgggaatactgcaaagaaaatagaagttcaagctgaaaataccgcactaaacaatgagcaatatgcagatccgaaaaagtggcataagcaggatactacatgggcactcagtctatttggaactgcaattggagcaggggtgctctttttaccgattaatgcaggttcaggtggtttattatctttactactaattacattgcttgcatatccagttatgtactactcacatagggcgcttgctaaaatgatatacgcttctaattctgctgatgaggggatcacaggtacaattagagagtatttcggaaataaagcgagtatcatttttaacatcgtatatttcggttcaatttatacaatcgtactaatgtattcggttgcgcttacaaacactgcaagtagttttatcgtgcatcaattgcacatgccagaacctccaagagcaattttatcacttgtattagttcttggtcttatcgctatactaaattttggtcaagatattactgtaaaggtaatgagtatgttagtgtatcctttcatcgtttctctactgtttatcgcaatatctttaattccacagtggaatacgtcaatgctgagtttttcagctgtttcaactgcttcaacaggaacaggctattttgggacgatagtgatgattttaccaatcatcgtattctcatttaatcattcacctatgatttcatcatttgttgtgaaacagagagctacgtatggaatcgaagccactgatgcgaaatgtgcgcaaatacaaaaggtttgttatattatgacattcgctgttgttatgttcttcgtttggagtagcgcattgagcttgactccagatgatataaaaatggcaaaagaacaaaacctattaatcctttcatatcttgcgaatgagcttaattcacctgtaattacgattgcagctccaatcattgcttttgtggctattacaaagtctttccttggccattatatcggagcatttgaagtaatgcgtgacatgattattaagtttggtaaatcacgtggaaaagatattgaagaaaaaacaattaagacaataatccttacttttgttgtattatcatgctggtttgttgcttatacaaatccaagtattcttggacttattgattctctaagcggtccattagttgctgctatcttatgtctattaccgatgtatgcgattcaaaaagtaccggtattagctaagtacaaagggaaaatgagtaacgtatttgttattattgtaggtgtacttactgttttagcaagtattaagtcattattctaa

SEQ ID NO: 8086 - protein, 439 aa, Bacillus anthracis str. Ames
MNGNTAKKIEVQAENTALNNEQYADPKKWHKQDTTWALSLFGTAIGAGVLFLPINAGSGGLLSLLLITLLAYPVMYYSHRALAKMIYASNSADEGITGTIREYFGNKASIIFNIVYFGSIYTIVLMYSVALTNTASSFIVHQLHMPEPPRAILSLVLVLGLIAILNFGQDITVKVMSMLVYPFIVSLLFIAISLIPQWNTSMLSFSAVSTASTGTGYFGTIVMILPIIVFSFNHSPMISSFVVKQRATYGIEATDAKCAQIQKVCYIMTFAVVMFFVWSSALSLTPDDIKMAKEQNLLILSYLANELNSPVITIAAPIIAFVAITKSFLGHYIGAFEVMRDMIIKFGKSRGKDIEEKTIKTIILTFVVLSCWFVAYTNPSILGLIDSLSGPLVAAILCLLPMYAIQKVPVLAKYKGKMSNVFVIIVGVLTVLASIKSLF

SEQ ID NO: 8087 - DNA, 1380 bp, Helicobacter hepaticus ATCC 51449
  CDS (1)..(1380): transl_table=11
atgaacaaatggaataactttgatacaagctggataatttctctttttggaacagctgtgggtgctgggattttatatctgccaattaaagcaggtggagggggaatctggcctgtaatagcaatgtgttttattatatttcctatggtttatcttagccatcgcgcacttagtcgttttgtatgtcaagcaaatggtaatgataaagatattacatacgccgctgaagaatattttggtcgcaatgtaagtatatttatctcaattctctatttttttgcaatttttcctatttgtctcgcatattgcgtaggcattacaaacacatttgaaagttttatttatcatcagattctcccacttgtcaatgaaaatcacccggcagttgctccacttgggactttagctggatttatacaagacatttattacgacccatatagttttctccaccaaagcgaatctggagcactccttaaacttaaatctgaaaattatgctactttgcacccattttggcgagctgggcttgtttttatcttggtaagtgcttttatgcttattatgctttttagtgaaaaacttatcataaaagtgtgccaatggcttgtatatcctctttgtgctattttatttatattttcactctatcttattccccaatggaatcttgaaagcattacatttgtacccgatatagaagattttttgataattgtatggcttacacttcccgtgcttgtattttcttttaatcactctcctgctatttctacctttgcgctaagtgctaagcgcgaatatggagcagatgctatcataaaatcagattctatacttttgcgcacttcaattatgcttcttgtctttgtaatgttttttgtcatctcttgtgtgctctctcttacaccacaagagcttatagaagctagagcacaaaatatccccgtgctctcatattttgccaataaacttgataatccattgatttcctatggtggtcctttgattgcatttttggcaatttctagttcattttttgggcattattttggtgcacgtgagggtgcatatggcattgtaaggaaatgttgcaaaattgcgggaaacaaagagccaaatctcaaacttattgcagcaatatgcacatttgtaatgtatgttattatgcttattactgcctatatcaatccaagcgttttagggtttattgaggatttaggaggtccgattattgcagctatcctttttcttatgcctattattgctatttatagcgtatctaagatgaaacaattcaaaaacccagctcttgatgcttttgtctttataacagggcttttaacaatatttactattacttataagctcatattgtaa

SEQ ID NO: 8088 - protein, 459 aa, Helicobacter hepaticus ATCC 51449
MNKWNNFDTSWIISLFGTAVGAGILYLPIKAGGGGIWPVIAMCFIIFPMVYLSHRALSRFVCQANGNDKDITYAAEEYFGRNVSIFISILYFFAIFPICLAYCVGITNTFESFIYHQILPLVNENHPAVAPLGTLAGFIQDIYYDPYSFLHQSESGALLKLKSENYATLHPFWRAGLVFILVSAFMLIMLFSEKLIIKVCQWLVYPLCAILFIFSLYLIPQWNLESITFVPDIEDFLIIVWLTLPVLVFSFNHSPAISTFALSAKREYGADAIIKSDSILLRTSIMLLVFVMFFVISCVLSLTPQELIEARAQNIPVLSYFANKLDNPLISYGGPLIAFLAISSSFFGHYFGAREGAYGIVRKCCKIAGNKEPNLKLIAAICTFVMYVIMLITAYINPSVLGFIEDLGGPIIAAILFLMPIIAIYSVSKMKQFKNPALDAFVFITGLLTIFTITYKLIL

SEQ ID NO: 8089 - DNA, 1290 bp, Wigglesworthia glossinidia endosymbiont of Glossina brevipalpis
  CDS (1)..(1290): transl_table=11
atgttttataaaaaacataaaaatatatgtaatatatgtaataataattacaaaaaatcaaatttaatatggatattaagcttatatggtacagcaataggggctggagttttgtttcttccaattaatattggaattaatggcttattttctttattgattattatgataatcgcttttccaatggcatttttttctcatagaggattaacaaggtttgtattgtctagcaaaaaaccaaataaaaatttatttaatgttatacatgaaaactttaataaacaaacatcttttatatttattttattttattttttttctatttatccaatactattaatttatagtactgctataaccaatacagtaatgtcttttattattcatcaattaaatattgcggaacaatcacgtgtttttgtgtcttttatacttatttctgttttaatgggaattattattttaggagaaaaagtaataattaagttcatgagttttttagtaattccatttatactttctttaatttttttttctttttatataattcaattttggaattattcattattttatgaaataaaaaatatttttaatttagatataaatagtttattaaaaattatttggtatattatacctgtaactgtattttcatttaatcattctcctataatatcttcttttgcagttttcaaaaaaagagaatgtagtaattgttgcgaaaaaacatgctctaaaatactattttatagtaatttattaatgatttttacagtaattttctttgtatttagttgcatacttagtgttcctagagaagctatgcaagaagcaaaagataaaaatttatctgtattatcttatttttcaatatattttgaagataatttaatgaattttttaggccctatcatagctattattgctataataaaatctttttttggtcattatttaggagctaaagaaagcatcaataaaatattaatgacgacttttcctaaattaaaaaataaaaaaagaacatatttaacaaattttacaactaactctttaatatttactagttcttggattattgcaatatttaatcctagtattttaaatataatagaagcaataattggacctattatttctataattttatttttaattcctgcatattcaatatataaagttcctaatatgaaacgttataaaaaagaaaaatttactaatttatttttatttgttattggaattttttcatttttagctatgatgcataaattgattatattttaa

SEQ ID NO: 8090 - protein, 429 aa, Wigglesworthia glossinidia endosymbiont of Glossina brevipalpis
MFYKKHKNICNICNNNYKKSNLIWILSLYGTAIGAGVLFLPINIGINGLFSLLIIMIIAFPMAFFSHRGLTRFVLSSKKPNKNLFNVIHENFNKQTSFIFILFYFFSIYPILLIYSTAITNTVMSFIIHQLNIAEQSRVFVSFILISVLMGIIILGEKVIIKFMSFLVIPFILSLIFFSFYIIQFWNYSLFYEIKNIFNLDINSLLKIIWYIIPVTVFSFNHSPIISSFAVFKKRECSNCCEKTCSKILFYSNLLMIFTVIFFVFSCILSVPREAMQEAKDKNLSVLSYFSIYFEDNLMNFLGPIIAIIAIIKSFFGHYLGAKESINKILMTTFPKLKNKKRTYLTNFTTNSLIFTSSWIIAIFNPSILNIIEAIIGPIISIILFLIPAYSIYKVPNMKRYKKEKFTNLFLFVIGIFSFLAMMHKLIIF

SEQ ID NO: 8091 - DNA, 1227 bp, Haemophilus ducreyi 35000HP
  CDS (1)..(1227): transl_table=11
atggttagactatctaatcgtttttcaaaaacttgggtacttaacctttttggtaccgctgtaggcgctggtgtattatttttacctattaatgctggtatgagcggtttttacccgctcatcattatgacgttaatcgttggaccaatgacttatttagcccatcgaggtttaactcgttttgtgctttcttcgcaaaaacctggcagtgatatcactaatgtcgtacgggaacattttggtgaacaagcgggtaaatttattactttactttatttctttgcaatttttcccattctattaatttatggtgttggcattaccaatacggtcagttcatttattgaaaaccaattacatatgacatcgccaccaagagtattactctctggtgccttaattgccgtattgattagcgtaatgttactgaatgaacaagcaatgttaagaattactacttatcttgtttatcctttagttctgattttatttggtttatccatttaccttattcccgaatggaacagcgcagctttagagcaaatgccaagcaccggtgattttataaccactttatggctaacgattccggtattagtgtttgcgtttaaccattcacctgcaatttcttcttttgcactttcgcaacaaaaacatcaccaagatcccgaaaaaaatgatgttgaatcaggcaaagtattacgttcaactgcaacgattttagtgctatttgtaatgttctttgtatttagctgcgtattaaccttaactccggtagaattagcggaagcaaaagtacaaaatatttcaattttgtcttacttagccaataaattcgataatcctattatttcttacttagggccatttattgctttcttagccattggtagttcattctttggccactatttaggtgcgcgtgaaggtttagaaggattagttaatcaattgcgtgataaacctatcgcttcacataaaattcataaaattacagcagtcgtattctttttaattctttggattgtggctactattaatccaagtattcttggcttcattgaaagtttaggcggtccaattattgctatgattctattcattatgcctgtatacgccgtttacactgtgcctgcactagcaaaatataaaggtcaatttagcaatatctttgttgcgattatgggatctattgctatttcagccattctatacggtttactgtaa

SEQ ID NO: 8092 - protein, 408 aa, Haemophilus ducreyi 35000HP
MVRLSNRFSKTWVLNLFGTAVGAGVLFLPINAGMSGFYPLIIMTLIVGPMTYLAHRGLTRFVLSSQKPGSDITNVVREHFGEQAGKFITLLYFFAIFPILLIYGVGITNTVSSFIENQLHMTSPPRVLLSGALIAVLISVMLLNEQAMLRITTYLVYPLVLILFGLSIYLIPEWNSAALEQMPSTGDFITTLWLTIPVLVFAFNHSPAISSFALSQQKHHQDPEKNDVESGKVLRSTATILVLFVMFFVFSCVLTLTPVELAEAKVQNISILSYLANKFDNPIISYLGPFIAFLAIGSSFFGHYLGAREGLEGLVNQLRDKPIASHKIHKITAVVFFLILWIVATINPSILGFIESLGGPIIAMILFIMPVYAVYTVPALAKYKGQFSNIFVAIMGSIAISAILYGLL

SEQ ID NO: 8093 - DNA, 1299 bp, Chromobacterium violaceum ATCC 12472
  CDS (1)..(1299): transl_table=11
atgtctcaagcaatcgcctccaccgcttcccgctccggttcatccggctggtccaagcacgacaccacctggatgctcggcctgtacggcaccgccatcggcgccggcgtcctgttcctcccgatcaacgccggcatcggcggcctgtggccgctgatgctgatggccatcctggccctgccgctgaccttcttcgcccaccgcggcctgacccgcttcgtgctgtccggcagcaaggaaggcgcggacatcaccgaggtggtggaagagcacttcggtctcggcgccggcaagatcatcaccctgctgtacttcttcgccatctacccgatcctgctgatgtacagcgtggccatcaccaacacggtgctgtccttcctgaacaaccagctgcacatcgaagtgggcaccggcatcgccacccgcgccgtgttctcgctggcgctgatcctgggcctgatgtccatcgtgcgcctgggcggccagatgatcgtcaaggcgatgagcatcctggtgtacccgttcgtggtggtgctgatgctgctggcgctgtacctgatcccgcaatggagcgataccgccatccgccacgccggcagcctgggcgacgcgctgtccagcggcgccttctacaagacgctgtggctggccatcccggtgatggtgttctcgttcaaccactcgccgatcatctcgtccttctccgtcgaccagcgcaagcttcacggcgatgacgccgagccggcctccagccgcgtgctgattcgcgcccacaccatgatggtgctgaccgtgatgttcttcgtgttcagctgcgtgttcagcctgagcccggccgacctggccgccgccaaggcccagaacatctccatcctgtcctacctggccaaccacttccaaaacccggtgatggaatgggttgccccgatcatcgccatggtcgccatcagcaagtccttcctgggccactacctgggcgccaaggaaggcttcaacggcctggtgatcaagcagctgcgccagaacggcaagagcatcgaatcgtccaagctggaccgctacaccgccatcttcatgatcgtcacctgctggatcatcgccaccatcaacccgtccatcctgggcatgatcgaaaccctgggcggcccggtgatcgcgatgctgctgttcctgatgccgatgtacgcgatccagaaagtgccggcgatgaagaagtactccggcgccgccagcaacatcttcgtgacgctgatcggcctgatcgccatctccgccatcttctacgatctgatcgcctga

SEQ ID NO: 8094 - protein, 432 aa, Chromobacterium violaceum ATCC 12472
MSQAIASTASRSGSSGWSKHDTTWMLGLYGTAIGAGVLFLPINAGIGGLWPLMLMAILALPLTFFAHRGLTRFVLSGSKEGADITEVVEEHFGLGAGKIITLLYFFAIYPILLMYSVAITNTVLSFLNNQLHIEVGTGIATRAVFSLALILGLMSIVRLGGQMIVKAMSILVYPFVVVLMLLALYLIPQWSDTAIRHAGSLGDALSSGAFYKTLWLAIPVMVFSFNHSPIISSFSVDQRKLHGDDAEPASSRVLIRAHTMMVLTVMFFVFSCVFSLSPADLAAAKAQNISILSYLANHFQNPVMEWVAPIIAMVAISKSFLGHYLGAKEGFNGLVIKQLRQNGKSIESSKLDRYTAIFMIVTCWIIATINPSILGMIETLGGPVIAMLLFLMPMYAIQKVPAMKKYSGAASNIFVTLIGLIAISAIFYDLIA

SEQ ID NO: 8095 - DNA, 1299 bp, Photorhabdus luminescens subsp. laumondii TTO1
  CDS (1)..(1299): transl_table=11
atggatatgactcaaacaggtacgatcgcatcgcaggcgaccagcccaagcgattataaaacctggcgtaaatcagatacagtatggatgcttggcttatacggtactgcgattggtgccggtgtattattcttacccatcaatgctggtattggtggcctactacctcttttggtaatggcgctactggctttcccaatgactttcttcgcccaccgcgggatgtgtcgtttcgttctatcaggtaaaaaccctggcgaagatattaccgaagtcgtagaagaacactttggcaacctggcaggtaaacttattactctgctctacttcttcgctatctacccgattctcttagtttacagcgttgctattaccaacaccgtagacagctttattgttcaccaattacacctgccatcacctcctcgtgctctgctggctctgatcctaattactggtgtaatgaccatcatccgttttggtgaacaggctattgttaaggcaatgagcgtgctggtattcccatttgttgccgttttgatgctactggcgttttatctgatccctaactggaataccgcaatcttcgaaaacatcagcgtttctgcatcgagtgcaagtcatgggctgctcattactctatggctagcgatcccagtaatggtgttctccttcaaccactcgccaattatctcggcatttgcggtggcaaaacgtggagaatatggtgagcatgctgagaaaaaatgctcccgcattctagcttacgcccatatcatgatggttgtaaccgtgatgttcttcgtattcagctgcgtattaagcctgtctccagaaaatctggcagaagccaaagcacaaaatatttctattctgtcttacctggctaaccactttaatacaccagtggttgcctacatcgctccgtttattgcattcatagcaattaccaaatctttccttggccattatctgggtgcacgtgaaggttttaatggtattgtggttaagacattgcgtgaccaaggtaaaactattgagcctaaaaagctgaatcgtatcactaccattttcatgttagtaacgacttggattgtcgctactctgaacccaagtattttggaaatgatcgaaagattaggtggtcctattatcgcaatgttgttgttcattatgccaatgtatgcaatcagcaaagttcctgcaatgcgcaaatatagcggcaagctgagtaatctgtttgtcgtctttatgggattagttgctatctctgctgtcctctactcactgtttgcataa

SEQ ID NO: 8096 - protein, 432 aa, Photorhabdus luminescens subsp. laumondii TTO1
MDMTQTGTIASQATSPSDYKTWRKSDTVWMLGLYGTAIGAGVLFLPINAGIGGLLPLLVMALLAFPMTFFAHRGMCRFVLSGKNPGEDITEVVEEHFGNLAGKLITLLYFFAIYPILLVYSVAITNTVDSFIVHQLHLPSPPRALLALILITGVMTIIRFGEQAIVKAMSVLVFPFVAVLMLLAFYLIPNWNTAIFENISVSASSASHGLLITLWLAIPVMVFSFNHSPIISAFAVAKRGEYGEHAEKKCSRILAYAHIMMVVTVMFFVFSCVLSLSPENLAEAKAQNISILSYLANHFNTPVVAYIAPFIAFIAITKSFLGHYLGAREGFNGIVVKTLRDQGKTIEPKKLNRITTIFMLVTTWIVATLNPSILEMIERLGGPIIAMLLFIMPMYAISKVPAMRKYSGKLSNLFVVFMGLVAISAVLYSLFA

SEQ ID NO: 8097 - DNA, 1254 bp, Vibrio vulnificus YJ016
  CDS (1)..(1254): transl_table=11
atgaaaacaacttcaactacggctcctgccgtacaatcttctagtaagtttacttacaaagatttcacttggtgtctgtcccttttcggtacagcggtaggtgctggtgtacttttccttccaattaaagcgggtgctggcggcttctggccattagttatgctagcgctacttgcagcaccaatgacttggttcgctcacaaatctctcgctcgtttcgttctttctgctaagaaccctgaagcggacatcactgacactgtagaagagcactttggtaagactggcgcaaaccttattacttttgcctatttcttcgctatctacccaatcgttctgatttacggtgttggtatcacaaacacagtagactctttccttgttaaccaaatgggtatggaatccattccacgtccactgctatctggcgcattgatccttgcaatgaccgctggtgtggtatttggtaaagaactgatgctaaaagcaacgtctgcaatggtttacccacttgtatttgtactgcttgcactttctttctacctgatcccagattggaacacgtcaatgatgcaagtagcacctgattggtcttctatgcctgttgtcgtatggctagccatcccgatcatcgtgttctcattcaaccacagcccaatcatctctcagttctctaaagaacagcgcctacagcatggtgacaaagcggttcagaaaaccgatgcgatcactggcggtgcagcgatgatgctaatgggctttgttatgttcttcgttttctctgttgtactgtctatgtctccagagcaactggcttctgcgaaagagcaaaacatctctgtactttcttacctagcgaacgtgcatgagtctccactgatctcttaccttggtccactggttgcgtttgcagcgatcacttctagctacttcggtcacttccttggtgcgcatgaaggtctagttggtctgatcaaatctcgctcaaacagccctatcagcaagatcgagaaagcgtcgctactgttcatcgttatcactacttggatcgtggctatcgttaacccaagtatcctaggcatgattgaaacaatgggcgcaccaatgattgcggcaatcctgttcctaatgcctgtatttgcaatgcaaaaagtgccagcgatggcgaagtacaaaacttcagcagctgtgcagattttcacagttatctgtggtcttgcttctattacttctgtaatctacggcgctctttaa

SEQ ID NO: 8098 - protein, 417 aa, Vibrio vulnificus YJ016
MKTTSTTAPAVQSSSKFTYKDFTWCLSLFGTAVGAGVLFLPIKAGAGGFWPLVMLALLAAPMTWFAHKSLARFVLSAKNPEADITDTVEEHFGKTGANLITFAYFFAIYPIVLIYGVGITNTVDSFLVNQMGMESIPRPLLSGALILAMTAGVVFGKELMLKATSAMVYPLVFVLLALSFYLIPDWNTSMMQVAPDWSSMPVVVWLAIPIIVFSFNHSPIISQFSKEQRLQHGDKAVQKTDAITGGAAMMLMGFVMFFVFSVVLSMSPEQLASAKEQNISVLSYLANVHESPLISYLGPLVAFAAITSSYFGHFLGAHEGLVGLIKSRSNSPISKIEKASLLFIVITTWIVAIVNPSILGMIETMGAPMIAAILFLMPVFAMQKVPAMAKYKTSAAVQIFTVICGLASITSVIYGAL

SEQ ID NO: 8099 - DNA, 1254 bp, Vibrio vulnificus YJ016
  CDS (1)..(1254): transl_table=11
gtgaaagaatctcgagaaacgttaaattttagtgacacgctgcccactaaaacttggacaaaacacgacactcattgggtattgagtttattcggcaccgccgtgggggctggcattctctttctgcctatcaacctaggaatcggcggcttttggcctttggtactgttagcgcttttggcgtttcccatgacattttggggccatcgtgcacttgcgcggtttgtgctctcgtcaaaacaagccgatgcagactttaccgatgttgtcgaggaacactttggagcgaaagcaggtcgtctgatttccttgctctatttcttgtcgatattccctattctgctcatttatggtgtgggcatcaccaacacggttgacagctttatggtcaatcaagcgggaatggaatcattacctcgagtgctgctgtctggtgtattggttttcagcctgatcgccatcatgctcggcggtgaaaagctgatgctgcgtgcgtttgcagccatggtttacccactcgccaccatactggcgttcttgtcgctttatctcatcccaagttggcaactgccttctttggctctgccttctgccggcgattttctacaaacggtctggttagccgtgcctgtggtgatcttctcatttagccatgccgctgccatttccagcttcgttggcgtgcaaaaacgccattacggtgagcaggcaaatggtaaatcagaacagattcttcagcgtaccagcatcatgttgattgcttttgtgctgctgtttgttttctcctgcgtactctctttaagcccagagcaattggcacaagcaaaagcgcaaaatgtgtcggtactttcttatttagccaacgcaacggagaacccatttattgcgacttttggtcctctggttgcctttatcgccattacgtcgtcattccttggccattttttaggtgcacgagaaagccttaacggattgctaaccaagcacacatcaatgcctattcaacgcgccgataaaatgaccatcgtcagcttgtttatctcaatttggattgcggcggtgatcaacccgagcattctcggcatgatggaaaccttatctggcccagtcatcgctatgatcctgtttataatgccggtttacgccatttaccgagttgattcattaaaaatctatcgtggtaaagccacgactgtgtttgttttgctgacagggctactggccgtttctgcgttgctgttcgcgattgtctaa

SEQ ID NO: 8100 - protein, 417 aa, Vibrio vulnificus YJ016
MKESRETLNFSDTLPTKTWTKHDTHWVLSLFGTAVGAGILFLPINLGIGGFWPLVLLALLAFPMTFWGHRALARFVLSSKQADADFTDVVEEHFGAKAGRLISLLYFLSIFPILLIYGVGITNTVDSFMVNQAGMESLPRVLLSGVLVFSLIAIMLGGEKLMLRAFAAMVYPLATILAFLSLYLIPSWQLPSLALPSAGDFLQTVWLAVPVVIFSFSHAAAISSFVGVQKRHYGEQANGKSEQILQRTSIMLIAFVLLFVFSCVLSLSPEQLAQAKAQNVSVLSYLANATENPFIATFGPLVAFIAITSSFLGHFLGARESLNGLLTKHTSMPIQRADKMTIVSLFISIWIAAVINPSILGMMETLSGPVIAMILFIMPVYAIYRVDSLKIYRGKATTVFVLLTGLLAVSALLFAIV

SEQ ID NO: 8101 - DNA, 1344 bp, Corynebacterium diphtheriae NCTC 13129
  CDS (1)..(1344): transl_table=11
gtgtctcagattgtttcccactcagcatctgctggggtccgcgatggtgtagcaccatcagaatcacctgcctcatctagcgcgccttcttggcgtaaaaccgacaccgtatggagcttgagcctcttcggcacagcaatcggtgcgggcgtattgttcctccccatcaacgccggtatcggcggaatcatccccatgctcgtcatggccgtcgttgcgtacccgatggcccactgggcacaccgaggtcttactcgtttcatcctttcagcatccaaggaagacgcagacctaacggacgtcgtcgatgagcacttcggccacaaggccggcgcatttatcaccgtcttgtacttcttgtcggtctacccgatcttgttggtctactcagttactatcaccaacaccgtgaactccttcttggaaaaccagctgggaatcaccccgctgccacgctggttgatgtcgctcatcttggtcggcggacttatcttcgtagtcagcctcggtcgcacggtgatcgtcaaggccatgtcggttttggtattccccttcatcgccatcttggttgtgctctctgtttacttgatccctaagtggaacaccgcactattccagaccttcgacctgcgcacttcagctgaggcttccggtcatagcatctgggttaccctgctgcttctcgtcccagtgatggttttctccttcaaccactcgccaatcatttcctccttcgcccaggaaaagcgtgctgagtatggtcagtgggctgactacaagaccggtcgcattcttagcgccgcccagatcttgatggtcgttgtggttatgttctttgtgttctcttgcgcattgagcttgtcgccagccgacctcgctgctgctaaagaacaaaacatcaccatcttgtcctacttggctaatcactttgataaccctgtgattcagtgggctgctcccattattgccatgattgctgtggcaaagtccttccttggccactacctcggtgctgctgaaggtttccaaggcttgattgcttcgggtgctgcttctaagggcaagactgttgatactcaaagccgtgcgctggtgctgggcactctcgccttcatgctgatctcttcgtggctggtggcatggctgaacccatccatcctcggaatgatcgagacgatgtgtggtcctacgatcgccatcctgctcttcctgatgcctatgtacgccatccataaggttccggcattggctaagtaccgtggtcgtatttcgaattacttggtcttcggcatgggcctgttggcactgtgcaccatcgtctacagcatcgtccaggctttctag

SEQ ID NO: 8102 - protein, 447 aa, Corynebacterium diphtheriae NCTC 13129
MSQIVSHSASAGVRDGVAPSESPASSSAPSWRKTDTVWSLSLFGTAIGAGVLFLPINAGIGGIIPMLVMAVVAYPMAHWAHRGLTRFILSASKEDADLTDVVDEHFGHKAGAFITVLYFLSVYPILLVYSVTITNTVNSFLENQLGITPLPRWLMSLILVGGLIFVVSLGRTVIVKAMSVLVFPFIAILVVLSVYLIPKWNTALFQTFDLRTSAEASGHSIWVTLLLLVPVMVFSFNHSPIISSFAQEKRAEYGQWADYKTGRILSAAQILMVVVVMFFVFSCALSLSPADLAAAKEQNITILSYLANHFDNPVIQWAAPIIAMIAVAKSFLGHYLGAAEGFQGLIASGAASKGKTVDTQSRALVLGTLAFMLISSWLVAWLNPSILGMIETMCGPTIAILLFLMPMYAIHKVPALAKYRGRISNYLVFGMGLLALCTIVYSIVQAF

SEQ ID NO: 8103 - DNA, 1320 bp, Bacillus cereus ATCC 10987
  CDS (1)..(1320): transl_table=11
atgaacgggaatactgcaaagaaaatagaagttcaagctgaaaataccgcacgaaaaaatgagcaatatgcagatccgaaaaagtggcataagcaggatactacatgggcactcagtctatttggaactgcaattggagcaggggtgctctttttaccgattaatgcaggttcaggtggattattatcgttactactaattacattgcttgcatatccagttatgtattactcacatagggcacttgctaaaatgatatacgcttctaattctgctgatgaggggatcacaggtacaattagagagtatttcggaaataaagcgagtatcatttttaacatcgtatatttcggttcaatttatacaatcgtactaatgtattcggttgcgcttacaaacactgcaagtagttttatcgtgcatcaattgcacatgccagaacctccaagggctattttatcacttgtattagttcttggtcttatcgctatactgaattttggtcaagatattactgtaaaagtcatgagtatgctagtgtatcctttcatagcttctctattatttatcgcaatatctttaattccacagtggaatacgtcaatgcttagcttttcagctgtttctactgcttcaacaggaacaggatattttggaacgatattgatgattttaccaatcatcgtattctcatttaatcattcacctatgatttcatcatttgttgtgaaacagagagctacgtatggaatcgaagctactgatgcgaaatgtgcacaaatacaaaaagtttgttacatcatgacattcgtcgtagttatgttcttcgtttggagtagtgcactgagcttaactccagaggatttaaaaatggcaaaagagcaaaacttatcaatcctttcatatctagcgaatgaacttaattcacctgtaattacgattgccgccccaatcattgcttttgtggctattacaaaatctttccttggccattatatcggagcatttgaagtaatgcgtgacatgattattaagttcggtcaatcacgtggaaaagtaattgaagaaaaaacaattaagacaatcgttcttacttttgttgtattatcatgctggtttgttgcttacacaaatccaagtattcttggacttattgattctttaagtggtccattagttgctgctatcttatgtctattaccgatgtatgcgattcaaaaagtaccagtactagctaaatacaaagggaaaatgagtaacgtatttgttattattgtaggtgtacttactgttttagcaagtattaaatcattattctaa

SEQ ID NO: 8104 - protein, 439 aa, Bacillus cereus ATCC 10987
MNGNTAKKIEVQAENTARKNEQYADPKKWHKQDTTWALSLFGTAIGAGVLFLPINAGSGGLLSLLLITLLAYPVMYYSHRALAKMIYASNSADEGITGTIREYFGNKASIIFNIVYFGSIYTIVLMYSVALTNTASSFIVHQLHMPEPPRAILSLVLVLGLIAILNFGQDITVKVMSMLVYPFIASLLFIAISLIPQWNTSMLSFSAVSTASTGTGYFGTILMILPIIVFSFNHSPMISSFVVKQRATYGIEATDAKCAQIQKVCYIMTFVVVMFFVWSSALSLTPEDLKMAKEQNLSILSYLANELNSPVITIAAPIIAFVAITKSFLGHYIGAFEVMRDMIIKFGQSRGKVIEEKTIKTIVLTFVVLSCWFVAYTNPSILGLIDSLSGPLVAAILCLLPMYAIQKVPVLAKYKGKMSNVFVIIVGVLTVLASIKSLF

SEQ ID NO: 8105 - DNA, 1320 bp, Bacillus thuringiensis serovar konkukian str. 97-27
  CDS (1)..(1320): transl_table=11
atgaacgggaatactgcaaagaaaatagaagttcaagctgaaaataacgcactaaaaaatgagcaatatgcagatccgaaaaagtggcataagcaggatactacatgggcactcagtctatttggaactgcaattggagcaggggtgctctttttaccgattaatgcaggttcaggtggtttattatcattactactaattacattgcttgcatatccagttatgtattactcacatagggcacttgcgaaaatgatatacgcttctaattctgctgatgaggggatcacaggtacaattagagagtatttcggaaataaagcgagtatcatttttaacatcgtatatttcggttcaatttatacaatcgtactaatgtattcggttgcgcttacaaatactgcaagtagttttatcgtgcatcaattgaacatgccagaacctccaagggctattttatcacttgtattagttcttggtcttatcgctatactgaactttggtcaagatattactgtaaaggtaatgagtatgctagtgtatcctttcatagcttctctactgtttattgcaatatctttaattccacagtggaatacgtcaatgcttagcttttcagctgtttctactgcttcaacaggaacaggctattttggaacgatattgatgattttaccaatcatcgtattctcatttaatcattcacctatgatttcatcatttgttgtgaaacagagagctacgtatggaatagaagctactgatgcgaaatgtgcgcaaatacaaaaagtttgttatattatgacattcgttgtagttatgttcttcgtttggagtagcgcactgagcctgactccagatgatttaaaaatggcaaaagagcaaaacttatcaattctttcttaccttgctaatgagcttaattcacctgtaatcacgattgcagctccaatcattgcttttgtggctattacaaagtctttccttggccattatatcggagcgtttgaagtaatgcgtgacatgattattaagtttggtaaatcacgtggaaaagtaatcgaagaaaaaacaattaagacaatcgtccttacttttgttgtattatcatgctggtttgttgcttatacaaatccaagtattcttggacttattgattctctaagtggtccattagttgcggctatcttatgtctattaccgatgtatgcgattcaaaaagtcccagtattagctaagtataaagggaaaatgagtaacgtatttgttattattgtaggtgtgcttactgttttagcaagtattaaatcattattctaa

SEQ ID NO: 8106 - protein, 439 aa, Bacillus thuringiensis serovar konkukian str. 97-27
MNGNTAKKIEVQAENNALKNEQYADPKKWHKQDTTWALSLFGTAIGAGVLFLPINAGSGGLLSLLLITLLAYPVMYYSHRALAKMIYASNSADEGITGTIREYFGNKASIIFNIVYFGSIYTIVLMYSVALTNTASSFIVHQLNMPEPPRAILSLVLVLGLIAILNFGQDITVKVMSMLVYPFIASLLFIAISLIPQWNTSMLSFSAVSTASTGTGYFGTILMILPIIVFSFNHSPMISSFVVKQRATYGIEATDAKCAQIQKVCYIMTFVVVMFFVWSSALSLTPDDLKMAKEQNLSILSYLANELNSPVITIAAPIIAFVAITKSFLGHYIGAFEVMRDMIIKFGKSRGKVIEEKTIKTIVLTFVVLSCWFVAYTNPSILGLIDSLSGPLVAAILCLLPMYAIQKVPVLAKYKGKMSNVFVIIVGVLTVLASIKSLF

SEQ ID NO: 8107 - DNA, 1290 bp, Erwinia carotovora subsp. atroseptica SCRI1043
  CDS (1)..(1290): transl_table=11
atgagcacaattcaagatagcagccacgtgttagaacaggcttcaggatggcgtaaaagcgacaccgtctggatgctcggcctctatggcacggccatcggtgcgggcgtgttattcttacccatcaatgctggcattggtggtttaattccgttaattatcatggcactgattgcctttccgatgacgtattattctcaccgtgcattatgccgctttgtattatccggcaagaaaggtggcgaagatattaccgaagtcgttgaagaacatttcggcgttggtgcgggtaaattaatcactttgctttattttttcgctatttatccgatcctattagtttatagcgtcgctatcaccaatacggtagatagctttattactcaccaattgcatttaccttctccgccgcgtgctgcgctgtcattaatattgatcctcgggttgatgtttattgtccgcttcggtgaagcgatgatcgttaaagcaatgagtgttctggtttacccttttgttgccgtactgatgttgctggcgctttatttaattccgaactggaatacctctgtttttgaaaacatttctctgagttccagcgtaacgggtaacggtctgttggcgacattatggctggctattccggtgatggttttctccttcaaccactcgccaatcatctcctctttcgccgttgccaaacgcaaagaatatggtgatgatgcagagaagaaatgctcacgcattctgtcttacagccacattatgatggtgttgacggtgatgttcttcgttttcagctgcgtactgagcctttctccaaccgagctgatggaagcaaaaacacaaaacatttctattctgtcctatctggcgaaccattttaatagcccggtaatcggctatctggccccagtaattgcaaccatcgcgatctctaaatccttcctgggccactatctgggcgcgggtgaaggctttaacggcatgatcgtgaaatccctgcgcagcagaggaaaaaccatctccagcaccaaactgaaccgtatcacttcgctgttcatgttgatcaccacctggattgtcgcgacgctgaacccaagcattctgggtatgatcgaaaccttgggcggcccgattatcgcgtgcctgctgttcctgatgccgatgtacgccatccagaaagtcccagcgatgaaaaaatacagcggccacattagcaacgtctttgtcaccctcatgggactgatcgctatttccgccattgtttacagcctgcgcgatctgctgtaa

SEQ ID NO: 8108 - protein, 429 aa, Erwinia carotovora subsp. atroseptica SCRI1043
MSTIQDSSHVLEQASGWRKSDTVWMLGLYGTAIGAGVLFLPINAGIGGLIPLIIMALIAFPMTYYSHRALCRFVLSGKKGGEDITEVVEEHFGVGAGKLITLLYFFAIYPILLVYSVAITNTVDSFITHQLHLPSPPRAALSLILILGLMFIVRFGEAMIVKAMSVLVYPFVAVLMLLALYLIPNWNTSVFENISLSSSVTGNGLLATLWLAIPVMVFSFNHSPIISSFAVAKRKEYGDDAEKKCSRILSYSHIMMVLTVMFFVFSCVLSLSPTELMEAKTQNISILSYLANHFNSPVIGYLAPVIATIAISKSFLGHYLGAGEGFNGMIVKSLRSRGKTISSTKLNRITSLFMLITTWIVATLNPSILGMIETLGGPIIACLLFLMPMYAIQKVPAMKKYSGHISNVFVTLMGLIAISAIVYSLRDLL

SEQ ID NO: 8109 - DNA, 1302 bp, Yersinia pseudotuberculosis IP 32953
  CDS (1)..(1302): transl_table=11
atggacactacgcaaacaagcactcttgcctcggcaagaaaaatctcatcaagtacatggcgcaaaagtgacaccatgtggatgttgggtctgtacggtacagcgattggcgcaggtgtactctttttgcccatcaacgccggtattggtggcctgctaccactgattgttatggctatcattgctttcccaatgacctactacgctcaccgtggcctgtgccgattcgtgttatccggtaaaaatccaggtgaagatattactgaggtggttgaagaacatttcggtgtaggcgcaggtaaactgattaccctgctttacttcttcgctatctaccccattctcttggtgtacagcgtagcaattaccaataccgtggatagtttcattacacatcagatgcacctgccatcaccaccacgcgccattttgtccctgattctgattgtgggcctgatggctatcgtgcgctttggtgaacagaccatcgtcaaagccatgagcatcttggtattcccgtttgttgccgtattgatgatgttggcgatatacctgatcccaaactggtcaggtgcaatattcgaaaacgtatccatggacggtaacggcacaggtagcggcctgtggatgacaatgtggctaatcattcccgtcatggtgttctctttcaaccactcaccgatcatctcagcctttgctgtagcaaagcgcgaagagtacggggtggatgcagagaaaaaatgttcacgcattttgagctttgcccacatcatgatggttatcaccgtcatgttcttcgtcttcagttgcgtactgagcctgtctcctgcggatctgatggatgcaaaaaaccaaaacatctccattttgtcttatctggcaaaccattttaatacgccagtaattgcctatatggcaccggttattgcctttattgccatcactaaatcattcctgggccactatctgggcgcccgtgaaggttttaacggtatggtcattaagtctctgcgtagtagaggcaaaaccattgagcagaacaaactgaaccgcattactgcgttgttcatgttagtcaccacctgggctgtcgcgaccttaaacccaagtatcttggggatgatcgaaacattgggcggccctatcatcgcgatgctcctgttcctgatgccgatgtatgccattcataaagtcccggccatgcgtaaatacagcggccagatcagtaacgtattcgtggtactcatgggcttgatcgccatctctgggatcttattcaacttaagcaacttgtttaattag

SEQ ID NO: 8110 - protein, 433 aa, Yersinia pseudotuberculosis IP 32953
MDTTQTSTLASARKISSSTWRKSDTMWMLGLYGTAIGAGVLFLPINAGIGGLLPLIVMAIIAFPMTYYAHRGLCRFVLSGKNPGEDITEVVEEHFGVGAGKLITLLYFFAIYPILLVYSVAITNTVDSFITHQMHLPSPPRAILSLILIVGLMAIVRFGEQTIVKAMSILVFPFVAVLMMLAIYLIPNWSGAIFENVSMDGNGTGSGLWMTMWLIIPVMVFSFNHSPIISAFAVAKREEYGVDAEKKCSRILSFAHIMMVITVMFFVFSCVLSLSPADLMDAKNQNISILSYLANHFNTPVIAYMAPVIAFIAITKSFLGHYLGAREGFNGMVIKSLRSRGKTIEQNKLNRITALFMLVTTWAVATLNPSILGMIETLGGPIIAMLLFLMPMYAIHKVPAMRKYSGQISNVFVVLMGLIAISGILFNLSNLFN

SEQ ID NO: 8111 - DNA, 1320 bp, Bacillus cereus E33L
  CDS (1)..(1320): transl_table=11
atgaacgggaatactgcaaagaaaatagaagttcaagctgaaaataccgcactaaacaatgagcaatatgcagatccgaaaaagtggcataagcaggatactacatgggcactcagtctatttggaactgcaattggagcaggggtgctctttttaccgattaatgcaggttcaggtggtttattatctttactgctaattacattgcttgcatatccagttatgtactactcacatagggcgcttgctaaaatgatatacgcttctaattctgctgatgaggggatcacaggtacaattagagagtatttcggaaataaagcgagtatcatttttaacatcgtatatttcggttcaatttatacaatcgtactaatgtattcggttgcgcttacaaacactgcaagtagttttatcgtgcatcaattgcacatgccagaacctccaagagcaattttatcacttgtattagttcttggtcttatcgctatactaaattttggtcaagatattactgtaaaggtaatgagtatgttagtgtatcctttcatcgtttctctactgtttatcgcaatatctttaattccacagtggaatacgtcaatgctgagtttttcagctgtttcaactgcttcaacaggaacaggctattttgggacgatattgatgattctaccaatcatcgtattctcatttaatcattcacctatgatttcatcatttgttgtgaaacagagagctacgtatggaatcgaagccactgatgcgaaatgtgcgcaaatacaaaaggtttgttatattatgacattcgctgttgttatgttcttcgtttggagtagcgcattgagcttgactccagaggatataaaaatggcaaaagaacaaaacttatcaatcctttcatatcttgcgaatgagcttaattcacctgtaatcacgattgcagctccaatcattgcttttgtggctattacaaagtctttccttggccattatatcggagcatttgaagtaatgcgtgacatgattattaagtttggtaaatcacgtggaaaagatattgaagaaaaaacaattaagacaatcgtccttacttttgttgtattatcatgctggtttgttgcttatacaaatccaagtattcttggacttattgattctctaagcggtccattagttgctgctatcttatgtctattaccgatgtatgcgattcaaaaagtaccggtattagctaagtacaaagggaaaatgagtaacgtatttgttattattgtaggtgtacttactgttttagcaagtattaagtcattattctaa

SEQ ID NO: 8112 - protein, 439 aa, Bacillus cereus E33L
MNGNTAKKIEVQAENTALNNEQYADPKKWHKQDTTWALSLFGTAIGAGVLFLPINAGSGGLLSLLLITLLAYPVMYYSHRALAKMIYASNSADEGITGTIREYFGNKASIIFNIVYFGSIYTIVLMYSVALTNTASSFIVHQLHMPEPPRAILSLVLVLGLIAILNFGQDITVKVMSMLVYPFIVSLLFIAISLIPQWNTSMLSFSAVSTASTGTGYFGTILMILPIIVFSFNHSPMISSFVVKQRATYGIEATDAKCAQIQKVCYIMTFAVVMFFVWSSALSLTPEDIKMAKEQNLSILSYLANELNSPVITIAAPIIAFVAITKSFLGHYIGAFEVMRDMIIKFGKSRGKDIEEKTIKTIVLTFVVLSCWFVAYTNPSILGLIDSLSGPLVAAILCLLPMYAIQKVPVLAKYKGKMSNVFVIIVGVLTVLASIKSLF

SEQ ID NO: 8113 - DNA, 1362 bp, Legionella pneumophila subsp. pneumophila str. Philadelphia 1
  CDS (1)..(1362): transl_table=11
gtgttaatattgatcaacctgcgaggcgctattttattagttagtattaaaacgaggatgtttttcatgtcatcaaatgaatctgcagctatagtatctccgatagtcaaccaaaaactatcacaatggaaaaaacaagatacgatttggatgttaagcctctatggcacagcaattggtgccggaactcttttccttcctatagatgctggtcttaatggcattttgcctttaatcattatgacaattctggccttccccatgacttattattctcatagggctttatgtcgttttgtcctttcaggctcgtcctcacacaatgacatcaccgatgttgtagaagaacactttggctcatttgcgggtaagatgctaactatcctgtacttttttgcgatttatccaattttgcttatgtacagtgtcgcaataactaataccacggaaagtttcctgattaatcaaatgggaattacccctccgccacgggctcttttagcaatcatattaattcttgggttaatgggtatcgtgcgtttaggacaagaaattattgtcaaatcgatgtcggtattggtatatccttttgccactattctatttctgctttcgctttatttaattccaaattggaataacgctatttttatccaaagcaattccttacatgccaatggagggcatggactattaatgactttatggttaattattccagtgatggtgttctcctttaaccattctcctatcatttcatcttttgctgtgaatcaaaagcagcaatatggtagccaagctgacgagaaaagctcattaattatgaaatacagtcacttgatgatggttttctctgtgatgttttttgtatttagctgtgtgttgagcctgtcacctcaagatcttttgcaagcaaagcaacaaaatatttccattttgtcttatctggcgaatcattttaatacccctattatggcctatattgcaccggttattgcattcatagccatttcaaaatcttttctgggacattatttaggtgccaaggaaggtttaagtggaattattgttaaatcattaaaatcaacaacaggcaaaacaattaataagaattccctgcacagaatcattgaaatctttatgattctgacttgttgggttgttgctacaattaatcctaatattttaaaaatgattgaaacattaggaggtcccatcatagctgtcttattatttatcatgccaatgtatgccattgctaaagtgccagccatgaaaaaatacaacaatcaaatcagtaacgtatttgttaccgtcatgggcattatttctatctcagccatcatttatggcttaatttaa

SEQ ID NO: 8114 - protein, 453 aa, Legionella pneumophila subsp. pneumophila str. Philadelphia 1
MLILINLRGAILLVSIKTRMFFMSSNESAAIVSPIVNQKLSQWKKQDTIWMLSLYGTAIGAGTLFLPIDAGLNGILPLIIMTILAFPMTYYSHRALCRFVLSGSSSHNDITDVVEEHFGSFAGKMLTILYFFAIYPILLMYSVAITNTTESFLINQMGITPPPRALLAIILILGLMGIVRLGQEIIVKSMSVLVYPFATILFLLSLYLIPNWNNAIFIQSNSLHANGGHGLLMTLWLIIPVMVFSFNHSPIISSFAVNQKQQYGSQADEKSSLIMKYSHLMMVFSVMFFVFSCVLSLSPQDLLQAKQQNISILSYLANHFNTPIMAYIAPVIAFIAISKSFLGHYLGAKEGLSGIIVKSLKSTTGKTINKNSLHRIIEIFMILTCWVVATINPNILKMIETLGGPIIAVLLFIMPMYAIAKVPAMKKYNNQISNVFVTVMGIISISAIIYGLI

SEQ ID NO: 8115 - DNA, 1251 bp, Campylobacter jejuni RM1221
  CDS (1)..(1251): transl_table=11
atgaatactcctaaatggactagtcacgatacaaggtgggttttatctctttttggaacagctattggagccggcgtacttttgttacctattagtgctgggcttggtggattgatacctttattagttatacttgttttagcttttcctatgacttacttagctcatagaaatttatgtcgctttgtgctttcaagttctaatccaaaagatgatattacttttgttgcagaaagttattttggcaagggcggtggatttttaattacacttttgtatttttttgctattttgcctattttattggtttatagtgctaatcttacaacaactttgcttgagttcttaatcaatcagttcaatttcaatgcagatcttactcatgctgctcgttggtgggtgagttttttgattgttggagttttggttttgatttctattcttggtgaaaatgttgtaacaaaagcaatgagttttcttgtttttccttttattatatttttatttattttttcattgcttttaattccacaatggaattcatcattatttgcaaatgttgatttttccgtaatttcaacaagtaatttttgggttactttatggcttgttattcctgtgatggtatttagttttaatcactctcctatcatttcttcacttgcttgttattgtaaaaaagaatatggtgattatgctgaacctcgcgctagaaaaattatttctttggcaattattcttatggtttttgttgtaatgttttttgttttttcttgtgctttaacctttacaccagaagattttgcatcagcaaaagatcaaaatatcaatattcttacttttatagcaaataaatttcctgaagtttctttactagcttatgttggacctattgttgcacttgtggctattagcaaaagtttcttaggacattatcttggttctcaagaaggcttaaatggcattttatataaagcaagtaatggtagaattcaaggtaaattcgctcaaactttaacagcgatcattacctttgctattgcttggcttgttgcgtataaaaatccaagtgttataggaattatcgaggctattggtggccctgttttggctattttgcttttcttaatgccactttattgtatttatcgttttgatattttggcaagatttcgtaataaatttttagatctttttattttggtaatggggatagttgcaatttctgctgcaattcatgatcttttataa

SEQ ID NO: 8116 - protein, 416 aa, Campylobacter jejuni RM1221
MNTPKWTSHDTRWVLSLFGTAIGAGVLLLPISAGLGGLIPLLVILVLAFPMTYLAHRNLCRFVLSSSNPKDDITFVAESYFGKGGGFLITLLYFFAILPILLVYSANLTTTLLEFLINQFNFNADLTHAARWWVSFLIVGVLVLISILGENVVTKAMSFLVFPFIIFLFIFSLLLIPQWNSSLFANVDFSVISTSNFWVTLWLVIPVMVFSFNHSPIISSLACYCKKEYGDYAEPRARKIISLAIILMVFVVMFFVFSCALTFTPEDFASAKDQNINILTFIANKFPEVSLLAYVGPIVALVAISKSFLGHYLGSQEGLNGILYKASNGRIQGKFAQTLTAIITFAIAWLVAYKNPSVIGIIEAIGGPVLAILLFLMPLYCIYRFDILARFRNKFLDLFILVMGIVAISAAIHDLL

SEQ ID NO: 8117 - DNA, 1278 bp, Pseudomonas syringae pv. syringae B728a
  CDS (1)..(1278): transl_table=11
atgaatgatcaggctaatggcgtcgtagaacgtctggatgtagctcccgagagcatcgcgtcatggaatcgtaatgacaccacctggatgctcggattgttcggtaccgccatcggtgcgggtaccctgtttttgccaatcaacgcgggtatcggtggtttctggccattgatggcgctggcactgctggcgtttcccatgaccttctacgcccaccgtgggttgacgcgcttcgtgctctcaggacgtgaaggtgccgacatcaccgatgtggtcgaagagcatttcggcaagagtgccggtgcgatgatcaccttgctgtatttcttcgcaattttcccgatcctgctgatctacagcgtggccctcaccaacaccgtcggcagttttcttgagcaccagttgcacatcacgccaccgccgcgcgccgcactggcgtttgtgctgatcatggggctgctggccgtggtgcgttgtggcgagcggttcatcgtcaaggccatgagcctgatggtttatccgttcatcgtcgcactattgtttctggcaatattcctcatcccgcactggaccggcggcattctgagcaccgctaccacgttccctgagctatcggcgttcatacccacgttgtggctggccattccggtgatggtgttctctttcaaccacacaccgatcatctcggcctttgccgtcgatcagaagcgtcagtatggcgaaaacgccgaggtgcgcagttcgcagattctggcccgcgcccacggtctgatggtcgtgatggtgctgttcttcgtgttcagttgcgtgttgaccctgtcgcctgcccaactggccgaggccaaggcgcagaacatctcgatcctgtcttacctggccaaccacttcaacaacccgaccatcgcctttgtcgcgccactgatcgcgttcgtggctatttccaagtcgtttcttggccactacatcggtgcgagcgagggcttgaaaggcctggttctgaaggcgggtcgtcgtcctgcacccaaggccctggaccgcatgaccgcggcgttcatgctggtggtgtgctggctggtggcaacgctcaacccgagcatcctgggcatgatcgaaaccctgggcgggccggtgatttcggctttgctgttcctgatgccgatgtacgccatccacaaagtaccagccatgcgtaaatacgctggcgcgtggtccaactactttgtggtggccgccggtgtggtggcaatttcagcattgatcttttcgctgatccgctga

SEQ ID NO: 8118 - protein, 425 aa, Pseudomonas syringae pv. syringae B728a
MNDQANGVVERLDVAPESIASWNRNDTTWMLGLFGTAIGAGTLFLPINAGIGGFWPLMALALLAFPMTFYAHRGLTRFVLSGREGADITDVVEEHFGKSAGAMITLLYFFAIFPILLIYSVALTNTVGSFLEHQLHITPPPRAALAFVLIMGLLAVVRCGERFIVKAMSLMVYPFIVALLFLAIFLIPHWTGGILSTATTFPELSAFIPTLWLAIPVMVFSFNHTPIISAFAVDQKRQYGENAEVRSSQILARAHGLMVVMVLFFVFSCVLTLSPAQLAEAKAQNISILSYLANHFNNPTIAFVAPLIAFVAISKSFLGHYIGASEGLKGLVLKAGRRPAPKALDRMTAAFMLVVCWLVATLNPSILGMIETLGGPVISALLFLMPMYAIHKVPAMRKYAGAWSNYFVVAAGVVAISALIFSLIR

SEQ ID NO: 8119 - DNA, 1239 bp, Haemophilus influenzae 86-028NP
  CDS (1)..(1239): transl_table=11
atgaaatcaacagaaaaactcaaatggaacaaatttgatgcaacgtggatgttaaaccttttcggtacggcggttggcgcgggcgtattgttcttgccgattaacgcagggatgggtggattttggccgttagttttaatggcaattatcgtcgggccaatgacttattttgctcaccgtggcttagcctactttgtactttcatcaaaaaatcctggcagcgatattactgaagtagtggaagaacactttggtaaaacagcgggtaaacttattaccttactttattttttcgcgattttccctattctgttgatttacggtaacggtatcacgaacaccgtagattctttcattgtaaatcaacttggtatggcatcaccaaatcgagtcattctctcttttgtattaattgcggtattgatttccgtgatgttatttaatgaaaaagtgatgttaaaaatcacagaatggcttgtttatccgttagtcttaattttatttgttctttctatttacttaattcctgaatggaatagtgccgtattatatgaatttccaacaacaggtggtttcttaaccactttatggctaaccattcccgtattagtattttcatttaaccattcgccagcgacttcatcgttcacttgctcacaattccgtgaatacaaaacgtttgagggtgcagaacgccatatcagccatacagaaaaaggcgcttcaacgattttattattcttcgtaatgttcttcgtatttagctgtgtattaacactaacacctgaagaattagtggcagcaaaagaacagaatattagtatcttgtctttcttagcaaataaatttgataatccatatatctcttattttggcccgcttgttgcattcttagcgattacaagttcattcttcggtcactatatgggggcacgtgaaggattagaaggcttatatttgaaaatgaaaggcgaatctgtaaatcgtaaaaaactcaattatgcgaccgcacttttcttcttattaaccttatggggcgttgcgattattaatccaagtatcttaggcttaattgaatctcttggcggcccaatcattgcgatgattttattcattatgccaatgtatgcgattcgcaaaatcccagcaatgaaacgctacagcggacgtttcagtaatgtatttgtaacaattatgggactaattgctatttctgcagttgtttatggattattataa

SEQ ID NO: 8120 - protein, 412 aa, Haemophilus influenzae 86-028NP
MKSTEKLKWNKFDATWMLNLFGTAVGAGVLFLPINAGMGGFWPLVLMAIIVGPMTYFAHRGLAYFVLSSKNPGSDITEVVEEHFGKTAGKLITLLYFFAIFPILLIYGNGITNTVDSFIVNQLGMASPNRVILSFVLIAVLISVMLFNEKVMLKITEWLVYPLVLILFVLSIYLIPEWNSAVLYEFPTTGGFLTTLWLTIPVLVFSFNHSPATSSFTCSQFREYKTFEGAERHISHTEKGASTILLFFVMFFVFSCVLTLTPEELVAAKEQNISILSFLANKFDNPYISYFGPLVAFLAITSSFFGHYMGAREGLEGLYLKMKGESVNRKKLNYATALFFLLTLWGVAIINPSILGLIESLGGPIIAMILFIMPMYAIRKIPAMKRYSGRFSNVFVTIMGLIAISAVVYGLL

SEQ ID NO: 8121 - DNA, 1296 bp, Pseudomonas fluorescens Pf-5
  CDS (1)..(1296): transl_table=11
atgaccgatgtaccgacacctgctgcccaaaaccctgctgtagccacaccccgcgacaccaccagcagccgccagggctggagcaagcacgacaccacctggatgctcggcctgtatggcaccgccatcggcgccggcaccctgttcctgccgatcaacgccggggttggcggcttctggccgctgatcgtgctggcgctgctggccttccccatgaccttcttcgcccaccgcggcctgacccgcttcgttctttccgggcgctccggagacatcaccgaagtggtcgaggagcatttcggggtcggcgccggcaagctgatcaccctgctctacttctttgccatcttcccgatcctgctggtgtacagcgtggcgctgaccaacaccctgagcagtttcatggaacaccagctgcacatgactccaccgccgcgggcgctgctgtcgctgctgctgatcctcggcctgatggccatcgtgcgctgcggccagggcgtgatcgtgcgggccatgagcctgctggtctacccgttcgtcgccgcgttgctgctactggccctgagcctgatccccaactggaacggcgcgttcttcgcctcggccggcgaaggcatgcccctgccgctgttcttcaagaccctgtggctggcgatcccggtgatggtgttttccttcaaccattcgccgatcatctcggccttcgccctggatcagaagcgccattacggcccgcaggccgaagccaagagcagcggtatcctggccacggcccacggcatgatggtgctgacagtgatgttcttctgcttcagttgcgtgctggccctgtcgccggcggacctggtagcggccaaggagcagaacatctcgatcctgtcctacctggccaaccacttccagaccccggtgattgcctatgccgccccgctgatcgccctggtggccattaccaagtcgttcctgggccactacatcggcgccagcgaaggcttccagggcctgatcgtgaaaaacctgcgggggcgctcgctgtcctccagcagcctggaaaagatcaccgcgctgttcatgatcctcacgtgctgggccgtggccaccttcaacccgagcatcctgcgcatcatcgagaccatgggcggaccggtaatcgcctgcctgctgttcctgatgccgatgtatgcgatccggcgggtgccttcactgcgccagtattcgggtcagttgtcgaacctgttcgtggtgctgatcgggctggtcgcactgtctgcgatcatttattcggtcgtgccctga

SEQ ID NO: 8122 - protein, 431 aa, Pseudomonas fluorescens Pf-5
MTDVPTPAAQNPAVATPRDTTSSRQGWSKHDTTWMLGLYGTAIGAGTLFLPINAGVGGFWPLIVLALLAFPMTFFAHRGLTRFVLSGRSGDITEVVEEHFGVGAGKLITLLYFFAIFPILLVYSVALTNTLSSFMEHQLHMTPPPRALLSLLLILGLMAIVRCGQGVIVRAMSLLVYPFVAALLLLALSLIPNWNGAFFASAGEGMPLPLFFKTLWLAIPVMVFSFNHSPIISAFALDQKRHYGPQAEAKSSGILATAHGMMVLTVMFFCFSCVLALSPADLVAAKEQNISILSYLANHFQTPVIAYAAPLIALVAITKSFLGHYIGASEGFQGLIVKNLRGRSLSSSSLEKITALFMILTCWAVATFNPSILRIIETMGGPVIACLLFLMPMYAIRRVPSLRQYSGQLSNLFVVLIGLVALSAIIYSVVP

SEQ ID NO: 8123 - DNA, 1485 bp, Pseudomonas fluorescens Pf-5
  CDS (1)..(1485): transl_table=11
ttgagcgggagagggccgggccagacgctttcccatcaaacgaaaaaatacctgcagcgcataaaccgttcctcagctgagtctatgcagcgcccttggaatcccggacaatcgcgccccctcttttcgctcgggcactgcctgtcgggtactccgatacgcccgggtgaatggcaaacgaccggaatgtggagatcccaccggatgaatgatcaggccaacagcgttgatcaacgctttgaaaccgcggccccagcgaccctgacccgctggaaccgccaagacaccacctggatgctcggcctgtttggcacggccatcggtgccggtaccctgtttctgcccatcaatgccggcatcggcggtttctggccgctgttgatcctggcgctgctggccttccccatgaccttctatgcacaccgcggcctgacccgcttcgtgctttccgggcgtgacggcgcggacatcactgacgtggtggaagagcatttcggcctcaccgccggtgccctgatcaccttgctgtactttttggcgatcttcccgatcctgctgatctacagcgtggccctgaccaacaccgtcgacagcttcatgaccaaccaactgcacatcgcgccgccaccgcgggcgatcctggccctggtgctgatcttcggcctgctggtggtggtgcgttgcggcgagcaggtgatcgtcaaggccatgagcctgatggtctacccgttcatcgtggccctgctgttcctcgcggtgttcctgatcccgcactggaatggcggcatcctcgccaccgtcagcgatgtcccggcgccttcggccttcctgcataccctgtggctggcgattccggtgatggtcttctcgttcaaccattcgccgatcatctcggcctttgccgtggaccagaagcgccgctatggcgtgcacgccgaagagcgcagttcgcagattctctcccgcgcccacctgctgatggtgggcatggtgctgttcttcgtcttcagctgcgtactgaccctgaacccggcgcagctggcggaagccaaggcgcagaacctgtccatcctgtcctacctggccaaccatttccagaatccgaccatcgccttcgccgcgccgttgattgccttcgtggccatcgccaagtccttcctgggccactacatcggtgccagcgaaggcctcaagggcctgatcggcaagagcggccggcgcccgggcacgaaaaccctggaccgcgtcaccgccgccttcatgctggtgatctgctgggccgtggccaccctcaacccgagcatcctgacgatgatcgagaccatgggcggcccggtgatcgcggcgatcctgttcctgatgccgatgtacgccatccgcaaggtgccggccatggcccgctaccgcggccaggcttccaacgtcttcgtgaccctggtgggcctggtggccattactgccctggtgtactccctggcgtcctga

SEQ ID NO: 8124 - protein, 494 aa, Pseudomonas fluorescens Pf-5
MSGRGPGQTLSHQTKKYLQRINRSSAESMQRPWNPGQSRPLFSLGHCLSGTPIRPGEWQTTGMWRSHRMNDQANSVDQRFETAAPATLTRWNRQDTTWMLGLFGTAIGAGTLFLPINAGIGGFWPLLILALLAFPMTFYAHRGLTRFVLSGRDGADITDVVEEHFGLTAGALITLLYFLAIFPILLIYSVALTNTVDSFMTNQLHIAPPPRAILALVLIFGLLVVVRCGEQVIVKAMSLMVYPFIVALLFLAVFLIPHWNGGILATVSDVPAPSAFLHTLWLAIPVMVFSFNHSPIISAFAVDQKRRYGVHAEERSSQILSRAHLLMVGMVLFFVFSCVLTLNPAQLAEAKAQNLSILSYLANHFQNPTIAFAAPLIAFVAIAKSFLGHYIGASEGLKGLIGKSGRRPGTKTLDRVTAAFMLVICWAVATLNPSILTMIETMGGPVIAAILFLMPMYAIRKVPAMARYRGQASNVFVTLVGLVAITALVYSLAS

SEQ ID NO: 8125 - DNA, 1278 bp, Pseudomonas syringae pv. phaseolicola 1448A
  CDS (1)..(1278): transl_table=11
atgaatgatcaggctaacggcgtcgtagaacgcctggatgtagctcccgagagcatcgcctcttggaaccgtaatgacaccacctggatgctcggactgttcggtactgccattggcgcaggtacgctgttcctgcccatcaatgcaggcatcggtggtttctggccactgatggcgctggcgctgctggcgtttcccatgacgttctatgctcaccgcgggctgacccgtttcgtattgtccgggcgtgaaggggccgacatcacggaagtggtcgagcaacatttcggcaaaagcgccggcgcgatgatcaccttgctgtatttttttgcgatctttccgatcctgctgatctacagcgtggccctcaccaataccgtgggcagttttcttgagcatcagttgcacatagcgccgccgccacgcgcagcgctggcgttcgtgctgatcatgggcctgctggccgtggtgcgttgtggcgagcggatcatcgtcaaggccatgagcctgatggtttacccgttcatcgtcgcactgctgtttctggcggtattcctgattccgcactggactggtggcatcctgagtacctcaaccacctttcccgagccttcggcgttcctgcctactttgtggctggccattccggtaatggtgttttctttcaaccacacgccgatcatctcggcgtttgccgttgatcaaaaacgtcagtatggagaaaacgccgaggtacgcagttcgcagatactggcccgtgcccacggtttgatggtggtgatggtgctgtttttcgtgttcagctgcgtattgacgctgtcgccagcccaattggctgaggccaaagcacagaacatttcgatcctctcctacctggccaaccacttcaacaacccgaccatcgccttcgtggcgccgctgattgcgttcgtggctatttccaagtcgttcctcggccactacatcggtgcaagcgagggcctgaaagggctggttctgaaaaccgggcgtcgtcctgcaccaaaggctctggatcgtctgacagcagtcttcatgctggtggtgtgctggctggtcgcaacgctgaacccgagcattctgggtatgatcgagaccctgggcgggccggtgatttcggcgctgctgttcctgatgccgatgtatgccgtctacaaagtacccgccatgcgcaaatatgcaggtgcatggtcgaactactttgtggtggccgccggtgtggtggcgatctctgcactgattttttcgctgacacgctga

SEQ ID NO: 8126 - protein, 425 aa, Pseudomonas syringae pv. phaseolicola 1448A
MNDQANGVVERLDVAPESIASWNRNDTTWMLGLFGTAIGAGTLFLPINAGIGGFWPLMALALLAFPMTFYAHRGLTRFVLSGREGADITEVVEQHFGKSAGAMITLLYFFAIFPILLIYSVALTNTVGSFLEHQLHIAPPPRAALAFVLIMGLLAVVRCGERIIVKAMSLMVYPFIVALLFLAVFLIPHWTGGILSTSTTFPEPSAFLPTLWLAIPVMVFSFNHTPIISAFAVDQKRQYGENAEVRSSQILARAHGLMVVMVLFFVFSCVLTLSPAQLAEAKAQNISILSYLANHFNNPTIAFVAPLIAFVAISKSFLGHYIGASEGLKGLVLKTGRRPAPKALDRLTAVFMLVVCWLVATLNPSILGMIETLGGPVISALLFLMPMYAVYKVPAMRKYAGAWSNYFVVAAGVVAISALIFSLTR

SEQ ID NO: 8127 - DNA, 1302 bp, Pseudomonas fluorescens PfO-1
  CDS (1)..(1302): transl_table=11
atgaccgatgtacgcacacctgctgccgaaaatcccgctgtagaccgcacacgcaataacgaaaccgcccacaagggctggagcaagttcgacaccacctggatgctcggcctgtatggcaccgccattggcgccggcaccctgttcctgccgatcaacgccggtgtcggcggcttctggccgttgctgatcctggcgttgctggctttcccgatgaccttcttcgcgcaccgtggcctcacccgcttcgtgctctcgggccgctccggtgacatcaccgaagtggtggaggaacacttcggcatcggcgccggcaaactgattacgctgctgtatttcttcgcaatcttcccgatcctgctggtgtacagcgtggcgctgaccaacactctcggcagcttcctcgaacaccagttgcacatcgccccgccaccgcgcgcggtgctgtcgctggcgctgatcctcggtctgatggccatcgtccgttgcggtcagaacgtgatcgtcaaagccatgagtgtgctggtgtatccgttcgtcgccgcgttgctgttgctcggcatcagcctgattccgaactggaacggcgcattcttcgccagcgctcaagaaccgatggaaatgtcggtgttcctcaagaccctgtggctggcgatcccggtgatggtgttctcgttcaaccattcacccatcatctctgcgttcgccgtcgagcagaaacagcgctacggcgagcaggccgaacgcaagagcagcggcatcctcgccatggcccacggcatgatggtcgtcacggtgatgttcttctgcttcagctgcgtgctggcgctgtcgccgacggatctggcagcggccaaggcgcagaacatctcgatcctgtcgtatctggccaaccacttccagaccccggtcatcgcttacgccgcgccattgattgcgctggtggcgatcaccaaatccttcctcggccactacatcggcgccagcgaaggcttccagggcatgatcgtcaaaagcctgcgcagccgtggccgggtgatgtcggcgagctggctgaaccgtgcgaccgcgctgttcatgatcctcagctgctgggccgtggcgaccttcaacccgagcatcctcggcatgatcgaaaccctcggcgggccggtgattgcctgcctgctgttcctgatgccgatgtacgcgatccgccgcgtgccagccttgcgccagtattcgggccaggtgtcgaacgtgttcgtggtgctgatcggcctgattgcactgtcagcgatcatctactcggttctgccctga

SEQ ID NO: 8128 - protein, 433 aa, Pseudomonas fluorescens PfO-1
MTDVRTPAAENPAVDRTRNNETAHKGWSKFDTTWMLGLYGTAIGAGTLFLPINAGVGGFWPLLILALLAFPMTFFAHRGLTRFVLSGRSGDITEVVEEHFGIGAGKLITLLYFFAIFPILLVYSVALTNTLGSFLEHQLHIAPPPRAVLSLALILGLMAIVRCGQNVIVKAMSVLVYPFVAALLLLGISLIPNWNGAFFASAQEPMEMSVFLKTLWLAIPVMVFSFNHSPIISAFAVEQKQRYGEQAERKSSGILAMAHGMMVVTVMFFCFSCVLALSPTDLAAAKAQNISILSYLANHFQTPVIAYAAPLIALVAITKSFLGHYIGASEGFQGMIVKSLRSRGRVMSASWLNRATALFMILSCWAVATFNPSILGMIETLGGPVIACLLFLMPMYAIRRVPALRQYSGQVSNVFVVLIGLIALSAIIYSVLP

SEQ ID NO: 8129 - DNA, 1281 bp, Pseudomonas fluorescens PfO-1
  CDS (1)..(1281): transl_table=11
atgaatgatcaggccaatagcgtcgaacaacgctttgaggcggcagcaccagccgaactgtcgagctggaatcgccatgacactacctggatgttgggactgtttgggacggccatcggcgccggtaccctgtttttgccgatcaacgcaggtctgggtggcttctggccgctggtgatcctcgcgctgctggccttcccgatgacgttttacgcacaccgcggcctgacccgcttcgtgctttccggtcgcgaaggcgccgacatcacagacgtggtggaacagcatttcggcatcaaggccggcgcgctgatcaccctgctgtacttcttcgctatcttcccgatcctgctgatctacagcgtcggcctgaccaacacggtcgccagtttcctcgagcaccaactgcacatcacgcagccaccgcgcgcgctgctgtcgttcgtgctgattctcggcctgctggccgtggtgcgctgcggcgagcaagtgatcgtcaaggccatgagccttatggtgtatccgttcatcgtcgcgctgctgttcctggcggtgtatctgattccgcactggaacggcggcatcctgaccaccgcttcgcaagtgccggcaccgtcggcgctgctgcacacgctgtggctggcgattccggtgatggtgttctcgttcaaccactcgccgatcatctcggcgtttgcggtggatcagaagcgccgttacggcgtccacgctgacgagcgcagctcgcagatcctgtcccgcgcgcacctgctgatggtggtgatggtgctgttcttcgtcttcagttgcgtgctgaccctgtcgccggagcaactggcgcaagccaaggcgcagaacctgtcgatcctgtcttacctggccaaccacttcagcaacccgaccatcgcgttcgcggcgccgctgattgcgtttgtggcgatctccaagtcgttcctcggccactacatcggtgccagcgaaggcctgaagggcttgatcgtcaagagcggcaagcgtccgggcgccaaggcgctggaccgcatcgtggcggcgttcatgctggtggtgtgctggatcgtggcgaccctgaacccgagcatcctcggcatgatcgaaaccatcggtggcccggtcatcgcggcgatcctgttcctgatgcctatgtacgcgatccgcaaagtgccggcgatggcccgttatcgtgggcagatgtcgaacgtgtttgtcaccgcagtgggtctggtggcgatttcggcgttgatctactcgctgactgcttaa

SEQ ID NO: 8130 - protein, 426 aa, Pseudomonas fluorescens PfO-1
MNDQANSVEQRFEAAAPAELSSWNRHDTTWMLGLFGTAIGAGTLFLPINAGLGGFWPLVILALLAFPMTFYAHRGLTRFVLSGREGADITDVVEQHFGIKAGALITLLYFFAIFPILLIYSVGLTNTVASFLEHQLHITQPPRALLSFVLILGLLAVVRCGEQVIVKAMSLMVYPFIVALLFLAVYLIPHWNGGILTTASQVPAPSALLHTLWLAIPVMVFSFNHSPIISAFAVDQKRRYGVHADERSSQILSRAHLLMVVMVLFFVFSCVLTLSPEQLAQAKAQNLSILSYLANHFSNPTIAFAAPLIAFVAISKSFLGHYIGASEGLKGLIVKSGKRPGAKALDRIVAAFMLVVCWIVATLNPSILGMIETIGGPVIAAILFLMPMYAIRKVPAMARYRGQMSNVFVTAVGLVAISALIYSLTA

SEQ ID NO: 8131 - DNA, 1224 bp, Francisella tularensis subsp. holarctica
  CDS (1)..(1224): transl_table=11
atgaaaaaaaatgaagatttaatgtggtcccttagtctgtatggtacagctatcggtgccggtgtactatttttgccaattcaaactggaatttcaggaattataccaatattagtgatattagtatttatcttcccaatggtgtttttatcacatcgtgcattatgtagatttgtgatatctaacccaaatactaactctgatatcacagtagttgctgatgactattttggtaagcttggtggaattattttcaacattttatatctatttgctatcttgccaatactactggtttatagtgttggtataacaaatactctggctagtttttttaagtatcagtttcattacgatattcaaaatagatttcttttgagtttttttactatactttcgctagtttttatcattaactttggtcagaagcttatcatccgtgttatgagccttctagtttttccatttatcatcgctttgctagtactttcattatggatgattccatattggaatattgagatactgcaaaagagcattgagtacaatcatagtttttctggtattttgatagctatctggataattatgccaatattgatattttcttttaaccactcaccgattatctcttctttagccgtatatgcaaaaaccaaatacaaacaaaatgccgacaaaaaagcctctaagataatcgcttttagtaatattctaatgattattactgtagttatatttgtaattagctcaatgcttaccctctctccaaaagagctaatgatcgcaaaagaagagaatatttctatactatcttatctagcaagtcattttaataattattctcttgattatgtagctccaatagtagctctagttgctatgagtaagtctttttttggtcattatttaggttcaaaagaaggtatagatggtctagtttataaagttacaaaaaataaaattagtgaaaaaactataaaaccaattacattatcaatagtgtttttatcatgctggctagttgcttatttaaacccaaatatcttagatatgatatctagtataggtggtctagttttagcggtgatactgtttattatgcctatttatagtatctataaaataaaatatctaaagccttataaaaacctattagcagatagttttatactttttgtcggtattattgcactatcatcggcaatttatgttttgttgtag

SEQ ID NO: 8132 - protein, 407 aa, Francisella tularensis subsp. holarctica
MKKNEDLMWSLSLYGTAIGAGVLFLPIQTGISGIIPILVILVFIFPMVFLSHRALCRFVISNPNTNSDITVVADDYFGKLGGIIFNILYLFAILPILLVYSVGITNTLASFFKYQFHYDIQNRFLLSFFTILSLVFIINFGQKLIIRVMSLLVFPFIIALLVLSLWMIPYWNIEILQKSIEYNHSFSGILIAIWIIMPILIFSFNHSPIISSLAVYAKTKYKQNADKKASKIIAFSNILMIITVVIFVISSMLTLSPKELMIAKEENISILSYLASHFNNYSLDYVAPIVALVAMSKSFFGHYLGSKEGIDGLVYKVTKNKISEKTIKPITLSIVFLSCWLVAYLNPNILDMISSIGGLVLAVILFIMPIYSIYKIKYLKPYKNLLADSFILFVGIIALSSAIYVLL

SEQ ID NO: 8133 - DNA, 1230 bp, Actinobacillus pleuropneumoniae serovar 1 str. 4074
  CDS (1)..(1230)
atggctacgccatctcatcgtttttccctcacttgggtgctaaatctgttcggtactgccgttggtgcaggcgtattatttttaccgattaacgccggtatgagcggtttttatccgctgattgtcatgaccttattagtcgggccgatgacttatctggcacaccgagggctggctcgttttgtgctgtcttccggcaaaccgggtagtgatattaccaacgtagtacgtgaacatttcggcgaaaacgccggtaaatttattaccttactctacttctttgcgatcttcccgattctattaatttatggtgtcggtatcaccaatacggtcggctcatttattgaaaaccaattacagatggctgtaccgcctcgcgcattactctcgggcgtattaattgccgttatgattagcgtaatgttactgagtgaacaagcgatgttaaaaatcaccacttacttagtttatccgttagtgttaattctgttcggtttatctatttacctaattccggaatggaatggtgccgcattacagcaaatgccgagtacaggcgacttcttaaccactttatggctgaccattcccgtattagtgtttgcctttaaccattcgccggcaatttcatcctttgccctttcacaacaaaaacattatcaagatccgcaacaaaccgaagttgaatcaagtaaagtattacgttcaaccgcaatgatcttagtgttattcgtgatgtttttcgtatttagctgcgtacttacgcttactccggaagagcttgcacaagcgaaagcacaaaatatttcaattttgtcttacttagccaataaatttgataatccggttatttcttatttcggacctttcgtggcattcttagcaatcggtagttctttcttcggtcactatttaggtgcgcgtgaaggattagaaggtttagtcaatcaattacgtgataaaccgattgaatcgacaaaattcaaaaaaattactgcggttgttttctttatcacattatggattgtagcaaccattaacccgagtattctcggttttatcgaaagtttaggtggtccgattattgcgatgattctgtttattatgccggtttatgccatttataccgtgccggcattagcaaaatataaaagcagtatcgccagcaatacttttgttaccgtgatgggaaccgtcgctatttcagcgattgtgtacggattattataa

SEQ ID NO: 8134 - protein, 409 aa, Actinobacillus pleuropneumoniae serovar 1 str. 4074
MATPSHRFSLTWVLNLFGTAVGAGVLFLPINAGMSGFYPLIVMTLLVGPMTYLAHRGLARFVLSSGKPGSDITNVVREHFGENAGKFITLLYFFAIFPILLIYGVGITNTVGSFIENQLQMAVPPRALLSGVLIAVMISVMLLSEQAMLKITTYLVYPLVLILFGLSIYLIPEWNGAALQQMPSTGDFLTTLWLTIPVLVFAFNHSPAISSFALSQQKHYQDPQQTEVESSKVLRSTAMILVLFVMFFVFSCVLTLTPEELAQAKAQNISILSYLANKFDNPVISYFGPFVAFLAIGSSFFGHYLGAREGLEGLVNQLRDKPIESTKFKKITAVVFFITLWIVATINPSILGFIESLGGPIIAMILFIMPVYAIYTVPALAKYKSSIASNTFVTVMGTVAISAIVYGLL

SEQ ID NO: 8135 - DNA, 1239 bp, Haemophilus influenzae R2846
  CDS (1)..(1239)
atgaaaccaacagaaaaactcaaatggaacaaatttgatgcaacatggatgttaaaccttttcggtacggcggttggcgcgggcgtattgttcttgccgattaacgcagggatgggtggattttggccgttagttttaatggcaattatcgtcgggccaatgacttattttgctcaccgtggcttagcctactttgtactttcatcaaaaaatcctggcagcgatattactgaagtagtggaagaacactttggtaaaacagcgggtaaacttattaccttactttattttttcgcgattttccctattctgttgatttacggtaacggtattactaacaccgtagattcttttattgtaaatcaacttggtatggcatcaccaaatcgagtcattctctcttttgtattaattgcggtattgatttccgtgatgttatttaatgaaaaagtgatgttaaaaatcacagaatggcttgtttatccgttagtcttaattttatttgttctttctatttacttaattcctgaatggaatagtgccgtattatatgaacttccaacagcaggcggtttcttaacaactttatggctaaccattcccgtattagtattttcatttaaccattcaccagcaatttcatctttcacttgctcacaattccgtgaatacaaaacgtttgagggtgcagaacgccatatcagccatacagaaaaaggcgcctcaacgattttgttattctttgtaatgttcttcgtatttagctgtgtactaacattaacacctgaagaattagtggcagcaaaagaacagaatattagtatcttgtctttcttagcgaataaatttgataatccatatatctcttattttggcccgcttgttgcattcttagcgattactagttcattcttcggtcactatatgggggcgcgtgaaggcttagaaggtttatatttaaaaatgaaaggtgaagcagtaaatcgtaaaaaactcaattatgcgaccgcacttttcttcttattaacgttatggggcgttgcgattattaatccaagtatcttaggcttaatcgaatctcttggcggtccaatcattgcgatgattttgtttatcatgccaatgtacgcgattcgaaaaatcccagcaatgaaacgctacagcggacatttcagtaatgtatttgtaacaattatggggctgattgctatttctgcagttgtttatggattattataa

SEQ ID NO: 8136 - protein, 412 aa, Haemophilus influenzae R2846
MKPTEKLKWNKFDATWMLNLFGTAVGAGVLFLPINAGMGGFWPLVLMAIIVGPMTYFAHRGLAYFVLSSKNPGSDITEVVEEHFGKTAGKLITLLYFFAIFPILLIYGNGITNTVDSFIVNQLGMASPNRVILSFVLIAVLISVMLFNEKVMLKITEWLVYPLVLILFVLSIYLIPEWNSAVLYELPTAGGFLTTLWLTIPVLVFSFNHSPAISSFTCSQFREYKTFEGAERHISHTEKGASTILLFFVMFFVFSCVLTLTPEELVAAKEQNISILSFLANKFDNPYISYFGPLVAFLAITSSFFGHYMGAREGLEGLYLKMKGEAVNRKKLNYATALFFLLTLWGVAIINPSILGLIESLGGPIIAMILFIMPMYAIRKIPAMKRYSGHFSNVFVTIMGLIAISAVVYGLL

SEQ ID NO: 8137 - DNA, 1239 bp, Haemophilus influenzae R2866
  CDS (1)..(1239)
atgaaatcaacagaaaaactcaaatggaacaaatttgatgcaacatggatgttaaaccttttcggtacggcggttggcgcgggcgtattgttcttgccgattaacgcagggatgggtggattttggccgttagttttaatggcaattatcgtcgggccaatgacttattttgctcaccgtggcttagcctactttgtactttcatcaaaaaatcctggcagcgatattactgaagtagtggaagaacactttggtaaaacagcgggtaaacttattaccttactttattttttcgcgattttccctattctgttgatttacggtaacggtattactaacaccgtagattcttttattgtaaatcaacttggtatggcatcaccaaatcgagtcattctctcttttgtattaattgcggtattgatttccgtgatgttatttaatgaaaaagtgatgttaaaaatcacagaatggcttgtttatccgttagtcttaattttatttgttctttctatttacttaattcctgaatggaatagtgccgtattatatgaacttccaacagcaggcggtttcttaacaactttatggctaaccattcccgtattagtattttcatttaaccattcaccagcaatttcatcttttacttgctcacaattccgcgaatacaaaacgtttgagggtgcagaacgccatatcagccatacagaaaaaggcgcctcaacgattttgttattctttgtaatgttcttcgtatttagctgtgtactaacattaacacctgaagaattagtggcagcaaaagaacagaatattagtatcttgtctttcttagcgaataaatttgataatccatatatctcttattttggcccgcttgttgcattcttagcgattactagttcattcttcggtcactatatgggggcacgtgaaggcttagaaggtttatatttaaaaatgaaaggtgaagcagtaaatcgtaaaaaactcaattatgcgaccgcacttttcttcttattaacgttatggggcgttgcgattattaatccaagtatcttaggcttaatcgaatctcttggcggcccaatcattgcgatgattttgtttatcatgccaatgtacgcgattcgaaaaatcccagcaatgaaacgctacagcggacgtttcagtaatgtatttgtaacaattatggggctaattgctatttctgcagttgtttatggattattataa

SEQ ID NO: 8138 - protein, 412 aa, Haemophilus influenzae R2866
MKSTEKLKWNKFDATWMLNLFGTAVGAGVLFLPINAGMGGFWPLVLMAIIVGPMTYFAHRGLAYFVLSSKNPGSDITEVVEEHFGKTAGKLITLLYFFAIFPILLIYGNGITNTVDSFIVNQLGMASPNRVILSFVLIAVLISVMLFNEKVMLKITEWLVYPLVLILFVLSIYLIPEWNSAVLYELPTAGGFLTTLWLTIPVLVFSFNHSPAISSFTCSQFREYKTFEGAERHISHTEKGASTILLFFVMFFVFSCVLTLTPEELVAAKEQNISILSFLANKFDNPYISYFGPLVAFLAITSSFFGHYMGAREGLEGLYLKMKGEAVNRKKLNYATALFFLLTLWGVAIINPSILGLIESLGGPIIAMILFIMPMYAIRKIPAMKRYSGRFSNVFVTIMGLIAISAVVYGLL

SEQ ID NO: 8139 - DNA, 1320 bp, Bacillus cereus G9241
  CDS (1)..(1320): transl_table=11
atggatgggaatactgcgaaaaacatagaatttcaagctgataacactgcagtaaaaaatgagaaatatctagaccctaaaaagtggcataaacaggatactacctgggcattgagcctttttggaacagcaattggagcaggagtactctttttacctattaatgcaggttcaggtggtttattatcattgctgttaattaccatacttgcatatcctgttatgtattattcacatagggcgcttgctaaaatgatttacgcttcgaattctgccgatgaggggattacaggtacaataagagaatatttcggaaataaagcaagtatcatttttaacattgtatatttcgtctccatttatacgatcgtgctgatgtactcggtcgcacttacaaatactgcaagtagttttattgtacaccaattgcacatgccggagcctccaagggctattttatcacttgtattagtactcggtcttatcactatactaaattttggtcaggatattactgtaaagataatgagcgtgctagtatatcctttcattgcttctctactttttattgcaatatctttaattccacaatggaatacttcaatgctaagtttttcaagtgtttctactgcttcaactggaacaggttatttcggaacgatttggatgatactaccaatcatagtgttctcgtttaatcattctcctatgatttcgtcattcgttatgaaacagagagctacgtatggaatagacgctaccgatgccaagtgtgcccaaatacaaaaagtttgttatatcatgacattcgctgttgttatgttctttgtttggagcagtactttaagtttgactccagatgatcttaaggtggcaaaagaacagaacttgtcaatcctatcatatcttgctaatgaacttaattcgccagtaatcacgattgcagctcctatcattgcgtttgtggctattacaaagtctttccttggccattatataggagcgtatgaggtaatgcgtgacatgattatcaagtccagtaaaaaacatgggaaagatataggagaaaaaacagttaagacaatgattcttacttttgttgtattaacatgctggtatgttgcttatacaaatccaagtattcttggaatcattgatgcccttagcggtcctttagtcgctgctatcttatgtctattaccgatgtatgcgattcgtaaagtaccagtactagcaaaatacagagggaaaatgagtaatgtatttgtaattgttatagggatacttactgttctagcgagtattaagtcattattctaa

SEQ ID NO: 8140 - protein, 439 aa, Bacillus cereus G9241
MDGNTAKNIEFQADNTAVKNEKYLDPKKWHKQDTTWALSLFGTAIGAGVLFLPINAGSGGLLSLLLITILAYPVMYYSHRALAKMIYASNSADEGITGTIREYFGNKASIIFNIVYFVSIYTIVLMYSVALTNTASSFIVHQLHMPEPPRAILSLVLVLGLITILNFGQDITVKIMSVLVYPFIASLLFIAISLIPQWNTSMLSFSSVSTASTGTGYFGTIWMILPIIVFSFNHSPMISSFVMKQRATYGIDATDAKCAQIQKVCYIMTFAVVMFFVWSSTLSLTPDDLKVAKEQNLSILSYLANELNSPVITIAAPIIAFVAITKSFLGHYIGAYEVMRDMIIKSSKKHGKDIGEKTVKTMILTFVVLTCWYVAYTNPSILGIIDALSGPLVAAILCLLPMYAIRKVPVLAKYRGKMSNVFVIVIGILTVLASIKSLF

SEQ ID NO: 8141 - DNA, 1254 bp, Vibrio sp. Ex25
  CDS (1)..(1254)
atgaatacaactacttctgcggtttctaccgcacaatcgtctagtaagttttcttacaaagactttacctggtgtctgtccctttttggtacggcagtaggtgccggtgtactattccttcctattaaagcaggtgcaggtggcttttggccattagtaatcctagccctaatcgcagcaccaatgacttggttcgcacacaaatctttagctcgcttcgttctttctgcgaaaaacccagaagcggacatcactgacacagtagaagagcactttggtaagactggcgcaaaccttattacgttcgcttacttcttcgctatctacccaatcgtacttatctacggtgttggtatcacaaacacggttgactctttcctagttaaccaaatgggtatggaatctattcctcgctggctactttccggtgcacttatcgctgcaatgacagcgggcgtagtgttcggtaaagagcttatgctgaaagcaacttcagcgatggtttaccctctagtgttcatcctactagcgctgtctgtgtacctaattcctggttggaacacttcaatgatggaagtatcacctgactggggtgcaatgccagctatcgtatggctagcaatccctgttatcgtgttctctttcaaccacagcccaatcatttctcagttctctaaagaacaacgtcgtgtatacggtgatgacgcagttaagaaaactgacgctatcactggtggtgcagcgatgatgctaatgggctttgtaatgttcttcgtattctctgttgtgctttctctgtctccagagcaactagcaacagcacaagagcaaaacatctctgttctttcttacctagcaaacgttcatgagtctccactgatctcttacttaggtccactggttgctttcgcggctatcacttctagctacttcggccacttcctaggtgcgcatgaaggtctagttggtctagtgaaatctcgttcaaaatcgccagtaagcaagatcgagaagatgtctcttatcttcatcgtaatcacaacttggatcgttgctatcgttaacccaagcatcctaggtatgattgaaacaatgggcgcaccgatgattgcggcaatcctattcttgatgcctatcttcgcaatgcaaaaagttccagcgatggctaagtacaaaacttcagcacctgtgcaaattttcacagcaatctgtggtcttgctgccattagttctgtaatctacggcgctctttaa

SEQ ID NO: 8142 - protein, 417 aa, Vibrio sp. Ex25
MNTTTSAVSTAQSSSKFSYKDFTWCLSLFGTAVGAGVLFLPIKAGAGGFWPLVILALIAAPMTWFAHKSLARFVLSAKNPEADITDTVEEHFGKTGANLITFAYFFAIYPIVLIYGVGITNTVDSFLVNQMGMESIPRWLLSGALIAAMTAGVVFGKELMLKATSAMVYPLVFILLALSVYLIPGWNTSMMEVSPDWGAMPAIVWLAIPVIVFSFNHSPIISQFSKEQRRVYGDDAVKKTDAITGGAAMMLMGFVMFFVFSVVLSLSPEQLATAQEQNISVLSYLANVHESPLISYLGPLVAFAAITSSYFGHFLGAHEGLVGLVKSRSKSPVSKIEKMSLIFIVITTWIVAIVNPSILGMIETMGAPMIAAILFLMPIFAMQKVPAMAKYKTSAPVQIFTAICGLAAISSVIYGAL

SEQ ID NO: 8143 - DNA, 1293 bp, Shewanella sp. ANA-3
  CDS (1)..(1293): transl_table=11
atgcaaaaagatgcgatcagtgttctcgaaacacctcaaagcacgcaagaaagcacaacaagacacttaccatggacgcgccaagacaccacttggatgctaagtttattcggcaccgctgtgggggcgggcattctatttcttcctatcaatgcgggcatgggcggtttttggcccttagtcttgatggccattatcatcggcccaatgacctatcttgcccaccgcggcctgtcacgcttcgtatgttcatcgagtattcccggcagtgacattacccaagtcgttgaagaacactttggaattggcgcgggcaaggcgattacattgctgtatttcttagcgatttatcccattgtgttgatctacggtgtggggatcactaacacagtcgacagttttatcgtcaaccagttgggcatggcctcaccaccacgtttcctgctgtcaggcgtgttgattttcggcatgatggccgtgatggttgctggtgagcaatttatgctgaaggtgactcagctgctggtctatccgctggtgggcattttggcttttatgtccatctatttgatcccggagtggaaaatggatgcgctgcaagtcgtgccagacaccggcgcctttttaggtactgtatggttaaccattcctgtgttggtgtttgccttcaaccattctccggcgatttcgcaattttcggtttcccttaagcgtgaccatggtgtcaacgcggcccgtaaggccgatgtgatcctgcgtaatacctcgatgatgttagtcggctttgtgatgttattcgtgttctcctgcgtgttgtcactgtcgccagaacagttggccgaagcgaaggcgaagaacctgccgattttatcttaccttgcgaacgtgcatgacagtggttttgtcagctatttcgggccttttatcgcatttgtggcgattgtgtcttctttctttggccattacatgggcgcgactgagggcatgaagggcattatcgttaagcagctgcgctcaagtaacaaacaaatcagtgagaacaagctgaacaagtttatcttagtgtttatgtttgccacgatttgggccgttgcgattaaaaacccaagtattttggggatgattgaggcgctgggcggcccgattattgcggcaattttgtacttaatgccaatgtatgccgtgtacaaagtgccggctctgaaggcttaccgtaaccgcatcagcaacgtgtttgtgattattgcgggcctgctggcgatgacggctattctgtttggcttgttaagctaa

SEQ ID NO: 8144 - protein, 430 aa, Shewanella sp. ANA-3
MQKDAISVLETPQSTQESTTRHLPWTRQDTTWMLSLFGTAVGAGILFLPINAGMGGFWPLVLMAIIIGPMTYLAHRGLSRFVCSSSIPGSDITQVVEEHFGIGAGKAITLLYFLAIYPIVLIYGVGITNTVDSFIVNQLGMASPPRFLLSGVLIFGMMAVMVAGEQFMLKVTQLLVYPLVGILAFMSIYLIPEWKMDALQVVPDTGAFLGTVWLTIPVLVFAFNHSPAISQFSVSLKRDHGVNAARKADVILRNTSMMLVGFVMLFVFSCVLSLSPEQLAEAKAKNLPILSYLANVHDSGFVSYFGPFIAFVAIVSSFFGHYMGATEGMKGIIVKQLRSSNKQISENKLNKFILVFMFATIWAVAIKNPSILGMIEALGGPIIAAILYLMPMYAVYKVPALKAYRNRISNVFVIIAGLLAMTAILFGLLS

SEQ ID NO: 8145 - DNA, 1293 bp, Shewanella sp. MR-7
  CDS (1)..(1293): transl_table=11
atgcaaaaagatgcgatcagtgttctcgaaacacctcaaagcacgcaagaaaacacaacaagacacttaccatggacgcgccaagacacgacttggatgctgagtttatttggcaccgctgtgggggcgggcattctatttctgcctatcaatgcgggcatgggcggtttttggcccttagtcttgatggccattatcatcgggcctatgacctatctcgcgcaccgtggcctatcgcgcttcgtatgttcatcgagcattcccggcagtgacattacccaagtggtcgaagaacactttgggattggcgcgggcaaggcgattacgctgctgtatttcttagcgatttatcccatcgtattgatctacggcgtggggatcactaataccgtcgacagctttatcgtcaaccaattgggcatggattcaccgccacgttttttgctgtctggcattttgattttcggcatgatggctgtgatggtctctggtgagcaatttatgctgaaggtgactcagttgctggtgtatccgctggtgggcattttagcctttatgtccatctatctggtcccagagtggaaaatggatgcgctgcaagtcgtgccagaaactggcgcctttttaggcacagtatggttaaccattcctgtactggtgtttgcctttaatcattctccggcgatttcgcaattttcggtttcccttaagcgtgaccatggggccaacgcggcccgtaaggccgatgtgatcctgcgtaatacctcgatgatgttagtcggctttgtgatgttattcgtgttctcctgcgtcttgtcactgtcgccagaacagttggctgaagctaaggcgaagaacctgccgattttatcttacttggcgaacgtgcatgacagtggttttgtcagctacttcgggcctttcatcgcgtttgtggcgattgtgtcttctttctttggccactacatgggtgcgactgagggcatgaagggcattatcgttaagcagctgcgttcaagtaacaagcaaatcagcgagaacaagctgaacaagtttatcttagtgtttatgtttgccacgatttgggccgttgcaattataaacccaagtattttgggaatgatcgaggcgctgggcggcccgattattgcggcgattttgtacttaatgccaatgtacgccgtgtacaaagtgcctgcgttgaaggcttatcgaaaccgcatcagcaacgtatttgtgattattgcgggcttactggcgatgaccgccattctgtttggtctgctgagataa

SEQ ID NO: 8146 - protein, 430 aa, Shewanella sp. MR-7
MQKDAISVLETPQSTQENTTRHLPWTRQDTTWMLSLFGTAVGAGILFLPINAGMGGFWPLVLMAIIIGPMTYLAHRGLSRFVCSSSIPGSDITQVVEEHFGIGAGKAITLLYFLAIYPIVLIYGVGITNTVDSFIVNQLGMDSPPRFLLSGILIFGMMAVMVSGEQFMLKVTQLLVYPLVGILAFMSIYLVPEWKMDALQVVPETGAFLGTVWLTIPVLVFAFNHSPAISQFSVSLKRDHGANAARKADVILRNTSMMLVGFVMLFVFSCVLSLSPEQLAEAKAKNLPILSYLANVHDSGFVSYFGPFIAFVAIVSSFFGHYMGATEGMKGIIVKQLRSSNKQISENKLNKFILVFMFATIWAVAIINPSILGMIEALGGPIIAAILYLMPMYAVYKVPALKAYRNRISNVFVIIAGLLAMTAILFGLLR

SEQ ID NO: 8147 - DNA, 1293 bp, Shewanella sp. MR-4
  CDS (1)..(1293): transl_table=11
atgcaaaaagatgcgatcagtgttctcgaaacacctcaaagcacgcaagaaaacacaacaagacacttaccatggacgcgccaagacacgacttggatgctaagtttatttggcaccgctgtgggggcgggcattctatttcttccaatcaatgcgggcatgggcggtttttggcccttagtcttgatggccattatcattgggcctatgacctatctcgcgcaccgtggcctatcgcgcttcgtatgttcatcgagcattcccggcagtgacattacccaagtggtcgaagaacactttgggattggcgcgggcaaggcgattacgctgctgtattttttagcgatttatcccatcgtattgatctacggcgtggggatcactaataccgtcgacagctttatcgtcaaccaattgggcatggcttcaccgccacgttttttgctgtctggcattttgattttcggcatgatggctgtgatggtctctggtgagcaatttatgctgaaggtgactcagttgctggtgtatccgctggtgggcattttagcctttatgtccatctatctggtcccagagtggaaaatggatgcgctgcaagtcgtgccagaaacgggcgcctttttaggcacagtatggttaaccattcctgtactggtgtttgcctttaatcattctccggcgatttcgcaattttcggtttcccttaagcgtgaccatggggccaacgcggcccgtaaggccgatgtgatcctgcgtaatacctcgatgatgttagtcggctttgtgatgttattcgtgttctcctgcgtcttgtcactgtcgccagaacagttggctgaagcgaagtcgaagaacctgccgattttatcttaccttgcgaacgtgcatgacagtggttttgtcagctatttcgggcctttcatcgcgtttgtggcgattgtatcttctttctttggccactacatgggggcgactgagggcatgaagggcattatcgttaagcagctgcgttcaagtaacaaacaaatcagtgagaacaagctgaacaattttatcttagtgtttatgtttgccacgatttgggccgttgcgattataaacccaagtattttgggaatgatcgaggcgctgggcggcccgattattgcggcgattttgtacttaatgccaatgtatgccgtgtacaaagtgccggcgctgaaggcttatcgaaaccgcatcagcaacgtatttgtgattattgcgggcctactggcgatgaccgccattctgtttggtctcctgagataa

SEQ ID NO: 8148 - protein, 430 aa, Shewanella sp. MR-4
MQKDAISVLETPQSTQENTTRHLPWTRQDTTWMLSLFGTAVGAGILFLPINAGMGGFWPLVLMAIIIGPMTYLAHRGLSRFVCSSSIPGSDITQVVEEHFGIGAGKAITLLYFLAIYPIVLIYGVGITNTVDSFIVNQLGMASPPRFLLSGILIFGMMAVMVSGEQFMLKVTQLLVYPLVGILAFMSIYLVPEWKMDALQVVPETGAFLGTVWLTIPVLVFAFNHSPAISQFSVSLKRDHGANAARKADVILRNTSMMLVGFVMLFVFSCVLSLSPEQLAEAKSKNLPILSYLANVHDSGFVSYFGPFIAFVAIVSSFFGHYMGATEGMKGIIVKQLRSSNKQISENKLNNFILVFMFATIWAVAIINPSILGMIEALGGPIIAAILYLMPMYAVYKVPALKAYRNRISNVFVIIAGLLAMTAILFGLLR

SEQ ID NO: 8149 - DNA, 1263 bp, Photobacterium sp. SKA34
  CDS (1)..(1263): transl_table=11
gtgtcattaacaacaatccaagagcaccccgaaaaagagatcaccgtacattcttcgaaatggacccaacatgacactcgttggatgttgagcttatttggtacatctgttggtgcgggtattttatttttaccaataaatattggctcaggtggattctggtcactggttataatggcattattagctggacctatgacattttgggctcatcgtggattagcgcgttttgttttatcatcatcttcttctgacgctgattttaccgatgtagttgaagagcattttggttcccgttacgggcgcttaatttcagcactgtattttctttctatctttcctattttactcatttatggtgtcggcctaaccaataccgttgatagttttattgtccatcaattaggttggcaagcgccgtcacgggtgttgttatcaggcggattagtttttttgatgatcactgtgatgcttgcgggtgaaaaagcgatgcttaaagcgtttgaagtgattgtctacccactggcatttattctggcgggcatttctatttacttgatcccaagctggcatgtacctaatcttaatttctctcaaaacatcaatgaatttagctcatcattatggttatcaataccggttgttgtttttgcttttagttatacacctgtcgtttctggctttgtaaatgctcaacgtcgtcagtatggcgatcatgcacatcgaaaatcagaaacaatcttaaagcgtacctcaatgatgttgattacttttgttttgttctttgtgttctcttgcgtgttaagtttatcccctgagcagttgcagcatgcaaaaatggataatgtgtcagtgttatcttatttagcgaacgttaaagacagtcattttattatgttgctaggccctttaattgcttttattgcgattacatcatcgtttttagggcactttatgggcgcacgtgaaagcttcaatggcattgtcgcgaaacaaacatcactgtcattaaaaaccatcgacaagattggtgtagtgatcatgttcttctctatttggtttgcagctgttatgaacccaagtattttagggatgatggaagcgttatctggacctattattgcgatgatactttttattatgccaatgcttgcggtatatcgaattgaaagtctgaaaatgtaccgaggtaagatcagtacttggtttattttattgatgggatgtttagcagtagcggcgatcatttttagcttagtgtaa

SEQ ID NO: 8150 - protein, 420 aa, Photobacterium sp. SKA34
MSLTTIQEHPEKEITVHSSKWTQHDTRWMLSLFGTSVGAGILFLPINIGSGGFWSLVIMALLAGPMTFWAHRGLARFVLSSSSSDADFTDVVEEHFGSRYGRLISALYFLSIFPILLIYGVGLTNTVDSFIVHQLGWQAPSRVLLSGGLVFLMITVMLAGEKAMLKAFEVIVYPLAFILAGISIYLIPSWHVPNLNFSQNINEFSSSLWLSIPVVVFAFSYTPVVSGFVNAQRRQYGDHAHRKSETILKRTSMMLITFVLFFVFSCVLSLSPEQLQHAKMDNVSVLSYLANVKDSHFIMLLGPLIAFIAITSSFLGHFMGARESFNGIVAKQTSLSLKTIDKIGVVIMFFSIWFAAVMNPSILGMMEALSGPIIAMILFIMPMLAVYRIESLKMYRGKISTWFILLMGCLAVAAIIFSLV

SEQ ID NO: 8151 - DNA, 1257 bp, Photobacterium sp. SKA34
  CDS (1)..(1257): transl_table=11
atgtcgttttccaataacattgaagtttccaataacatagaacaaaaacttaccctcaacaaacacgataaaacctggatcataagcctatttggcacagccgttggcgcagggatcttattcctacccattaatatcggtgtcagcggtttatggcctttgatcaccatggctctattagctggcccaatgacatttttagcccaccgtggtttggcacgatttattttgtcatcaaataacccgaaagcagaattcaccgatgttgttgaagagcactttggtcatcgcttcgggtttctgatttcactactctacttcttatctatttttccgattttaatgatttatggggtgggattaaccaatacagttgaaagttatatagtcaatcaaatggggatggcagcgccaccacgcattattttgtcgggtgtactggttgctgcaatgattggtattatgacggcaggtgagaaaaccgtattacgtgcctttgaagtaattgtttatccattagtattcatcttatttgggatctcgctttacatgatccctaactggcaaatgccaaactttgctgaaataccagatgcaaaaacatttactcaaaccctatggctcgctattcctaccactatttttgccttcagccacacagcagctatttccagtttttctgttgcccagaaaagacattacggagatcaggctggtaagcgtgtcgactttatcttaaaacacacatcgatgatgttaatcacctttgtattgttttttgttttctcttgtgcgctaagcttaactcctgctcagttagccgaagctaaggcacaaaatatttctattttatcttaccttgcaaatgtaacaggaagcggcttgattgcgtcatttggtcccttcattgcttgtattgcgatcatctcatcgttctttggtcacttccttggtggacgagaaagtttagacgggatcattgccaagcacaccaacctaaaacctaacgtggttaataaactcaccattggtattttatttttctctgtttggtatgccgcagtaaaaaatccaagtgtgctgggtattatggaaaccttttcaggccctgtgatcgccctgattttatttattctgccgatgtatgcgattaaaaatgttgaatcaatgaagaaatatcgtggaaagataagtaatattttcattactattattggtttaattgctatctctgcgattctatataatttggtatag

SEQ ID NO: 8152 - protein, 418 aa, Photobacterium sp. SKA34
MSFSNNIEVSNNIEQKLTLNKHDKTWIISLFGTAVGAGILFLPINIGVSGLWPLITMALLAGPMTFLAHRGLARFILSSNNPKAEFTDVVEEHFGHRFGFLISLLYFLSIFPILMIYGVGLTNTVESYIVNQMGMAAPPRIILSGVLVAAMIGIMTAGEKTVLRAFEVIVYPLVFILFGISLYMIPNWQMPNFAEIPDAKTFTQTLWLAIPTTIFAFSHTAAISSFSVAQKRHYGDQAGKRVDFILKHTSMMLITFVLFFVFSCALSLTPAQLAEAKAQNISILSYLANVTGSGLIASFGPFIACIAIISSFFGHFLGGRESLDGIIAKHTNLKPNVVNKLTIGILFFSVWYAAVKNPSVLGIMETFSGPVIALILFILPMYAIKNVESMKKYRGKISNIFITIIGLIAISAILYNLV

SEQ ID NO: 8153 - DNA, 1290 bp, Photobacterium sp. SKA34
  CDS (1)..(1290): transl_table=11
atgggcaccgaacaaaatttaacggcaacggcttctgcacaaagcaaaaaattagggtggagcaaaagtgatacattatggatgcttggtctatacggtacagccgtaggcgcaggtactctatttttaccaattaatgcgggggttggtggtttaattccattacttgtaatggccgttctcgcttttccaatgacattctttgcccaccgtgcaatgacacgttttgtattatcaagttcgaatcctggcgctgatattacagaagttgttgaagagcactttggtaagggcatgggtaaagtgatcacattactttatttctttgctatctaccctatcctattagtttacagtgttgcactaacaaatactgttgaaagctttatgcttaaccagttaggtatcgaaccaccagcacgtgcaattttagcgttagtattgatccttggtttaatggcaattgttcgtttaggtgagcaattaattgttaaagcgatgagtatcttggtattcccattcgttgctgtattattaattcttgcactatttcttgtaccgtactggaatgactctatcttccacaacgttatgccagcagacggtggcttaaactcagtgatgcttgcagtatggctaattttaccggtaatggttttctcgtttaaccactcacctgttatctcatcatttgctgttgctaagcaaaaagaatacggcgtaaacgcagagcgtcaaagttcacgtattctagcgcgtgctcacattatgatggtattaaccgtaatgttcttcgttttcagctgtgtattaagcttatcacctgaaaacttagcagaagctaaagcgaataacgtatctattctgacttacttagcgaaccacttcgatacaccgatcattgcttatgttgcaccgattgtagcgattattgcaattactaagtctttccttggccactacttaggtgcaagtgaaggtctaaatggtttagttatcaaagttactcgtgataagaataaagagatctcaagtaaggcactaaaccgttttaccgcaatctttatgctagtaacaacatgggcagtagcaacactaaacccaagcattctaggtatgattgagagcttaggtggtcctatcattgcaatgttgctatttattatgccaatgtatgcaatcaaaaaagtaccagcgatgaagaaatactcaggcgcaatcagtaatgtatttgtgacggttatcggacttgtttctatctctgcaatcttctactcattatttatgtaa

SEQ ID NO: 8154 - protein, 429 aa, Photobacterium sp. SKA34
MGTEQNLTATASAQSKKLGWSKSDTLWMLGLYGTAVGAGTLFLPINAGVGGLIPLLVMAVLAFPMTFFAHRAMTRFVLSSSNPGADITEVVEEHFGKGMGKVITLLYFFAIYPILLVYSVALTNTVESFMLNQLGIEPPARAILALVLILGLMAIVRLGEQLIVKAMSILVFPFVAVLLILALFLVPYWNDSIFHNVMPADGGLNSVMLAVWLILPVMVFSFNHSPVISSFAVAKQKEYGVNAERQSSRILARAHIMMVLTVMFFVFSCVLSLSPENLAEAKANNVSILTYLANHFDTPIIAYVAPIVAIIAITKSFLGHYLGASEGLNGLVIKVTRDKNKEISSKALNRFTAIFMLVTTWAVATLNPSILGMIESLGGPIIAMLLFIMPMYAIKKVPAMKKYSGAISNVFVTVIGLVSISAIFYSLFM

SEQ ID NO: 8155 - DNA, 1254 bp, Photobacterium sp. SKA34
  CDS (1)..(1254): transl_table=11
atgcaaaatacatcgaccgcagttaaaactggtgtagaaaaaactcgttggacttataaagatttcacatgggcattgtcactcttcggtaccgccgtaggtgctggtgttctattccttcctattaaagcaggtgcgggcggtttttggccgttggttattttagcacttatcgcagcaccaatgacttggcttgctcacaaaggccttgctcgttttgttctttctgcgaaaaatccaaatgctgacattacagataccgttgaagaacattacggaaaaacaggcgcaaatcttataacatttgcttacttttttgctatttttccgattgtacttatctacggtgtaggtattaccaatacagtggattctttcatggttaaccaattaggcatggactctgttcctcgttggttactatccggtgtgcttatttcactaatgactgcaggtgttgtatttggtaaagagctgatgctcaaagcaacgtcggcaatggtttaccctctggttatcattttacttctattgtctatttacctaattcctgattggaacatgtcaatggtgtctgtggcacctgattggtcatcaatgcctactgttatttggctagcgattcctatcatcgtgttctctttcaaccacagccctgtcatcagccagtttgcaaaagagcaacgccatgtatatggcgataatgcagttaagaagacggacatgatcacaggcggtgcagcaatgatgctcatgggctttgttatgttcttcgtattctctgtcgtattgtctatgacaccagagcagttgaacatggcgaaagagcaaaatatctctgttctttcatacttagcaaacgtgaaagagtcacctgcgatatcttacctaggtccactggttgcttttgctgctatcacttcaagctactttggtcactttttaggtgcacacgaaggccttgtaggtcttgttaaatctcgtagcagcctgcctgtaaatacgattgaaaaactgtctttggcatttatcgttatcattacgtggattgtggcaattaaaaacccaagtatcttaggcatgattgaaacgatgggtgcgccaatgattgcagctatcctattcctgctgcctgttgttgcgatgcaaaaagtacctgcaatggcaaaatacaaaacatctgttgcagcacgcattttcacagcggtttgtggtattgcggcaatcagttcagtaatttacggcgctttctaa

SEQ ID NO: 8156 - protein, 417 aa, Photobacterium sp. SKA34
MQNTSTAVKTGVEKTRWTYKDFTWALSLFGTAVGAGVLFLPIKAGAGGFWPLVILALIAAPMTWLAHKGLARFVLSAKNPNADITDTVEEHYGKTGANLITFAYFFAIFPIVLIYGVGITNTVDSFMVNQLGMDSVPRWLLSGVLISLMTAGVVFGKELMLKATSAMVYPLVIILLLLSIYLIPDWNMSMVSVAPDWSSMPTVIWLAIPIIVFSFNHSPVISQFAKEQRHVYGDNAVKKTDMITGGAAMMLMGFVMFFVFSVVLSMTPEQLNMAKEQNISVLSYLANVKESPAISYLGPLVAFAAITSSYFGHFLGAHEGLVGLVKSRSSLPVNTIEKLSLAFIVIITWIVAIKNPSILGMIETMGAPMIAAILFLLPVVAMQKVPAMAKYKTSVAARIFTAVCGIAAISSVIYGAF

SEQ ID NO: 8157 - DNA, 1296 bp, Aeromonas salmonicida
  CDS (1)..(1296): transl_table=11
atgtctgacatgaacattgcagtagaaggcagcgcagccagtaatgcgtcttcccgtggcaacaccaaggccgatctggtctggatgctgggtttgtacggtaccgccatcggtgccggtgtactcttcctgccgatcaacgccggcgtaggtggtttgtggccgctggtggccatggcgattctggcgttggcgctgaccttctttggacaccgtggtctgactcgcttcgtactgtccggctccacccgtgatggcgacatcaccgaagtggtggaagagcactttggcaagaccgcagggaagttcatcaccctgctctacttctttggcatctatcccatagtactgatgtactcggtcggcatcaacaacaaggttgaaagcctgctggttcaccaactcggtatgacagcaccaccccgtgccgtcctgtcgctggcactgatcctgggtctgatggcggtggtacgcctcggtggccagttcatcgtcaaggcgatgagcgtgctggtattcccgttcgtgctgaccctgatgggcctggccttctatctggttccacactggaacggcgccatcatcacagaagcaccggccctgtccgatgccttcaacggcgacttcatcaagaccctgtggctggccattcctgtgatggtgttctccttcaaccactccccgatcatctcctccttcgcggtggacaacaagggtcgttacggcgccggtgctgagaagaagtgcggcaacatactgctgggtgcccacgtcatgatggtcatgaccgtcatgttcttcgtgttcagctgcgtactgagcctctccccggctgatctgtctcccgccaaggaacagaacatcaccattctgtcctacctggccaaccatttcgataacgccttcattgccacagcggctccgctgatcgccatggttgccatcagcaagtccttcctcggccactatctgggtgccaaagagggcatgaacggtctgatgcccaaggcgctgcgcgagaaaggcaagcaggtcgacatcaagcaactggacaaggtgactgccgtcttcatgatactgaccacctgggctgtggttaccgtcaaccccagcatcctcggcatgatcgaagacctgggcgggcccatcatcgccatgctgctgttcctgatgccgatgtacgccatcaccaaggtacctgccatgcgcaaatacgctggcaacatcagaaacggcttcgtgaccctgattgggctgatcgccatgtccggtatcatctacaagatgattgcctga

SEQ ID NO: 8158 - protein, 431 aa, Aeromonas salmonicida
MSDMNIAVEGSAASNASSRGNTKADLVWMLGLYGTAIGAGVLFLPINAGVGGLWPLVAMAILALALTFFGHRGLTRFVLSGSTRDGDITEVVEEHFGKTAGKFITLLYFFGIYPIVLMYSVGINNKVESLLVHQLGMTAPPRAVLSLALILGLMAVVRLGGQFIVKAMSVLVFPFVLTLMGLAFYLVPHWNGAIITEAPALSDAFNGDFIKTLWLAIPVMVFSFNHSPIISSFAVDNKGRYGAGAEKKCGNILLGAHVMMVMTVMFFVFSCVLSLSPADLSPAKEQNITILSYLANHFDNAFIATAAPLIAMVAISKSFLGHYLGAKEGMNGLMPKALREKGKQVDIKQLDKVTAVFMILTTWAVVTVNPSILGMIEDLGGPIIAMLLFLMPMYAITKVPAMRKYAGNIRNGFVTLIGLIAMSGIIYKMIA

SEQ ID NO: 8159 - DNA, 1332 bp, Edwardsiella tarda
  CDS (1)..(1332): transl_table=11
atgagtagcactgacagtgtcgttgcgggtcaggccaaggtgagcacttggcgcaaaacggatacacgctgggttttagggttgttcggtacagcgatcggggccggcgttttgttcttcccgatcagcgccggtatcggcgggctgttgccgatcattttcatgcttattcttgcctttcccatcgcgttcttttgccatcgcgcgttggctcgtctgtgcctgtccgggcgcagcatatcggataatattaccgataccgtcgatcagcacttcggccatgtcggcggcgtggtgatcaccttcctgtatttttttgccatctgtccgctgctgtggatctacggcgtgaccatcaccaatacgtttattgccttctggcagcatcagctgctgctgccggccattaaccgcggcgtggtggcgctggctatcctgctggtcatggcgttttttatctacttcggcaaggatttaatggttaaggtaatgggatatctggtctttcccttcattacctgcctggtgctgatctccctgtcgctgatcccctactggacgagtgacatctttaccagcttcgatatgcacagcctgagcctgttcggcagccatggcattctggtaaccgtctggctggggatcgcgattatggtgttctccttcaacttctcccccattgtttcgtcgtttgtagtctccaaacgcgaagagtatgaggcggactttggccgggaatataccgagcaaaagtgtgcgaagatcatttcgcgcgccagcgtgctgatggtggtggtggtgatgttctttgcctttagctgcctctttaccctgtcgccgcaggatatggcgcaggctaaacagcagaacattcccattctctcctatctggccaaccacttcagctcactgggcagcggtaaatctacctatgccaccgttctggagtatggcgcctcgattatcgccctggtggctatttttaaatcgttctttggtcattacctgggaaccctggaggggttgaacggtttgatcattaaatttggctaccatggagagaagtcgcaggcgccgatgaagaagctcaatatgatcagcatggtcatcattatgggctctacctgggtgatcgcgtatatcaacccgaatattctggacctgatcggtgccatgggtgcgcctattattgctgcgctgctgtgtctgctgccgatgtatgcggtatggcgagttcctgcgctggcgaaatacaaaggcaaggcgtctaactatttcgtcacgattatcggcctgctgaccatcctgaatattgtttatcagctgatgtaa

SEQ ID NO: 8160 - protein, 443 aa, Edwardsiella tarda
MSSTDSVVAGQAKVSTWRKTDTRWVLGLFGTAIGAGVLFFPISAGIGGLLPIIFMLILAFPIAFFCHRALARLCLSGRSISDNITDTVDQHFGHVGGVVITFLYFFAICPLLWIYGVTITNTFIAFWQHQLLLPAINRGVVALAILLVMAFFIYFGKDLMVKVMGYLVFPFITCLVLISLSLIPYWTSDIFTSFDMHSLSLFGSHGILVTVWLGIAIMVFSFNFSPIVSSFVVSKREEYEADFGREYTEQKCAKIISRASVLMVVVVMFFAFSCLFTLSPQDMAQAKQQNIPILSYLANHFSSLGSGKSTYATVLEYGASIIALVAIFKSFFGHYLGTLEGLNGLIIKFGYHGEKSQAPMKKLNMISMVIIMGSTWVIAYINPNILDLIGAMGAPIIAALLCLLPMYAVWRVPALAKYKGKASNYFVTIIGLLTILNIVYQLM

SEQ ID NO: 8161 - DNA, 1290 bp, Escherichia coli O157
  CDS (1)..(1290): transl_table=11
atggaaacgactcaaaccagcacgattgcgtcgaaagactctcgtagtgcctggcgcaagacagacaccatgtggatgctgggcctttacggcacggcaatcggcgcgggcgtgctgttcctgccaatcaacgccggtgttggcggtatgatcccgctgatcatcatggctatccttgcgttcccgatgacgttttttgctcaccgcggcctgactcgcttcgtactgtctggtaaaaacccgggcgaagacattaccgaggttgtagaagaacactttggtattggcgcaggtaaactgattaccctgctctacttcttcgctatctacccgatcctgctggtttatagcgtggcaatcaccaatacagttgaaagcttcatgtctcaccagctgggtatgacaccaccgccgcgtgcgattctgtcgctgatcctgatcgtgggtatgatgaccatcgttcgctttggtgaacagatgatcgttaaagcgatgagtattctggtattcccgtttgttggcgtactgatgctgctggctctgtacctgatcccgcagtggaacggcgcagcactggaaacgctgtctctggacactgcatctgcaaccggaaacggtctgtggatgaccctgtggctggcaattccggtaatggtgttctcgttcaaccactctccgatcatctcttctttcgccgttgcgaagcgtgaagagtacggcgatatggcagaacagaaatgctcgaagatcctggcattcgcacacatcatgatggtgctgaccgtaatgttcttcgtcttcagctgcgtactgagcctgactccggcagacctggctgcggctaaagagcagaacatctcgattctgtcttacctggctaaccactttaacgcaccggttatcgcgtggatggctccgattatcgcgattatcgctatcaccaaatccttcctcggccactacctgggcgcacgtgaaggcttcaacggtatggtgattaaatctctgcgtggtaaaggtaagtctatcgaaatcaacaagctgaaccgtatcactgcgctgttcatgctggtaacgacctggattgttgccaccctgaacccgagcatcctgggtatgattgaaaccctgggcggcccaatcatcgcgatgatcctgttcctgatgccgatgtacgcaattcagaaagtaccggcaatgcgtaagtacagcggtcacatcagcaacgtattcgttgtcgtgatgggtctgattgcaatctccgcaatcttctactctctgttcagctaa

SEQ ID NO: 8162 - protein, 429 aa, Escherichia coli O157; identical to SEQ ID NO: 8022

SEQ ID NO: 8163 - DNA, 1239 bp, Haemophilus influenzae
  CDS (1)..(1239): transl_table=11
atgaaatcaacagaaaaactcaaatggaacaaatttgatgcaacgtggatgttaaaccttttcggtacggcggttggcgcgggcgtattgttcttgccgattaacgcagggatgggtggattttggccgttagttttaatggcaattatcgtcgggccaatgacttattttgctcaccgtggcttagcctactttgtactttcatcaaaaaatcctggcagcgatattactgaagtagtggaagaacactttggtaaaacagcgggtaaacttattaccttactttattttttcgcgattttccctattctgttgatttacggtaacggtatcacgaacaccgtagattcttttattgtgaatcaacttggtatggcatcaccaaatcgagtcattctctcttttgtattaattgcggtattgatttccgtgatgttatttaatgaaaaagtgatgttaaaaatcacagaatggcttgtttatccgttagtcttaattttatttgttctttctatttacttaattcctgaatggaatagtgccgtattatatgaatttccaacagtaggcggtttcttaacaactttatggctaaccattcccgtattagtattttcatttaaccattcgccagcaatttcatctttcacttgctcacaattccgtgaatataaaactttcgatggtgcagaacgccatatcagccatacagaaaaaggcgcctcaacgattttgttattcttcgtaatgttcttcgtatttagctgtgtattaacattaacacctgaagaattagtggcagcaaaagaacagaatattagtatcttgtctttcttagcgaataaatttgataatccatatatctcttattttggcccgcttgttgcattcttagcgattactagttcattcttcggtcactatatgggggcacgtgaaggcttagaaggtttatatttaaaaatgaaaggtgaagcagtaaatcgtaaaaaactcaattatgcgaccgcacttttcttcttattaacgttatggggcgttgcgattattaatccaagtatcttaggcttaatcgaatctcttggcggcccaatcattgcgatgattttgtttatcatgccaatgtacgcgattcgaaaaatcccagcaatgaaacgctacagcggacgtttcagtaatgtatttgtaacaattatggggctaattgctatttctgcagttgtttatggattattataa

SEQ ID NO: 8164 - protein, 412 aa, Haemophilus influenzae
MKSTEKLKWNKFDATWMLNLFGTAVGAGVLFLPINAGMGGFWPLVLMAIIVGPMTYFAHRGLAYFVLSSKNPGSDITEVVEEHFGKTAGKLITLLYFFAIFPILLIYGNGITNTVDSFIVNQLGMASPNRVILSFVLIAVLISVMLFNEKVMLKITEWLVYPLVLILFVLSIYLIPEWNSAVLYEFPTVGGFLTTLWLTIPVLVFSFNHSPAISSFTCSQFREYKTFDGAERHISHTEKGASTILLFFVMFFVFSCVLTLTPEELVAAKEQNISILSFLANKFDNPYISYFGPLVAFLAITSSFFGHYMGAREGLEGLYLKMKGEAVNRKKLNYATALFFLLTLWGVAIINPSILGLIESLGGPIIAMILFIMPMYAIRKIPAMKRYSGRFSNVFVTIMGLIAISAVVYGLL

SEQ ID NO: 8165 - DNA, 1332 bp, Escherichia coli O157
  CDS (1)..(1332): transl_table=11
atgagtacttcagatagcattgtatccagccagacaaaacaatcgtcctggcgtaaatcagataccacatggacgttaggcttgtttggtacggcaatcggcgccggggtgctgttcttccctatccgcgcaggttttggcggactgatcccgattcttctgatgttggtattggcataccccatcgcattttattgccaccgggcgctggcgcgtctgtgtctttctggctctaacccttccggcaacattacggaaacggtggaagagcattttggtaaaactggcggcgtggttatcacgttcctgtacttcttcgcgatttgcccactgctgtggatttatggcgttactattaccaatacctttatgacgttctgggaaaaccagctcggctttgcaccgctgaatcgcggctttgtggcgctgttcctgttgctgctgatggctttcgtcatctggtttggtaaggatctgatggttaaagtgatgagctacctggtatggccgtttatcgccagcctggtgctgatttctttgtcgctgatcccttactggaactctgcagttatcgaccaggttgacctcggttcgctgtcgttaaccggtcatgacggtatcctgatcactgtctggctggggatttccatcatggttttctcctttaacttctcgccaatcgtctcttccttcgtggtttctaaacgtgaagagtatgagaaagacttcggtcgcgacttcaccgaacgtaaatgttcccaaatcatttctcgtgccagcatgctgatggttgcagtggtgatgttctttgcctttagctgcctgtttacgctgtctccggccaacatggcggaagccaaagcgcagaatattccagtgctttcttatctggctaaccactttgcgtccatgaccggtaccaaaacaacgttcgcgattacactggaatatgcggcttccatcatcgcactcgtggctatcttcaaatctttcttcggtcactatctgggaacgctggaaggtctgaatggcctggtcctgaagtttggttataaaggcgacaaaactaaagtatcgctgggtaaactgaacactatcagcatgatcttcatcatgggctccacctgggttgttgcctacgccaacccgaacatcctcgacctgattgaagccatgggcgcaccgattatcgcatccctgctgtgcctgttgccgatgtatgccatccgtaaagcgccgtctctggcgaaataccgtggtcgtctggataacgtgtttgttaccgtgattggtctgctgaccatcctgaacatcgtatataaactgttttaa

SEQ ID NO: 8166 - protein, 443 aa, Escherichia coli O157
MSTSDSIVSSQTKQSSWRKSDTTWTLGLFGTAIGAGVLFFPIRAGFGGLIPILLMLVLAYPIAFYCHRALARLCLSGSNPSGNITETVEEHFGKTGGVVITFLYFFAICPLLWIYGVTITNTFMTFWENQLGFAPLNRGFVALFLLLLMAFVIWFGKDLMVKVMSYLVWPFIASLVLISLSLIPYWNSAVIDQVDLGSLSLTGHDGILITVWLGISIMVFSFNFSPIVSSFVVSKREEYEKDFGRDFTERKCSQIISRASMLMVAVVMFFAFSCLFTLSPANMAEAKAQNIPVLSYLANHFASMTGTKTTFAITLEYAASIIALVAIFKSFFGHYLGTLEGLNGLVLKFGYKGDKTKVSLGKLNTISMIFIMGSTWVVAYANPNILDLIEAMGAPIIASLLCLLPMYAIRKAPSLAKYRGRLDNVFVTVIGLLTILNIVYKLF

SEQ ID NO: 8167 - DNA, 23 bp, Artificial sequence
  primer
atggaaacgactcaaaccagcac

SEQ ID NO: 8168 - DNA, 25 bp, Artificial sequence
  primer
ttagctgaacagagagtagaagatt

SEQ ID NO: 8169 - protein, 466 aa, Artificial sequence
  consensus sequence
  Variant (2)..(3): Xaa in position 2 to 3 is any amino acid
  Variant (5)..(5): Xaa in position 5 is any amino acid
  Variant (7)..(7): Xaa in position 7 is any amino acid
  Variant (9)..(9): Xaa in position 9 is any amino acid
  Variant (13)..(13): Xaa in position 13 is any amino acid
  Variant (17)..(17): Xaa in position 17 is any amino acid
  Variant (23)..(23): Xaa in position 23 is any amino acid
  Variant (26)..(26): Xaa in position 26 is any amino acid
  Variant (29)..(30): Xaa in position 29 to 30 is any amino acid
  Variant (31)..(31): Xaa in position 31 is any or no amino acid
  Variant (33)..(40): Xaa in position 33 to 40 is any amino acid
  Variant (42)..(46): Xaa in position 42 to 46 is any amino acid
  Variant (49)..(49): Xaa in position 49 is any amino acid
  Variant (51)..(52): Xaa in position 51 to 52 is any amino acid
  Variant (54)..(55): Xaa in position 54 to 55 is any amino acid
  Variant (57)..(61): Xaa in position 57 to 61 is any amino acid
  Variant (62)..(64): Xaa in position 62 to 64 is any or no amino acid
  Variant (67)..(70): Xaa in position 67 to 70 is any amino acid
  Variant (72)..(72): Xaa in position 72 is any amino acid
  Variant (75)..(84): Xaa in position 75 to 84 is any amino acid
  Variant (87)..(88): Xaa in position 87 to 88 is any amino acid
  Variant (90)..(90): Xaa in position 90 is any amino acid
  Variant (93)..(93): Xaa in position 93 is any amino acid
  Variant (95)..(95): Xaa in position 95 is any amino acid
  Variant (97)..(97): Xaa in position 97 is any amino acid
  Variant (99)..(100): Xaa in position 99 to 100 is any amino acid
  Variant (104)..(105): Xaa in position 104 to 105 is any amino acid
  Variant (108)..(110): Xaa in position 108 to 110 is any amino acid
  Variant (112)..(118): Xaa in position 112 to 118 is any amino acid
  Variant (119)..(167): Xaa in position 119 to 167 is any or no amino acid
  Variant (169)..(170): Xaa in position 169 to 170 is any amino acid
  Variant (172)..(174): Xaa in position 172 to 174 is any amino acid
  Variant (176)..(185): Xaa in position 176 to 185 is any amino acid
  Variant (187)..(191): Xaa in position 187 to 191 is any amino acid
  Variant (193)..(197): Xaa in position 193 to 197 is any amino acid
  Variant (199)..(199): Xaa in position 199 is any amino acid
  Variant (201)..(204): Xaa in position 201 to 204 is any amino acid
  Variant (206)..(211): Xaa in position 206 to 211 is any amino acid
  Variant (215)..(215): Xaa in position 215 is any amino acid
  Variant (217)..(233): Xaa in position 217 to 233 is any amino acid
  Variant (234)..(241): Xaa in position 234 to 241 is any or no amino acid
  Variant (244)..(245): Xaa in position 244 to 245 is any amino acid
  Variant (247)..(248): Xaa in position 247 to 248 is any amino acid
  Variant (257)..(257): Xaa in position 257 is any amino acid
  Variant (260)..(260): Xaa in position 260 is any amino acid
  Variant (262)..(269): Xaa in position 262 to 269 is any amino acid
  Variant (270)..(273): Xaa in position 270 to 273 is any or no amino acid
  Variant (275)..(283): Xaa in position 275 to 283 is any amino acid
  Variant (284)..(287): Xaa in position 284 to 287 is any or no amino acid
  Variant (289)..(299): Xaa in position 289 to 299 is any amino acid
  Variant (301)..(301): Xaa in position 301 is any amino acid
  Variant (307)..(308): Xaa in position 307 to 308 is any amino acid
  Variant (310)..(310): Xaa in position 310 is any amino acid
  Variant (312)..(312): Xaa in position 312 is any amino acid
  Variant (314)..(318): Xaa in position 314 to 318 is any amino acid
  Variant (321)..(321): Xaa in position 321 is any amino acid
  Variant (324)..(326): Xaa in position 324 to 326 is any amino acid
  Variant (333)..(343): Xaa in position 333 to 343 is any amino acid
  Variant (344)..(352): Xaa in position 344 to 352 is any or no amino acid
  Variant (354)..(355): Xaa in position 354 to 355 is any amino acid
  Variant (357)..(358): Xaa in position 357 to 358 is any amino acid
  Variant (361)..(362): Xaa in position 361 to 362 is any amino acid
  Variant (365)..(365): Xaa in position 365 is any amino acid
  Variant (369)..(369): Xaa in position 369 is any amino acid
  Variant (372)..(372): Xaa in position 372 is any amino acid
  Variant (374)..(376): Xaa in position 374 to 376 is any amino acid
  Variant (378)..(402): Xaa in position 378 to 402 is any amino acid
  Variant (403)..(409): Xaa in position 403 to 409 is any or no amino acid
  Variant (411)..(411): Xaa in position 411 is any amino acid
  Variant (414)..(415): Xaa in position 414 to 415 is any amino acid
  Variant (421)..(422): Xaa in position 421 to 422 is any amino acid
  Variant (425)..(427): Xaa in position 425 to 427 is any amino acid
  Variant (430)..(430): Xaa in position 430 is any amino acid
  Variant (433)..(434): Xaa in position 433 to 434 is any amino acid
  Variant (436)..(438): Xaa in position 436 to 438 is any amino acid
  Variant (440)..(441): Xaa in position 440 to 441 is any amino acid
  Variant (443)..(451): Xaa in position 443 to 451 is any amino acid
  Variant (453)..(458): Xaa in position 453 to 458 is any amino acid
  Variant (459)..(460): Xaa in position 459 to 460 is any or no amino acid
  Variant (462)..(465): Xaa in position 462 to 465 is any amino acid
DXXWXLXLXGTAXGAGXLFLPIXAGXGGXXXLXXXXXXXXPXXXXXHRXLXXFXXSXXXXXXXXITXXXXEXFGXXXXXXXXXXYFXXIXPIXLXYXVXXTNTXXSFXXXQXXXXXXXXXXXXXXXXXXXXXXXXXXXXXXXXXXXXXXXXXXXXXXXXXXXXXXXXRXXLXXXLXXXXXXXXXXGXXXXXKXXXXXVXPXXXXLXXXXXXLIPXWXXXXXXXXXXXXXXXXXXXXXXXXXWLXXPXXVFSFNHSPXISXFXXXXXXXXXXXXGXXXXXXXXXXXXXIXXXXXXXXXXXVXFFVFSXXLXLXPXXXXXAKXQNXXXLSYLANXXXXXXXXXXXXXXXXXXXXPXXAXXAIXXSFXGHYXGAXEXXXGXXXXXXXXXXXXXXXXXXXXXXXXXXXXXXXXWXVAXXNPSILXXIEXXXGPXIAXXLXXXPXXAXXXXXXXXXYXXXXXXXXFXXXXG

SEQ ID NO: 8170 - protein, 40 aa, Artificial sequence
  protein pattern
  Variant (3)..(3): Xaa in position 3 is any amino acid
  Variant (4)..(4): Xaa in position 4 is Ala, Thr or Val
  Variant (5)..(5): Xaa in position 5 is Ala, Ile or Val
  Variant (6)..(6): Xaa in position 6 is Glu, Lys or Arg
  Variant (7)..(7): Xaa in position 7 is Glu, Gln or Ser
  Variant (8)..(8): Xaa in position 8 is His or Tyr
  Variant (11)..(16): Xaa in position 11 to 16 is any amino acid
  Variant (17)..(18): Xaa in position 17 to 18 is any or no amino acid
  Variant (20)..(20): Xaa in position 20 is any amino acid
  Variant (21)..(22): Xaa in position 21 to 22 is any or no amino acid
  Variant (25)..(25): Xaa in position 25 is any amino acid
  Variant (26)..(26): Xaa in position 26 is Ala, Gly or Ser
  Variant (28)..(28): Xaa in position 28 is any amino acid
  Variant (29)..(29): Xaa in position 29 is Pro or Thr
  Variant (30)..(30): Xaa in position 30 is Ile or Leu
  Variant (31)..(33): Xaa in position 31 to 33 is any amino acid
  Variant (35)..(35): Xaa in position 35 is Cys, Gly or Ser
  Variant (36)..(36): Xaa in position 36 is Ala, Asn or Val
  Variant (37)..(37): Xaa in position 37 is Ala, Gly, Asn, Ser or Thr
  Variant (38)..(38): Xaa in position 38 is Ile or Leu
  Variant (39)..(39): Xaa in position 39 is Asn, Ser or Thr
  Variant (40)..(40): Xaa in position 40 is Asn or Thr
ITXXXXXXFGXXXXXXXXIXXXYFXXIXXXXXXYXXXXXX

SEQ ID NO: 8171 - protein, 44 aa, Artificial sequence
  protein pattern
  Variant (2)..(6): Xaa in position 2 to 6 is any or no amino acid
  Variant (8)..(8): Xaa in position 8 is any amino acid
  Variant (10)..(10): Xaa in position 10 is Gly, Asn or Ser
  Variant (12)..(12): Xaa in position 12 is Phe or Tyr
  Variant (16)..(16): Xaa in position 16 is Ile or Val
  Variant (20)..(20): Xaa in position 20 is any amino acid
  Variant (22)..(22): Xaa in position 22 is any amino acid
  Variant (23)..(23): Xaa in position 23 is Phe or Leu
  Variant (26)..(26): Xaa in position 26 is any amino acid
  Variant (27)..(27): Xaa in position 27 is Ala, Ile, Leu or Val
  Variant (29)..(29): Xaa in position 29 is any amino acid
  Variant (30)..(30): Xaa in position 30 is Ala, Gly, Asn or Ser
  Variant (32)..(32): Xaa in position 32 is Phe, Ile, Leu, Met or Val
  Variant (33)..(33): Xaa in position 33 is any amino acid
  Variant (34)..(34): Xaa in position 34 is Gly, Pro or Ser
  Variant (35)..(36): Xaa in position 35 to 36 is Ile, Leu, Met or Val
  Variant (37)..(37): Xaa in position 37 is any amino acid
  Variant (38)..(38): Xaa in position 38 is Ile, Leu or Met
  Variant (39)..(39): Xaa in position 39 is any amino acid
  Variant (40)..(40): Xaa in position 40 is Phe, Ile, Leu or Val
  Variant (41)..(41): Xaa in position 41 is Ile, Leu or Val
  Variant (42)..(42): Xaa in position 42 is Ala, Ile or Val
  Variant (43)..(43): Xaa in position 43 is any amino acid
TXXXXXWXLXLXGTAXGAGXLXXPIXXGXXGXXXXXXXXXXXXP

SEQ ID NO: 8172 - protein, 34 aa, Artificial sequence
  protein pattern
  Variant (2)..(3): Xaa in position 2 to 3 is any amino acid
  Variant (4)..(4): Xaa in position 4 is any or no amino acid
  Variant (6)..(7): Xaa in position 6 to 7 is any or no amino acid
  Variant (9)..(9): Xaa in position 9 is Cys or Val
  Variant (10)..(10): Xaa in position 10 is Ala, Leu or Val
  Variant (11)..(11): Xaa in position 11 is Phe, Leu or Met
  Variant (12)..(12): Xaa in position 12 is Ala, Cys, Ser or Thr
  Variant (13)..(13): Xaa in position 13 is Phe, Leu or Met
  Variant (14)..(14): Xaa in position 14 is Asn, Ser or Thr
  Variant (15)..(15): Xaa in position 15 is Ala, Gly, Pro or Ser
  Variant (16)..(16): Xaa in position 16 is any amino acid
  Variant (17)..(17): Xaa in position 17 is Ala, Asp, Glu, Asn or Gln
  Variant (18)..(18): Xaa in position 18 is Phe, Leu or Met
  Variant (19)..(20): Xaa in position 19 to 20 is any amino acid
  Variant (22)..(24): Xaa in position 22 to 24 is any amino acid
  Variant (26)..(26): Xaa in position 26 is Ile, Leu or Val
  Variant (27)..(27): Xaa in position 27 is Asn, Pro, Ser or Thr
  Variant (28)..(28): Xaa in position 28 is Ile or Val
  Variant (30)..(30): Xaa in position 30 is Ser or Thr
  Variant (31)..(31): Xaa in position 31 is Phe or Tyr
  Variant (32)..(32): Xaa in position 32 is Phe, Ile or Leu
FXXXFXXSXXXXXXXXXXXXAXXXNXXXLXXXAN

SEQ ID NO: 8173 - protein, 29 aa, Artificial sequence
  protein pattern
  Variant (2)..(2): Xaa in position 2 is Ile, Leu or Met
  Variant (3)..(3): Xaa in position 3 is any amino acid
  Variant (4)..(4): Xaa in position 4 is Ile, Leu, Met or Val
  Variant (6)..(7): Xaa in position 6 to 7 is any amino acid
  Variant (8)..(8): Xaa in position 8 is Ile or Val
  Variant (10)..(10): Xaa in position 10 is Ala or Ser
  Variant (12)..(12): Xaa in position 12 is Asp, Asn or Ser
  Variant (14)..(15): Xaa in position 14 to 15 is any amino acid
  Variant (16)..(16): Xaa in position 16 is any or no amino acid
  Variant (18)..(18): Xaa in position 18 is any or no amino acid
  Variant (20)..(20): Xaa in position 20 is Ala, Gln, Ser or Thr
  Variant (21)..(21): Xaa in position 21 is Phe or Leu
  Variant (22)..(22): Xaa in position 22 is Ala, Ser, Thr or Val
  Variant (23)..(28): Xaa in position 23 to 28 is any amino acid
  Variant (29)..(29): Xaa in position 29 is Phe, His or Tyr
WXXXPXXXFXFXHXXXIXSXXXXXXXXXX

SEQ ID NO: 8174 - protein, 22 aa, Artificial sequence
  protein pattern
  Variant (2)..(2): Xaa in position 2 is Phe, Ile, Leu or Val
  Variant (3)..(3): Xaa in position 3 is Ile or Val
  Variant (5)..(5): Xaa in position 5 is any amino acid
  Variant (6)..(6): Xaa in position 6 is Ala, Ile, Leu or Val
  Variant (9)..(10): Xaa in position 9 to 10 is any amino acid
  Variant (12)..(12): Xaa in position 12 is any or no amino acid
  Variant (14)..(14): Xaa in position 14 is any or no amino acid
  Variant (17)..(17): Xaa in position 17 is Phe or Tyr
  Variant (18)..(18): Xaa in position 18 is any amino acid
  Variant (21)..(21): Xaa in position 21 is any amino acid
PXXAXXAIXXSXFXGHXXGAXE

SEQ ID NO: 8175 - protein, 17 aa, Artificial sequence
  protein pattern
  Variant (3)..(3): Xaa in position 3 is any amino acid
  Variant (4)..(4): Xaa in position 4 is Phe, Leu or Met
  Variant (5)..(5): Xaa in position 5 is Ile or Met
  Variant (6)..(6): Xaa in position 6 is Asp, Glu, Gly or Ser
  Variant (7)..(7): Xaa in position 7 is any amino acid
  Variant (8)..(8): Xaa in position 8 is Phe, Ile, Leu or Met
  Variant (9)..(9): Xaa in position 9 is Cys, Gly or Ser
  Variant (10)..(10): Xaa in position 10 is Ala or Gly
  Variant (11)..(11): Xaa in position 11 is Leu or Pro
  Variant (12)..(12): Xaa in position 12 is any amino acid
  Variant (13)..(13): Xaa in position 13 is Ile, Leu or Val
  Variant (14)..(14): Xaa in position 14 is Ala or Ser
  Variant (15)..(15): Xaa in position 15 is any amino acid
  Variant (16)..(16): Xaa in position 16 is Ile or Leu
ILXXXXXXXXXXXXXXL

SEQ ID NO: 8176 - protein, 19 aa, Artificial sequence
  protein pattern
  Variant (2)..(2): Xaa in position 2 is Phe, Trp or Tyr
  Variant (4)..(4): Xaa in position 4 is Phe or Leu
  Variant (5)..(7): Xaa in position 5 to 7 is any amino acid
  Variant (9)..(10): Xaa in position 9 to 10 is any amino acid
  Variant (11)..(11): Xaa in position 11 is Phe, Ile, Leu or Met
  Variant (12)..(12): Xaa in position 12 is Ala, Gly or Ser
  Variant (13)..(13): Xaa in position 13 is Phe, Ile, Leu, Met or Val
  Variant (14)..(14): Xaa in position 14 is any amino acid
  Variant (18)..(18): Xaa in position 18 is any amino acid
VXPXXXXLXXXXXXLIPXW

SEQ ID NO: 8177 - DNA, 735 bp, Saccharomyces cerevisiae
  CDS (1)..(735)
atgactgtggttgaaataaaaagccaggaccaatttacgcaactaaccactacaaacgctgctaataaactcattgtcttatattttaaagctcaatgggctgatccttgcaaaactatgagccaggtgctagaagctgttagtgaaaaagttaggcaagaggatgtccggtttttatcaatagatgcagacgaacatccagaaatatcagacctttttgagattgcagccgtaccatacttcgtcttcattcaaaatggtactattgtaaaagaaatatcagccgcagatcctaaggagtttgtgaaaagcttagaaattctttcgaatgcttctgcctcactagcgaacaatgccaagggtcctaaatctacgtctgatgaggaaagcagcgggtcttccgatgatgaagaggacgaaactgaagaagaaataaatgctaggctggtgaagctagtacaagctgcacctgtgatgctattcatgaaaggaagcccatcagaacctaaatgcggattttctagacagttagttggtatcctcagagaacaccaaataaggttcggattttttgatatattaagagacgaaaacgttagacaaagcttgaagaagttttctgattggcctacttttcctcagttatatatcaatggggagttccagggaggtttggatattatcaaggaatctatagaagaagatcctgaatatttccaacatgctctacagtaa

SEQ ID NO: 8178 - protein, 244 aa, Saccharomyces cerevisiae
MTVVEIKSQDQFTQLTTTNAANKLIVLYFKAQWADPCKTMSQVLEAVSEKVRQEDVRFLSIDADEHPEISDLFEIAAVPYFVFIQNGTIVKEISAADPKEFVKSLEILSNASASLANNAKGPKSTSDEESSGSSDDEEDETEEEINARLVKLVQAAPVMLFMKGSPSEPKCGFSRQLVGILREHQIRFGFFDILRDENVRQSLKKFSDWPTFPQLYINGEFQGGLDIIKESIEEDPEYFQHALQ

SEQ ID NO: 8179 - DNA, 2273 bp, Zea mays
  CDS (53)..(1807)
cctcgaggccggccggagtcgccgtcgcggcgccgcgcgggagcccccagaaatggggaggagcgagaggcagcgtacgccttctgcctcgctgcgccggcctcccaatcgatcgaggcggcgcagagcagaggaaaaccccgagccgcaaccctcctcaccgcacagcaactcgagtcctcgttctcttccccatcctcctcctcgtcaactccagtcgtcttcagcccttcaccacaatcaggcccacctcccaccaccacatttcttctcatccaaccgccccgtaggatcacagagaagggggatggcgagcggcggggcggtgagggatgtgggctcgcctgcggagctggaggcggcggtggccggggcgcgggcggcggccgtgcacttctgggcgtcctggtgcgaggcgtccaagcagatggacgaggtcttcgcgcacctcgccgtcgacttcccccacgcggccttcctgcgggttgaagctgaagaacaacctgaaatatcagaggcatatggagttacagcggttccatattttgttttctgcaaggaaggaaaaattgttgatactttggagggagcaaacccagccagcctggccaataaggttgcaaaagtagctgggcctgctagtgttgctgagtctgctgtacctgctagccttggagtcgctgctgggcctgctgtacttgaaaacatccaaaagatggcacagcaaaatggatcctctgctgctgaaagcacaaactctggcagtactcaagatgcattgaataagcgattggagcagcttgtcaattcccatcctgtgtttttatttatgaagggaaccccagaacaaccaaggtgtggtttcagccgtaaagtggtgaacattttgaagcaagaaggggtcaaatttgggagctttgacatccttacagataatgatgttcgtgaaggtatgaagaagttctccaactggcccacttttcctcaactgtactgcaaaggcgagctgcttggtggatgtgatattgttattgctatgcatgacagtggtgaattgaaggatgtttttgaggagcacaatattccccttaaaccacagggtagcaaaaatgaagaagcaggtcagcccgagtctgcaactgagaagggtgctgcagttgctgaaccaatggggcttactgatgctcagaaatctcgtttggaaagccttattaattccagcccagtgatggtattcatcaaaggtacaccagaggaaccaaagtgtgggttcagtgggaagttggtccacatacttaagcaagagaatattcctttctcaagttttgacatcctttcagatgatgaggttagacaggggctgaaggtgctctcaaactggcccagttaccctcaactgtacataaaaggtgagctggttggcggctcagacatagtgatggagatgcacaagagtggtgagctgaagaaggttctgtctgagaaaggggttattccaaaaggaaagctggaggacagattgaagtccctggtttcctctgcaccggtgatgcttttcatgaagggcactccagatgctcctcgttgcggcttcagttcgaaggttgtgaacgccttgaagaaggaaggggtcagctttgggtccttcgacatcttatctgacgaggaagttaggcaaggtttgaagacgtactccaactggcctaccttcccccagctctactacaaatcggagctgattgggggatgtgatatcgttcttgagatggagaagagcggagagctgaagtcgaccctgtcagagtagacacctagctagcattcttgcttcgctggcgtttttatcatattgcctgcattggatcactctactctggtattcatgccattgtattcatagatccacgttggtacttgtctgcagtgccacattgctagaattgtgacacatctgcagaaggaataacttgagacgcttgttcggtactgattgcattgttcttatatcaccagttctatttagcgggtggaagcttttttgttcgggtattgtcacgatttatagacggataaagtaaaatatttatagagtataaaaaaaaaaaaaaaaaaaaaaaaaaaaaaaaaaaaaaaaaaaaaaaaaaaaaaaaaaagggggcccggtacgggtaattgtgtatttaagtcaacccattgtttttgggaagtcccatgtggaaaattgactttcccaatgaacaagcttataaatctaattaaaagtggttcggccc

SEQ ID NO: 8180 - protein, 584 aa, Zea mays
MGRSERQRTPSASLRRPPNRSRRRRAEENPEPQPSSPHSNSSPRSLPHPPPRQLQSSSALHHNQAHLPPPHFFSSNRPVGSQRRGMASGGAVRDVGSPAELEAAVAGARAAAVHFWASWCEASKQMDEVFAHLAVDFPHAAFLRVEAEEQPEISEAYGVTAVPYFVFCKEGKIVDTLEGANPASLANKVAKVAGPASVAESAVPASLGVAAGPAVLENIQKMAQQNGSSAAESTNSGSTQDALNKRLEQLVNSHPVFLFMKGTPEQPRCGFSRKVVNILKQEGVKFGSFDILTDNDVREGMKKFSNWPTFPQLYCKGELLGGCDIVIAMHDSGELKDVFEEHNIPLKPQGSKNEEAGQPESATEKGAAVAEPMGLTDAQKSRLESLINSSPVMVFIKGTPEEPKCGFSGKLVHILKQENIPFSSFDILSDDEVRQGLKVLSNWPSYPQLYIKGELVGGSDIVMEMHKSGELKKVLSEKGVIPKGKLEDRLKSLVSSAPVMLFMKGTPDAPRCGFSSKVVNALKKEGVSFGSFDILSDEEVRQGLKTYSNWPTFPQLYYKSELIGGCDIVLEMEKSGELKSTLSE

SEQ ID NO: 8181 - DNA, 2177 bp, Zea mays
  CDS (249)..(1748)
aattcggcacgaggctcccagaaaagccgaggaggcagcctcgctgtgctcctgctgctgctccgaccgatcgaggtggcgcaaagcagaggaaaaccccaggccgcaaccctcgcaaacactcaagtcctcgtcccttccgcactctcctcttcaactccagccgctttcaccgccaatcagaggtccaccacccaccaccacatctcttcgcatccaaccgccccgtaggatcacaggaaacggggatggcgagcggcggggcggtgagggaggtgggctcggcggccgagctgcaggcggcggtggccggggcgcgggcggcggcggtgcacttctgggcgtcctggtgcgaggcgtccaagcagatggacgaggtcttcgcgcacctcgccgtcgacttcccccacgcggccttcctccgggttgaagctgaagaacaacctgaaatatcagaggcgtatggagttacagcggtgccatattttgttttctgcaaggaaggcaaaactgtcgatactttggagggagcaaacccagccagcttagccaataaggttgcaaaagtagctgggcctgctagtgttgctgagtctgctgtacctgctagccttggagttgctgctggacctgctgtacttgaaaacatccaaaagatggcacagcgaaatggatcttctgctgttgaaagcataagctctggtagcacagaagatgcattgaataagcgattggagcagcttgtcaattcccatcccgtgtttttatttatgaagggaaccccagagcaaccaaggtgtggtttcagccgtaaagtgattgacattttgaagcaggaaggggtgaaatttgggagctttgacattcttacagacaatgatgttcgcgaaggcatgaagaaattctccaactggcccactttccctcaactctactgcaaaggtgagctgcttggtggatgtgatattgttgttgctatgcacgaaagtggtgaattgaaggatgtttttgaggagcacaacattacccttaaaccacagggaagcaaaaatgaagaagcaggtgaacctgagtctgcaactgagaagggcagtgcagtttctgaatcaatcaagcttactgatgctcagaaaactcgtttggaaagccttattaactccagcccggtgatggtattcatcaaaggtacacctgaggaaccaaagtgtgggttcagtgggaagctggttcacatacttaagcaagagaacattcctttctccagttttgacatcctttcagatgatgaagttagacaggggctgaaggtcttctcaaactggcctagttaccctcaactgtacataaaaggtgaactggttggcggctcagacatagtgatggagatgcataagagtggtgagctgaagaagatactatctgagaaaggggttcgtcaaaaaggaaatctggaggacagattgaagtccctgatttcctctgccccggtgatgcttttcatgaagggcaccccagatgctccacgttgcggcttcagttcgaaagttgtgaacgccttgaagaaggaaggggtcagctttgggtcctttgacatcttatctgacgaggaagttcgacagggtttgaagacatactccaactggcctaccttcccccaactctactacaagtcggagctgattggtggctgtgacatcgttcttgagatggagaagagcggagagctgaagtcgaccctgtcagagtagacacctagcattcttgcttcgctggcgtttttaccatattgcctgcattggatcactctactctggtattcatgccattgtattcatagatccacgttggtacttgtctgcagtgccacattgctagaattgtgacacatctgcagaaggaataacttacgcttgttcggtactgattgcattgttcttatatcaccagttctatttagcggatggaagcttttttgttcgggtattgtcacgatttatagacggataaagtaaaatatttatagagtatatgtgtacgtgtaattgtgtatttaagtcatgccattgttcttgggaaggcacatgtgaaaaaaattgacttatcacaatgaacaagcttatacacctaatttaataaaagttcgcaccaaaaaaaaaggatttttgggggtaattatt

SEQ ID NO: 8182 - protein, 499 aa, Zea mays
MASGGAVREVGSAAELQAAVAGARAAAVHFWASWCEASKQMDEVFAHLAVDFPHAAFLRVEAEEQPEISEAYGVTAVPYFVFCKEGKTVDTLEGANPASLANKVAKVAGPASVAESAVPASLGVAAGPAVLENIQKMAQRNGSSAVESISSGSTEDALNKRLEQLVNSHPVFLFMKGTPEQPRCGFSRKVIDILKQEGVKFGSFDILTDNDVREGMKKFSNWPTFPQLYCKGELLGGCDIVVAMHESGELKDVFEEHNITLKPQGSKNEEAGEPESATEKGSAVSESIKLTDAQKTRLESLINSSPVMVFIKGTPEEPKCGFSGKLVHILKQENIPFSSFDILSDDEVRQGLKVFSNWPSYPQLYIKGELVGGSDIVMEMHKSGELKKILSEKGVRQKGNLEDRLKSLISSAPVMLFMKGTPDAPRCGFSSKVVNALKKEGVSFGSFDILSDEEVRQGLKTYSNWPTFPQLYYKSELIGGCDIVLEMEKSGELKSTLSE

SEQ ID NO: 8183 - DNA, 801 bp, Neurospora crassa
  CDS (1)..(801)
atgtcgaccatcaaggacattaccagtatcgaggcttggaacaatcatgtgtcgtcattgccggcgtccaccctcctgatcgtctccttccacgcgccctgggctgcgccctgcgcccagatggcgacagtgctcaagacattggcgagcgaatatcccgttactgaaccgctttccacgtcctgggtctcgatcgacgccgaagaactgtcggaaatcagcgaaacgtacaacgtgacggccgttccctttctcgtgctcgcccggaataaccaggttttggagacggttagcggaagcagtgccgtcaaggttcgaaacgcgattgagacccacgccaaaaaatcggcccagttcggcactgaagctagtgagaagacaccggcgatcgcaaatggcgccgcaactgctgagggccaggccggcgacgttgtacctcaggaccccaagaagcaaaaggaggagttgttcagacgtctgggtgacctggtcaaggccgccccggtcatgctgttcatgaagggtactcccagtgagcccaagtgcggcttctcgcgacagctggttgctattctccgagaaaatgccgttaaatacggtttctttaacattctagcggacgacgaagtacgacagggccttaaggagtttgctgattggcctacttatccacaactttgggtcgacggtgagctagtggggggactcgatatcgtcaaggaggagttggcgaacgacgccgacttcttcaaaccatatagtgtcaaggcgaacggcgatgcgtccgccgggcaatcatag

SEQ ID NO: 8184 - protein, 266 aa, Neurospora crassa
MSTIKDITSIEAWNNHVSSLPASTLLIVSFHAPWAAPCAQMATVLKTLASEYPVTEPLSTSWVSIDAEELSEISETYNVTAVPFLVLARNNQVLETVSGSSAVKVRNAIETHAKKSAQFGTEASEKTPAIANGAATAEGQAGDVVPQDPKKQKEELFRRLGDLVKAAPVMLFMKGTPSEPKCGFSRQLVAILRENAVKYGFFNILADDEVRQGLKEFADWPTYPQLWVDGELVGGLDIVKEELANDADFFKPYSVKANGDASAGQS

SEQ ID NO: 8185 - DNA, 1604 bp, Brassica napus
  CDS (42)..(1469)
cgcgactgtgtgtaatctaaagcaatcgtagatcttcgaagatgggtggtgcggtgaaggatattgcttcaaagcccgagcttgataacattcgccagagcggcgcaccggtggtgcttcacttctgggcttcgtggtgtgatgcttcgaagcagatggatcaagtcttctctcacctcgctaccgacttccctcgcgcccacttctttagggtagaagctgaggaacatcctgagatatctgaagcttactctgtttctgctgttccctatttcgtcttcttcaaggatggcaaagctgtggatacacttgagggagcagatccatcaagtttggccaataaagttgacaaagtcgctggttccagcacttctgctgagcctgctgctcctgcaagcctaggcctggctgcaggtccaacgattctagaaaccgtgaaggagaatgcgaaagctacttcgaaagaccgagctcagcctttatcctccaccaccaaggaagctctcaatacccgtttggagaaactcaccaactctcaccctgttatgttgttcatgaaaggtacccctgaggagcctaggtgcggtttcagcaagaacgtagttaacatcttgaaggaggaggaagttgagttcggaagtttcgatatactttcggacaatgaagtccgtgaaggtctgaagaagttctccaactggccaacgtaccctcagctgtacagcaacggagagctactcggtggagctgacattgtgatagcgatgcacgagagcggcgagctgaaggaagctttgactgatgaagctggaaaaggaggaggtgggatcacttcaggcagcacaggagggttaagcgagacgctccgagctcggctcgaagggcttgttaactcgagtccagtgatgctgttcatgaaaggaaagccagaagagccaaagtgcgggttcagtgggaaagtggttgagattctcaaccaagagaagatcgagttcgcaagctttgatatactcttggatgatgaagttcgccaagggcttaaagtgtactcaaactggtcgagctaccctcagctctacgtcaaaggcgagcttctagggggatcagacattgtcttagagatgcaaaagagcggcgagctgaaacaagttttttccgagaaaggaaagagtcttgaagagagattaaagtcgttgattaactctgagaaggttatgcttttcatgaaaggctcaccggatgaaccaaagtgcgggtttagctccaaagttgtgaaggcgctgagagatgaagatgtgagttttgggtcgtttgatatattgagcgacgaagaagtgaggcaagggattaagagcttctcgaactggcctacgtttcctcagctttactataaaggtgagttggttggagggtgtgatatcattatggagctgagtagcagtggtgatctcaaagcaacattgtccgagtaaaagcaatagtttctctcttctttttttttttttgccttttggtgagaagatgctatttctgtttaggtgttgcaaacattgtttttacttattgtttttacttaaagttatggttatttggaaaaaaaaaaaaaa

SEQ ID NO: 8186 - protein, 475 aa, Brassica napus
MGGAVKDIASKPELDNIRQSGAPVVLHFWASWCDASKQMDQVFSHLATDFPRAHFFRVEAEEHPEISEAYSVSAVPYFVFFKDGKAVDTLEGADPSSLANKVDKVAGSSTSAEPAAPASLGLAAGPTILETVKENAKATSKDRAQPLSSTTKEALNTRLEKLTNSHPVMLFMKGTPEEPRCGFSKNVVNILKEEEVEFGSFDILSDNEVREGLKKFSNWPTYPQLYSNGELLGGADIVIAMHESGELKEALTDEAGKGGGGITSGSTGGLSETLRARLEGLVNSSPVMLFMKGKPEEPKCGFSGKVVEILNQEKIEFASFDILLDDEVRQGLKVYSNWSSYPQLYVKGELLGGSDIVLEMQKSGELKQVFSEKGKSLEERLKSLINSEKVMLFMKGSPDEPKCGFSSKVVKALRDEDVSFGSFDILSDEEVRQGIKSFSNWPTFPQLYYKGELVGGCDIIMELSSSGDLKATLSE

SEQ ID NO: 8187 - DNA, 1665 bp, Arabidopsis thaliana
  CDS (29)..(1198)
gttaagagatccttctccctcttcgaagatgagcggtacggtgaaggatatcgtttcaaaggcggagcttgataacttgcgccagagcggcgcaccagtcgtgcttcacttctgggcttcttggtgtgatgcttcgaagcagatggatcaagttttctctcatctcgctactgatttccctcgtgctcacttctttagggttgaagctgaggaacatcctgagatatctgaggcttactctgttgctgctgtgccttatttcgtcttcttcaaggatggtaaaactgtggatacacttgagggtgcagatccatcaagtttagctaataaggttggcaaagttgctggttctagtacttctgcggagcctgctgctcctgcaagcttagggttggctgctgggccaacgattcttgaaactgtgaaggagaatgcgaaagcttctttacaagaccgagctcagcctgtatctaccgccgatgctctcaagagccgtttggaaaagctcactaattctcaccctgtcatgttattcatgaaaggtattcctgaagagcctaggtgtgggtttagcaggaaagtagttgacattttgaaagaggttaacgttgattttggaagttttgacatactatcggataacgaagtgcgagagggtttgaagaaattctctaactggccaacgtttcctcagctgtactgcaacggagagcttcttggtggagctgatatcgcaatagcgatgcacgagagcggtgaactaaaagatgctttcaaagatcttgggatcacgacagttggttcaaaagaaagtcaggatgaagctggaaaaggaggaggggttagttcaggaaacacaggcttaagtgagaccctccgagctcggctcgaaggtctggtcaattccaaaccagttatgctgttcatgaaaggaagaccagaagaaccaaagtgtgggttcagtgggaaagtggttgaaatcctcaaccaagaaaaaatcgagtttgggagtttcgatatcctcttagatgacgaagttcgccaaggccttaaagtgtattcaaactggtcaagctatcctcagctttacgtgaaaggcgagcttatgggtggatcagacattgtcttggagatgcaaaagagcggtgagctgaaaaaggtctaccgagaaagggatcactggagaacagagtcttgaagatagattgaaggcactgatcaattcctcggaagtaatgctattcatgaaaggttcaccagatgaaccgaaatgcggatttagctccaaagttgtgaaagcattgagaggagaaaacgtgagtttcggatcgtttgatatcttgactgatgaagaagtaaggcaagggattaagaatttctcaaactggccaacttttcctcagctatactacaaaggtgagttaattggaggatgtgatatcattatggagctaagtgagagtggtgatctcaaagcaactctatccgagtaagtaatatatacaagtctctgtctgctggtttgccttggtgagagagaacatttcagttatggtaataatatgttttaggtgttacaaacattgatattgttgcttctcaagctttgtcttgttatttctattgctgagtctattagattcataactatttttctctctttgt

SEQ ID NO: 8188 - protein, 389 aa, Arabidopsis thaliana
MSGTVKDIVSKAELDNLRQSGAPVVLHFWASWCDASKQMDQVFSHLATDFPRAHFFRVEAEEHPEISEAYSVAAVPYFVFFKDGKTVDTLEGADPSSLANKVGKVAGSSTSAEPAAPASLGLAAGPTILETVKENAKASLQDRAQPVSTADALKSRLEKLTNSHPVMLFMKGIPEEPRCGFSRKVVDILKEVNVDFGSFDILSDNEVREGLKKFSNWPTFPQLYCNGELLGGADIAIAMHESGELKDAFKDLGITTVGSKESQDEAGKGGGVSSGNTGLSETLRARLEGLVNSKPVMLFMKGRPEEPKCGFSGKVVEILNQEKIEFGSFDILLDDEVRQGLKVYSNWSSYPQLYVKGELMGGSDIVLEMQKSGELKKVYRERDHWRTES

SEQ ID NO: 8189 - DNA, 816 bp, Aspergillus fumigatus
  CDS (1)..(816)
atgtcgacgctcaacgaaatcacctcggacgccgacttctcggcacacacctcctctctccctccctccaccttactagtcctctacttccatgcgccgtgggcagctccctgcgcccagatgcgcgccgttctctccgccctcgcctcccagcacccggttactaccccgcccaccatctcctttgtgagcgtcaacgctgaagaactccccgacatctccgaagagtacaacgtcacagcagtcccctacgtggtccttatccgcaacggccagatcctcgaatccatcagcggcagcgacgccgtcaaggtgcgcgatgcggtcgagcgccacgcgggcgctggatcgggcgcgggtgcagacggcgcgaacaagacggctatccctcctcctttgacggctacgcctcgcgagaatgcccctgcggctgctgcgcaaccacccgctccctcgacccaggcattgacgcccgagcagtccaaggaggcgctgtttgcacggttggcggagctggtgaaggccgcgccggttatgctcttcatgaagggtacacctagtgcaccacagtgcggattcagtcgccagttggttgccatcctgcgggagaagagcgtcaagtacgggttcttcaatattctggccgatgaggacgtaaggcaggggttgaaggagtttgcggactggcctacatttcctcagttgtgggttgagggcgagctggttggtggactagatatcgtcaaggaagagatcaacaacgaccctgatttcctgagccagtactccattaacaaggctcctgccagcgcttga

SEQ ID NO: 8190 - protein, 271 aa, Aspergillus fumigatus
MSTLNEITSDADFSAHTSSLPPSTLLVLYFHAPWAAPCAQMRAVLSALASQHPVTTPPTISFVSVNAEELPDISEEYNVTAVPYVVLIRNGQILESISGSDAVKVRDAVERHAGAGSGAGADGANKTAIPPPLTATPRENAPAAAAQPPAPSTQALTPEQSKEALFARLAELVKAAPVMLFMKGTPSAPQCGFSRQLVAILREKSVKYGFFNILADEDVRQGLKEFADWPTFPQLWVEGELVGGLDIVKEEINNDPDFLSQYSINKAPASA

SEQ ID NO: 8191 - DNA, 1467 bp, Arabidopsis thaliana
  CDS (1)..(1467)
atgagcggtacggtgaaggatatcgtttcaaaggcggagcttgataacttgcgccagagcggcgcaccagtcgtgcttcacttctgggcttcttggtgtgatgcttcgaagcagatggatcaagttttctctcatctcgctactgatttccctcgtgctcacttctttagggttgaagctgaggaacatcctgagatatctgaggcttactctgttgctgctgtgccttatttcgtcttcttcaaggatggtaaaactgtggatacacttgagggtgcagatccatcaagtttagctaataaggttggcaaagttgctggttctagtacttctgcggagcctgctgctcctgcaagcttagggttggctgctgggccaacgattcttgaaactgtgaaggagaatgcgaaagcttctttacaagaccgagctcagcctgtatctaccgccgatgctctcaagagccgtttggaaaagctcactaattctcaccctgtcatgttattcatgaaaggtattcctgaagagcctaggtgtgggtttagcaggaaagtagttgacattttgaaagaggttaacgttgattttggaagttttgacatactatcggataacgaagtgcgagagggtttgaagaaattctctaactggccaacgtttcctcagctgtactgcaacggagagcttcttggtggagctgatatcgcaatagcgatgcacgagagcggtgaactaaaagatgctttcaaagatcttgggatcacgacagttggttcaaaagaaagtcaggatgaagctggaaaaggaggaggggttagttcaggaaacacaggcttaagtgagaccctccgagctcggctcgaaggtctggtcaattccaaaccagttatgctgttcatgaaaggaagaccagaagaaccaaagtgtgggttcagtgggaaagtggttgaaatcctcaaccaagaaaaaatcgagtttgggagtttcgatatcctcttagatgacgaagttcgccaaggccttaaagtgtattcaaactggtcaagctatcctcagctttacgtgaaaggcgagcttatgggtggatcagacattgtcttggagatgcaaaagagcggtgagctgaaaaaggtcttgaccgagaaagggatcactggagaacagagtcttgaagatagattgaaggcactgatcaattcctcggaagtaatgctattcatgaaaggttcaccagatgaaccgaaatgcggatttagctccaaagttgtgaaagcattgagaggagaaaacgtgagtttcggatcgtttgatatcttgactgatgaagaagtaaggcaagggattaagaatttctcaaactggccaacttttcctcagctatactacaaaggtgagttaattggaggatgtgatatcattatggagctaagtgagagtggtgatctcaaagcaactctatccgagtaa

SEQ ID NO: 8192 - protein, 488 aa, Arabidopsis thaliana
MSGTVKDIVSKAELDNLRQSGAPVVLHFWASWCDASKQMDQVFSHLATDFPRAHFFRVEAEEHPEISEAYSVAAVPYFVFFKDGKTVDTLEGADPSSLANKVGKVAGSSTSAEPAAPASLGLAAGPTILETVKENAKASLQDRAQPVSTADALKSRLEKLTNSHPVMLFMKGIPEEPRCGFSRKVVDILKEVNVDFGSFDILSDNEVREGLKKFSNWPTFPQLYCNGELLGGADIAIAMHESGELKDAFKDLGITTVGSKESQDEAGKGGGVSSGNTGLSETLRARLEGLVNSKPVMLFMKGRPEEPKCGFSGKVVEILNQEKIEFGSFDILLDDEVRQGLKVYSNWSSYPQLYVKGELMGGSDIVLEMQKSGELKKVLTEKGITGEQSLEDRLKALINSSEVMLFMKGSPDEPKCGFSSKVVKALRGENVSFGSFDILTDEEVRQGIKNFSNWPTFPQLYYKGELIGGCDIIMELSESGDLKATLSE

SEQ ID NO: 8193 - DNA, 1476 bp, Oryza sativa (japonica cultivar-group)
  CDS (1)..(1476)
atggcggcggtgagggaggtggggtcgaaggcggagctggaggcggcggcgggaggggcgcgggccgccgcggtgcacttctgggcggcgtggtgcgaggcgtccaagcagatggacgaggtcttcgcgcacctcgccgtcgacttctcccacgccgtcttcctccgggttgaagctgaggaacaacccgaaatttcagaggcatatggagttacagcagtgccatattttgttttcttgaaggaaggtaaaactgttgatactctggagggtgcaaatccagccagcttggccaataaggttgcaaagttagctgggcctgccagcgttgctgagtctgctgtgcctgctagcctgggtgtggctgctgggcctgctgtacttgaaaaggttcaagagatggcacagcaaaatggagcttctgccactagtagtgcagaagatgcattgaacaagagattggagcagcttgtcaattcccatcccgtcttcttatttatgaagggaacccctgagcaaccaaggtgtggtttcagtcgaaaagtagttgacgttttgaagcaggaaggagttgaatttgggagctttgacatcctaacagataacgatgtacgtgaaggaatgaaaaagttctcaaactggccgacttttcctcagctctactgcaaaggtgagctgcttggtggatgtgatattgtgattgctatgcatgaaagcggtgaactgaaggatgtttttaaggagcacaacattccgctgcagccacagggaagcaaaaacgaggaggcagtgaaagccaagcctgatactgagaagagtggtgcagtttctgaaccagctttgcttactgcagctcagaaggaacgcttggaaagccttgttaatttcagcacagtgatggcatttataaaaggtacacctgaggagcccaagtgtggattcagtggaaaactagtgcatattcttaagcaagagaagatccctttctcaagttttgacattcttacggatgatgaggttaggcagggtctaaagcttctctcaaactggcctagttaccctcaactgtacataaacggtgaactggttggcggatcagacattgttatggagatgcataagagtggggagcttaagaaggttctatctgagaaagggatcgttgcgaaagaaagtctagaagaccgcctgaaggccctgatttcctctgccccagtgatgctcttcatgaagggcaccccagatgccccccgctgcggcttcagttcgaaggttgtgaatgcactgaagcaagcaggagtcagcttcggagcgttcgacatcctatccgacgaggaggttaggcaaggcttgaagacgtactccaactggcccacgttccctcagctgtactacaaatcagaactgattggaggctgtgacatcgttcttgagctggagaagagtggagagctgaagtccacgctttcggagtga

SEQ ID NO: 8194 - protein, 491 aa, Oryza sativa (japonica cultivar-group)
MAAVREVGSKAELEAAAGGARAAAVHFWAAWCEASKQMDEVFAHLAVDFSHAVFLRVEAEEQPEISEAYGVTAVPYFVFLKEGKTVDTLEGANPASLANKVAKLAGPASVAESAVPASLGVAAGPAVLEKVQEMAQQNGASATSSAEDALNKRLEQLVNSHPVFLFMKGTPEQPRCGFSRKVVDVLKQEGVEFGSFDILTDNDVREGMKKFSNWPTFPQLYCKGELLGGCDIVIAMHESGELKDVFKEHNIPLQPQGSKNEEAVKAKPDTEKSGAVSEPALLTAAQKERLESLVNFSTVMAFIKGTPEEPKCGFSGKLVHILKQEKIPFSSFDILTDDEVRQGLKLLSNWPSYPQLYINGELVGGSDIVMEMHKSGELKKVLSEKGIVAKESLEDRLKALISSAPVMLFMKGTPDAPRCGFSSKVVNALKQAGVSFGAFDILSDEEVRQGLKTYSNWPTFPQLYYKSELIGGCDIVLELEKSGELKSTLSE

SEQ ID NO: 8195 - DNA, 714 bp, Eremothecium gossypii
  CDS (1)..(714)
atgacagtcatcgatatcacatccaaggaccagttcacgcaacagactacggtggctgccggctctaagcttgtggcgctgtacttccacacagcctgggccgagccatgcaaggccatgagcgccgtgttttctgctgtgagtgaggaaccggcgcacaaagatgtcctattccttgcgattgatgcagacgagcatgcggaaatctctgagctgtttgaggtggcggcggttccgtacttcgtcttgatcaaggagggggccatcgtaaaagagatttctgggtcggaccccaaagacttcgtcagcgcattaaatgaatacaccgccggtagcaactccacaggcgctgccgccactgcatctgcacctgctgaagagtatggtgaggaggaaacagaggaacaactacaggaacggctcaagaagctgaccagcgctgctcctgtaatgttattcatgaaaggaacaccatctgaaccgaaatgtggtttctccaggcagatggttggtatcttacgtgagcaccaagtgaggtttggcttttttgacattcttaaggacgagagtgtgagacaggggctgaagacgttttcagattggcccacgttcccgcaattgtacatcaatggtgagttccaaggtggcctagatatcatcaaggagtccttggaggaagaccctgagtttttccaaaacactctaagctcctga

SEQ ID NO: 8196 - protein, 237 aa, Eremothecium gossypii
MTVIDITSKDQFTQQTTVAAGSKLVALYFHTAWAEPCKAMSAVFSAVSEEPAHKDVLFLAIDADEHAEISELFEVAAVPYFVLIKEGAIVKEISGSDPKDFVSALNEYTAGSNSTGAAATASAPAEEYGEEETEEQLQERLKKLTSAAPVMLFMKGTPSEPKCGFSRQMVGILREHQVRFGFFDILKDESVRQGLKTFSDWPTFPQLYINGEFQGGLDIIKESLEEDPEFFQNTLSS

SEQ ID NO: 8197 - DNA, 885 bp, Magnaporthe grisea 70-15
  CDS (1)..(885)
atgacgccgccgcagtcgattgctacccctgcgcccgccaatgaggggcacgccattgtattgcgaatttccaccccgccgattatcgggagcaatgcttttgcctcttggcccagttcagatatcaccactttggaggaatgggaggctcaccaggcctcactcccggcctcaactcttcagattatatactttcatgcaccatgggcgccaccttgcgctcagatggcaacagtgcttaagaccctgtcatccgaatatccagtaaccgaccctcttgcgacctcatgggtatccctcgacgccgaggacctgagcgacgtgagcgagacctacgacgtcacggcggttccgttcgtcgttctttcgcgcggcggcaaggtcctcgagtctatcagcggtaacagcgcccagcgcgtgcgcactgcgatcgaaacgcataccagcagctccggccccggcgcgtcttcagcaggtgccccagtggcggctagcgacgaggccgccaaggccgagggtgcacctcaagacccggagaagcagaaggaggagctgttcaagcggctggcggatttggtcaaggcggcaccggtcatgctgttcatgaagggcacgcctagcgcgccgcagtgcggcttctcgaggcagctggtcgctctgctgagggaaaactcagtcaagtacggtttcttcaacatcctggcggacgacgaggtcaggcaaggcctcaaagaattcgccgactggccgacatacccacagctctggatggatggcgagctggttggcggactcgatattgtcaaggaggagatcggaaacgacccggactttttcaaggcctatagcgtcaaggccagcacagatgctgcgggcacatcatag

SEQ ID NO: 8198 - protein, 294 aa, Magnaporthe grisea 70-15
MTPPQSIATPAPANEGHAIVLRISTPPIIGSNAFASWPSSDITTLEEWEAHQASLPASTLQIIYFHAPWAPPCAQMATVLKTLSSEYPVTDPLATSWVSLDAEDLSDVSETYDVTAVPFVVLSRGGKVLESISGNSAQRVRTAIETHTSSSGPGASSAGAPVAASDEAAKAEGAPQDPEKQKEELFKRLADLVKAAPVMLFMKGTPSAPQCGFSRQLVALLRENSVKYGFFNILADDEVRQGLKEFADWPTYPQLWMDGELVGGLDIVKEEIGNDPDFFKAYSVKASTDAAGTS

SEQ ID NO: 8199 - DNA, 762 bp, Gibberella zeae PH-1
  CDS (1)..(762)
atgccgaccattacagaaatcaccagcatcaccgagtgggagcagctgctcggctctgttccccccaccaccctcgtcatcgtatcgttccacgctccatgggctgcgccatgcgcgcaaatggccaccgtcctgtcgacactcgcttccgaataccccgacactgagcctcctaccactaagtgggtgtctatcaacgcagaggagctgagcgatctcagcgagacctacgatgttaccgcggttcccttcctcgttcttttgaggaatggtcaggttgtcgagacagtcagtggcagtagtgctgtcaaggtgcgcacagcgatcgagacacaggcgaagcagtcaggtgaaaacgccgcagccagcggccccaatggtgttgctgcggacgatgctgttgtcgaggaggagcaggaccctgagaagaagaaggaggagcttttcaagcgtctcggagaccttgtcaaggccgcgccggtcatgcttttcatgaagggtacgcccagctcacctcagtgcggtttctccaggcagctggtaggattgctacgagacaactcagtcaagtatggattctttaacattctcgccgacgacgaggtccgacagggactcaaagagtttgcggattggccaacatacccccaactttggatcgacggcgaacttgttggcggtttggatattgtcaaggaggagatgagcaacgatgccgaattccttaccaagtacagcgtgagcgctcctgcagcgccttga

SEQ ID NO: 8200 - protein, 253 aa, Gibberella zeae PH-1
MPTITEITSITEWEQLLGSVPPTTLVIVSFHAPWAAPCAQMATVLSTLASEYPDTEPPTTKWVSINAEELSDLSETYDVTAVPFLVLLRNGQVVETVSGSSAVKVRTAIETQAKQSGENAAASGPNGVAADDAVVEEEQDPEKKKEELFKRLGDLVKAAPVMLFMKGTPSSPQCGFSRQLVGLLRDNSVKYGFFNILADDEVRQGLKEFADWPTYPQLWIDGELVGGLDIVKEEMSNDAEFLTKYSVSAPAAP

SEQ ID NO: 8201 - DNA, 783 bp, Candida glabrata CBS 138
  CDS (1)..(783)
atggaggggggaaggagggaaatcgaaggcaggagacactttttgaagaggaatatggttgctgagattacgaaccaggaccagtttacggagctgactacgcagaatgtgcaggacaagctgattgctatatatttccacacctcgtgggcggagccctgcaaggccatcagcgagttgtaccgggctataagcgaagacgagtcgaacaaggacgtgtcgttcttggcggtggatgcggacgagcaggctgagatagctgagctgtttgagataagcgcggtgccatacttcgtgctgatcaggaacgggaccatcctgaaggagctctccggtgccaaccccaaggagttccttgctgcgctggaggagtgcaggagagcgggcacagagtcgaagtcgaaggaaagcaacggcgcggtagaggacgacgaagacagcgaggacagcgaggaagagaccgaggaagagatgaatatgaggctgacaaagctggtgaacgcagcacccgtgatgctgttcatgaagggtaacccatccgagcctaagtgcgggttctccagacaaatcgtgggaattctaagggaacaccagatcagattcgggttcttcgacatattaagagacgacaccgtcagaaccaacttgaagaagttctcagactggcctacgttccctcaattatatatcaacggtgagttccaaggtggcctagatatcataaaggaatccctagaggaagaccctgacttcttccaacacaccatacgagtaaataactag

SEQ ID NO: 8202 - protein, 260 aa, Candida glabrata CBS 138
MEGGRREIEGRRHFLKRNMVAEITNQDQFTELTTQNVQDKLIAIYFHTSWAEPCKAISELYRAISEDESNKDVSFLAVDADEQAEIAELFEISAVPYFVLIRNGTILKELSGANPKEFLAALEECRRAGTESKSKESNGAVEDDEDSEDSEEETEEEMNMRLTKLVNAAPVMLFMKGNPSEPKCGFSRQIVGILREHQIRFGFFDILRDDTVRTNLKKFSDWPTFPQLYINGEFQGGLDIIKESLEEDPDFFQHTIRVNN

SEQ ID NO: 8203 - DNA, 729 bp, Candida glabrata CBS 138
  CDS (1)..(729)
atgtctgttgttgatatagataatgtggagcagtttctggatttggccaggacgaaagctggtaataagctagtggtgttgtttttttacatgccttggatgaagtcatgtagagtcttgaaggaagtggtgctggcgttgagcagatcagtaggtaagaaacattccacatttttacagattaatatagaaggtaatagagacattgtgtctcttctgggtatcacacaggttccagctttcttcctggtgagaaaaggtgttgtgataaaagcactaagcggtgttgatcccagagagtttttagcagcataccatgaatgtgtagataattccaactgctatgaccatgaccttgacgaagactcccaagatatcaaatcggatgatacattacaggagcccgaagatttctactctgaagataccgaaagtttagataaactggtaaacgctgcaccagtgatggtgttcataaaaggaagcccctctgatccaaaatgtggtttctctagacaaatggtaaatatactgagatcccaccagatacggtttggtttttttgatatactaaaggataagattacaagacaacagctaaaggattactcagactggcccacattcccacaattatatattaatggcgaatttgagggaggcctggatatagtaaaggaatcgttattggaagaccccgatttctttaacaagaagttatcactgtaa

SEQ ID NO: 8204 - protein, 242 aa, Candida glabrata CBS 138
MSVVDIDNVEQFLDLARTKAGNKLVVLFFYMPWMKSCRVLKEVVLALSRSVGKKHSTFLQINIEGNRDIVSLLGITQVPAFFLVRKGVVIKALSGVDPREFLAAYHECVDNSNCYDHDLDEDSQDIKSDDTLQEPEDFYSEDTESLDKLVNAAPVMVFIKGSPSDPKCGFSRQMVNILRSHQIRFGFFDILKDKITRQQLKDYSDWPTFPQLYINGEFEGGLDIVKESLLEDPDFFNKKLSL

SEQ ID NO: 8205 - DNA, 795 bp, Kluyveromyces lactis NRRL Y-1140
  CDS (1)..(795)
atgggtgttattgatattacttctcaggatcaatttactgagttgactactactaaggcgggtgacaagctattggtattgtatttctataccagttgggccgagccatgtgttgccgttggaaaagttgtggaagctctaagtgaagaacgttgcaataaggatgttgtattcttgagtatttctgctgaggaacaagttgaaatctctgagcttttcgaagtttcatctgtgccttatttcatcttcattaaaagcggaacgatattgagagaaatgtcgggtgctgatccaaaggaatttgttgctattttgaaccaattgaacgcttctggtactgacgataacgaatctggtgcggctaattcttctgctgataatggagctggttccaatgtcgcttcttctagaacggaaaacgtttctaatgttggcccagggtcaccattgggtgaagataacgaagagcaagaagaaacagaagaacagttgggcgaaaggctaaaaaaacttacacaagctgcacctgttatgctgtttatgaagggtacaccatccgagccaaagtgtggcttttctagacagatggttggaatattgagagaacatcaaatcagatttgggttcttcgatattttgaaggatgagaacgttagacaaggtttgaagaaattttctgactggccaactttcccacagctatatatcaatggtgaattccaaggaggtttggatatcatcaaggagtcattagaggaagatccagagttttttcaacacactctgtcagcataa

SEQ ID NO: 8206 - protein, 264 aa, Kluyveromyces lactis NRRL Y-1140
MGVIDITSQDQFTELTTTKAGDKLLVLYFYTSWAEPCVAVGKVVEALSEERCNKDVVFLSISAEEQVEISELFEVSSVPYFIFIKSGTILREMSGADPKEFVAILNQLNASGTDDNESGAANSSADNGAGSNVASSRTENVSNVGPGSPLGEDNEEQEETEEQLGERLKKLTQAAPVMLFMKGTPSEPKCGFSRQMVGILREHQIRFGFFDILKDENVRQGLKKFSDWPTFPQLYINGEFQGGLDIIKESLEEDPEFFQHTLSA

SEQ ID NO: 8207 - DNA, 717 bp, Debaryomyces hansenii CBS767
  CDS (1)..(717)
atgtcagtgatagaaatagagtctgagtcgcagttcacagagttaactaaatcggacgctaataagttgattgcattgtatttccatacaccatgggcaggaccatgccaaacgatgaactcagtgtttaagacgttagcagaggccaacaagtcggttttgttcatatcgatcaacgcagacgaccacccggacataagcgagcttttcgaggtgtcggcggtgccatattttatattgattcgtaactcgactattttgaaggagttgtcgggtgcagaccctagggaattcataagtgcgttgaaccagttcacagagaagaaggacacggctgctccagcagcagccgctgctgctgctccggcggcaccggcacaatccccaatcgaggagtcgccggaagcgttgaacgagaggttgaagaagttgacgggtgcagcaccagtgatgcttttcatgaaggggtcgccatcggctccgcaatgtgggttttcgagacaactcgtggcgattttgagagaacaccaggtcagatttgggttctttgacatcttgaaggacgattctgtcagacagggtctcaagaacttttcggactggccaacgttcccccaattatacatcagcggagaattccaagggggacttgatatcgttaaggaatcgatcgaggaagattcgagcttcttcgagaatgcggttaaaagtgcttag

SEQ ID NO: 8208 - protein, 238 aa, Debaryomyces hansenii CBS767
MSVIEIESESQFTELTKSDANKLIALYFHTPWAGPCQTMNSVFKTLAEANKSVLFISINADDHPDISELFEVSAVPYFILIRNSTILKELSGADPREFISALNQFTEKKDTAAPAAAAAAAPAAPAQSPIEESPEALNERLKKLTGAAPVMLFMKGSPSAPQCGFSRQLVAILREHQVRFGFFDILKDDSVRQGLKNFSDWPTFPQLYISGEFQGGLDIVKESIEEDSSFFENAVKSA

SEQ ID NO: 8209 - DNA, 753 bp, Yarrowia lipolytica CLIB122
  CDS (1)..(753)
atgtcagtcgtggaaatcaccagcgactcgcacttctccgagctcaccagctcgctagctcccaccactctggtggccgtctacttccacactccttgggccgctccctgtgcccagatgaacagcgttttcaagtcgctgtcgaccctccattcgtcggtgctttttctgtccgtcaacgccgatgagctgccagagatttccgaatctttcgacatctcggccgtaccctactttgtcatgctcagggacggcaccattctcaaggagttgagtggagccgaccccaaggagctggccgccactatcagcgctctgagcgagagcgacgccaagcctgccgagtctgagtcggccgccgccgctgcccccacttcttctactgctgacgcccctgccagctcatccacagacgctcccgaacccgcagaggagaccgaagaagaactcaacgcccgtctggccaaactcgtgaaggccgcaccagtcatgctcttcatgaagggcacgccggcagctccacagtgcggcttctcacgacaattggtcgccattctcagagaacatcacgtgcggttcggctttttcgacattctcaaagatgacgccgtgcgacagggcctgaaaaagttttccgactggcccaccttcccccagctgtacattggaggcgagctgcagggcggtctggatatcgtcaaggagagcattcaggaggaccccgagtttttcgagaaggctgttgctgaatga

SEQ ID NO: 8210 - protein, 250 aa, Yarrowia lipolytica CLIB122
MSVVEITSDSHFSELTSSLAPTTLVAVYFHTPWAAPCAQMNSVFKSLSTLHSSVLFLSVNADELPEISESFDISAVPYFVMLRDGTILKELSGADPKELAATISALSESDAKPAESESAAAAAPTSSTADAPASSSTDAPEPAEETEEELNARLAKLVKAAPVMLFMKGTPAAPQCGFSRQLVAILREHHVRFGFFDILKDDAVRQGLKKFSDWPTFPQLYIGGELQGGLDIVKESIQEDPEFFEKAVAE

SEQ ID NO: 8211 - DNA, 828 bp, Aspergillus nidulans FGSC A4
  CDS (1)..(828)
atgtcgaccctcttcgaagtcacctcagaggagagcttcgggcctcatcttgcctccattccgtccgatactctcatcgtcctctatttccacgcgccatgggccgccccctgcgcgcaaatgagagctgtgctctccgccctcgcctcccaatacccagccactacccctccaaccgtttccttcatcagtgtcaacgctgaagaactccctgacatctccgaagaatacgacgtcaccgccgtcccttacgttgtcctcctccgcaacggccaagtcctcgaaacaatctccggcagtgaggcgacaaaggtgcgcgatgctgttgaacggtatgccggtgctggctcagcaggtgcaagcgccaatggcgccgcatctgcaattccacctgcattgactgctgtgccgagagaggatgtgaatacgccaacgacggctacgcaagcacctgtggccggtgctgcttcgggtgctggcgccgcaccggccttgacgcccgagcagagcaaggaggcgctatttgctcgactttcggagctggtgaaggctgcgcccgtcatgctattcatgaaggggacaccgagtgcaccgcagtgtgggttcagtcgacagttggttggtatcctgcgtgaacggagtgtcaaatacgggttcttcaacattcttgccgatgaggatgtgcgacagggtttgaaagagtttgcggactggcctactttcccccagttatgggttaacggggagttagttggtgggctagatattgtcaaggaagaactcgagaatgatcccaatttcctggacagcttctccattaacaaataa

SEQ ID NO: 8212 - protein, 275 aa, Aspergillus nidulans FGSC A4
MSTLFEVTSEESFGPHLASIPSDTLIVLYFHAPWAAPCAQMRAVLSALASQYPATTPPTVSFISVNAEELPDISEEYDVTAVPYVVLLRNGQVLETISGSEATKVRDAVERYAGAGSAGASANGAASAIPPALTAVPREDVNTPTTATQAPVAGAASGAGAAPALTPEQSKEALFARLSELVKAAPVMLFMKGTPSAPQCGFSRQLVGILRERSVKYGFFNILADEDVRQGLKEFADWPTFPQLWVNGELVGGLDIVKEELENDPNFLDSFSINK

SEQ ID NO: 8213 - DNA, 762 bp, Candida albicans SC5314
  CDS (1)..(762): transl_table=12
atgggagttattgaaatcgagtcagaacaacagttcactgaattaaccaaagccgatccatccaagttgattgcactttatttccatacaccatgggcaggaccttgtaaaaccatgaatcaagtattcaaaaccttagctgattccaaagaatcagataattcaataatctttttaagtataaatgctgatgagttaccggaaatcagtgaaatctttgaagttagtgcagttccttatttcatattgattcgtaatcaaaccatattgaaagaattatcaggagctgatcctaaagaatttattcaagcattaaaccaattttccaataacaccaacagcactactaccagtaataacgataacgtccaggcatcaattaacagcacaactgccaataccaatagtaataataccaccactaatgctcctgaagtggaggaatcagaggaagcattaaatgaacgattaaataaattaactaaagctgctccaatcatgttgtttatgaaaggttcaccatcttcaccacaatgtggattttctcgtcaattagtggcaattttaagagaacatcaagttagatttggatttttcgatattttaaaagatgattcagtaagacaaggtttaaaaaaattcagtgattggccaactttccctcaattatacattaatggtgaattccaaggtggattggatatcatcaaagaaagtattgaagatgatgagaaattcttcgaacatgctttagaagcttga

SEQ ID NO: 8214 - protein, 253 aa, Candida albicans SC5314
MGVIEIESEQQFTELTKADPSKLIALYFHTPWAGPCKTMNQVFKTLADSKESDNSIIFLSINADELPEISEIFEVSAVPYFILIRNQTILKELSGADPKEFIQALNQFSNNTNSTTTSNNDNVQASINSTTANTNSNNTTTNAPEVEESEEALNERLNKLTKAAPIMLFMKGSPSSPQCGFSRQLVAILREHQVRFGFFDILKDDSVRQGLKKFSDWPTFPQLYINGEFQGGLDIIKESIEDDEKFFEHALEA

SEQ ID NO: 8215 - DNA, 801 bp, Ustilago maydis 521
  CDS (1)..(801)
atgtctgccgaagcaggacccagcaacctcgtcgaggtcacctcgcccgagcactttaccgagatcatgcagaaggacttgactcggatctcgctgctcaactttcatgctccgtgggccgagccatgcaaacagatgaacgaagtggtccgcgagatcgccatcaagtatcctcaagtgctgtgtctcgaaatcgaggcagagtctcttccggatgtctctgaatccttcgacatcgaggcagtaccctcgtttgtattgcttcgtggtcacacgctcctctctcgcatcagcggtgccaacgcttctgccctctcggcagctgtcgcaacacacgctgcttccgctcgatccaacggcactggcagtgtctccaagacctcggccgccccacgtgctgcgtcagacgtctacgacgcttcaagttccaaacgtaacggcgcttccacctacgctgacgaggaagacgaggaaaatgttgtgcccgagacagaagaggaaatctttgcgaggtgcaaaaagctcatggaacagagcaaggtgatgcttttcatgaagggcgacccggacacaccgcgttgcggtttcagccagaaaacggtcaaccttttgcgacaagaaaaggttgatttcggccactacgacattctcaaggacgaaaatgtacgacagggtcttaagaagctcaatgaatggcctactttcccacagatcattgtcaatggcgagcttatcggtggtcttgacatcctcaaggagagcatcgagagcggagagttccaagagatgctccatgcttga

SEQ ID NO: 8216 - protein, 266 aa, Ustilago maydis 521
MSAEAGPSNLVEVTSPEHFTEIMQKDLTRISLLNFHAPWAEPCKQMNEVVREIAIKYPQVLCLEIEAESLPDVSESFDIEAVPSFVLLRGHTLLSRISGANASALSAAVATHAASARSNGTGSVSKTSAAPRAASDVYDASSSKRNGASTYADEEDEENVVPETEEEIFARCKKLMEQSKVMLFMKGDPDTPRCGFSQKTVNLLRQEKVDFGHYDILKDENVRQGLKKLNEWPTFPQIIVNGELIGGLDILKESIESGEFQEMLHA

SEQ ID NO: 8217 - DNA, 894 bp, Aspergillus oryzae
  CDS (1)..(894)
atgtcaaccctaattgaaatttcctccgaggcagaattcgactcccacatcaagtccctgccttcaacaaccttatcgatcctctacttccatgccccctgggccgcgccctgcgcgcaaatgcgcaccgtgctcgccgccctcgcatcccagtaccccgccacacagcccccaacaacctccttcattagcatcaacgccgaagaactccccgacatttctgaaacttacgaggtcaccgccgtgcccttcgtagtcctcactcgcgacggcaaaatccttgaatccatctccggcagcgacgccgtccgcgtccgtgaagccatcgaacgccacgccggctcgaaagcctcgaccggcgcacctgccacgatccccccgcccttggccgctgtgccccgcgagacgggccccacgacggctacgcagccgccggccggagccgcgaacggggatgcgctgacgccggagcagtcgaaggaggcgctgtttgcgcgactcagagagctggtcaaggcggcgccggtgatgctgtttatgaaggggacgccgagtgcgccgcagtgtgggttcagtcggcagctcgtggcaattctgcgggagaggagcgtcaagtatgggttctttaatatcttggccgatgaggatgtgaggcagggattgaaggagtttgcggattggccgacgttcccgcagttgtgggttggtggggagttggttggggggttggatattgtaagtctttatttcctcttttttttcttcctctgtttggtttccttaccgtggttgaatggacttgtgctaattggtgaacaggtcaaggacgagattgaaaatgatccggatttcttgcgtgagcactctgtcaacaaggctcccgttgcggcttga

SEQ ID NO: 8218 - protein, 297 aa, Aspergillus oryzae
MSTLIEISSEAEFDSHIKSLPSTTLSILYFHAPWAAPCAQMRTVLAALASQYPATQPPTTSFISINAEELPDISETYEVTAVPFVVLTRDGKILESISGSDAVRVREAIERHAGSKASTGAPATIPPPLAAVPRETGPTTATQPPAGAANGDALTPEQSKEALFARLRELVKAAPVMLFMKGTPSAPQCGFSRQLVAILRERSVKYGFFNILADEDVRQGLKEFADWPTFPQLWVGGELVGGLDIVSLYFLFFFFLCLVSLPWLNGLVLIGEQVKDEIENDPDFLREHSVNKAPVAA

SEQ ID NO: 8219 - DNA, 723 bp, Dictyostelium discoideum
  CDS (1)..(723)
atggcaaatacaattaatacaaatgaagaatttgaaaatattttaaaagataataaatttttagttgttatgttttgggcagattggtcaaaaccatcaactcaaatgagagatgtttttgatcaattagctaaacaagctacaaatcaagcaaacaataaacttttattcttaaaagttgaagcagagaaagttcatcaaatttctggtagatataatgttaaatctgtaccaacttgtatatttttaaatcaaggtaaattagttcaatcagtcgttggtgctaatccatcagaattagcattacaaacaaataatttctcaaaaacttgtgatacattaccattggaagagcaacaacaacaacaacaaagtgaagaaatcataaataaaattaaattagatcaagaacaagagaaaaaattattaaatgaaagattagaaaaacttgtaaatcaatcaccagttatgttatttatgaaaggtaatccagagaaaccacaatgtggtttctcaaataaaactgttacaatcttaaaagagaatggttttgaatttggttcattcgatatcttacaagatcaagcagttcgtaatggtttaaaggaatattcgaattggccaacttatcctcaattatatatcaatggtaaattagttggtggttatgatattattaaagatttaaatgaagaaggtgaattaattgatcttaagccatag

SEQ ID NO: 8220 - protein, 240 aa, Dictyostelium discoideum
MANTINTNEEFENILKDNKFLVVMFWADWSKPSTQMRDVFDQLAKQATNQANNKLLFLKVEAEKVHQISGRYNVKSVPTCIFLNQGKLVQSVVGANPSELALQTNNFSKTCDTLPLEEQQQQQQSEEIINKIKLDQEQEKKLLNERLEKLVNQSPVMLFMKGNPEKPQCGFSNKTVTILKENGFEFGSFDILQDQAVRNGLKEYSNWPTYPQLYINGKLVGGYDIIKDLNEEGELIDLKP

SEQ ID NO: 8221 - DNA, 1038 bp, Caenorhabditis elegans
  CDS (1)..(1038)
atgccaattcaagaaatcaagtcaggagaggaggttgctgcgttcattaaggaaccatctccagctgttcttcatttctacgcatcgtgggctccaagctgtgagcaagttaatcagctactggatgatttgctcgctgaaattgctctgccgcttcgtgccgccttcattgacgctgaagctttgcccggaatttcgttgaatttcaagattactgctgcgccgacgcttgtattttttagtaatggcaaagaagtcgacagaatcgatggcttcgtgccaaaagagatccaatcaaaagttgttcttgttgccagccgatccctttcccagagctcatcggatgcttcatctacaacctcttccacaccttcactgactccacaacaagaaaaggaagctctaaatgccagattgggtgcgctggtcaattctcaaaaagtcatggttttcatgaaaggagatccatcggcgccacgttgtggtttctcgagaactattgtcgaacttttaaattcacataaaatcaaattcggatccttcgacattttctcggatgaagcagttcgccaaggattaaaggaatactcgaattggccaacttatcctcaactctatttcgatggagaattgattggagggcttgatgtcgtcaaggaggagttttcagatccacaatttatcaagcaacttccgaaagttggagaaaatagtgaggggggatcacttgaagatcgactcaaaaagcttgtctcatcgcaaagattgatgctatttatgaaaggagatcgggagacaccaaagtgcggattttcacgaactatcgttgatttgttgaacaaggctcgtgctgattatcatacttttgatatcttggaggatgaggaagtcaggcaagggcttaagaaattctccaattggccaacttatccacagctctatctcgacggagagctcgtcggagggcttgatgtcgtcaaggaagagctcttggatacgcatttccttcgtcagattccaagaattagaaatgattaa

SEQ ID NO: 8222 - protein, 345 aa, Caenorhabditis elegans
MPIQEIKSGEEVAAFIKEPSPAVLHFYASWAPSCEQVNQLLDDLLAEIALPLRAAFIDAEALPGISLNFKITAAPTLVFFSNGKEVDRIDGFVPKEIQSKVVLVASRSLSQSSSDASSTTSSTPSLTPQQEKEALNARLGALVNSQKVMVFMKGDPSAPRCGFSRTIVELLNSHKIKFGSFDIFSDEAVRQGLKEYSNWPTYPQLYFDGELIGGLDVVKEEFSDPQFIKQLPKVGENSEGGSLEDRLKKLVSSQRLMLFMKGDRETPKCGFSRTIVDLLNKARADYHTFDILEDEEVRQGLKKFSNWPTYPQLYLDGELVGGLDVVKEELLDTHFLRQIPRIRND

SEQ ID NO: 8223 - DNA, 828 bp, Mortierella alpina
  CDS (1)..(828)
atggtctccaacaactatatagacatcaccagcgaagacgactttgcgcaagtcttccagccctcctcatccactgtctatgctctgaacttttgggcggcatgggcacctccttgcgtccaaatgaatgaggtctttgaagaactggccgccaagaacgctaatgtgaactttctcaagattgaggcagaaaagtttcccgacatttccgaagactatgagatcgctgctgttccaagcttcgttatcgtgaaggagggtactgtcgtcgatcgcgtggagggagctaacgcacccgagctggccaaagtcatcgccaagtactcaaagtcaacgtcatcgcctttaccaacacagagttcgaccatggcggccgcaggacacgcagcgccttctgttgcccctccaacaatgtctcccgaagagatgaacgctcggctcaaggagctgaccagcagttcgagtgtcatggcttttatcaaaggaacacctacagctcccagatgccagttctctcgccagctcctggaaatcttgactgctcaaaacatccgattcagctccttcaacattcttgctgacgatgaggtccgacaggccatgaagaccttttcggactggccaacattccctcaggtgtatgtgaagggtgagtttgtcggaggactggatgttgtcaaggagctggttgcatctggcgagttccaggccctggtgcctgctgaaaaggatctgaagactcgcatggatgagctgattcgcaaggcacctgtgatgatctttatcaaaggcagccccgagacgcctcgttgcggcttttcgaagtaa

SEQ ID NO: 8224 - protein, 275 aa, Mortierella alpina
MVSNNYIDITSEDDFAQVFQPSSSTVYALNFWAAWAPPCVQMNEVFEELAAKNANVNFLKIEAEKFPDISEDYEIAAVPSFVIVKEGTVVDRVEGANAPELAKVIAKYSKSTSSPLPTQSSTMAAAGHAAPSVAPPTMSPEEMNARLKELTSSSSVMAFIKGTPTAPRCQFSRQLLEILTAQNIRFSSFNILADDEVRQAMKTFSDWPTFPQVYVKGEFVGGLDVVKELVASGEFQALVPAEKDLKTRMDELIRKAPVMIFIKGSPETPRCGFSK

SEQ ID NO: 8225 - DNA, 651 bp, Drosophila melanogaster
  CDS (1)..(651)
atgcccgtggtgaacgtgtcggctgccgaggagtaccagaagtacattaatgcggataagacgaccgtagctctattcgccgccgaatgggcagagcaatgcggtcaggtgaaagacgcgctggaggagctggccaagattactggcgaaaaactgcagttcatcagcctaaacgctgaacaatttcccgagatttccatgaaacatcagatcgaggccgtgcccacagtcatattcttcgccaagggctccgccgttgaccgtgtcgatggtgtagacatcgccgccataagcgccaaatccaaaaagttggccgaaaacgcaagcagcgcggcggcaacaggacaaacgttggaggaacgcctaaaggccctaatcaatacagctccgctgatgatattcatgaagggcgaccgaaatggaccgcgttgcggattctccaagcagctcatcggcattgtgaacgaaaccaacttgccgtacgagacatttgacatcctcggcgacgaagaagtgcgtcaaggcctgaaaacctactccgactggcccacatatccccaggtttacgtcaagggtgaacttatcggcggactcgatattattaaggaactgctggcgaacaatgagctcgagtccacgctaaagggctaa

SEQ ID NO: 8226 - protein, 216 aa, Drosophila melanogaster
MPVVNVSAAEEYQKYINADKTTVALFAAEWAEQCGQVKDALEELAKITGEKLQFISLNAEQFPEISMKHQIEAVPTVIFFAKGSAVDRVDGVDIAAISAKSKKLAENASSAAATGQTLEERLKALINTAPLMIFMKGDRNGPRCGFSKQLIGIVNETNLPYETFDILGDEEVRQGLKTYSDWPTYPQVYVKGELIGGLDIIKELLANNELESTLKG

SEQ ID NO: 8227 - DNA, 858 bp, Saccharomyces cerevisiae
  CDS (1)..(858)
atgtgttcttttcaggttccatctgcattttcttttaactacacctcgtactgttataaacgccaccaagcaagatattacacagcagcaaaactttttcaggaaatgcctgttattgaaattaacgatcaagagcaatttacttacctaactaccactgcggccggcgacaagttaatcgtgctttatttccataccagttgggcagaaccatgcaaagcattaaagcaggtttttgaggccattagtaatgagccttccaattccaacgtctctttcttatccattgatgcggacgaaaactcggaaatttcagaactttttgaaatctcagctgttccatattttatcataattcacaaagggacaatcttaaaagaattatccggcgcggatccaaaggagtatgtgtctttattagaagactgcaagaactcagtcaattccggatcatcacaaactcatactatggaaaatgcaaacgtaaatgaggggagtcataatgatgaagacgatgacgacgaagaagaggaagaagaaactgaggagcaaataaacgctagattgactaaattggtcaatgccgcgccggtaatgttatttatgaaggggagcccctctgaacctaaatgcgggttttcgagacaacttgtgggtatcttgagagaacatcaagtaagatttggcttctttgatatattaagagacgaatctgttagacaaaacttgaaaaagttttctgaatggccaactttccctcaactttatataaatggggagtttcaaggcggtttagacattatcaaggaatccttggaggaagaccctgattttttgcagcatgctctccaatcttaa

SEQ ID NO: 8228 - protein, 285 aa, Saccharomyces cerevisiae
MCSFQVPSAFSFNYTSYCYKRHQARYYTAAKLFQEMPVIEINDQEQFTYLTTTAAGDKLIVLYFHTSWAEPCKALKQVFEAISNEPSNSNVSFLSIDADENSEISELFEISAVPYFIIIHKGTILKELSGADPKEYVSLLEDCKNSVNSGSSQTHTMENANVNEGSHNDEDDDDEEEEEETEEQINARLTKLVNAAPVMLFMKGSPSEPKCGFSRQLVGILREHQVRFGFFDILRDESVRQNLKKFSEWPTFPQLYINGEFQGGLDIIKESLEEDPDFLQHALQS

SEQ ID NO: 8229 - DNA, 735 bp, Schizosaccharomyces pombe
  CDS (1)..(735)
atgagcgtcgaaattacttttgttgaacaatttcaagagatattgcaaaatggaaaagagcaaataattttactcaatttttatgcaccatgggctgctccatgcaagcaaatgaaccaagtctttgatcaatttgcaaaggacacgaaaaatgccgttttcttaaaaattgaagctgaaaaattttccgatatagcagagtcgtttgatgtaaacgctgttcctctatttgttttaatccacggagcaaaagttttggctagaatttcgggggcaaatcctcaaaaattgaaggctgctattgacgagtatattcaaccccttatctcccaaatatcctctaccaacgcgtccgtggaaactcaagtaaattccgttcagactaccaacactacttccaatacctctaaagctccaaatgggttggattctgaactaaatgaaaggttgagcacgctaacaaatgctcacaatgttatgctctttttaaagggtactccttcagaacctgcatgtggttttagtcgtaagctcgttggattacttcgtgagcaaaacgttcagtatggattttttaacatattggctgatgattctgtacgccaaggtcttaaagtgttttccgattggccaactttccctcaattgtacattaaaggtgaattcgtcggtggtttagatattgtttcggagatgattgaaaatggtgaattgcaagagatgcttcccaattaa

SEQ ID NO: 8230 - protein, 244 aa, Schizosaccharomyces pombe
MSVEITFVEQFQEILQNGKEQIILLNFYAPWAAPCKQMNQVFDQFAKDTKNAVFLKIEAEKFSDIAESFDVNAVPLFVLIHGAKVLARISGANPQKLKAAIDEYIQPLISQISSTNASVETQVNSVQTTNTTSNTSKAPNGLDSELNERLSTLTNAHNVMLFLKGTPSEPACGFSRKLVGLLREQNVQYGFFNILADDSVRQGLKVFSDWPTFPQLYIKGEFVGGLDIVSEMIENGELQEMLPN

SEQ ID NO: 8231 - DNA, 1260 bp, Mus musculus
  CDS (12)..(1025)
gcggagacagcatggcggcgggggcggccgaggcaggcgaggcagccgtggcagtggtggaagtcggctctgcccagcagtttgaagagctactgcgcctcaaaaccaagtcactccttgtggttcatttctgggcaccatgggctccacagtgtgtacagatgaacgatgtcatggcagagttagctaaagaacaccctcatgtttcatttgtgaagctggaagccgaagctgttcctgaagtatctgaaaaatatgaaattagctctgtccccaccttcctgttcttcaagaattctcagaaagtcgaccggttagatggtgcacatgccccagagttgaccaaaaaagtccagcgacacgtgtctagcggagcctttcctcctagtactaatgaacatcttaaagaagacctcagccttcgcctgaaaaagctgactcacgctgccccctgcatgctgttcatgaagggaacacctcaagaaccgcgctgtggtttcagcaagcagatggtggaaatccttcacaaacacaatattcagttcagcagctttgatatcttctcagatgaagaagttcgacaggggctcaaaacgtactctaattggcccacctatcctcagctctatgtttctggagagctaataggaggacttgacataattaaggagctggaagcatcagaagagctggacacgatctgtcccaaagcacccaagttagaggaaaggctcaaagtgctgaccaataaagcttccgtgatgctctttatgaaaggaaacaaacaggaagcaaaatgtggattcagcaaacaaattctggaaatactgaatagtactggggttgaatatgaaacttttgatatactggaagatgaagaagtgcgtcagggattaaaaacgttctcaaattggccaacctaccctcagctgtatgtgagaggggatcttgttggaggattggatattgtcaaggaactgaaagacaacggtgaattgctgcctatactgaaaggagaaaattagtgaacataagcatggtgtccaaggactgcaagaagtaactaattaccttggaacagttgatgatttggtcctgagaagtggactaacagtagagatacaacacactcagccatgctcgatgcgcttcaaaaggtgtgctgaagaaacatgctacgttctccatgaagcagagaaggcaataaactcttcagactcagctaaaaaaaaaaaaaaaaaaaaaaaaaaaaaaaaaaaa

SEQ ID NO: 8232 - protein, 337 aa, Mus musculus
MAAGAAEAGEAAVAVVEVGSAQQFEELLRLKTKSLLVVHFWAPWAPQCVQMNDVMAELAKEHPHVSFVKLEAEAVPEVSEKYEISSVPTFLFFKNSQKVDRLDGAHAPELTKKVQRHVSSGAFPPSTNEHLKEDLSLRLKKLTHAAPCMLFMKGTPQEPRCGFSKQMVEILHKHNIQFSSFDIFSDEEVRQGLKTYSNWPTYPQLYVSGELIGGLDIIKELEASEELDTICPKAPKLEERLKVLTNKASVMLFMKGNKQEAKCGFSKQILEILNSTGVEYETFDILEDEEVRQGLKTFSNWPTYPQLYVRGDLVGGLDIVKELKDNGELLPILKGEN

SEQ ID NO: 8233 - DNA, 1068 bp, Brassica napus
  CDS (1)..(1068)
atgggtggtgcggtgaaggatatcgcttcaaagtctgagcttgataacttgcgccagagcggcgcaccaatcgcgcttcacttctgggcatcgtggtgtgatgcttcgaagcagatggatcaagtcttctctcacctcgctactgatttccctcgcgcccacttctttagggtagaagctgaggaacatcctgagatatctgaagcttactctgtttctgctgttccctttttcgtcttcttcaaggatggcaaagctgtggatacccttgaaggcgcagatccatcgagtttagccaacaaggttgccaaaatagctggttctagtacttcttctgagcctgctgctccggcaagcctagggttagctgcagggccaatgattctcgaaaccgtgaaggagaatgcgaaagctaccgtgaaagaccgagctcagcctgcgcccaccactgaaaatctcaatgaccgtttggagaaactcactaactctcaccctgtcatgttgttcatgaaaggcactcctgaagagcctaggtgcgggtttagcaggcaagtagtgggcgttttaagagaggagaatgttgatttcggaagcttcgatatactttctgacaaccaagtgcgtgaaggtctgaagaaattctcaaactggccaacgtttcctcagctgtactgcaacggggagcttctaggaggatcagacattgtcctggagatgcaaaagagcggcgagctgaaacaagtgttgtccgagaaaggaaaacagagtcttgaagagagattgaagacgttgatcaactctgagaaggttatgcttttcatgaaaggctcaccggatgaaccaaagtgcgggtttagctccaaagttgtgaaggcgctgagagatgaagatgtgagttttgggtcgtttgatatattgagcgatgaagaagtgaggcaagggattaagagcttctcgaactggcctacgtttcctcagctttactataaaggtgagttggttggaggatgtgatatcattatggagctgagtagcagtggtgatctcaaagcaacgttgtccgagtaa

SEQ ID NO: 8234 - protein, 355 aa, Brassica napus
MGGAVKDIASKSELDNLRQSGAPIALHFWASWCDASKQMDQVFSHLATDFPRAHFFRVEAEEHPEISEAYSVSAVPFFVFFKDGKAVDTLEGADPSSLANKVAKIAGSSTSSEPAAPASLGLAAGPMILETVKENAKATVKDRAQPAPTTENLNDRLEKLTNSHPVMLFMKGTPEEPRCGFSRQVVGVLREENVDFGSFDILSDNQVREGLKKFSNWPTFPQLYCNGELLGGSDIVLEMQKSGELKQVLSEKGKQSLEERLKTLINSEKVMLFMKGSPDEPKCGFSSKVVKALRDEDVSFGSFDILSDEEVRQGIKSFSNWPTFPQLYYKGELVGGCDIIMELSSSGDLKATLSE

SEQ ID NO: 8235 - DNA, 546 bp, Brassica napus
  CDS (1)..(546)
atggctctccgatctatcaaaacgccgtctgtaactccaaccgccgccgtctcctcctcaattaccaacaaaccacagtctttcagattcgtctccaaaccgtcggcatcactcgccgtccacaacctccaccaaccgatctccatcacccgttcgaatctcctacccaaactcaaaccagcatctccccccgcgaaattccggtgctcggcgtcggcggcgctcacgccgcagcttagagatacgctggagaagctggtgaactcggagaaagtcgtgttgttcatgaaaggaacgagagatttcccgatgtgcggattctcgaacacggtggtgcagatcctgaagaatctgaacgtgcctttcgaagacgtgaacattctggagaacgagatgctgaggcaagggctgaaagagtactccaattggcccacgtttcctcagctctacatcggcggcgagttcttcggtggttgtgacatcactctcgaggcgtttcagagtggggagttgcaggaagtggttgaaagagctatttgttcttga

SEQ ID NO: 8236 - protein, 181 aa, Brassica napus
MALRSIKTPSVTPTAAVSSSITNKPQSFRFVSKPSASLAVHNLHQPISITRSNLLPKLKPASPPAKFRCSASAALTPQLRDTLEKLVNSEKVVLFMKGTRDFPMCGFSNTVVQILKNLNVPFEDVNILENEMLRQGLKEYSNWPTFPQLYIGGEFFGGCDITLEAFQSGELQEVVERAICS

SEQ ID NO: 8237 - DNA, 504 bp, Brassica napus
  CDS (1)..(504)
atggcggctgctttgtcgagcagatttctcaacaccgttcgttgtagcagattgacatctgtgtcatcagtctatcaaaatgggatgaggaggtactcatcttcagttcccagcgattcagacacacatgatgacttcaagcctacacagaaagtccctcctggtggttccacggactcgttaaaggatctcgttgagaatgatgtgaaggagaatcctgtaatgctctacatgaaaggagtccctgaagctcctcagtgtgggtttagctcactagccgtgagagttctccaacagtataatgttcctataggtgccagaaacattcttgaagatccagagttgaaaaacgctgtgaaatcattcagccattggcctacatttccacagatcttcatcaagggagagtttattggaggctcagacatcattctcaacatgcacaaggaaggtgaactggaggagaagcttaaagacgtctctgcaaaccataagtctcagtaa

SEQ ID NO: 8238 - protein, 167 aa, Brassica napus
MAAALSSRFLNTVRCSRLTSVSSVYQNGMRRYSSSVPSDSDTHDDFKPTQKVPPGGSTDSLKDLVENDVKENPVMLYMKGVPEAPQCGFSSLAVRVLQQYNVPIGARNILEDPELKNAVKSFSHWPTFPQIFIKGEFIGGSDIILNMHKEGELEEKLKDVSANHKSQ

SEQ ID NO: 8239 - DNA, 522 bp, Brassica napus
  CDS (1)..(522)
atggctctccgatctgtcaaagctccgacctcgatacctcccggcctgatcgtctcctcctcagttatcaacaagcctcaatctctcagattcgcctccaaaccgacggcatcactcgccgtccgttccaatctcaaactcaaaccagcttctccccgcgccgcgaaattccgctgctccgcgtcgtcgtcgtcggcgctcacgccgcagctaagagacacgctggagaagctggtgaactcggagaaagtagtgctgttcatgaaagggacgagggactttccgatgtgcggattctcgaacacggtggtgcagatcctgaagaatctgaacgtgcctttcgaagttgtgaacattctcgagaacgagatggtgaggcaagggttgaaagagtactcgagttggccgacgtttcctcagctttacatcggcggtgagtttttcgggggatgtgatattactctcgaggcgtttcagagtggagagttgcaggaagctgtcgaaaaagctatgtgctcttga

SEQ ID NO: 8240 - protein, 173 aa, Brassica napus
MALRSVKAPTSIPPGLIVSSSVINKPQSLRFASKPTASLAVRSNLKLKPASPRAAKFRCSASSSSALTPQLRDTLEKLVNSEKVVLFMKGTRDFPMCGFSNTVVQILKNLNVPFEVVNILENEMVRQGLKEYSSWPTFPQLYIGGEFFGGCDITLEAFQSGELQEAVEKAMCS

SEQ ID NO: 8241 - DNA, 888 bp, Glycine max
  CDS (1)..(888)
atggctacactcaacctctcttcgttgcaagctctcgccttccatcgtttatcctcttcttttccccaaagtacccctaccctttccttcaatttccaaccaaaacccttcgctaacccgcgcccaatttctctgaaaccctacgtttccgagaaacctcgcgcgcgcgtggtggcgctggccgtgaagagcctcggcgaaacggaggcggtggcggtgtcgccggaagatggccaatccgccggagaactgccgtcgggatccggcgtctacgccgtgtacgacacgaacggcgacgttcagttcatcggtttgtcgcggaacattgccgcgagcgttgccgcgcactggaaatcggtgccggagctgtgcggttccgtcaaggctggggtagtggatgaaccagacagagaaactctaacccaagcatggaagtcttggatggaagaatacataaaagatagtggaaaagttccacctggcaatgaatcaggaaatgccacttgggtcaggcagccacctaaacggaagcctgatcttcgattaacgcccggtcaccacatgcaattgaccgtccctcttgagaacctcattgatgcgttggtgaaagagaacaaggtagtggcattcattaagggccctagaagtgcaccattatgtggattctcacagagagtaatagccattcttgaaaatgaaggagtagattatgagagtgtaaatgtgctggatgaagagtataactacggattgagggaaacacttaaaaaatacagcaattggccaacattccctcagatttttgtggatggtgaactggttgggggttgtgatatattgacctccatgtatgagaaaggtgaacttgctagcttgctcaaaaaataa

SEQ ID NO: 8242 - protein, 295 aa, Glycine max
MATLNLSSLQALAFHRLSSSFPQSTPTLSFNFQPKPFANPRPISLKPYVSEKPRARVVALAVKSLGETEAVAVSPEDGQSAGELPSGSGVYAVYDTNGDVQFIGLSRNIAASVAAHWKSVPELCGSVKAGVVDEPDRETLTQAWKSWMEEYIKDSGKVPPGNESGNATWVRQPPKRKPDLRLTPGHHMQLTVPLENLIDALVKENKVVAFIKGPRSAPLCGFSQRVIAILENEGVDYESVNVLDEEYNYGLRETLKKYSNWPTFPQIFVDGELVGGCDILTSMYEKGELASLLKK

SEQ ID NO: 8243 - DNA, 1473 bp, Glycine max
  CDS (1)..(1473)
atgggtggatcagtgagggacgtgaagtcgaagggcgaggtcgacgaggtggtggcgagtggctctccggttatcctccacttctgggcgtcgtggtgcgaagcttccaagcacatggaccaactcttctctcacctttccactgatttccccaacgcccgcttcttaagggtcgaggccgaagagcaacccgagatttctgaggcttactccgtctccgctgttcctttctttgccttctgcaaggatgggaagacctttgatacattggagggagctgatccgtcaagcttagccaataaggttgctaaagtagcaggctcaattaaccctggagaagctgcatctcctgccagtcttgggatggctgcaggggcttctgttcttgaaacggtgaaagaattagcaaaagacaatgattcttcaaaggagaaaaatcaagttcaaccagggcttagtggtcctctgaaaaagagaattcagcagcttgttgactctaatcctgtcatgcttttcatgaaaggaactcctgaagagccaaaatgtggatttagcaggaaagttgttgttgtgttgaacgaagagagagtcaagtttggaagttttgatgtcctatcagactcagaggttcgtgaaggcttgaagaagttttccaattggcccacatttcctcagctttactgtaaaggagaacttcttggtgggtgtgacatagcaattgctatgcatgagagtggggaactgaaggaagtttttaaagatcatggaattgatactactaatgaagcaaaagagaaagaatcaggaaacggcaaaggtggcatctcaaaatctactgatttgagtacaaccttatcctctcgtctggaaagcctggtaaattcaagtgcagttatgctgtttatgaaaggaaagccagatgaacctaagtgtggtttcagtaggaaggtagttgaaattctccagcaagaaaatgttccctttgagagttttgacattcttactgatgaagaagttcgtcaagggcttaaggtttattcaaactggtccagttatcctcaactgtatatcaagggtgagcttattggtggatcagatattgtgttggagatgcaaaaaagcggagaacttaggaagaatttacacgagaaagggattcttcctgcagagaccattcaagatcgactgaagaatttgattgcctcgtcccctgtgatgctgttcatgaagggtaccccagatgcaccaagatgtggttttagttccagagttgctgatgcccttcgacaagagggcttgaattttgggtcctttgatatattgactgatgaggaagtgagacagggattgaaggtatactcaaattggccaacctatcctcaactctactacaaaagtgagctgattggtggtcatgatattgtgatggagctgcgaaataatggggagctgaagtcgactttatctgagtag

SEQ ID NO: 8244 - protein, 490 aa, Glycine max
MGGSVRDVKSKGEVDEVVASGSPVILHFWASWCEASKHMDQLFSHLSTDFPNARFLRVEAEEQPEISEAYSVSAVPFFAFCKDGKTFDTLEGADPSSLANKVAKVAGSINPGEAASPASLGMAAGASVLETVKELAKDNDSSKEKNQVQPGLSGPLKKRIQQLVDSNPVMLFMKGTPEEPKCGFSRKVVVVLNEERVKFGSFDVLSDSEVREGLKKFSNWPTFPQLYCKGELLGGCDIAIAMHESGELKEVFKDHGIDTTNEAKEKESGNGKGGISKSTDLSTTLSSRLESLVNSSAVMLFMKGKPDEPKCGFSRKVVEILQQENVPFESFDILTDEEVRQGLKVYSNWSSYPQLYIKGELIGGSDIVLEMQKSGELRKNLHEKGILPAETIQDRLKNLIASSPVMLFMKGTPDAPRCGFSSRVADALRQEGLNFGSFDILTDEEVRQGLKVYSNWPTYPQLYYKSELIGGHDIVMELRNNGELKSTLSE

SEQ ID NO: 8245 - DNA, 486 bp, Glycine max
  CDS (1)..(486)
atggcgacatccttgtcaaacatgttcttgaagggaatcgcagctcgttctctcagcagacccttaaatgggttgttttattgcacaagatactcgactactgtgtcaaatgattctgacacgcatgatgacttcaagccagctaataagcttgagaattctggcatttctttgtcaaatgttattgagcaggatgtcaaggataatcctgttatggtttacatgaaaggtgtgcctgattttccacaatgtggatttagttcgcttgctgtaagagttttaaaacactatgatgttcctattagtgctagaaacattttggatgatcctgaccttaaaaatgctgtaaaagccttcagtaactggccaacatttcctcaaattttcatcaagggagagtttattggtggatcagatattgttctcaatatgcaccagactggtgaattgaaggaaaagcttaaagatattacttccaagcagtga

SEQ ID NO: 8246 - protein, 161 aa, Glycine max
MATSLSNMFLKGIAARSLSRPLNGLFYCTRYSTTVSNDSDTHDDFKPANKLENSGISLSNVIEQDVKDNPVMVYMKGVPDFPQCGFSSLAVRVLKHYDVPISARNILDDPDLKNAVKAFSNWPTFPQIFIKGEFIGGSDIVLNMHQTGELKEKLKDITSKQ

SEQ ID NO: 8247 - DNA, 534 bp, Glycine max
  CDS (1)..(534)
atgtcgtggtgttactgcgctaagcctatgactttgcagttgccgttgcaatcaagagcagcatcatcgttccattcccacgttggaggagtaacagtaacattctcaacactgtctcttcgaccctcttctcctcttgttctgacccacaacctccacttccaacccaaactcaaacgcgcttccacaaccattcgctgctcctctgcgttgactcctcaattgaagtctaccttggatcaagttattgcttcaaataaagtagttgtgtttatgaagggaactaaagactttccacagtgtggattctcaaacacagtggtgcaaatattgaagtctctaaatgtgccttttgaaaccataaatgtgcttgaaaatgacttgttgcgccaagggctgaaagagtactccagttggcctacctttcctcaagtctacatagaaggagagttttttggtggctgtgatatcactgttgatgcatatcagaagggggaattgcaggagctgttggagaaggcaatgttgtcctga

SEQ ID NO: 8248 - protein, 177 aa, Glycine max
MSWCYCAKPMTLQLPLQSRAASSFHSHVGGVTVTFSTLSLRPSSPLVLTHNLHFQPKLKRASTTIRCSSALTPQLKSTLDQVIASNKVVVFMKGTKDFPQCGFSNTVVQILKSLNVPFETINVLENDLLRQGLKEYSSWPTFPQVYIEGEFFGGCDITVDAYQKGELQELLEKAMLS

SEQ ID NO: 8249 - DNA, 888 bp, Glycine max
  CDS (1)..(888)
atggccaccctcaacctctcttcgttgcaagctctctcctcccatcgtttatgctcttcttttccccaaaatacccctaccccttccttcaatttccagctaaaaccctcaattaacccgcgcccaatttctctgaaaccctacgtttccgagaagcctcgcgcgcgcgtggtggcattggccgtgaagagcctcggcgatacggaggcgctggcggtgtcgcctgaaaatgacggccccgccggagaactgccgtcgggcgccggcgtctacgccgtgtacgacacgaacggcgacgttcagttcatcggtttgtcgcggaacattgccgcgagcgttgcggcgcactggaaatcagtgccggagctgtgcggttccgttaaggctggggtagtggatgaaccagacagagaaactctaacccaagcatggaagtcttggatggaagaatacataaaagatagtggaaaagttccacctggcaatgaatcaggaaatgccacttgggtcaggcaggcacctaaacggaagcctgatcttcgattaacgcccggtcgccacatgcaattaactgtccctcttgagaacctcattgacgcgttggtgaaagagaacaaggtggtggcattcattaagggccctagaagtgcaccattatgtggattctcacagagagtaatagccattcttgaaaatgaaggagtagattatgagagtgtaaatgtgctggatgaagagtataactacggattgagggaaacacttaaaaaatacagcaattggccaacattccctcagatttttgtggatggtgaactggttgggggttgtgatatattgacctccatgtatgagaaaggtgaacttgctagcttgctcaaaaaataa

SEQ ID NO: 8250 - protein, 295 aa, Glycine max
MATLNLSSLQALSSHRLCSSFPQNTPTPSFNFQLKPSINPRPISLKPYVSEKPRARVVALAVKSLGDTEALAVSPENDGPAGELPSGAGVYAVYDTNGDVQFIGLSRNIAASVAAHWKSVPELCGSVKAGVVDEPDRETLTQAWKSWMEEYIKDSGKVPPGNESGNATWVRQAPKRKPDLRLTPGRHMQLTVPLENLIDALVKENKVVAFIKGPRSAPLCGFSQRVIAILENEGVDYESVNVLDEEYNYGLRETLKKYSNWPTFPQIFVDGELVGGCDILTSMYEKGELASLLKK

SEQ ID NO: 8251 - DNA, 489 bp, Glycine max
  CDS (1)..(489)
atgacaacatcattgtccagcatccttttcaagggaattgcagctcgttctttcaccgcccctctaactaggtcctgttatcatggaatgagatactttgctactgtatcaaatgatcctgacacacatgatgacttcaagccagctaataaacttgagaattccaacatttctttggctgatgttattgagcaggatgtcaaggataatcctgttatgatttacatgaaaggtgtgcctgattttccacagtgtggatttagttctcttgcagttagagtgttacaacaatatgatgttcctttaagtgctagaaacattttggaggatcctgaactgaaaaatgctgtaaaagctttcagtaactggccaacatttccacaagttttcattaagggagagtttatcggtggatcagatattgttcttaatatgcatcagacgggtgatttgaaggaaaagcttaaagatattacgtccaagcagtaa

SEQ ID NO: 8252 - protein, 162 aa, Glycine max
MTTSLSSILFKGIAARSFTAPLTRSCYHGMRYFATVSNDPDTHDDFKPANKLENSNISLADVIEQDVKDNPVMIYMKGVPDFPQCGFSSLAVRVLQQYDVPLSARNILEDPELKNAVKAFSNWPTFPQVFIKGEFIGGSDIVLNMHQTGDLKEKLKDITSKQ

SEQ ID NO: 8253 - DNA, 507 bp, Hordeum vulgare
  CDS (1)..(507)
atggccgccgccgcctcctcctccgccacggcgctggccggcgcttccctcccgccccccctatccgctcgcctgcggcccgttgggttctccgtggcgctcccccggacggcccctcctcccccggccctgcggctccggtcggtccggcgcctggcggcgacggagggaggaggaggcggagtggcggcgggcatgaaggagacgctggacaaggtggtgacggcgcacaaggtggtgctgttcatgaaggggaccaaggacttcccgcagtgcggcttctcccacacggtggtgcagatcctgcgctccctcgacgtgcccttcgagacgctcgacgtgctcgccaacgacgcgctccgccagggcctcaaggagtactccagctggcccaccttcccgcagctctacatcgacggcgagttcttcggcggctgcgacatcaccctcgaggcatacaagagtggggaactgcaggagacgctggagaaagcaatgtgctcttag

SEQ ID NO: 8254 - protein, 168 aa, Hordeum vulgare
MAAAASSSATALAGASLPPPLSARLRPVGFSVALPRTAPPPPALRLRSVRRLAATEGGGGGVAAGMKETLDKVVTAHKVVLFMKGTKDFPQCGFSHTVVQILRSLDVPFETLDVLANDALRQGLKEYSSWPTFPQLYIDGEFFGGCDITLEAYKSGELQETLEKAMCS

SEQ ID NO: 8255 - DNA, 513 bp, Linum usitatissimum
  CDS (1)..(513)
atggccaggttgctatcaaatatgttgctgaagggtgctgttggtccatcagcagtgcggtctagtctacttgttcctcgatgggttcatcaagcagaaatgaaatactccactacagtccccagtgatcctgacactcatgaagatttccgccctagtaataagatcgaaaagtctgacgtagctttgaaagacattgttgagcaggatgtaagggagaaccctgtgatgatatacatgaaaggagtccctgagtttcctcaatgtggatttagtgcattggctgtgagagtactgaaactgtacaatgttcccataagtgcaagaaacattttggagaatccagagctcaaaggcgcagtgaaaggattcagcaactggccaacatttccgcaggttttcattaaaggggagttcattggcgggtcggatatagtcctcaatctacaccagaatggagagctgaaagaaaagctccaagaggttggcggggacaaccagaagtcagagtga

SEQ ID NO: 8256 - protein, 170 aa, Linum usitatissimum
MARLLSNMLLKGAVGPSAVRSSLLVPRWVHQAEMKYSTTVPSDPDTHEDFRPSNKIEKSDVALKDIVEQDVRENPVMIYMKGVPEFPQCGFSALAVRVLKLYNVPISARNILENPELKGAVKGFSNWPTFPQVFIKGEFIGGSDIVLNLHQNGELKEKLQEVGGDNQKSE

SEQ ID NO: 8257 - DNA, 1500 bp, Zea mays
  CDS (1)..(1500)
atggcgagcggcggggcggtgagggatgtgggctcgcctgcggagctggaggcggcggtggccggggcgcgggcggtggccgtgcacttctgggcgtcctggtgcgaggcgtccaagcagatggacgaggtcttcgcgcacctcgccgtcgacttcccccacgcggccttcctgcgggttgaagctgaagaacaacctgaaatatcagaggcatatggagttacagcggttccatattttgttttttgcaaggaaggaaaaattgttgatactttggagggagcaaacccagccagcctggccaataaggttgcaaaagtagctgggcctgctagtgttgctgagtctgctgtacctgctagccttggagtcgctgctgggcctgctgtacttgaaaacatccaaaagatggcacagcaaaatggatcctctgctgctgaaagcacaaactctggcagtactcaagatgcattgaataagcgattggagcagcttgtcaattcccatcctgtgtttttatttatgaagggaaccccagaacaaccaaggtgtggtttcagccgtaaagtggtgaacattttgaagcaagaaggggtcaaatttgggagctttgacatccttacagataatgatgttcgtgaaggtatgaagaagttctccaactggcccacttttcctcaactgtactgcaaaggcgagctgcttggtggatgtgatattgttattgctatgcatgacagtggtgaattgaaggatgtttttgaggagcacaatattccccttaaaccacagggtagcaaaaatgaagaagcaggtcagcccgagtctgcaactgagaagggtgctgcagttgctgaaccaatggggcttactgatgctcagaaatctcgtttggaaagccttattaattccagcccagtgatggtattcatcaaaggtacaccagaggaaccaaagtgtgggttcagtgggaagttggtccacatacttaagcaagagaatattcctttctcaagttttgacatcctttcagatgatgaggttagacaggggctgaaggtgctctcaaactggcccagttaccctcaactgtacataaaaggtgagctggttggcggctcagacatagtgatggagatgcacaagagtggtgagctgaagaaggttctgtctgagaaaggggttattccaaagggaagcctggaggacagattgaagtccctggtttcctctgcaccggtgatgcttttcatgaagggcactccagatgctcctcgttgcggcttcagttcgaaggttgtgaacgccttgaagaaggaaggggtcagctttgggtccttcgacatcttatctgacgaggaagttaggcaaggtttgaagacgtactccaactggcctaccttcccccagctctactacaaatcggagctgattgggggatgtgatatcgttcttgagatggagaagagcggagagctgaagtcgaccctgtcagagtag

SEQ ID NO: 8258 - protein, 499 aa, Zea mays
MASGGAVRDVGSPAELEAAVAGARAVAVHFWASWCEASKQMDEVFAHLAVDFPHAAFLRVEAEEQPEISEAYGVTAVPYFVFCKEGKIVDTLEGANPASLANKVAKVAGPASVAESAVPASLGVAAGPAVLENIQKMAQQNGSSAAESTNSGSTQDALNKRLEQLVNSHPVFLFMKGTPEQPRCGFSRKVVNILKQEGVKFGSFDILTDNDVREGMKKFSNWPTFPQLYCKGELLGGCDIVIAMHDSGELKDVFEEHNIPLKPQGSKNEEAGQPESATEKGAAVAEPMGLTDAQKSRLESLINSSPVMVFIKGTPEEPKCGFSGKLVHILKQENIPFSSFDILSDDEVRQGLKVLSNWPSYPQLYIKGELVGGSDIVMEMHKSGELKKVLSEKGVIPKGSLEDRLKSLVSSAPVMLFMKGTPDAPRCGFSSKVVNALKKEGVSFGSFDILSDEEVRQGLKTYSNWPTFPQLYYKSELIGGCDIVLEMEKSGELKSTLSE

SEQ ID NO: 8259 - DNA, 558 bp, Zea mays
  CDS (1)..(558)
atggcaagatcactctccaccgccctcgtgaggggacttatgagatcgtcccgtgcatcgacatcagctgctgtgtcacgaccagctatccagcagtttatgaactattcatcaggtcttagtggcactcctaatgcaaatggggactcagtgacaacacgagtagctgctgatcacgacacccatcaagattttcagccaacaagtaaaagttcagatatgtctttcagtgacattgttgctcaggatgtgaaggagcaccctgttgtcatctatatgaaaggttatcctgatgctcctaggtgtggtttcagtgcattagcagtgaaggtcctccagcaatatggtgtccccatcagtgctagagatattctttcagatctaaagctcaaagagagtgttaaagcatacagtaactggcctacgtttccacaaatatttatcaaaggagagttcgttgggggatctgatatcatactcaccatgcaccagaagggtgaactgaaggaactgcttggcgatattgcacaaaaagccgaacaaagtggttcttcatga

SEQ ID NO: 8260 - protein, 185 aa, Zea mays
MARSLSTALVRGLMRSSRASTSAAVSRPAIQQFMNYSSGLSGTPNANGDSVTTRVAADHDTHQDFQPTSKSSDMSFSDIVAQDVKEHPVVIYMKGYPDAPRCGFSALAVKVLQQYGVPISARDILSDLKLKESVKAYSNWPTFPQIFIKGEFVGGSDIILTMHQKGELKELLGDIAQKAEQSGSS

SEQ ID NO: 8261 - DNA, 1470 bp, Triticum aestivum
  CDS (1)..(1470)
atggcgagcggcggcggggcggtgagggaggtggggtcgagggcggagctggacgcggcggtcggcggcgcgcgggccgccgcggtgcacttctgggcggcctggtgcgaggcctccaagcagatggacgaggtcttcgcgcacctcgccgtcgacttcccccacgcgctcttcctcagggttgaggctgaagaacaaccggaaatttcagaggcatatggagttacagcagtgccatactttgttttatgcaaggaaggcaaacctgttgataccttggagggcgcaaacccagccagcctggccaataaggttgcaaagttagctgggcctgccaatgttgctcagcctgctgcacctgctagcttgggggtggctgctgggcctgctgtactcgaaaaggtccaagaaatggcacggcaaaatggatcttctgctgctgaaagtacactgaagaagcgtttggagcagcttgtcaactcccatcctgtcatcttatttatgaagggaaatccagaagaaccaaggtgtggtttcagccgaagggtggttgacattttgaagcaggaaggtgttgaatttgggagctttgacatccttacagataatgaagtacgtgaaggactgaagaagttctctaactggccaacttttcctcagttgtactgcaaaggtgagctgcttggtgggtgtgatattgttattgccatgcatgaaagtggtgaactgaaggatgtattaaaggagcacaacattcctctcaggcaacaaggaagcaaaattgaggagccagtgatgtctgaatctgcaaatgaacagagtcctgaggcaattgggcttaccgaagctcagaaagctcgtttggagagcctcactaattctaacccagtgatgatatttatcaaaggttcacctgaggagcccaagtgtggattcagtgggaaggtcgttcatattcttaagcaggagaagattcctttctcaagttttgacattctttcagatgatgaggttaggcaaggtctaaaggttctatcaaactggcctagttaccctcaggtgtacatcaagggtgaactggttggtggttcggacatagtgatggagatgcataagagtggggaactgaagaaggtcctgactgagaaagggattattcagaaagagagcctagaggaccgactcaaggccctaatttcctcatccccagtgatgctgttcatgaagggcaacccagataatccacgttgtggctttagttcgaaagtcgtgaatgccttgaaaggagcagggataagctttgggtcctttgacattctatctgatgaggaagttagacaaggtctgaagacatactcgaactggcccaccttcccccaactctactacaaatcagaactgatggggggctgtgacattgttctcgagttggaaaagagtggagagctgaaggccactctctcggagtag

SEQ ID NO: 8262 - protein, 489 aa, Triticum aestivum
MASGGGAVREVGSRAELDAAVGGARAAAVHFWAAWCEASKQMDEVFAHLAVDFPHALFLRVEAEEQPEISEAYGVTAVPYFVLCKEGKPVDTLEGANPASLANKVAKLAGPANVAQPAAPASLGVAAGPAVLEKVQEMARQNGSSAAESTLKKRLEQLVNSHPVILFMKGNPEEPRCGFSRRVVDILKQEGVEFGSFDILTDNEVREGLKKFSNWPTFPQLYCKGELLGGCDIVIAMHESGELKDVLKEHNIPLRQQGSKIEEPVMSESANEQSPEAIGLTEAQKARLESLTNSNPVMIFIKGSPEEPKCGFSGKVVHILKQEKIPFSSFDILSDDEVRQGLKVLSNWPSYPQVYIKGELVGGSDIVMEMHKSGELKKVLTEKGIIQKESLEDRLKALISSSPVMLFMKGNPDNPRCGFSSKVVNALKGAGISFGSFDILSDEEVRQGLKTYSNWPTFPQLYYKSELMGGCDIVLELEKSGELKATLSE

SEQ ID NO: 8263 - DNA, 1500 bp, Zea mays
  CDS (1)..(1500)
atggcgagcggcggggcggtgagggatgtgggctcgcctgcggagctggaggcggcggtggccggggcgcgggcggcggccgtgcacttctgggcgtcctggtgcgaggcgtccaagcagatggacgaggtcttcgcgcacctcgccgtcgacttcccccacgcggccttcctccgggttgaagctgaagaacaacctgaaatatcagaggcgtatggagttacagcggtgccatattttgttttctgcaaggaaggaaaaattgtcgatactttggagggagtaaacccagccagcctggccaataaggttgcaaaagtagctgggcctgctagtgttgctgagtctgctgtacctgctagccttggagttgctgctggacctgctgtacttgaaaacatccaaaagatggcacagcgaaatggatcttctgctgttgaaagcataagctctggtagcacagaagatgcattgaataagcgattggagcagcttgtcaattcccatcccgtgtttttatttatgaagggaaccccagagcaaccaaggtgtggtttcagccgtaaagtgattgacattttgaagcaggaaggggtgaaatttgggagctttgacattcttacagataatgatgttcgtgaaggtatgaagaagttctccaactggcccacttttcctcaactgtactgcaaaggcgagctgcttggtggatgtgatattgttattgctatgcatgacagtggtgaattgaaggatgtttttgaggagcacaatattcccctcaaaccacagggtagcaaaaatgaagaagcaggtcaacccgagtctgcaactgagaagggtgctgcagttgctgaaccaatggggcttactgatgctcagaaagctcgtttggaaagccttattaattccagcccagtgatggtattcatcaaaggtacaccagaggaaccaaagtgtgggttcagtgggaagttggtccacatacttaagcaagagaatattcctttctcaagttttgacatcctttcagatgatgaggttagacaggggctgaaggtgctctcaaactggcccagttaccctcaactgtacataaaaggtgagctggttggcggctcagacatagtgatggagatgcacaagagtggtgagctgaagaaggttctgtctgagaaaggggttattccaaaggaaagcctggaggacagattgaagtccctggtttcctctgcaccggtgatgcttttcatgaagggcactccagatgctcctcgctgcggcttcagttcgaaggttgtgaacgccttgaagaaggaaggggtcagctttgggtccttcgacatcttatctgacgaggaagttaggcaaggtttgaagacgtactccaactggcctaccttcccccagctctactacaaatcggagctgattgggggatgtgatatcgttcttgagatggagaagagcggagagctgaagtcgaccctgtcagagtag

SEQ ID NO: 8264 - protein, 499 aa, Zea mays
MASGGAVRDVGSPAELEAAVAGARAAAVHFWASWCEASKQMDEVFAHLAVDFPHAAFLRVEAEEQPEISEAYGVTAVPYFVFCKEGKIVDTLEGVNPASLANKVAKVAGPASVAESAVPASLGVAAGPAVLENIQKMAQRNGSSAVESISSGSTEDALNKRLEQLVNSHPVFLFMKGTPEQPRCGFSRKVIDILKQEGVKFGSFDILTDNDVREGMKKFSNWPTFPQLYCKGELLGGCDIVIAMHDSGELKDVFEEHNIPLKPQGSKNEEAGQPESATEKGAAVAEPMGLTDAQKARLESLINSSPVMVFIKGTPEEPKCGFSGKLVHILKQENIPFSSFDILSDDEVRQGLKVLSNWPSYPQLYIKGELVGGSDIVMEMHKSGELKKVLSEKGVIPKESLEDRLKSLVSSAPVMLFMKGTPDAPRCGFSSKVVNALKKEGVSFGSFDILSDEEVRQGLKTYSNWPTFPQLYYKSELIGGCDIVLEMEKSGELKSTLSE

SEQ ID NO: 8265 - DNA, 582 bp, Zea mays
  CDS (1)..(582)
atgggtaccatgaagaggttggtttcgaccgccctcgccgcgagagggctcctgagatctcacggactgccgaccacaacttctgttatgtaccaaccagcattccagcaatttatgaactattcatcaccacatggtggtgatcccaatgcaaacacgaactcaactacaacacgaatagcagctgatcctgatacacatcaagatttcgagccaaagagcagaagttcagacatgactttgcatgacgctattgctcaggatatcaaggagaacccagtcttgatctacatgaagggttttcctgagtctccaatgtgtggcttcagtgcactggctgttaaggtcttccagcaatatggcgtccctgtctgtggtagagacattcttggggatcttaagctcaaagagtgtgttaaagcccacactaactggcctacatttccacaaatatttatcaaaggagagtttgttggggggtctgacatcatattaagcttgcaccagaagggtgagcttaaggatcttcttggggatattgcacaaagagacgaacaaaaagtgcatgctcacgattcatga

SEQ ID NO: 8266 - protein, 193 aa, Zea mays
MGTMKRLVSTALAARGLLRSHGLPTTTSVMYQPAFQQFMNYSSPHGGDPNANTNSTTTRIAADPDTHQDFEPKSRSSDMTLHDAIAQDIKENPVLIYMKGFPESPMCGFSALAVKVFQQYGVPVCGRDILGDLKLKECVKAHTNWPTFPQIFIKGEFVGGSDIILSLHQKGELKDLLGDIAQRDEQKVHAHDS

SEQ ID NO: 8267 - DNA, 25 bp, Artificial sequence
  primer
atgactgtggttgaaataaaaagcc

SEQ ID NO: 8268 - DNA, 26 bp, Artificial sequence
  primer
ttactgtagagcatgttggaaatatt

SEQ ID NO: 8269 - protein, 82 aa, Artificial sequence
  consensus sequence
  Variant (2)..(3): Xaa in position 2 to 3 is any amino acid
  Variant (5)..(9): Xaa in position 5 to 9 is any amino acid
  Variant (12)..(12): Xaa in position 12 is any amino acid
  Variant (14)..(14): Xaa in position 14 is any amino acid
  Variant (17)..(17): Xaa in position 17 is any amino acid
  Variant (19)..(20): Xaa in position 19 to 20 is any amino acid
  Variant (22)..(22): Xaa in position 22 is any amino acid
  Variant (27)..(29): Xaa in position 27 to 29 is any amino acid
  Variant (31)..(32): Xaa in position 31 to 32 is any amino acid
  Variant (34)..(44): Xaa in position 34 to 44 is any amino acid
  Variant (47)..(47): Xaa in position 47 is any amino acid
  Variant (49)..(51): Xaa in position 49 to 51 is any amino acid
  Variant (52)..(54): Xaa in position 52 to 54 is any or no amino acid
  Variant (56)..(57): Xaa in position 56 to 57 is any amino acid
  Variant (60)..(61): Xaa in position 60 to 61 is any amino acid
  Variant (63)..(63): Xaa in position 63 is any amino acid
  Variant (67)..(67): Xaa in position 67 is any amino acid
  Variant (70)..(73): Xaa in position 70 to 73 is any amino acid
  Variant (76)..(77): Xaa in position 76 to 77 is any amino acid
  Variant (80)..(80): Xaa in position 80 is any amino acid
LXXLXXXXXVMXFXKGXPXXPXCGFSXXXVXXLXXXXXXXXXXXILXDXXXXXXRXXLKXXSXWPTXPQXXXXGEXXGGXDI

SEQ ID NO: 8270 - protein, 39 aa, Artificial sequence
  protein pattern
  Variant (2)..(4): Xaa in position 2 to 4 is any amino acid
  Variant (8)..(9): Xaa in position 8 to 9 is any amino acid
  Variant (10)..(10): Xaa in position 10 is Ala, Asp, Glu or Ser
  Variant (11)..(11): Xaa in position 11 is any amino acid
  Variant (13)..(13): Xaa in position 13 is any amino acid
  Variant (18)..(20): Xaa in position 18 to 20 is any amino acid
  Variant (22)..(22): Xaa in position 22 is any amino acid
  Variant (23)..(23): Xaa in position 23 is Ala, Ile, Leu or Val
  Variant (25)..(28): Xaa in position 25 to 28 is any amino acid
  Variant (29)..(29): Xaa in position 29 is Phe, Ile or Val
  Variant (30)..(31): Xaa in position 30 to 31 is any amino acid
  Variant (32)..(32): Xaa in position 32 is Glu, Gly or Ser
  Variant (33)..(34): Xaa in position 33 to 34 is any amino acid
  Variant (35)..(35): Xaa in position 35 is Asp or Asn
  Variant (36)..(36): Xaa in position 36 is Ile or Val
  Variant (37)..(37): Xaa in position 37 is Phe or Leu
  Variant (38)..(38): Xaa in position 38 is any amino acid
  Variant (39)..(39): Xaa in position 39 is Asp or Asn
VXXXMKGXXXXPXCGFSXXXVXXLXXXXXXXXXXXXXXX

SEQ ID NO: 8271 - protein, 28 aa, Artificial sequence
  protein pattern
  Variant (2)..(2): Xaa in position 2 is Glu, Gln or Thr
  Variant (3)..(3): Xaa in position 3 is Ala, Gly, Asn, Gln, Ser or Thr
  Variant (4)..(4): Xaa in position 4 is Ile, Leu or Met
  Variant (6)..(7): Xaa in position 6 to 7 is any amino acid
  Variant (8)..(8): Xaa in position 8 is Ala, Asn or Ser
  Variant (9)..(9): Xaa in position 9 is Asp, Glu, Asn or Ser
  Variant (12)..(12): Xaa in position 12 is Ser or Thr
  Variant (13)..(13): Xaa in position 13 is Phe or Tyr
  Variant (16)..(16): Xaa in position 16 is Ile, Leu or Val
  Variant (17)..(19): Xaa in position 17 to 19 is any amino acid
  Variant (21)..(21): Xaa in position 21 is Asp or Glu
  Variant (22)..(22): Xaa in position 22 is Phe or Leu
  Variant (23)..(23): Xaa in position 23 is any amino acid
  Variant (26)..(26): Xaa in position 26 is any amino acid
  Variant (28)..(28): Xaa in position 28 is Ile or Val
RXXXKXXXXWPXXPQXXXXGXXXGGXDX

SEQ ID NO: 8272 - DNA, 603 bp, Saccharomyces cerevisiae
  CDS (1)..(603)
atggcaggtatcaagttgacgcataagctttatcagtattatcaattagccacaagctttttgtatgctgcattattgatacggtggctgatattaatgccactggtagggtctcggtttttaccgggaggaatccacgaattcttgatatatttgatgttttattccagcatcatggaagttatttggttgcttagattccacgggttcaaatatggtttgctttcaagaacgtttttgaaagacctaaattttatctatttagtcagcgtgatccatttttatgacgattatgagcatgcattgatcctcaagaatgcatcatattctagtttcattatttccttatctttatcacaggcatattgccattggtgcaaactttttaaacgtaagggcgtaaaggaaagaacacttgtatggaaggttaacacatttgttacattgccaattctctacctgagtgaatttgcattgctactattaaatatccaggttaagaactatcattctaccccgactttggacataatcaacagggtggttttactagcatacttccctgtactactaacagcatacaaaaaactattaacaaaatga

SEQ ID NO: 8273 - protein, 200 aa, Saccharomyces cerevisiae
MAGIKLTHKLYQYYQLATSFLYAALLIRWLILMPLVGSRFLPGGIHEFLIYLMFYSSIMEVIWLLRFHGFKYGLLSRTFLKDLNFIYLVSVIHFYDDYEHALILKNASYSSFIISLSLSQAYCHWCKLFKRKGVKERTLVWKVNTFVTLPILYLSEFALLLLNIQVKNYHSTPTLDIINRVVLLAYFPVLLTAYKKLLTK

SEQ ID NO: 8274 - DNA, 714 bp, Candida albicans
  CDS (1)..(714)
atggcatcattatatccattaaaatttaacgaaaaacttgcattcttttataatactgttgctgcaacattatggttttgttgtttaggtagatttcttattctacttcccttggtagggagaaaattcttacctggtggaatggctgatttctttcatgtggtttcattactaccgataattgaatcattatttgtgaaatcagtgttaaggaaaaaattcactatcacatcattatgggggattctgaatggattaaaaatggtgtggctatgttatggtgttattttccctcatcccaaaattgccaaacatacttcatattcattattaattacttcttggtgtttacaatatttcattcattacttttattatgcattcaaagtgaaaacaaagagttcatttcattttttgttttggttagaatacaataatttttacttgacttatcctttgggtttggtttctgaaatgattcttttattcttaagtcttgcctttgttgaacaagactcgatatatgattacgttttaagagcagcattcttggcttatattccaatagcatattttgcttggggtcatttgaaatcaagaaagaagaaaagatacaccgaaattatgaataaaagaaatgttagacaagtagcaactttagaaagtactactactagtactaagaatacctctattgaactaagaaatatgtaa

SEQ ID NO: 8275 - protein, 237 aa, Candida albicans
MASLYPLKFNEKLAFFYNTVAATLWFCCLGRFLILLPLVGRKFLPGGMADFFHVVSLLPIIESLFVKSVLRKKFTITSLWGILNGLKMVWLCYGVIFPHPKIAKHTSYSLLITSWCLQYFIHYFYYAFKVKTKSSFHFLFWLEYNNFYLTYPLGLVSEMILLFLSLAFVEQDSIYDYVLRAAFLAYIPIAYFAWGHLKSRKKKRYTEIMNKRNVRQVATLESTTTSTKNTSIELRNM

SEQ ID NO: 8276 - DNA, 636 bp, Eremothecium gossypii
  CDS (1)..(636)
atggcagacctccaagggatacccggtaagcccgcgcacacacccaattcaatggtgtctcgggcgtatcagttttacaggctctcttgtatgtttctctacgcagctttggtggcgcgctggctagcgctgttccccctggtaggaacgcgctgggttccgggcggcatacatgggtttttgatctaccttctaggcggcagcgcggtgttagaggttctgtggatgatctggttttataggttcacgaagggactctggacgcggaccctgctgaagtgtgccaacatgctgtacttcgtggccgtgatgcatttctacgacgactacgagcacgcgccggtactgaagaacattgggtactcgatctttattctgagcattgggatgaatcaggcactgcatcacggcgggcggctattcagggggcgacgccggcggcggtcctggtggtggcggtccgacacatttgtgctgcagcccgcactatatatcagccagttctacctgctgctactgaatgtacagaacccgagctttcattcgacgccgaagcttgacataattaatcgcacggtgctggtggcctacgtgcccctggcgcttcagtgctttcgtcggcagctgacgagctaa

SEQ ID NO: 8277 - protein, 211 aa, Eremothecium gossypii
MADLQGIPGKPAHTPNSMVSRAYQFYRLSCMFLYAALVARWLALFPLVGTRWVPGGIHGFLIYLLGGSAVLEVLWMIWFYRFTKGLWTRTLLKCANMLYFVAVMHFYDDYEHAPVLKNIGYSIFILSIGMNQALHHGGRLFRGRRRRRSWWWRSDTFVLQPALYISQFYLLLLNVQNPSFHSTPKLDIINRTVLVAYVPLALQCFRRQLTS

SEQ ID NO: 8278 - DNA, 594 bp, Candida glabrata CBS 138
  CDS (1)..(594)
atgtttacgcataagctgtttcaattgtatcaattgcagaccacgctactgtacctggcactctttggcaggtggctggtgttgatgcccctggtgggctctcgttatctccctggtggaatacacgaatacctctgttacttgttggtgattgtgtctgtgtttgaagtgctgtggtctctatacttccatggattacgcggttttatttcccagagagtgctcaagtcattgaactacctgtacttagtgctgaatttgcacttctacgatgactatgagcatgctcctttattgaagactagtgcttactctacatttataataggtgtcagtctggtggagtcgtaccagcactggtgcaggctattcaagagagggccaaactacaaacgtgagactcgttactggaaatttatcagctatgtgatgttgccatgcttatacttgagcgaattcgttctgctattgctgaatagacaactaccaaatcaccacactactgagcaactggaattggttaatactgtggtgctgatattgtatttcccaatggcgttaactgtatataagagacacctacaggtgaattga

SEQ ID NO: 8279 - protein, 197 aa, Candida glabrata CBS 138
MFTHKLFQLYQLQTTLLYLALFGRWLVLMPLVGSRYLPGGIHEYLCYLLVIVSVFEVLWSLYFHGLRGFISQRVLKSLNYLYLVLNLHFYDDYEHAPLLKTSAYSTFIIGVSLVESYQHWCRLFKRGPNYKRETRYWKFISYVMLPCLYLSEFVLLLLNRQLPNHHTTEQLELVNTVVLILYFPMALTVYKRHLQVN

SEQ ID NO: 8280 - DNA, 630 bp, Kluyveromyces lactis NRRL Y-1140
  CDS (1)..(630)
atgaatgctactagaagacaacagccaaggaggctggttgttaagctatatcagtttttccatatatcaagcgccttcttatattgcgctttgttagttcgttggttggttcttcttccattggtctcgcgaaagtatctaccaggaggaattcataggtttctatgttgtttgatggtatactcagcggtcggtaacattctatggtggattaaaatgcgaggcctggcctggtcgatctttaacagacacaatcttaagaatatcaatctaatatatcttgtagccattctgcacttttatgatgattttgaacactcaccgctcttgaaaaatactagttattcctctttcattgttggtctttcattcacgcaaatgtactatcactggaatagaatattcaagggcccatcacctgaaccacgaagctcaaaatcgttagcttctagacttaacgcatttatcatgattccactcttataccttagtgaattttacctactattgttgaatactgagattgataactatcacaatggaccaaagactgtgcttttcaataagtttgtgttggtggtgtttatcccattgtgtttgcatctatacaaaggctttttatataaatga

SEQ ID NO: 8281 - protein, 209 aa, Kluyveromyces lactis NRRL Y-1140
MNATRRQQPRRLVVKLYQFFHISSAFLYCALLVRWLVLLPLVSRKYLPGGIHRFLCCLMVYSAVGNILWWIKMRGLAWSIFNRHNLKNINLIYLVAILHFYDDFEHSPLLKNTSYSSFIVGLSFTQMYYHWNRIFKGPSPEPRSSKSLASRLNAFIMIPLLYLSEFYLLLLNTEIDNYHNGPKTVLFNKFVLVVFIPLCLHLYKGFLYK

SEQ ID NO: 8282 - DNA, 24 bp, Artificial sequence
  primer
atggcaggtatcaagttgacgcat

SEQ ID NO: 8283 - DNA, 28 bp, Artificial sequence
  primer
tcattttgttaatagttttttgtatgct

SEQ ID NO: 8284 - protein, 193 aa, Artificial sequence
  consensus sequence
  Variant (3)..(3): Xaa in position 3 is any amino acid
  Variant (5)..(5): Xaa in position 5 is any amino acid
  Variant (7)..(12): Xaa in position 7 to 12 is any amino acid
  Variant (15)..(15): Xaa in position 15 is any amino acid
  Variant (18)..(19): Xaa in position 18 to 19 is any amino acid
  Variant (23)..(23): Xaa in position 23 is any amino acid
  Variant (25)..(25): Xaa in position 25 is any amino acid
  Variant (30)..(32): Xaa in position 30 to 32 is any amino acid
  Variant (39)..(39): Xaa in position 39 is any amino acid
  Variant (42)..(43): Xaa in position 42 to 43 is any amino acid
  Variant (45)..(54): Xaa in position 45 to 54 is any amino acid
  Variant (56)..(70): Xaa in position 56 to 70 is any amino acid
  Variant (71)..(71): Xaa in position 71 is any or no amino acid
  Variant (74)..(75): Xaa in position 74 to 75 is any amino acid
  Variant (77)..(78): Xaa in position 77 to 78 is any amino acid
  Variant (82)..(84): Xaa in position 82 to 84 is any amino acid
  Variant (90)..(90): Xaa in position 90 is any amino acid
  Variant (93)..(95): Xaa in position 93 to 95 is any amino acid
  Variant (98)..(100): Xaa in position 98 to 100 is any amino acid
  Variant (103)..(103): Xaa in position 103 is any amino acid
  Variant (106)..(115): Xaa in position 106 to 115 is any amino acid
  Variant (117)..(120): Xaa in position 117 to 120 is any amino acid
  Variant (123)..(140): Xaa in position 123 to 140 is any amino acid
  Variant (141)..(144): Xaa in position 141 to 144 is any or no amino acid
  Variant (146)..(146): Xaa in position 146 is any amino acid
  Variant (149)..(149): Xaa in position 149 is any amino acid
  Variant (153)..(153): Xaa in position 153 is any amino acid
  Variant (159)..(164): Xaa in position 159 to 164 is any amino acid
  Variant (166)..(171): Xaa in position 166 to 171 is any amino acid
  Variant (172)..(173): Xaa in position 172 to 173 is any or no amino acid
  Variant (175)..(176): Xaa in position 175 to 176 is any amino acid
  Variant (179)..(180): Xaa in position 179 to 180 is any amino acid
  Variant (182)..(182): Xaa in position 182 is any amino acid
  Variant (184)..(185): Xaa in position 184 to 185 is any amino acid
  Variant (187)..(192): Xaa in position 187 to 192 is any amino acid
KLXQXYXXXXXXLYXALXXRWLXLXPLVGXXXLPGGIHXFLXXLXXXXXXXXXXWXXXXXXXXXXXXXXXXLKXXNXXYLVXXXHFYDDXEHXXXLKXXXYSXFIXXXXXXXXXXHXXXXFKXXXXXXXXXXXXXXXXXXXXXXPXLYXSEFXLLLLNXXXXXXHXXXXXXXXNXXVLXXYXPXXLXXXXXXL

SEQ ID NO: 8285 - protein, 23 aa, Artificial sequence
  protein pattern
  Variant (2)..(2): Xaa in position 2 is Phe or Trp
  Variant (4)..(4): Xaa in position 4 is Ala, Ile or Val
  Variant (6)..(6): Xaa in position 6 is Phe, Leu or Met
  Variant (11)..(11): Xaa in position 11 is any or no amino acid
  Variant (13)..(14): Xaa in position 13 to 14 is any amino acid
  Variant (15)..(15): Xaa in position 15 is any or no amino acid
  Variant (19)..(19): Xaa in position 19 is Ile or Met
  Variant (20)..(20): Xaa in position 20 is any amino acid
  Variant (21)..(21): Xaa in position 21 is Asp, Glu or Gly
  Variant (22)..(22): Xaa in position 22 is Phe or Tyr
  Variant (23)..(23): Xaa in position 23 is Phe or Leu
RXLXLXPLVGXRXXXPGGXXXXX

SEQ ID NO: 8286 - protein, 30 aa, Artificial sequence
  protein pattern
  Variant (6)..(6): Xaa in position 6 is Phe or Tyr
  Variant (9)..(9): Xaa in position 9 is any amino acid
  Variant (10)..(11): Xaa in position 10 to 11 is any or no amino acid
  Variant (13)..(14): Xaa in position 13 to 14 is any or no amino acid
  Variant (16)..(16): Xaa in position 16 is Asn or Thr
  Variant (17)..(17): Xaa in position 17 is any amino acid
  Variant (18)..(18): Xaa in position 18 is Ala, Gly or Ser
  Variant (21)..(21): Xaa in position 21 is any amino acid
  Variant (24)..(24): Xaa in position 24 is Ile, Leu or Val
  Variant (25)..(25): Xaa in position 25 is Gly or Ser
  Variant (26)..(26): Xaa in position 26 is Ile, Leu or Val
  Variant (27)..(27): Xaa in position 27 is Gly or Ser
  Variant (28)..(28): Xaa in position 28 is Phe, Leu or Met
  Variant (29)..(29): Xaa in position 29 is Asn, Ser, Thr or Val
  Variant (30)..(30): Xaa in position 30 is Glu or Gln
HFYDDXEHXXXLXXKXXXYSXFIXXXXXXX

SEQ ID NO: 8287 - protein, 23 aa, Artificial sequence
  protein pattern
  Variant (2)..(2): Xaa in position 2 is any amino acid
  Variant (5)..(5): Xaa in position 5 is Ile or Leu
  Variant (7)..(7): Xaa in position 7 is Glu or Gln
  Variant (9)..(9): Xaa in position 9 is any amino acid
  Variant (15)..(16): Xaa in position 15 to 16 is any amino acid
  Variant (17)..(18): Xaa in position 17 to 18 is any or no amino acid
  Variant (20)..(20): Xaa in position 20 is any amino acid
  Variant (21)..(22): Xaa in position 21 to 22 is any or no amino acid
PXLYXSXFXLLLLNXXXXNXXXH

SEQ ID NO: 8288 - DNA, 264 bp, Saccharomyces cerevisiae
  CDS (1)..(264)
atggaaaacgataagggccaattagtcgaactttacgttccaagaaaatgttctgctaccaacagaatcatcaaggctgatgaccacgcatctgttcaaatcaacgtcgctaaggttgatgaagaaggacgtgctatcccaggtgagtacgttacctacgctttgtccggttacgttagatccagaggtgaatctgatgattctttgaaccgtttggctcaaaacgatggtttgttaaagaacgtctggtcttactcacgttaa

SEQ ID NO: 8289 - protein, 87 aa, Saccharomyces cerevisiae
MENDKGQLVELYVPRKCSATNRIIKADDHASVQINVAKVDEEGRAIPGEYVTYALSGYVRSRGESDDSLNRLAQNDGLLKNVWSYSR

SEQ ID NO: 8290 - DNA, 399 bp, sorghum bicolor
  CDS (51)..(314)
gccggccgggttcggacctctactacatcaccaaaacacatcccggcaaaatggagaacgacaaaggtgtcctcgttgacctgtacatcccccgacactgctcggccaccaaccgactgatcacggccaaggaccacgcctcgatccagatccaagtcgccgatgtcgacgccgacggcaaggccatcaagggcaagtccacgaccattgccatctgcggacgaatcagggctcagggcgactcggacgactcgatcaaccgaattgctaccaaggagggtctgctgaagaacacctggacctactcccgctagattgggcatacgtgtacgattgggatgtatgcagctggatcatgagaaaaaaaaaaaagaaaaaaaaaaaaaaaaaaggccccta

SEQ ID NO: 8291 - protein, 87 aa, sorghum bicolor
MENDKGVLVDLYIPRHCSATNRLITAKDHASIQIQVADVDADGKAIKGKSTTIAICGRIRAQGDSDDSINRIATKEGLLKNTWTYSR

SEQ ID NO: 8292 - DNA, 264 bp, Sorghum bicolor
  CDS (1)..(264)
atggagaacgaccgcggcgagcttgtcgacctgtacgtcccccgcaagtgcagcgcgaccaaccgcatcatcaaggccaaggaccacggctccgtccagatcagcatcgccaaggtcgacgagaacggccgctacaccggcgagaaccaggtctacgcgctctgcggcttcgtgcgcgcgatgggcgagagcgacgactgcatgaaccgcctcacccagagggacggctacctcaagggtgtctggaacgcgagcggaaactag

SEQ ID NO: 8293 - protein, 87 aa, Sorghum bicolor
MENDRGELVDLYVPRKCSATNRIIKAKDHGSVQISIAKVDENGRYTGENQVYALCGFVRAMGESDDCMNRLTQRDGYLKGVWNASGN

SEQ ID NO: 8294 - DNA, 264 bp, Zea mays
  CDS (1)..(264)
atggaaaacgatcgtggagacctcgtcgacatctacgtcccaagaaagtgtgctgccactggtcgtctaattgaggccaaggatcatgcttcagtccaaatcgctgtcggtgatgttgacgccgaaggaaagatcattccaggttcaaacaccacctttgccctctctggttacgtccgtaacgctggtgaggctgatgattctttgaacagattggccacaaaggagggactcctccgtaacgtctggacttatgccaagtaa

SEQ ID NO: 8295 - protein, 87 aa, Zea mays
MENDRGDLVDIYVPRKCAATGRLIEAKDHASVQIAVGDVDAEGKIIPGSNTTFALSGYVRNAGEADDSLNRLATKEGLLRNVWTYAK

SEQ ID NO: 8296 - DNA, 473 bp, Zea mays
  CDS (90)..(335)
acgccgccgccgcagttgtcttcggtctcccgtgcttcctcccttcgagagatcaagttgctgttgcggtagtttccccaactgtcaccatgcagaacgaggagggtaagatggtggacctctacgtccccaggaagtgctcggccaccaacaggattatcactgccaaggaccatgcctctgtgcagatcaacattggccacgtggatgccaatggcctctacgacggtcacttcaccacgtttgctctctctgggtttgtccgtgctcagggtgacgcagacagctccttggacaggctgtggcagaagaagaaggctgagatcaagcagtagatcttacatgtagtttaccaagaattggacactttgagggaccctgcataagctatgttttgatttcatatcaccatatgcaatgttgtgatttcagttggtatcttaaatctaaagacttggtatctttgctggatc

SEQ ID NO: 8297 - protein, 81 aa, Zea mays
MQNEEGKMVDLYVPRKCSATNRIITAKDHASVQINIGHVDANGLYDGHFTTFALSGFVRAQGDADSSLDRLWQKKKAEIKQ

SEQ ID NO: 8298 - DNA, 261 bp, Zea mays
  CDS (1)..(261)
atggagaacgaacgcggcgagctcgttgacctctacgtcccccgcaaatgctcggctaccggacgcatcatcagggccaaggaccacgcctctgtccaactgagcatcggcaaggttgacgagaacggccgctacaccggtgacaaccaggtctacgccatctccggcttcgttcgcgccatgggcgagtccgacgacagccttaacaggctcacacaaaaggatggattcctcaagtccgtctggagcgcgtcccgttaa

SEQ ID NO: 8299 - protein, 86 aa, Zea mays
MENERGELVDLYVPRKCSATGRIIRAKDHASVQLSIGKVDENGRYTGDNQVYAISGFVRAMGESDDSLNRLTQKDGFLKSVWSASR

SEQ ID NO: 8300 - DNA, 246 bp, Zea mays
  CDS (1)..(246)
atgcagaacgaggagggtaagactgtggacctctatgtccccaggaagtgctcggccacaaacaggatcatcactgccaaggaccatgcctctgtccagatcaacattggccacttggatgcgaatggcctgtatgatggtcacttcacaacgtttgctctctctgggtttgtccgtgctcagggcgacgcagacagctccttggacaggttgtggcagaagaagaaggttgatatcaagcagtag

SEQ ID NO: 8301 - protein, 81 aa, Zea mays
MQNEEGKTVDLYVPRKCSATNRIITAKDHASVQINIGHLDANGLYDGHFTTFALSGFVRAQGDADSSLDRLWQKKKVDIKQ

SEQ ID NO: 8302 - DNA, 246 bp, Glycine max
  CDS (1)..(246)
atgcagaacgaggtgggtgatatggtggacctctatgtcccaaggaagtgctctgccaccaacaggatcataactgccaaggaccatgcctctgtccagatcaacatcgggcatgtggatgcgaatggactgtataatggcagtttcaccacgtttgccctctctggattcgtccgcgcccagggtgatgctgatggttctttggacaggctctggcagcagaagagggctgagatcaagcagtag

SEQ ID NO: 8303 - protein, 81 aa, Glycine max
MQNEVGDMVDLYVPRKCSATNRIITAKDHASVQINIGHVDANGLYNGSFTTFALSGFVRAQGDADGSLDRLWQQKRAEIKQ

SEQ ID NO: 8304 - DNA, 246 bp, Zea mays subsp. mays
  CDS (1)..(246)
  misc_feature (23)..(23): n is a, g, c or t
atgcagaacgaggagggtaagantgtggacctctatgtccccaggaagtgctcggccacaaacaggatcatcactgccaaggaccatgcctctgtccagatcaacattggccacttggatgcgaatggcctgtatgatggtcacttcacaacgtttgctctctctgggtttgtccgtgctcagggtgacgcagacagctccttggacaggctgtggcaaaagaagaaggctgatatcaagcagtag

SEQ ID NO: 8305 - protein, 81 aa, Zea mays subsp. mays
  misc_feature (8)..(8): The Xaa at location 8 stands for Asn, Ile, Ser, or Thr.
MQNEEGKXVDLYVPRKCSATNRIITAKDHASVQINIGHLDANGLYDGHFTTFALSGFVRAQGDADSSLDRLWQKKKADIKQ

SEQ ID NO: 8306 - DNA, 246 bp, Zea mays subsp. mays
  CDS (1)..(246)
atgcagaacgaggagggtaagactgtggacctctatgtccccaggaagtgctcggccacaaacaggatcatcactgccaaggaccatgcctctgtccagatcaacattggccacttggatgcgaatggcctgtatgatggtcacttcacaacgtttgctctctctgggtttgtccgtgctcagggtgacgcagacagctccttggacaggctgtggcaaaagaagaaggctgatatcaagcagtag

SEQ ID NO: 8307 - protein, 81 aa, Zea mays subsp. mays
MQNEEGKTVDLYVPRKCSATNRIITAKDHASVQINIGHLDANGLYDGHFTTFALSGFVRAQGDADSSLDRLWQKKKADIKQ

SEQ ID NO: 8308 - DNA, 249 bp, Guillardia theta nucleomorph
  CDS (1)..(249)
atgaattctaccaacaaaaaaattgtaggggaatatatcccgagaaaatgctctttaagtaataaactaatcaataataaagatcatgcttcaattcaaatttcaattggggtcttagataaaaacgatttatttaaaggtgaatatgatatatttgcattttcaggtcttatgagaaaaaaaggtaaatctgattatgcaatagtaaatttaattgaaaaattggataattgtaatttaaaaatttga

SEQ ID NO: 8309 - protein, 82 aa, Guillardia theta nucleomorph
MNSTNKKIVGEYIPRKCSLSNKLINNKDHASIQISIGVLDKNDLFKGEYDIFAFSGLMRKKGKSDYAIVNLIEKLDNCNLKI

SEQ ID NO: 8310 - DNA, 258 bp, Arabidopsis thaliana
  CDS (1)..(258)
atgcaaaacgaagagggtcaggtcactgagctttacattcctaggaaatgttctgctactaaccggttgatcacatccaaggatcatgcctctgttcagctcaacattggtcatttagatgctaatggcttgtacaccggacagttcacaacctttgctctctgcggttttgtccgtgctcagggagacgctgacagtggtgtcgacaggttgtggcagaagaagaaggttgaagccaaacaaaaactaagagcttaa

SEQ ID NO: 8311 - protein, 85 aa, Arabidopsis thaliana
MQNEEGQVTELYIPRKCSATNRLITSKDHASVQLNIGHLDANGLYTGQFTTFALCGFVRAQGDADSGVDRLWQKKKVEAKQKLRA

SEQ ID NO: 8312 - DNA, 264 bp, Magnaporthe grisea 70-15
  CDS (1)..(264)
atggagaacgacaagggagagatcgtcgacctttacgtcccccgcaagtgctcggccaccaaccgcatcatcaaggcccaggaccacgcttcggttcagatctccatcgccaaggttgacgagaacggccgtgccgtccagggcgagaaccatgtctacgctctctgcggtttcgtccgcgccatgggcgagggtgacgatgccctgaacaggctgacccagagggacggtctcctcaagaacgtcttcagcgctgtccgataa

SEQ ID NO: 8313 - protein, 87 aa, Magnaporthe grisea 70-15
MENDKGEIVDLYVPRKCSATNRIIKAQDHASVQISIAKVDENGRAVQGENHVYALCGFVRAMGEGDDALNRLTQRDGLLKNVFSAVR

SEQ ID NO: 8314 - DNA, 264 bp, Gibberella zeae PH-1
  CDS (1)..(264)
atggagaacgaccgcggcgagattgtggacctttacgtcccccgcaagtgcagcgccaccaaccgcatcatcaaggccaaggatcacggctctgtccagatctccatcgccaaggttgacgagaacggccgtgccatccagggcgagaaccacgtctacgccctctgcggtttcgtccgagccatgggcgagagcgacgactccctcaaccgactggcccagcgtgacggcctcctcaagagcgtctggagcggacagcgataa

SEQ ID NO: 8315 - protein, 87 aa, Gibberella zeae PH-1
MENDRGEIVDLYVPRKCSATNRIIKAKDHGSVQISIAKVDENGRAIQGENHVYALCGFVRAMGESDDSLNRLAQRDGLLKSVWSGQR

SEQ ID NO: 8316 - DNA, 249 bp, Oryza sativa (japonica cultivar-group)
  CDS (1)..(249)
atgcagaacgaggagggtcagatggtggacctctacgtccccaggaagtgctcgaccaccaacaggatcatcaccgccaaggaccatgcctcggtccagatcaacattgggcatgtggatgagaatgggctgtacgatggccgcttcaccacgtttgctctctctgggttcatccgtgctcagggagacgccgacagtgctctggataggctgtggcagaagaggaaggctgaggtcaagcagcagtag

SEQ ID NO: 8317 - protein, 82 aa, Oryza sativa (japonica cultivar-group)
MQNEEGQMVDLYVPRKCSTTNRIITAKDHASVQINIGHVDENGLYDGRFTTFALSGFIRAQGDADSALDRLWQKRKAEVKQQ

SEQ ID NO: 8318 - DNA, 264 bp, Yarrowia lipolytica CLIB122
  CDS (1)..(264)
atggaaaacgatcagggtgtccttgtcgagctttacgttccccgaaagtgctctgccactaaccgaatcatcaaggctgatgaccactcctccgtccagatcaacgtggccaaggttgacgagaacggccgagccattgccggtgacaacatcacctacgctctgtccggctacgtccgatctcgagctgaggctgacgactctctcaaccgactcacccagcaggacggtatcctcaagaacgtctggtcttactcccgataa

SEQ ID NO: 8319 - protein, 87 aa, Yarrowia lipolytica CLIB122
MENDQGVLVELYVPRKCSATNRIIKADDHSSVQINVAKVDENGRAIAGDNITYALSGYVRSRAEADDSLNRLTQQDGILKNVWSYSR

SEQ ID NO: 8320 - DNA, 267 bp, Aspergillus nidulans FGSC A4
  CDS (1)..(267)
atggagaacgagaagggagaaatcgtcgatctctacgtcccccgcaagtgcagcgccaccaaccgcatcattaaggccaacgaccacgcctcggtccagatctccatcggcaaggtcgacgagaacggccgctacaccggcgagaaccagacctacgctctgtgcggcttcatccgtgcccgcggcgagagcgacgactcgctcaaccgtcttacccagcgcgacggctacatccgtaacgtgtggactgctagccgccagcggtaa

SEQ ID NO: 8321 - protein, 88 aa, Aspergillus nidulans FGSC A4
MENEKGEIVDLYVPRKCSATNRIIKANDHASVQISIGKVDENGRYTGENQTYALCGFIRARGESDDSLNRLTQRDGYIRNVWTASRQR

SEQ ID NO: 8322 - DNA, 360 bp, Ustilago maydis 521
  CDS (1)..(360)
atggagaacgaccgcccagcattgctcgacacggattggtggttgatagaattctgcagcagttcggaccttgcattcacaccatcgcctgtttccggtgaccttgtcgacctttacgtgccccgaaagtgcgctgccactggccgcatcatcgaggcgaaggaccacgcttccgtccagatcgccgtcgctgacgtcgacgccaacggtcgcatgattcctggccagtcgaccaacttccccctgtctggcttcgttcgccagctcggtgagggtgacgactcgcttaaccgtcttgcccagaaggagggtccaatatcacatgcgggtggatcagacacaaaggaggaaaggacatga

SEQ ID NO: 8323 - protein, 119 aa, Ustilago maydis 521
MENDRPALLDTDWWLIEFCSSSDLAFTPSPVSGDLVDLYVPRKCAATGRIIEAKDHASVQIAVADVDANGRMIPGQSTNFPLSGFVRQLGEGDDSLNRLAQKEGPISHAGGSDTKEERT

SEQ ID NO: 8324 - DNA, 252 bp, Drosophila melanogaster
  CDS (1)..(252)
atggagaacgacgccggtgagaatgttgatctgtacgtgccccgcaaatgctcggcgtccaacaggatcatccacgccaaggatcacgcctccgtgcagctgagcatcgtggatgtggaccccgagaccggtcgccagaccgacggttccaagacctacgccatctgcggcgagatccgtcgcatgggcgagtccgacgactgcatcgtgcgtctggccaagaaggacggcatcattaccaagaacttctaa

SEQ ID NO: 8325 - protein, 83 aa, Drosophila melanogaster [sequence omitted]

SEQ ID NO: 8326 - DNA, 246 bp, Zea mays
  CDS (1)..(246)
atgcagaacgaggagggtaagactgtggacctctatgttcccaggaagtgctcggccacaaacaggatcatcactgccaaggaccatgcctctgtccagatcaacattggccacttggatgcgaatggcctgtatgatggtcacttcacaacatttgctctctctgggtttgtccgtgctcagggcgatgcagacagctccttggacaggctgcggcagaagaagaaggctgatatcaagcagtag

SEQ ID NO: 8327 - protein, 81 aa, Zea mays
MQNEEGKTVDLYVPRKCSATNRIITAKDHASVQINIGHLDANGLYDGHFTTFALSGFVRAQGDADSSLDRLRQKKKADIKQ

SEQ ID NO: 8328 - DNA, 246 bp, Medicago truncatula
  CDS (1)..(246)
atgcagaacgaagaaggccaaatcaccgaactctacattcctagaaaatgttctgctacaaatcgattgattactgccaaggatcacgcttcagttcagattaacgttggtcatttggatgaaagcggtgtctacaatggtcaattttccacttttgccctttgtggcttcactcgcgcacagggagatgctgacagtggaattgatcgcttatggcagaaaaagaaagctgaaattaagcaatag

SEQ ID NO: 8329 - protein, 81 aa, Medicago truncatula
MQNEEGQITELYIPRKCSATNRLITAKDHASVQINVGHLDESGVYNGQFSTFALCGFTRAQGDADSGIDRLWQKKKAEIKQ

SEQ ID NO: 8330 - DNA, 360 bp, Oryza sativa
  CDS (1)..(360)
atgcagaacgaggagggtcagatggtggacctctacgtccccaggaagtgctcgaccaccaacaggatcatcaccgccaaggaccatgcctcggtccagatcaacattgggcatgtggatgagaatgggctgtacgatggccgcttcaccacgtttgctctctctgggttcatccgtgctcagggagacgccgacagtgctctggataggctgtggcagaagaggaaggctgagctacttgatacaatgcctgttatttcagctggtactctgaaagctttaaggcttgactttcctggggtaaatcctgataatgtgccatccgagttgaagctttttatcacaaaatctgtttcttga

SEQ ID NO: 8331 - protein, 119 aa, Oryza sativa
MQNEEGQMVDLYVPRKCSTTNRIITAKDHASVQINIGHVDENGLYDGRFTTFALSGFIRAQGDADSALDRLWQKRKAELLDTMPVISAGTLKALRLDFPGVNPDNVPSELKLFITKSVS

SEQ ID NO: 8332 - DNA, 243 bp, Anopheles gambiae
  CDS (1)..(243)
atggagaacgatgctggagagtttgttgatctgtactgcccccgcaagtgctcttcgagcaaccgcatcatccacgctaaggatcatgcctccatccagatcaacatcgtcgacgtagacccggagactggccgcatgctggacacctccaaggtgtacgccatctgcggtgagatccgccgtatgggcgaatcggacgattgcatcgttcgtctggccaagaaggacggtatcctgtcctga

SEQ ID NO: 8333 - protein, 80 aa, Anopheles gambiae
MENDAGEFVDLYCPRKCSSSNRIIHAKDHASIQINIVDVDPETGRMLDTSKVYAICGEIRRMGESDDCIVRLAKKDGILS

SEQ ID NO: 8334 - DNA, 270 bp, Giardia lamblia
  CDS (1)..(270)
atgcaatcggatgacatcgggatgaagaacagcagcggagtggtcgtagacgcatacataccgcgcaagtgttcagcaacaaataggctcattggcccgaaggaccacgccgcagtccagctgagcgtcgccagggttaatgataagggcaagatgatcgagaacaactatgttacattcgccttctgcggggccatccgcagccgaggcggagtggactcggccttcatgctcctcgcccaggagcacggtctcatggaacgcctttag

SEQ ID NO: 8335 - protein, 89 aa, Giardia lamblia
MQSDDIGMKNSSGVVVDAYIPRKCSATNRLIGPKDHAAVQLSVARVNDKGKMIENNYVTFAFCGAIRSRGGVDSAFMLLAQEHGLMERL

SEQ ID NO: 8336 - DNA, 258 bp, Branchiostoma belcheri tsingtaunese
  CDS (1)..(258)
atgcagaacgacgcaggtgaagttgtggatctgtacatccctcgcaagtgctcatcaaccaaccgcatcattggtgccaaggatcatgcctcaatccagatcaactttgctgaggttgacccgaccactggccgcatgacaggacagtacaagacttacgccatctgtggctacatcaggcaaatgggagagtccgatgactgtctgaagcgcctggcaataaaggataaaatcattgacgcaaaaatggatgcctag

SEQ ID NO: 8337 - protein, 85 aa, Branchiostoma belcheri tsingtaunese
MQNDAGEVVDLYIPRKCSSTNRIIGAKDHASIQINFAEVDPTTGRMTGQYKTYAICGYIRQMGESDDCLKRLAIKDKIIDAKMDA

SEQ ID NO: 8338 - DNA, 252 bp, Ceratitis capitata
  CDS (1)..(252)
atggagaacgacgccggtgaatctgttgatttgtactgcccacgtaaatgttctgcatccaacagaattatccacgctaaggatcatgcttcagtgcaattaaacattgttgatgttgaccctgaaaccggccgtatgactgttggttcaaagacctacgctatctgcggtgagatccgtcgtatgggcgaatccgatgattgtattgtgcgtttggccaagaaagatggtttgatcaccaaggctttctaa

SEQ ID NO: 8339 - protein, 83 aa, Ceratitis capitata
MENDAGESVDLYCPRKCSASNRIIHAKDHASVQLNIVDVDPETGRMTVGSKTYAICGEIRRMGESDDCIVRLAKKDGLITKAF

SEQ ID NO: 8340 - DNA, 249 bp, Plasmodium falciparum
  CDS (1)..(249)
atgtttaacgatcaaaaagttttagtcgatatttatatacccaggaagtgctcagctacatcacgacttattccggccaaggaacatggagctgtacaaataaatgttggaatggttgatgctaatggagtttacaacggtaaaaccgaaaccttcgctatctctggtcatgtcagacaaaatggagaatcagatgcttgcttaaatagacttatgtatgaaaagaaattattatcctttcaaaactaa

SEQ ID NO: 8341 - protein, 82 aa, Plasmodium falciparum
MFNDQKVLVDIYIPRKCSATSRLIPAKEHGAVQINVGMVDANGVYNGKTETFAISGHVRQNGESDACLNRLMYEKKLLSFQN

SEQ ID NO: 8342 - DNA, 249 bp, Arabidopsis thaliana
  CDS (1)..(249)
atggagaacgacgcaggtcaggtcacagagctctacattccaagtaaatgctcggcaacaaacagaatgatcacatcaaaggatcatgcttcagttcagcttaacattggtcatcttgatgctaatggtctctacactggccaattcaccacttttgctctctgcggatttgtccgtgctcagggagacgcagacagtggcgtggacaggctctggcagaagaagaaggtcgaagctaaacaacagtga

SEQ ID NO: 8343 - protein, 82 aa, Arabidopsis thaliana
MENDAGQVTELYIPSKCSATNRMITSKDHASVQLNIGHLDANGLYTGQFTTFALCGFVRAQGDADSGVDRLWQKKKVEAKQQ

SEQ ID NO: 8344 - DNA, 252 bp, Ictalurus punctatus
  CDS (1)..(252)
atgcaaaacgacgctggagaattcgtggacctgtacgtgcctcgtaaatgctctgctagcaacagaattattggtgcaaaggaccatgcctccatccagatcaacattgctgaggttgacaaggtaacaggcaggttcaatggccagttcaagacctatgccatctgtggtgctattcgcagaatgggggaggctgatgactctctcctgagactggcaaagaacgactccattgtgtcaaagaacatataa

SEQ ID NO: 8345 - protein, 83 aa, Ictalurus punctatus
MQNDAGEFVDLYVPRKCSASNRIIGAKDHASIQINIAEVDKVTGRFNGQFKTYAICGAIRRMGEADDSLLRLAKNDSIVSKNI

SEQ ID NO: 8346 - DNA, 252 bp, Spodoptera frugiperda
  CDS (1)..(252)
atgcagaacgacgccggagaattcgttgacttgtactgcccgaggaagtgctcggccagcaaccgtctgatccacgccaaggaccacgcgtccgtgcagctggtgatcgcggacgtggaccccgccacgggccgcgccgccgacacctccaagatgtacgtggtgtgcggagccatccgccgcatgggggagtccgacgactgcatcgtcaggctcaccaagaaggacggcatattggctaagaactactga

SEQ ID NO: 8347 - protein, 83 aa, Spodoptera frugiperda
MQNDAGEFVDLYCPRKCSASNRLIHAKDHASVQLVIADVDPATGRAADTSKMYVVCGAIRRMGESDDCIVRLTKKDGILAKNY

SEQ ID NO: 8348 - DNA, 249 bp, Arabidopsis thaliana
  CDS (1)..(249)
atggagaacgacgcaggtcaggtcacagagctctacattccaaggaaatgctcggcaacaaacagaatgatcacatcaaaggatcatgcttcagttcagcttaacattggtcatcttgatgctaatggtctctacactggccaattcaccacttttgctctctgcggatttgtccgtgctcagggagacgcagacagtggcgtggacaggctctggcagaagaagaaggtcgaagctaaacaacagtga

SEQ ID NO: 8349 - protein, 82 aa, Arabidopsis thaliana
MENDAGQVTELYIPRKCSATNRMITSKDHASVQLNIGHLDANGLYTGQFTTFALCGFVRAQGDADSGVDRLWQKKKVEAKQQ

SEQ ID NO: 8350 - DNA, 264 bp, Ashbya gossypii
  CDS (1)..(264)
atggaaaacgacaagggtcaactagttgaactatacgttccaagaaagtgttctgccaccaacagaatcatcaaggctaaggaccacggttccgtgcagatcaacattgcccaggtcgacgagaacggccacgccgtcccaggtgagtacatcacatacgccctatccggctacgtcagagccagaggtgaggccgacgactccatgaacaggctagctcaaaaggacggcttgttgaagaacgtctggagctactcccgttaa

SEQ ID NO: 8351 - protein, 87 aa, Ashbya gossypii
MENDKGQLVELYVPRKCSATNRIIKAKDHGSVQINIAQVDENGHAVPGEYITYALSGYVRARGEADDSMNRLAQKDGLLKNVWSYSR

SEQ ID NO: 8352 - DNA, 267 bp, Aspergillus fumigatus
  CDS (1)..(267)
atggagaacgagaagggagagatcgttgatctctacgtcccccgcaagtgcagcgccaccaaccgcatcatcaaggccaacgaccacgcctccgtccagatctccatcgccaaggttgacgagaacggtcgctacaccggcgagaaccagagctacgccctctgcggtttcatccgtgcccgtggtgagagcgatgactcgctgaaccgcctctgccagcgtgacggctacatccgcaacgtctggtccgccagccgtcagcggtaa

SEQ ID NO: 8353 - protein, 88 aa, Aspergillus fumigatus
MENEKGEIVDLYVPRKCSATNRIIKANDHASVQISIAKVDENGRYTGENQSYALCGFIRARGESDDSLNRLCQRDGYIRNVWSASRQR

SEQ ID NO: 8354 - DNA, 267 bp, Caenorhabditis elegans
  CDS (1)..(267)
atgcaaaacgacgccggacaaaccgtcgagctttacgttccacgcaagtgctcttcgtccaaccgcatcatcggaccaaaggaccacgcttccgtccaaatcgatttcgtcgatgtcgacccagagactggccgcatgatcccaggaaagtctacccgctacgccatctgtggagctatccgccgcatgggagaatccgacgacgctatcttgagacttgcccagaaggacggactcgtgccaagagatgatgttaagtccaactga

SEQ ID NO: 8355 - protein, 88 aa, Caenorhabditis elegans
MQNDAGQTVELYVPRKCSSSNRIIGPKDHASVQIDFVDVDPETGRMIPGKSTRYAICGAIRRMGESDDAILRLAQKDGLVPRDDVKSN

SEQ ID NO: 8356 - DNA, 264 bp, Candida albicans
  CDS (1)..(264): transl_table=12
atggaaaacgataaaggtcaattagttgaattatacgtcccaagaaaatgttctgctaccaacagaatcattaaagccaaagatcacgcttctgttcaaatctcaattgctaaagttgatgaagacggtagagctattgctggtgaaaacatcacttacgctttaagtggttacgttagaggtagaggtgaagctgatgactcattaaacagattggctcaacaagacggtttattgaagaacgtctggtcttactctcgttaa

SEQ ID NO: 8357 - protein, 87 aa, Candida albicans
MENDKGQLVELYVPRKCSATNRIIKAKDHASVQISIAKVDEDGRAIAGENITYALSGYVRGRGEADDSLNRLAQQDGLLKNVWSYSR

SEQ ID NO: 8358 - DNA, 264 bp, Candida glabrata
  CDS (1)..(264)
atggagaacgataagggtcaattagtcgaactttacattccaagaaagtgttctgctaccaacagaatcatcaaggccgatgaccacgcttctgttcaaatcaacatcgctaaggttgatgaagaaggccgtgccatcccaggtgaatacatcacttacgctctatccggtaacgttagagctagaggtgaatctgacgactctttgaaccgtttggctcaaaacgacggtttgttgaagaacgtctggtcttactcccgttaa

SEQ ID NO: 8359 - protein, 87 aa, Candida glabrata
MENDKGQLVELYIPRKCSATNRIIKADDHASVQINIAKVDEEGRAIPGEYITYALSGNVRARGESDDSLNRLAQNDGLLKNVWSYSR

SEQ ID NO: 8360 - DNA, 332 bp, Cyanophora paradoxa
  CDS (1)..(249)
atgcagaacgacgagggcaagattgtggacctgtacatcccgcggaagtgctccgcgaccaaccggctgatctcggccacggaccacgccgccgtccagatcaacgtcggccacgttgacccgaactctggcctgtacactggtgactacaccacgttcgccctgtgcggcttcgttcgcagcatgggcgagtcggacgccgcgctcaaccgcctgtgcgtgaagcacgggctggcgaaggccatttaagcagccttcaacattgtgtcccgtttcttggaggatgtaacaatgacacgaatgccccccctttcaaaaaaaaaaaaaaaaaa

SEQ ID NO: 8361 - protein, 82 aa, Cyanophora paradoxa
MQNDEGKIVDLYIPRKCSATNRLISATDHAAVQINVGHVDPNSGLYTGDYTTFALCGFVRSMGESDAALNRLCVKHGLAKAI

SEQ ID NO: 8362 - DNA, 264 bp, Kluyveromyces lactis
  CDS (1)..(264)
atggaaaacgataagggtcaattagtcgaactttacgttccaagaaagtgttctgctaccaacagaatcatcaaggccaaggaccactcctccgtccaaatcaacatcgctcaagtcgatgaagaaggtcgtgccatcccaggcgaatacgttacctacgctttgtctggttacatcagagccagaggtgaagctgatgactctttgaacagattggctcaacaagacggtttgttgaagaacgtctggagctactcccgttaa

SEQ ID NO: 8363 - protein, 87 aa, Kluyveromyces lactis
MENDKGQLVELYVPRKCSATNRIIKAKDHSSVQINIAQVDEEGRAIPGEYVTYALSGYIRARGEADDSLNRLAQQDGLLKNVWSYSR

SEQ ID NO: 8364 - DNA, 246 bp, Zea mays
  CDS (1)..(246)
atgcagaacgaggagggtaagacggtggacctctacgtccccaggaagtgctcggccacgaataggatcatcactgccaaggatcatgcctctgtccagatcaacattggccacttggatgcgaatggcctgtacgatggtcacttcaccacgtttgctctctctgggtttgtccgtgctcagggtgatgctgacagttcgttggacaggctgtggcagaagaagaaggctgagatcaagcagtag

SEQ ID NO: 8365 - protein, 81 aa, Zea mays
MQNEEGKTVDLYVPRKCSATNRIITAKDHASVQINIGHLDANGLYDGHFTTFALSGFVRAQGDADSSLDRLWQKKKAEIKQ

SEQ ID NO: 8366 - DNA, 264 bp, Neurospora crassa
  CDS (1)..(264)
atggagaacgatcgcggcgaaattgtcgacctttacgtcccccgcaagtgctctgcgacgggccgcatcatcaagtccaaggaccacggttcttgccagatcaccatcgccaaggtcgacgagaacggccgtgccatccagggcgagaacatcatctacgctctctccggcttcgttcgcgccatgggcgagtctgacgactccctcaaccgccttgcccagcgcgatggtctcctcaaggccgtctggaacccccagcgctaa

SEQ ID NO: 8367 - protein, 87 aa, Neurospora crassa
MENDRGEIVDLYVPRKCSATGRIIKSKDHGSCQITIAKVDENGRAIQGENIIYALSGFVRAMGESDDSLNRLAQRDGLLKAVWNPQR

SEQ ID NO: 8368 - DNA, 249 bp, Oryza sativa
  CDS (1)..(249)
atgcagaacgaggagggtcagatggtggacctctacgtccccaggaagtgctcggccacgaacaggatcatcaccgccaaggaccacgcctcggtccagatcaacattgggcatgtggatgagaatgggctgtacgatggccgcttcaccacctttgctctctctgggttcatccgtgctcagggagatgctgacagtgctctggataggctgtggcagaagaggaaggctgaggtcaagcagcagtag

SEQ ID NO: 8369 - protein, 82 aa, Oryza sativa
MQNEEGQMVDLYVPRKCSATNRIITAKDHASVQINIGHVDENGLYDGRFTTFALSGFIRAQGDADSALDRLWQKRKAEVKQQ

SEQ ID NO: 8370 - DNA, 264 bp, Schizosaccharomyces pombe
  CDS (1)..(264)
atggaaaacgaggctggacaattggttgacctttacgtccctcgcaagtgctctgccactaaccgcatcatccaagccaaagatcacgcttctgtgcaaatcaacgtttgcgctgttgacgctgaaggtcgccaaattcctggcgagaagaccacctatgctattagtggctttgttcgctccaagggcgagtccgatgactgcattaaccgccttaccacccaagacggattgttggagggtgtctggtcttatcaacgttaa

SEQ ID NO: 8371 - protein, 87 aa, Schizosaccharomyces pombe
MENEAGQLVDLYVPRKCSATNRIIQAKDHASVQINVCAVDAEGRQIPGEKTTYAISGFVRSKGESDDCINRLTTQDGLLEGVWSYQR

SEQ ID NO: 8372 - DNA, 258 bp, Pectinaria gouldii
  CDS (1)..(258)
atgcagaacgaccagggagaaatcgtggatgtatacatccccaggaagtgctctgccacgaacaacattctggctgcaaaggaccatgcatcagtgcagatcaacatggctgagattgacccccaaactggcaggatgactggcaaacagatcacatatgctctgtgtggagagctcaggaggatgggtgaggctgatgacagtgtaaacagattggcaatgaaagacaaaatgctgtcagaggtcttcggtcattga

SEQ ID NO: 8373 - protein, 85 aa, Pectinaria gouldii
MQNDQGEIVDVYIPRKCSATNNILAAKDHASVQINMAEIDPQTGRMTGKQITYALCGELRRMGEADDSVNRLAMKDKMLSEVFGH

SEQ ID NO: 8374 - DNA, 249 bp, Brassica napus
  CDS (1)..(249)
atgcagaacgaagagggtcaggtcacggaactctacattcctaggaaatgctctgctactaaccggatgatcacatcaaaggatcatgcctctgtgcaactcaacattggtcatttagatgctgatggcatctacaccggtcaattcactaccttggctctctgcggttttgttcgtgcccagggagacgctgacagtggggtggacaggctgtggcagaagaagaaggtcgaagccaaacaaatctaa

SEQ ID NO: 8375 - protein, 82 aa, Brassica napus
MQNEEGQVTELYIPRKCSATNRMITSKDHASVQLNIGHLDADGIYTGQFTTLALCGFVRAQGDADSGVDRLWQKKKVEAKQI

SEQ ID NO: 8376 - DNA, 249 bp, Glycine max
  CDS (1)..(249)
atgcagaacgaggaaggacagatcaccgagctttacattcctaggaagtgctctgccacaaaccgattgattaccgctaaggaccatgcttcggttcaggttaacattgggcatgtggatgagaatggcgtctacaatggccatttctccacttttgctctctgcggcttcatacgtgctcagggtgatgctgacagtgccctagatcgcttgtggcagaagaagaaagttgaagttaagcaacagtag

SEQ ID NO: 8377 - protein, 82 aa, Glycine max
MQNEEGQITELYIPRKCSATNRLITAKDHASVQVNIGHVDENGVYNGHFSTFALCGFIRAQGDADSALDRLWQKKKVEVKQQ

SEQ ID NO: 8378 - DNA, 252 bp, Unknown
  Unidentified
  CDS (1)..(249)
atgcagaacgaagagggtcaggtcacggaactctacattcctaggaaatgctctgctactaaccggatgatcacatcaaaggatcatgcctctgtgcaactcaacattggtcatttagatgctgatggcatctacaccggtcaattcactaccttggctctctgcggttttgttcgtgcccagggagacgctgacagtggggtggacaggctgtggcagaagaagaaggtcgaagccaaacaaatctaaaga

SEQ ID NO: 8379 - protein, 82 aa, Unknown; identical to SEQ ID NO: 8375
  Unidentified

SEQ ID NO: 8380 - DNA, 249 bp, Unknown
  Unidentified
  CDS (1)..(246)
atgcagaacgaggtgggtgatatggtggacctctatgtcccaaggaagtgctctgccaccaacaggatcataactgccaaggaccatgcctctgtccagatcaacatcgggcatgtggatgcgaatggactgtataatggcagtttcaccacgtttgccctctctggattcgtccgcgcccagggtgatgctgatggttctttggacaggctctggcagcagaagagggctgagatcaagcagtagatg

SEQ ID NO: 8381 - protein, 81 aa, Unknown; identical to SEQ ID NO: 8303
  Unidentified

SEQ ID NO: 8382 - DNA, 252 bp, Unknown
  Unidentified
  CDS (1)..(249)
atgcagaacgaggaaggacagatcaccgagctttacattcctaggaagtgctctgccacaaaccgattgattaccgctaaggaccatgcttcggttcaggttaacattgggcatgtggatgagaatggcgtctacaatggccatttctccacttttgctctctgcggcttcatacgtgctcagggtgatgctgacagtgccctagatcgcttgtggcagaagaagaaagttgaagttaagcaacagtagaca

SEQ ID NO: 8383 - protein, 82 aa, Unknown; identical to SEQ ID NO: 8377
  Unidentified

SEQ ID NO: 8384 - DNA, 249 bp, Unknown
  Unidentified
  CDS (1)..(246)
atgcagaacgaggagggtaagactgtggacctctatgtccccaggaagtgctcggccacaaacaggatcatcactgccaaggaccatgcctctgtccagatcaacattggccacttggatgcgaatggcctgtatgatggtcacttcacaacgtttgctctctctgggtttgtccgtgctcagggcgacgcagacagctccttggacaggttgtggcagaagaagaaggttgatatcaagcagtagatt

SEQ ID NO: 8385 - protein, 81 aa, Unknown; identical to SEQ ID NO: 8301
  Unidentified

SEQ ID NO: 8386 - DNA, 249 bp, Brassica napus
  CDS (1)..(249)
atgcagaacgaagagggtcagatcacagaactatacgttcctaggaaatgctctgctactaaccggatgatcacatcaaaggatcatgcctctgttcagctcaacattgggcatttagatgctgatggcatctacaccggacagttcactacctttgctctctgcggctttgttcgtgcccagggagatgcagacagtggcgtggacaggttgtggcagaagaagaaggtcgaagccaaacaaatctaa

SEQ ID NO: 8387 - protein, 82 aa, Brassica napus
MQNEEGQITELYVPRKCSATNRMITSKDHASVQLNIGHLDADGIYTGQFTTFALCGFVRAQGDADSGVDRLWQKKKVEAKQI

SEQ ID NO: 8388 - DNA, 249 bp, Brassica napus
  CDS (1)..(249)
atgcaaaacgaagaaggtgtcgtcactgagctatacattccgaggaaatgctcggccacaaacagattgatcacatcaaaggatcacgcctctgttcagcttaacattggtcatcttgatgccgatggtatctacactggccagttcaccacccttgctctctgcgggtttgtccgtgctcagggagacgcagacagtggcgtcgacaggctctggcagaagaagaaggtcgaaaccaaacaacagtga

SEQ ID NO: 8389 - protein, 82 aa, Brassica napus
MQNEEGVVTELYIPRKCSATNRLITSKDHASVQLNIGHLDADGIYTGQFTTLALCGFVRAQGDADSGVDRLWQKKKVETKQQ

SEQ ID NO: 8390 - DNA, 249 bp, Brassica napus
  CDS (1)..(249)
atgcaaaacgaagaaggtgtcgtcactgagctatacattccaaggaaatgctcggccacaaacagattgatcacatcaaaggatcacgcctctgttcagcttaacattggtcatcttgatgccgatggtatctacactggccagttcaccacccttgctctctgcgggtttgtccgtgctcagggagacgcagacagtggcgtcgacaggctctggcagaagaagaaggtcgaaaccaaacaacagtga

SEQ ID NO: 8391 - protein, 82 aa, Brassica napus; identical to SEQ ID NO: 8389

SEQ ID NO: 8392 - DNA, 249 bp, Brassica napus
  CDS (1)..(249)
atgcagaacgaggaaggagtcgtcacagagctatacattccaaggaaatgctcggctacaaacagattgatcacatcaaaggatcatgcatctgttcagcttaacattggccatcttgatgccgatggtatctacactggacagttcaccacacttgcgctctgcggtttcgtccgtgctcagggagacgcagacagtggcgtggacaggctctggcagaagaagaaggtcgaaaccaaacaactttga

SEQ ID NO: 8393 - protein, 82 aa, Brassica napus
MQNEEGVVTELYIPRKCSATNRLITSKDHASVQLNIGHLDADGIYTGQFTTLALCGFVRAQGDADSGVDRLWQKKKVETKQL

SEQ ID NO: 8394 - DNA, 249 bp, Brassica napus
  CDS (1)..(249)
atgcagaacgaagagggtcagatcacagaactatacgtccctaggaaatgctctgctactaaccggatgatcacatcaaaggatcacgcctctgttcagctcaacattgggcatttagatgctgatggcatctacactggacagttcaccacctttgctctctgcggttttgttcgcgcccagggagatgcagacagtggcgtggacaggctgtggcagaagaagaaggtcgaagccaaacaaatctaa

SEQ ID NO: 8395 - protein, 82 aa, Brassica napus; identical to SEQ ID NO: 8387

SEQ ID NO: 8396 - DNA, 249 bp, Brassica napus
  CDS (1)..(249)
atgcagaacgaagagggtcaggtcacggaactctacattcctaggaaatgctctgctactaaccggatgatcacatcaaaggaccatgcctcggtgcaactcaacattggtcatttagatgctgatggcatctacaccggtcaattcactaccttggctctctgcggttttgttcgtgcccagggagacgctgacagtggagtggacaggctgtggcagaagaagaaggtcgaagccaaacaaatctaa

SEQ ID NO: 8397 - protein, 82 aa, Brassica napus; identical to SEQ ID NO: 8375

SEQ ID NO: 8398 - DNA, 249 bp, Glycine max
  CDS (1)..(249)
atgcagaacgaggaaggacagatcaccgagctttacattcctaggaagtgctctgccacaaaccgattgattaccgctaaggaccatgcttcggttcaggttaacattgggcatgtggatgagaatggcgtctacaatggccatttctccacttttgctctctgcggcttcatccgtgctcagggtgatgctgacagtgccctagatcgcttgtggcagaagaagaaagttgaagttaagcaacagtag

SEQ ID NO: 8399 - protein, 82 aa, Glycine max; identical to SEQ ID NO: 8377

SEQ ID NO: 8400 - DNA, 249 bp, Glycine max
  CDS (1)..(249)
atgcagaacgaggaaggacagatcactgagctttacattcctaggaagtgctccgccacaaacagattgattaccgctaaggaccatgcttcggttcagatcaacattgggcatgtggatgagaatggcgtctacaatggccatttctccacttttgccctctgcggattcatccgtgctcagggtgatgctgacagtgctctagaccgcttgtggcagaagaagaaagttgaagttaagcaacagtag

SEQ ID NO: 8401 - protein, 82 aa, Glycine max
MQNEEGQITELYIPRKCSATNRLITAKDHASVQINIGHVDENGVYNGHFSTFALCGFIRAQGDADSALDRLWQKKKVEVKQQ

SEQ ID NO: 8402 - DNA, 249 bp, Glycine max
  CDS (1)..(249)
atgcagaacgaggtaggacagatcaccgagctttacattcctaggaagtgctctgccacaaaccgattgattaccgctaaggaccatgcttcggttcaggttaacattgggcatgtggatgagaatggcgtctacaatggccatttctccacttttgctctctgcggcttcatacgtgctcagggtgatgctgacagtgccctagatcgcttgtggcagaagaagaaagttgaagctaagcaacagtag

SEQ ID NO: 8403 - protein, 82 aa, Glycine max
MQNEVGQITELYIPRKCSATNRLITAKDHASVQVNIGHVDENGVYNGHFSTFALCGFIRAQGDADSALDRLWQKKKVEAKQQ

SEQ ID NO: 8404 - DNA, 249 bp, Glycine max
  CDS (1)..(249)
atgcagaacgaggaaggacagatcaccgagctttacattcctaggaagtgctctgccacaaaccgattgattaccgctaaggaccatgcttcggttcaggttaacattgggcatgtggatgagaatggcgtctacaatgcccatttctccacttttgctctctgcggcttcatacgtgctcagggtgatgctgacagtgccctagatcgcttgtggcagaagaagaaagttgaagttaagcaacagtag

SEQ ID NO: 8405 - protein, 82 aa, Glycine max
MQNEEGQITELYIPRKCSATNRLITAKDHASVQVNIGHVDENGVYNAHFSTFALCGFIRAQGDADSALDRLWQKKKVEVKQQ

SEQ ID NO: 8406 - DNA, 249 bp, Glycine max
  CDS (1)..(249)
atgcagaacgaggaaggacagatcaccgagctttacattcctaggaagtgctctgccacaaaccgattgattaccgctaaggaccatgcttcggttcaggttaacattgggcatgtggatgagaatggcgtctacaatggccatttctccacttttgctctctgcggcttcatacgtgctcagggtgatgctgacagtgccctacatcgcttgtggcagaagaagaaagttgaagttaagcaacagtag

SEQ ID NO: 8407 - protein, 82 aa, Glycine max
MQNEEGQITELYIPRKCSATNRLITAKDHASVQVNIGHVDENGVYNGHFSTFALCGFIRAQGDADSALHRLWQKKKVEVKQQ

SEQ ID NO: 8408 - DNA, 246 bp, Linum usitatissimum
  CDS (1)..(246)
atgcagaacgaagaaggtaacaacgtggatctctacatcccgaggaaatgctccgccactaacaggctgattacctcgaaggaccacgcctccgtccagatcaatgttggacatttggacgctaacggccgttacaccggccagttcaccacctttgctctctgtggattcgtccgtgctcagggtgatggagacagcggccttgacaggctgtggcagaagaaaaaggcagagcttcgccagtga

SEQ ID NO: 8409 - protein, 81 aa, Linum usitatissimum
MQNEEGNNVDLYIPRKCSATNRLITSKDHASVQINVGHLDANGRYTGQFTTFALCGFVRAQGDGDSGLDRLWQKKKAELRQ

SEQ ID NO: 8410 - DNA, 246 bp, Linum usitatissimum
  CDS (1)..(246)
atgcagaacgaagagggtaacaacgtggatctctacatcccgaggaaatgctccgccactaacaggctgattacctcgaaggaccacgcctccgtccagatcaatgttggacatttggacgctaacggccgttacaccggccagttcaccacctttgccctctgcggattcgtccgtgctcagggtgatggagacagcggccttgacaggctgtggcagaagaagaaagccgaactcaggcaatga

SEQ ID NO: 8411 - protein, 81 aa, Linum usitatissimum; identical to SEQ ID NO: 8409

SEQ ID NO: 8412 - DNA, 246 bp, Linum usitatissimum
  CDS (1)..(246)
atgcagaacgaagaaggtcagaacgtggatctctacatcccgaggaaatgctcggccaccaacaggctgattacctccaaggatcacgcttccgtccagattaacgtcggtcatttggatgctaacggccgttacactggccagttcactacttttgctctctgtggattcgtccgtgctcagggtgatggagacagtggactcgacaggctgtggcaaaagaaaaaggcagagcttcgccagtga

SEQ ID NO: 8413 - protein, 81 aa, Linum usitatissimum
MQNEEGQNVDLYIPRKCSATNRLITSKDHASVQINVGHLDANGRYTGQFTTFALCGFVRAQGDGDSGLDRLWQKKKAELRQ

SEQ ID NO: 8414 - DNA, 246 bp, Linum usitatissimum
  CDS (1)..(246)
atgcagaacgaagaaggtaacaacgtggatctctacatcccgaggaaatgctccgccactaacaggctgattacctcgaaggaccacgcctccgtccagatcaatgttggacatttggacgcgaacggccgttacaccggccagttcaccacctttgctctctgtggattcgtccgtgctcagggtgatggagacagcggccttgacaggctgtggcagaagaagaaagccgagctccggcaatga

SEQ ID NO: 8415 - protein, 81 aa, Linum usitatissimum; identical to SEQ ID NO: 8409

SEQ ID NO: 8416 - DNA, 249 bp, Triticum aestivum
  CDS (1)..(249)
atgcagaacgaggtgggtgacatggtggacctctacatccccaggaagtgctcggccaccaacaggatcatcacggccaaggaccacgcctctgtccagatcaacattggtcacgttgatgagaatggcctctatgatggccgcttcaccacctttgctctctctgggtttgtccgtgctcagggtgatgctgatggctccctggacaggctaaggcacccgaggacgcctgagatcaagcagctctag

SEQ ID NO: 8417 - protein, 82 aa, Triticum aestivum
MQNEVGDMVDLYIPRKCSATNRIITAKDHASVQINIGHVDENGLYDGRFTTFALSGFVRAQGDADGSLDRLRHPRTPEIKQL

SEQ ID NO: 8418 - DNA, 249 bp, Triticum aestivum
  CDS (1)..(249)
atgcagaacgaggtgggtgacatggtggacctctacatccccaggaagtgctcggccaccaacaggatcatcacggccaaggaccacgcctctgtccagatcaacattggtcacgttgatgagaatggcctctatgatggccgcttcaccacctttgctctctctgggtttgtccgtgctcagggtgatgctgatggctccctggacaggctgtggcagaagaggaaggctgagatcaagcagctctag

SEQ ID NO: 8419 - protein, 82 aa, Triticum aestivum
MQNEVGDMVDLYIPRKCSATNRIITAKDHASVQINIGHVDENGLYDGRFTTFALSGFVRAQGDADGSLDRLWQKRKAEIKQL

SEQ ID NO: 8420 - DNA, 243 bp, Zea mays
  CDS (1)..(243)
atgcagaacgaggagggtaagactgtggacctctatgtccccaggaagtgctcggccacaaacaggatcatcactgccaaggaccatgcctctgtccagatcaacattggccacttggatgcgaatggcctgtatgatggtcacttcacaacgtttgctctctctgggtttgtccgtgctcagggcgacgcagacagctccttggacaggctgtggcagaagaaggctgatatcaagcagtag

SEQ ID NO: 8421 - protein, 80 aa, Zea mays
MQNEEGKTVDLYVPRKCSATNRIITAKDHASVQINIGHLDANGLYDGHFTTFALSGFVRAQGDADSSLDRLWQKKADIKQ

SEQ ID NO: 8422 - DNA, 246 bp, Zea mays
  CDS (1)..(246)
atgcagaacgaggagggtaagactgtggacctctatgttcccaggaagtgctcggccacaaacaggatcatcactgccaaggaccatgcctctgtccagatcaacattggccacttggatgcgaatggcctgtatgatggtcacttcacaacatttgctctctctgggtttgtccgtgctcagggcgatgcagacagctccttggacaggctgtggcagaagaagaaggctgatatcaagcagtag

SEQ ID NO: 8423 - protein, 81 aa, Zea mays; identical to SEQ ID NO: 8307

SEQ ID NO: 8424 - DNA, 246 bp, Zea mays
  CDS (1)..(246)
atgcagaacgaggagggtaagactgtggacctctatgtccccaggaagtgctcggccacaaacaggatcatcactgccaaggaccatgcctctgtccagatcaacattggccacttggatgcgaatggcctgtatgatggtcacttcacaacgtttgctctctctgggtttgtccgtgctcagggcgacgcagacagctccttggacaggctgtggcagaagaagaaggctgatatcaagcagtag

SEQ ID NO: 8425 - protein, 81 aa, Zea mays; identical to SEQ ID NO: 8307

SEQ ID NO: 8426 - DNA, 25 bp, Artificial sequence
  primer
atggaaaacgataagggccaattag

SEQ ID NO: 8427 - DNA, 24 bp, Artificial sequence
  primer
ttaacgtgagtaagaccagacgtt

SEQ ID NO: 8428 - protein, 100 aa, Artificial sequence
  consensus sequence
  Variant (2)..(2): Xaa in position 2 is any amino acid
  Variant (4)..(5): Xaa in position 4 to 5 is any amino acid
  Variant (6)..(32): Xaa in position 6 to 32 is any or no amino acid
  Variant (34)..(37): Xaa in position 34 to 37 is any amino acid
  Variant (40)..(40): Xaa in position 40 is any amino acid
  Variant (50)..(50): Xaa in position 50 is any amino acid
  Variant (52)..(53): Xaa in position 52 to 53 is any amino acid
  Variant (61)..(66): Xaa in position 61 to 66 is any amino acid
  Variant (68)..(73): Xaa in position 68 to 73 is any amino acid
  Variant (74)..(75): Xaa in position 74 to 75 is any or no amino acid
  Variant (77)..(78): Xaa in position 77 to 78 is any amino acid
  Variant (79)..(79): Xaa in position 79 is any or no amino acid
  Variant (81)..(81): Xaa in position 81 is any amino acid
  Variant (84)..(84): Xaa in position 84 is any amino acid
  Variant (86)..(87): Xaa in position 86 to 87 is any amino acid
  Variant (89)..(90): Xaa in position 89 to 90 is any amino acid
  Variant (92)..(93): Xaa in position 92 to 93 is any amino acid
  Variant (95)..(98): Xaa in position 95 to 98 is any amino acid
MXNXXXXXXXXXXXXXXXXXXXXXXXXXXXXXGXXXXLYXPRKCSATNRXIXXKDHASVQXXXXXXDXXXXXXXXGXXXTXALXGXXRXXGXXDXXXXRL

SEQ ID NO: 8429 - protein, 42 aa, Artificial sequence
  protein pattern
  Variant (2)..(3): Xaa in position 2 to 3 is any or no amino acid
  Variant (5)..(5): Xaa in position 5 is any amino acid
  Variant (6)..(7): Xaa in position 6 to 7 is any or no amino acid
  Variant (9)..(10): Xaa in position 9 to 10 is any amino acid
  Variant (11)..(11): Xaa in position 11 is Thr or Val
  Variant (12)..(12): Xaa in position 12 is Asp or Glu
  Variant (15)..(15): Xaa in position 15 is any amino acid
  Variant (21)..(21): Xaa in position 21 is Ala, Ser or Thr
  Variant (22)..(22): Xaa in position 22 is Ser or Thr
  Variant (23)..(23): Xaa in position 23 is Gly or Asn
  Variant (25)..(25): Xaa in position 25 is Ile, Leu or Met
  Variant (27)..(27): Xaa in position 27 is any amino acid
  Variant (28)..(28): Xaa in position 28 is Ala or Ser
  Variant (29)..(29): Xaa in position 29 is any amino acid
  Variant (32)..(32): Xaa in position 32 is Ala, Gly or Ser
  Variant (34)..(34): Xaa in position 34 is any amino acid
  Variant (36)..(36): Xaa in position 36 is Ile, Leu or Val
  Variant (37)..(37): Xaa in position 37 is Asn, Ser or Thr
  Variant (38)..(38): Xaa in position 38 is Ile or Val
  Variant (39)..(39): Xaa in position 39 is Ala, Cys, Gly or Val
  Variant (40)..(40): Xaa in position 40 is any amino acid
  Variant (41)..(41): Xaa in position 41 is Leu or Val
MXXEXXXGXXXXLYXPRKCSXXXRXIXXXDHXSXQXXXXXXD

SEQ ID NO: 8430 - protein, 25 aa, Artificial sequence
  protein pattern
  Variant (2)..(6): Xaa in position 2 to 6 is any amino acid
  Variant (8)..(8): Xaa in position 8 is Ile or Leu
  Variant (9)..(9): Xaa in position 9 is Cys or Ser
  Variant (11)..(11): Xaa in position 11 is Phe, His or Tyr
  Variant (12)..(12): Xaa in position 12 is any amino acid
  Variant (14)..(14): Xaa in position 14 is Ala, Gly, Asn, Gln or Ser
  Variant (15)..(15): Xaa in position 15 is any amino acid
  Variant (16)..(16): Xaa in position 16 is Ala or Gly
  Variant (17)..(17): Xaa in position 17 is Asp or Glu
  Variant (18)..(18): Xaa in position 18 is Ala, Gly or Ser
  Variant (20)..(20): Xaa in position 20 is Ala, Asp, Gly or Ser
  Variant (21)..(21): Xaa in position 21 is Ala, Cys, Gly or Ser
  Variant (22)..(22): Xaa in position 22 is Ile, Leu, Met or Val
  Variant (23)..(23): Xaa in position 23 is any amino acid
GXXXXXAXXGXXRXXXXXDXXXXRL

SEQ ID NO: 8431 - DNA, 9469 bp, Artificial
  plasmid VC-MME354-1QCZ
  5'UTR (2130)..(2294)
  transit_peptide (2295)..(2402)
  CDS (2295)..(2402)
  transit_peptide (2480)..(2548)
  CDS (2480)..(2548)
  CDS (2549)..(2566): adapter
agctttgggcggatcctctagaggacaatcagtaaattgaacggagaatattattcataaaaatacgatagtaacgggtgatatattcattagaatgaaccgaaaccggcggtaaggatctgagctacacatgctcaggttttttacaacgtgcacaacagaattgaaagcaaatatcatgcgatcataggcgtctcgcatatctcattaaagcagggcatgccggtcgagtcaaatctcggtgacgggcaggaccggacggggcggtaccggcaggctgaagtccagctgccagaaacccacgtcatgccagttcccgtgcttgaagccggccgcccgcagcatgccgcggggggcatatccgagcgcctcgtgcatgcgcacgctcgggtcgttgggcagcccgatgacagcgaccacgctcttgaagccctgtgcctccagggacttcagcaggtgggtgtagagcgtggagcccagtcccgtccgctggtggcggggggagacgtacacggtcgactcggccgtccagtcgtaggcgttgcgtgccttccaggggcccgcgtaggcgatgccggcgacctcgccgtccacctcggcgacgagccagggatagcgctcccgcagacggacgaggtcgtccgtccactcctgcggttcctgcggctcggtacggaagttgaccgtgcttgtctcgatgtagtggttgacgatggtgcagaccgccggcatgtccgcctcggtggcacggcggatgtcggccgggcgtcgttctgggctcatggtagactcgacggatccacgtgtggaagatatgaatttttttgagaaactagataagattaatgaatatcggtgttttggttttttcttgtggccgtctttgtttatattgagatttttcaaatcagtgcgcaagacgtgacgtaagtatccgagtcagtttttatttttctactaatttggtcgaatctagattcgacggtatcgataagctcgcggatccctgaaagcgacgttggatgttaacatctacaaattgccttttcttatcgaccatgtacgtaagcgcttacgtttttggtggacccttgaggaaactggtagctgttgtgggcctgtggtctcaagatggatcattaatttccaccttcacctacgatggggggcatcgcaccggtgagtaatattgtacggctaagagcgaatttggcctgtaggatccctgaaagcgacgttggatgttaacatctacaaattgccttttcttatcgaccatgtacgtaagcgcttacgtttttggtggacccttgaggaaactggtagctgttgtgggcctgtggtctcaagatggatcattaatttccaccttcacctacgatggggggcatcgcaccggtgagtaatattgtacggctaagagcgaatttggcctgtaggatccctgaaagcgacgttggatgttaacatctacaaattgccttttcttatcgaccatgtacgtaagcgcttacgtttttggtggacccttgaggaaactggtagctgttgtgggcctgtggtctcaagatggatcattaatttccaccttcacctacgatggggggcatcgcaccggtgagtaatattgtacggctaagagcgaatttggcctgtaggatccgcgagctggtcaatcccattgcttttgaagcagctcaacattgatctctttctcgatcgagggagatttttcaaatcagtgcgcaagacgtgacgtaagtatccgagtcagtttttatttttctactaatttggtcgtttatttcggcgtgtaggacatggcaaccgggcctgaatttcgcgggtattctgtttctattccaactttttcttgatccgcagccattaacgacttttgaatagatacgctgacacgccaagcctcgctagtcaaaagtgtaccaaacaacgctttacagcaagaacggaatgcgcgtgacgctcgcggtgacgccatttcgccttttcagaaatggataaatagccttgcttcctattatatcttcccaaattaccaatacattacactagcatctgaatttcataaccaatctcgatacaccaaatcgaagatctccctggaattcgcataaacttatcttcatagttgccactccaatttgctccttgaatctcctccacccaatacataatccactcctccatcacccacttcactactaaatcaaacttaactctgtttttctctctcctcctttcatttcttattcttccaatcatcgtactccgccatgaccaccgctgtcaccgccgctgtttctttcccctctaccaaaaccacctctctctccgcccgaagctcctccgtcatttcccctgacaaaatcagctacaaaaaggtgattcccaatttcactgtgttttttattaataatttgttattttgatgatgagatgattaatttgggtgctgcaggttcctttgtactacaggaatgtatctgcaactgggaaaatgggacccatcagggcccagatcgcctctgaattccagctgaccaccatggcaattcccggggatcagctcgaatttccccgatcgttcaaacatttggcaataaagtttcttaagattgaatcctgttgccggtcttgcgatgattatcatataatttctgttgaattacgttaagcatgtaataattaacatgtaatgcatgacgttatttatgagatgggtttttatgattagagtcccgcaattatacatttaatacgcgatagaaaacaaaatatagcgcgcaaactaggataaattatcgcgcgcggtgtcatctatgttactagatcgggaattggcatgcaagcttggcactggccgtcgttttacaacgtcgtgactgggaaaaccctggcgttacccaacttaatcgccttgcagcacatccccctttcgccagctggcgtaatagcgaagaggcccgcaccgatcgcccttcccaacagttgcgcagcctgaatggcgaatgctagagcagcttgagcttggatcagattgtcgtttcccgccttcagtttaaactatcagtgtttgacaggatatattggcgggtaaacctaagagaaaagagcgtttattagaataatcggatatttaaaagggcgtgaaaaggtttatccgttcgtccatttgtatgtgcatgccaaccacagggttcccctcgggatcaaagtactttgatccaacccctccgctgctatagtgcagtcggcttctgacgttcagtgcagccgtcttctgaaaacgacatgtcgcacaagtcctaagttacgcgacaggctgccgccctgcccttttcctggcgttttcttgtcgcgtgttttagtcgcataaagtagaatacttgcgactagaaccggagacattacgccatgaacaagagcgccgccgctggcctgctgggctatgcccgcgtcagcaccgacgaccaggacttgaccaaccaacgggccgaactgcacgcggccggctgcaccaagctgttttccgagaagatcaccggcaccaggcgcgaccgcccggagctggccaggatgcttgaccacctacgccctggcgacgttgtgacagtgaccaggctagaccgcctggcccgcagcacccgcgacctactggacattgccgagcgcatccaggaggccggcgcgggcctgcgtagcctggcagagccgtgggccgacaccaccacgccggccggccgcatggtgttgaccgtgttcgccggcattgccgagttcgagcgttccctaatcatcgaccgcacccggagcgggcgcgaggccgccaaggcccgaggcgtgaagtttggcccccgccctaccctcaccccggcacagatcgcgcacgcccgcgagctgatcgaccaggaaggccgcaccgtgaaagaggcggctgcactgcttggcgtgcatcgctcgaccctgtaccgcgcacttgagcgcagcgaggaagtgacgcccaccgaggccaggcggcgcggtgccttccgtgaggacgcattgaccgaggccgacgccctggcggccgccgagaatgaacgccaagaggaacaagcatgaaaccgcaccaggacggccaggacgaaccgtttttcattaccgaagagatcgaggcggagatgatcgcggccgggtacgtgttcgagccgcccgcgcacgtctcaaccgtgcggctgcatgaaatcctggccggtttgtctgatgccaagctggcggcctggccggccagcttggccgctgaagaaaccgagcgccgccgtctaaaaaggtgatgtgtatttgagtaaaacagcttgcgtcatgcggtcgctgcgtatatgatgcgatgagtaaataaacaaatacgcaaggggaacgcatgaaggttatcgctgtacttaaccagaaaggcgggtcaggcaagacgaccatcgcaacccatctagcccgcgccctgcaactcgccggggccgatgttctgttagtcgattccgatccccagggcagtgcccgcgattgggcggccgtgcgggaagatcaaccgctaaccgttgtcggcatcgaccgcccgacgattgaccgcgacgtgaaggccatcggccggcgcgacttcgtagtgatcgacggagcgccccaggcggcggacttggctgtgtccgcgatcaaggcagccgacttcgtgctgattccggtgcagccaagcccttacgacatatgggccaccgccgacctggtggagctggttaagcagcgcattgaggtcacggatggaaggctacaagcggcctttgtcgtgtcgcgggcgatcaaaggcacgcgcatcggcggtgaggttgccgaggcgctggccgggtacgagctgcccattcttgagtcccgtatcacgcagcgcgtgagctacccaggcactgccgccgccggcacaaccgttcttgaatcagaacccgagggcgacgctgcccgcgaggtccaggcgctggccgctgaaattaaatcaaaactcatttgagttaatgaggtaaagagaaaatgagcaaaagcacaaacacgctaagtgccggccgtccgagcgcacgcagcagcaaggctgcaacgttggccagcctggcagacacgccagccatgaagcgggtcaactttcagttgccggcggaggatcacaccaagctgaagatgtacgcggtacgccaaggcaagaccattaccgagctgctatctgaatacatcgcgcagctaccagagtaaatgagcaaatgaataaatgagtagatgaattttagcggctaaaggaggcggcatggaaaatcaagaacaaccaggcaccgacgccgtggaatgccccatgtgtggaggaacgggcggttggccaggcgtaagcggctgggttgcctgccggccctgcaatggcactggaacccccaagcccgaggaatcggcgtgagcggtcgcaaaccatccggcccggtacaaatcggcgcggcgctgggtgatgacctggtggagaagttgaaggccgcgcaggccgcccagcggcaacgcatcgaggcagaagcacgccccggtgaatcgtggcaagcggccgctgatcgaatccgcaaagaatcccggcaaccgccggcagccggtgcgccgtcgattaggaagccgcccaagggcgacgagcaaccagattttttcgttccgatgctctatgacgtgggcacccgcgatagtcgcagcatcatggacgtggccgttttccgtctgtcgaagcgtgaccgacgagctggcgaggtgatccgctacgagcttccagacgggcacgtagaggtttccgcagggccggccggcatggccagtgtgtgggattacgacctggtactgatggcggtttcccatctaaccgaatccatgaaccgataccgggaagggaagggagacaagcccggccgcgtgttccgtccacacgttgcggacgtactcaagttctgccggcgagccgatggcggaaagcagaaagacgacctggtagaaacctgcattcggttaaacaccacgcacgttgccatgcagcgtacgaagaaggccaagaacggccgcctggtgacggtatccgagggtgaagccttgattagccgctacaagatcgtaaagagcgaaaccgggcggccggagtacatcgagatcgagctagctgattggatgtaccgcgagatcacagaaggcaagaacccggacgtgctgacggttcaccccgattactttttgatcgatcccggcatcggccgttttctctaccgcctggcacgccgcgccgcaggcaaggcagaagccagatggttgttcaagacgatctacgaacgcagtggcagcgccggagagttcaagaagttctgtttcaccgtgcgcaagctgatcgggtcaaatgacctgccggagtacgatttgaaggaggaggcggggcaggctggcccgatcctagtcatgcgctaccgcaacctgatcgagggcgaagcatccgccggttcctaatgtacggagcagatgctagggcaaattgccctagcaggggaaaaaggtcgaaaaggtctctttcctgtggatagcacgtacattgggaacccaaagccgtacattgggaaccggaacccgtacattgggaacccaaagccgtacattgggaaccggtcacacatgtaagtgactgatataaaagagaaaaaaggcgatttttccgcctaaaactctttaaaacttattaaaactcttaaaacccgcctggcctgtgcataactgtctggccagcgcacagccgaagagctgcaaaaagcgcctacccttcggtcgctgcgctccctacgccccgccgcttcgcgtcggcctatcgcggccgctggccgctcaaaaatggctggcctacggccaggcaatctaccagggcgcggacaagccgcgccgtcgccactcgaccgccggcgcccacatcaaggcaccctgcctcgcgcgtttcggtgatgacggtgaaaacctctgacacatgcagctcccggagacggtcacagcttgtctgtaagcggatgccgggagcagacaagcccgtcagggcgcgtcagcgggtgttggcgggtgtcggggcgcagccatgacccagtcacgtagcgatagcggagtgtatactggcttaactatgcggcatcagagcagattgtactgagagtgcaccatatgcggtgtgaaataccgcacagatgcgtaaggagaaaataccgcatcaggcgctcttccgcttcctcgctcactgactcgctgcgctcggtcgttcggctgcggcgagcggtatcagctcactcaaaggcggtaatacggttatccacagaatcaggggataacgcaggaaagaacatgtgagcaaaaggccagcaaaaggccaggaaccgtaaaaaggccgcgttgctggcgtttttccataggctccgcccccctgacgagcatcacaaaaatcgacgctcaagtcagaggtggcgaaacccgacaggactataaagataccaggcgtttccccctggaagctccctcgtgcgctctcctgttccgaccctgccgcttaccggatacctgtccgcctttctcccttcgggaagcgtggcgctttctcatagctcacgctgtaggtatctcagttcggtgtaggtcgttcgctccaagctgggctgtgtgcacgaaccccccgttcagcccgaccgctgcgccttatccggtaactatcgtcttgagtccaacccggtaagacacgacttatcgccactggcagcagccactggtaacaggattagcagagcgaggtatgtaggcggtgctacagagttcttgaagtggtggcctaactacggctacactagaaggacagtatttggtatctgcgctctgctgaagccagttaccttcggaaaaagagttggtagctcttgatccggcaaacaaaccaccgctggtagcggtggtttttttgtttgcaagcagcagattacgcgcagaaaaaaaggatctcaagaagatcctttgatcttttctacggggtctgacgctcagtggaacgaaaactcacgttaagggattttggtcatgcattctaggtactaaaacaattcatccagtaaaatataatattttattttctcccaatcaggcttgatccccagtaagtcaaaaaatagctcgacatactgttcttccccgatatcctccctgatcgaccggacgcagaaggcaatgtcataccacttgtccgccctgccgcttctcccaagatcaataaagccacttactttgccatctttcacaaagatgttgctgtctcccaggtcgccgtgggaaaagacaagttcctcttcgggcttttccgtctttaaaaaatcatacagctcgcgcggatctttaaatggagtgtcttcttcccagttttcgcaatccacatcggccagatcgttattcagtaagtaatccaattcggctaagcggctgtctaagctattcgtatagggacaatccgatatgtcgatggagtgaaagagcctgatgcactccgcatacagctcgataatcttttcagggctttgttcatcttcatactcttccgagcaaaggacgccatcggcctcactcatgagcagattgctccagccatcatgccgttcaaagtgcaggacctttggaacaggcagctttccttccagccatagcatcatgtccttttcccgttccacatcataggtggtccctttataccggctgtccgtcatttttaaatataggttttcattttctcccaccagcttatataccttagcaggagacattccttccgtatcttttacgcagcggtatttttcgatcagttttttcaattccggtgatattctcattttagccatttattatttccttcctcttttctacagtatttaaagataccccaagaagctaattataacaagacgaactccaattcactgttccttgcattctaaaaccttaaataccagaaaacagctttttcaaagttgttttcaaagttggcgtataacatagtatcgacggagccgattttgaaaccgcggtgatcacaggcagcaacgctctgtcatcgttacaatcaacatgctaccctccgcgagatcatccgtgtttcaaacccggcagcttagttgccgttcttccgaatagcatcggtaacatgagcaaagtctgccgccttacaacggctctcccgctgacgccgtcccggactgatgggctgcctgtatcgagtggtgattttgtgccgagctgccggtcggggagctgttggctggctggtggcaggatatattgtggtgtaaacaaattgacgcttagacaacttaataacacattgcggacgtttttaatgtactgaattaacgccgaatta

SEQ ID NO: 8432 - protein, 65 aa, Artificial
  Synthetic Construct
MTTAVTAAVSFPSTKTTSLSARSSSVISPDKISYKKVPLYYRNVSATGKMGPIRAQIASEFQLTT

SEQ ID NO: 8433 - DNA, 9045 bp, Artificial; identical to SEQ ID NO: 1
  plasmid VC-MME220-1qcz

SEQ ID NO: 8434 - DNA, 9466 bp, Artificial
  plasmid VC-MME432-1qcz
  5'UTR (2125)..(2289)
  transit_peptide (2290)..(2397)
  CDS (2290)..(2397)
  transit_peptide (2475)..(2543)
  CDS (2475)..(2543)
  CDS (2544)..(2552): adapter
gctttgggcggatcctctagaggacaatcagtaaattgaacggagaatattattcataaaaatacgatagtaacgggtgatatattcattagaatgaaccgaaaccggcggtaaggatctgagctacacatgctcaggttttttacaacgtgcacaacagaattgaaagcaaatatcatgcgatcataggcgtctcgcatatctcattaaagcagggcatgccggtcgagtcaaatctcggtgacgggcaggaccggacggggcggtaccggcaggctgaagtccagctgccagaaacccacgtcatgccagttcccgtgcttgaagccggccgcccgcagcatgccgcggggggcatatccgagcgcctcgtgcatgcgcacgctcgggtcgttgggcagcccgatgacagcgaccacgctcttgaagccctgtgcctccagggacttcagcaggtgggtgtagagcgtggagcccagtcccgtccgctggtggcggggggagacgtacacggtcgactcggccgtccagtcgtaggcgttgcgtgccttccaggggcccgcgtaggcgatgccggcgacctcgccgtccacctcggcgacgagccagggatagcgctcccgcagacggacgaggtcgtccgtccactcctgcggttcctgcggctcggtacggaagttgaccgtgcttgtctcgatgtagtggttgacgatggtgcagaccgccggcatgtccgcctcggtggcacggcggatgtcggccgggcgtcgttctgggctcatggtagactcgacggatccacgtgtggaagatatgaatttttttgagaaactagataagattaatgaatatcggtgttttggttttttcttgtggccgtctttgtttatattgagatttttcaaatcagtgcgcaagacgtgacgtaagtatccgagtcagtttttatttttctactaatttggtcgaatctagattcgacggtatcgataagctcgcggatccctgaaagcgacgttggatgttaacatctacaaattgccttttcttatcgaccatgtacgtaagcgcttacgtttttggtggacccttgaggaaactggtagctgttgtgggcctgtggtctcaagatggatcattaatttccaccttcacctacgatggggggcatcgcaccggtgagtaatattgtacggctaagagcgaatttggcctgtaggatccctgaaagcgacgttggatgttaacatctacaaattgccttttcttatcgaccatgtacgtaagcgcttacgtttttggtggacccttgaggaaactggtagctgttgtgggcctgtggtctcaagatggatcattaatttccaccttcacctacgatggggggcatcgcaccggtgagtaatattgtacggctaagagcgaatttggcctgtaggatccctgaaagcgacgttggatgttaacatctacaaattgccttttcttatcgaccatgtacgtaagcgcttacgtttttggtggacccttgaggaaactggtagctgttgtgggcctgtggtctcaagatggatcattaatttccaccttcacctacgatggggggcatcgcaccggtgagtaatattgtacggctaagagcgaatttggcctgtaggatccgcgagctggtcaatcccattgcttttgaagcagctcaacattgatctctttctcgatcgagggagatttttcaaatcagtgcgcaagacgtgacgtaagtatccgagtcagtttttatttttctactaatttggtcgtttatttcggcgtgtaggacatggcaaccgggcctgaatttcgcgggtattctgtttctattccaactttttcttgatccgcagccattaacgacttttgaatagatacgctgacacgccaagcctcgctagtcaaaagtgtaccaaacaacgctttacagcaagaacggaatgcgcgtgacgctcgcggtgacgccatttcgccttttcagaaatggataaatagccttgcttcctattatatcttcccaaattaccaatacattacactagcatctgaatttcataaccaatctcgatacaccaaatcgaagatctcccaaacgcataaacttatcttcatagttgccactccaatttgctccttgaatctcctccacccaatacataatccactcctccatcacccacttcactactaaatcaaacttaactctgtttttctctctcctcctttcatttcttattcttccaatcatcgtactccgccatgaccaccgctgtcaccgccgctgtttctttcccctctaccaaaaccacctctctctccgcccgaagctcctccgtcatttcccctgacaaaatcagctacaaaaaggtgattcccaatttcactgtgttttttattaataatttgttattttgatgatgagatgattaatttgggtgctgcaggttcctttgtactacaggaatgtatctgcaactgggaaaatgggacccatcagggcccagatcgcctcttgctcttccatggcaatgattaattaacgaagagcaagagctcgaatttccccgatcgttcaaacatttggcaataaagtttcttaagattgaatcctgttgccggtcttgcgatgattatcatataatttctgttgaattacgttaagcatgtaataattaacatgtaatgcatgacgttatttatgagatgggtttttatgattagagtcccgcaattatacatttaatacgcgatagaaaacaaaatatagcgcgcaaactaggataaattatcgcgcgcggtgtcatctatgttactagatcgggaattggcatgcaagcttggcactggccgtcgttttacaacgtcgtgactgggaaaaccctggcgttacccaacttaatcgccttgcagcacatccccctttcgccagctggcgtaatagcgaagaggcccgcaccgatcgcccttcccaacagttgcgcagcctgaatggcgaatgctagagcagcttgagcttggatcagattgtcgtttcccgccttcagtttaaactatcagtgtttgacaggatatattggcgggtaaacctaagagaaaagagcgtttattagaataatcggatatttaaaagggcgtgaaaaggtttatccgttcgtccatttgtatgtgcatgccaaccacagggttcccctcgggatcaaagtactttgatccaacccctccgctgctatagtgcagtcggcttctgacgttcagtgcagccgtcttctgaaaacgacatgtcgcacaagtcctaagttacgcgacaggctgccgccctgcccttttcctggcgttttcttgtcgcgtgttttagtcgcataaagtagaatacttgcgactagaaccggagacattacgccatgaacaagagcgccgccgctggcctgctgggctatgcccgcgtcagcaccgacgaccaggacttgaccaaccaacgggccgaactgcacgcggccggctgcaccaagctgttttccgagaagatcaccggcaccaggcgcgaccgcccggagctggccaggatgcttgaccacctacgccctggcgacgttgtgacagtgaccaggctagaccgcctggcccgcagcacccgcgacctactggacattgccgagcgcatccaggaggccggcgcgggcctgcgtagcctggcagagccgtgggccgacaccaccacgccggccggccgcatggtgttgaccgtgttcgccggcattgccgagttcgagcgttccctaatcatcgaccgcacccggagcgggcgcgaggccgccaaggcccgaggcgtgaagtttggcccccgccctaccctcaccccggcacagatcgcgcacgcccgcgagctgatcgaccaggaaggccgcaccgtgaaagaggcggctgcactgcttggcgtgcatcgctcgaccctgtaccgcgcacttgagcgcagcgaggaagtgacgcccaccgaggccaggcggcgcggtgccttccgtgaggacgcattgaccgaggccgacgccctggcggccgccgagaatgaacgccaagaggaacaagcatgaaaccgcaccaggacggccaggacgaaccgtttttcattaccgaagagatcgaggcggagatgatcgcggccgggtacgtgttcgagccgcccgcgcacgtctcaaccgtgcggctgcatgaaatcctggccggtttgtctgatgccaagctggcggcctggccggccagcttggccgctgaagaaaccgagcgccgccgtctaaaaaggtgatgtgtatttgagtaaaacagcttgcgtcatgcggtcgctgcgtatatgatgcgatgagtaaataaacaaatacgcaaggggaacgcatgaaggttatcgctgtacttaaccagaaaggcgggtcaggcaagacgaccatcgcaacccatctagcccgcgccctgcaactcgccggggccgatgttctgttagtcgattccgatccccagggcagtgcccgcgattgggcggccgtgcgggaagatcaaccgctaaccgttgtcggcatcgaccgcccgacgattgaccgcgacgtgaaggccatcggccggcgcgacttcgtagtgatcgacggagcgccccaggcggcggacttggctgtgtccgcgatcaaggcagccgacttcgtgctgattccggtgcagccaagcccttacgacatatgggccaccgccgacctggtggagctggttaagcagcgcattgaggtcacggatggaaggctacaagcggcctttgtcgtgtcgcgggcgatcaaaggcacgcgcatcggcggtgaggttgccgaggcgctggccgggtacgagctgcccattcttgagtcccgtatcacgcagcgcgtgagctacccaggcactgccgccgccggcacaaccgttcttgaatcagaacccgagggcgacgctgcccgcgaggtccaggcgctggccgctgaaattaaatcaaaactcatttgagttaatgaggtaaagagaaaatgagcaaaagcacaaacacgctaagtgccggccgtccgagcgcacgcagcagcaaggctgcaacgttggccagcctggcagacacgccagccatgaagcgggtcaactttcagttgccggcggaggatcacaccaagctgaagatgtacgcggtacgccaaggcaagaccattaccgagctgctatctgaatacatcgcgcagctaccagagtaaatgagcaaatgaataaatgagtagatgaattttagcggctaaaggaggcggcatggaaaatcaagaacaaccaggcaccgacgccgtggaatgccccatgtgtggaggaacgggcggttggccaggcgtaagcggctgggttgcctgccggccctgcaatggcactggaacccccaagcccgaggaatcggcgtgagcggtcgcaaaccatccggcccggtacaaatcggcgcggcgctgggtgatgacctggtggagaagttgaaggccgcgcaggccgcccagcggcaacgcatcgaggcagaagcacgccccggtgaatcgtggcaagcggccgctgatcgaatccgcaaagaatcccggcaaccgccggcagccggtgcgccgtcgattaggaagccgcccaagggcgacgagcaaccagattttttcgttccgatgctctatgacgtgggcacccgcgatagtcgcagcatcatggacgtggccgttttccgtctgtcgaagcgtgaccgacgagctggcgaggtgatccgctacgagcttccagacgggcacgtagaggtttccgcagggccggccggcatggccagtgtgtgggattacgacctggtactgatggcggtttcccatctaaccgaatccatgaaccgataccgggaagggaagggagacaagcccggccgcgtgttccgtccacacgttgcggacgtactcaagttctgccggcgagccgatggcggaaagcagaaagacgacctggtagaaacctgcattcggttaaacaccacgcacgttgccatgcagcgtacgaagaaggccaagaacggccgcctggtgacggtatccgagggtgaagccttgattagccgctacaagatcgtaaagagcgaaaccgggcggccggagtacatcgagatcgagctagctgattggatgtaccgcgagatcacagaaggcaagaacccggacgtgctgacggttcaccccgattactttttgatcgatcccggcatcggccgttttctctaccgcctggcacgccgcgccgcaggcaaggcagaagccagatggttgttcaagacgatctacgaacgcagtggcagcgccggagagttcaagaagttctgtttcaccgtgcgcaagctgatcgggtcaaatgacctgccggagtacgatttgaaggaggaggcggggcaggctggcccgatcctagtcatgcgctaccgcaacctgatcgagggcgaagcatccgccggttcctaatgtacggagcagatgctagggcaaattgccctagcaggggaaaaaggtcgaaaaggtctctttcctgtggatagcacgtacattgggaacccaaagccgtacattgggaaccggaacccgtacattgggaacccaaagccgtacattgggaaccggtcacacatgtaagtgactgatataaaagagaaaaaaggcgatttttccgcctaaaactctttaaaacttattaaaactcttaaaacccgcctggcctgtgcataactgtctggccagcgcacagccgaagagctgcaaaaagcgcctacccttcggtcgctgcgctccctacgccccgccgcttcgcgtcggcctatcgcggccgctggccgctcaaaaatggctggcctacggccaggcaatctaccagggcgcggacaagccgcgccgtcgccactcgaccgccggcgcccacatcaaggcaccctgcctcgcgcgtttcggtgatgacggtgaaaacctctgacacatgcagctcccggagacggtcacagcttgtctgtaagcggatgccgggagcagacaagcccgtcagggcgcgtcagcgggtgttggcgggtgtcggggcgcagccatgacccagtcacgtagcgatagcggagtgtatactggcttaactatgcggcatcagagcagattgtactgagagtgcaccatatgcggtgtgaaataccgcacagatgcgtaaggagaaaataccgcatcaggcgctcttccgcttcctcgctcactgactcgctgcgctcggtcgttcggctgcggcgagcggtatcagctcactcaaaggcggtaatacggttatccacagaatcaggggataacgcaggaaagaacatgtgagcaaaaggccagcaaaaggccaggaaccgtaaaaaggccgcgttgctggcgtttttccataggctccgcccccctgacgagcatcacaaaaatcgacgctcaagtcagaggtggcgaaacccgacaggactataaagataccaggcgtttccccctggaagctccctcgtgcgctctcctgttccgaccctgccgcttaccggatacctgtccgcctttctcccttcgggaagcgtggcgctttctcatagctcacgctgtaggtatctcagttcggtgtaggtcgttcgctccaagctgggctgtgtgcacgaaccccccgttcagcccgaccgctgcgccttatccggtaactatcgtcttgagtccaacccggtaagacacgacttatcgccactggcagcagccactggtaacaggattagcagagcgaggtatgtaggcggtgctacagagttcttgaagtggtggcctaactacggctacactagaaggacagtatttggtatctgcgctctgctgaagccagttaccttcggaaaaagagttggtagctcttgatccggcaaacaaaccaccgctggtagcggtggtttttttgtttgcaagcagcagattacgcgcagaaaaaaaggatctcaagaagatcctttgatcttttctacggggtctgacgctcagtggaacgaaaactcacgttaagggattttggtcatgcattctaggtactaaaacaattcatccagtaaaatataatattttattttctcccaatcaggcttgatccccagtaagtcaaaaaatagctcgacatactgttcttccccgatatcctccctgatcgaccggacgcagaaggcaatgtcataccacttgtccgccctgccgcttctcccaagatcaataaagccacttactttgccatctttcacaaagatgttgctgtctcccaggtcgccgtgggaaaagacaagttcctcttcgggcttttccgtctttaaaaaatcatacagctcgcgcggatctttaaatggagtgtcttcttcccagttttcgcaatccacatcggccagatcgttattcagtaagtaatccaattcggctaagcggctgtctaagctattcgtatagggacaatccgatatgtcgatggagtgaaagagcctgatgcactccgcatacagctcgataatcttttcagggctttgttcatcttcatactcttccgagcaaaggacgccatcggcctcactcatgagcagattgctccagccatcatgccgttcaaagtgcaggacctttggaacaggcagctttccttccagccatagcatcatgtccttttcccgttccacatcataggtggtccctttataccggctgtccgtcatttttaaatataggttttcattttctcccaccagcttatataccttagcaggagacattccttccgtatcttttacgcagcggtatttttcgatcagttttttcaattccggtgatattctcattttagccatttattatttccttcctcttttctacagtatttaaagataccccaagaagctaattataacaagacgaactccaattcactgttccttgcattctaaaaccttaaataccagaaaacagctttttcaaagttgttttcaaagttggcgtataacatagtatcgacggagccgattttgaaaccgcggtgatcacaggcagcaacgctctgtcatcgttacaatcaacatgctaccctccgcgagatcatccgtgtttcaaacccggcagcttagttgccgttcttccgaatagcatcggtaacatgagcaaagtctgccgccttacaacggctctcccgctgacgccgtcccggactgatgggctgcctgtatcgagtggtgattttgtgccgagctgccggtcggggagctgttggctggctggtggcaggatatattgtggtgtaaacaaattgacgcttagacaacttaataacacattgcggacgtttttaatgtactgaattaacgccgaattaa

SEQ ID NO: 8435 - protein, 62 aa, Artificial
  Synthetic Construct
MTTAVTAAVSFPSTKTTSLSARSSSVISPDKISYKKVPLYYRNVSATGKMGPIRAQIASCSS

SEQ ID NO: 8436 - DNA, 8885 bp, Artificial
  plasmid VC-MME221-1qcz
agcttggacaatcagtaaattgaacggagaatattattcataaaaatacgatagtaacgggtgatatattcattagaatgaaccgaaaccggcggtaaggatctgagctacacatgctcaggttttttacaacgtgcacaacagaattgaaagcaaatatcatgcgatcataggcgtctcgcatatctcattaaagcagggcatgccggtcgagtcaaatctcggtgacgggcaggaccggacggggcggtaccggcaggctgaagtccagctgccagaaacccacgtcatgccagttcccgtgcttgaagccggccgcccgcagcatgccgcggggggcatatccgagcgcctcgtgcatgcgcacgctcgggtcgttgggcagcccgatgacagcgaccacgctcttgaagccctgtgcctccagggacttcagcaggtgggtgtagagcgtggagcccagtcccgtccgctggtggcggggggagacgtacacggtcgactcggccgtccagtcgtaggcgttgcgtgccttccaggggcccgcgtaggcgatgccggcgacctcgccgtccacctcggcgacgagccagggatagcgctcccgcagacggacgaggtcgtccgtccactcctgcggttcctgcggctcggtacggaagttgaccgtgcttgtctcgatgtagtggttgacgatggtgcagaccgccggcatgtccgcctcggtggcacggcggatgtcggccgggcgtcgttctgggctcatggtagactcgacggatccacgtgtggaagatatgaatttttttgagaaactagataagattaatgaatatcggtgttttggttttttcttgtggccgtctttgtttatattgagatttttcaaatcagtgcgcaagacgtgacgtaagtatccgagtcagtttttatttttctactaatttggtcgaagctttgggcggatcctctagaattcgaatccaaaaattacggatatgaatataggcatatccgtatccgaattatccgtttgacagctagcaacgattgtacaattgcttctttaaaaaaggaagaaagaaagaaagaaaagaatcaacatcagcgttaacaaacggccccgttacggcccaaacggtcatatagagtaacggcgttaagcgttgaaagactcctatcgaaatacgtaaccgcaaacgtgtcatagtcagatcccctcttccttcaccgcctcaaacacaaaaataatcttctacagcctatatatacaacccccccttctatctctcctttctcacaattcatcatctttctttctctacccccaattttaagaaatcctctcttctcctcttcattttcaaggtaaatctctctctctctctctctctctgttattccttgttttaattaggtatgtattattgctagtttgttaatctgcttatcttatgtatgccttatgtgaatatctttatcttgttcatctcatccgtttagaagctataaatttgttgatttgactgtgtatctacacgtggttatgtttatatctaatcagatatgaatttcttcatattgttgcgtttgtgtgtaccaatccgaaatcgttgatttttttcatttaatcgtgtagctaattgtacgtatacatatggatctacgtatcaattgttcatctgtttgtgtttgtatgtatacagatctgaaaacatcacttctctcatctgattgtgttgttacatacatagatatagatctgttatatcattttttttattaattgtgtatatatatatgtgcatagatctggattacatgattgtgattatttacatgattttgttatttacgtatgtatatatgtagatctggactttttggagttgttgacttgattgtatttgtgtgtgtatatgtgtgttctgatcttgatatgttatgtatgtgcagcccgggttgctcttccatggcaatgattaattaacgaagagcaagagctcgaatttccccgatcgttcaaacatttggcaataaagtttcttaagattgaatcctgttgccggtcttgcgatgattatcatataatttctgttgaattacgttaagcatgtaataattaacatgtaatgcatgacgttatttatgagatgggtttttatgattagagtcccgcaattatacatttaatacgcgatagaaaacaaaatatagcgcgcaaactaggataaattatcgcgcgcggtgtcatctatgttactagatcgggaattggcatgcaagcttggcactggccgtcgttttacaacgtcgtgactgggaaaaccctggcgttacccaacttaatcgccttgcagcacatccccctttcgccagctggcgtaatagcgaagaggcccgcaccgatcgcccttcccaacagttgcgcagcctgaatggcgaatgctagagcagcttgagcttggatcagattgtcgtttcccgccttcagtttaaactatcagtgtttgacaggatatattggcgggtaaacctaagagaaaagagcgtttattagaataatcggatatttaaaagggcgtgaaaaggtttatccgttcgtccatttgtatgtgcatgccaaccacagggttcccctcgggatcaaagtactttgatccaacccctccgctgctatagtgcagtcggcttctgacgttcagtgcagccgtcttctgaaaacgacatgtcgcacaagtcctaagttacgcgacaggctgccgccctgcccttttcctggcgttttcttgtcgcgtgttttagtcgcataaagtagaatacttgcgactagaaccggagacattacgccatgaacaagagcgccgccgctggcctgctgggctatgcccgcgtcagcaccgacgaccaggacttgaccaaccaacgggccgaactgcacgcggccggctgcaccaagctgttttccgagaagatcaccggcaccaggcgcgaccgcccggagctggccaggatgcttgaccacctacgccctggcgacgttgtgacagtgaccaggctagaccgcctggcccgcagcacccgcgacctactggacattgccgagcgcatccaggaggccggcgcgggcctgcgtagcctggcagagccgtgggccgacaccaccacgccggccggccgcatggtgttgaccgtgttcgccggcattgccgagttcgagcgttccctaatcatcgaccgcacccggagcgggcgcgaggccgccaaggcccgaggcgtgaagtttggcccccgccctaccctcaccccggcacagatcgcgcacgcccgcgagctgatcgaccaggaaggccgcaccgtgaaagaggcggctgcactgcttggcgtgcatcgctcgaccctgtaccgcgcacttgagcgcagcgaggaagtgacgcccaccgaggccaggcggcgcggtgccttccgtgaggacgcattgaccgaggccgacgccctggcggccgccgagaatgaacgccaagaggaacaagcatgaaaccgcaccaggacggccaggacgaaccgtttttcattaccgaagagatcgaggcggagatgatcgcggccgggtacgtgttcgagccgcccgcgcacgtctcaaccgtgcggctgcatgaaatcctggccggtttgtctgatgccaagctggcggcctggccggccagcttggccgctgaagaaaccgagcgccgccgtctaaaaaggtgatgtgtatttgagtaaaacagcttgcgtcatgcggtcgctgcgtatatgatgcgatgagtaaataaacaaatacgcaaggggaacgcatgaaggttatcgctgtacttaaccagaaaggcgggtcaggcaagacgaccatcgcaacccatctagcccgcgccctgcaactcgccggggccgatgttctgttagtcgattccgatccccagggcagtgcccgcgattgggcggccgtgcgggaagatcaaccgctaaccgttgtcggcatcgaccgcccgacgattgaccgcgacgtgaaggccatcggccggcgcgacttcgtagtgatcgacggagcgccccaggcggcggacttggctgtgtccgcgatcaaggcagccgacttcgtgctgattccggtgcagccaagcccttacgacatatgggccaccgccgacctggtggagctggttaagcagcgcattgaggtcacggatggaaggctacaagcggcctttgtcgtgtcgcgggcgatcaaaggcacgcgcatcggcggtgaggttgccgaggcgctggccgggtacgagctgcccattcttgagtcccgtatcacgcagcgcgtgagctacccaggcactgccgccgccggcacaaccgttcttgaatcagaacccgagggcgacgctgcccgcgaggtccaggcgctggccgctgaaattaaatcaaaactcatttgagttaatgaggtaaagagaaaatgagcaaaagcacaaacacgctaagtgccggccgtccgagcgcacgcagcagcaaggctgcaacgttggccagcctggcagacacgccagccatgaagcgggtcaactttcagttgccggcggaggatcacaccaagctgaagatgtacgcggtacgccaaggcaagaccattaccgagctgctatctgaatacatcgcgcagctaccagagtaaatgagcaaatgaataaatgagtagatgaattttagcggctaaaggaggcggcatggaaaatcaagaacaaccaggcaccgacgccgtggaatgccccatgtgtggaggaacgggcggttggccaggcgtaagcggctgggttgcctgccggccctgcaatggcactggaacccccaagcccgaggaatcggcgtgagcggtcgcaaaccatccggcccggtacaaatcggcgcggcgctgggtgatgacctggtggagaagttgaaggccgcgcaggccgcccagcggcaacgcatcgaggcagaagcacgccccggtgaatcgtggcaagcggccgctgatcgaatccgcaaagaatcccggcaaccgccggcagccggtgcgccgtcgattaggaagccgcccaagggcgacgagcaaccagattttttcgttccgatgctctatgacgtgggcacccgcgatagtcgcagcatcatggacgtggccgttttccgtctgtcgaagcgtgaccgacgagctggcgaggtgatccgctacgagcttccagacgggcacgtagaggtttccgcagggccggccggcatggccagtgtgtgggattacgacctggtactgatggcggtttcccatctaaccgaatccatgaaccgataccgggaagggaagggagacaagcccggccgcgtgttccgtccacacgttgcggacgtactcaagttctgccggcgagccgatggcggaaagcagaaagacgacctggtagaaacctgcattcggttaaacaccacgcacgttgccatgcagcgtacgaagaaggccaagaacggccgcctggtgacggtatccgagggtgaagccttgattagccgctacaagatcgtaaagagcgaaaccgggcggccggagtacatcgagatcgagctagctgattggatgtaccgcgagatcacagaaggcaagaacccggacgtgctgacggttcaccccgattactttttgatcgatcccggcatcggccgttttctctaccgcctggcacgccgcgccgcaggcaaggcagaagccagatggttgttcaagacgatctacgaacgcagtggcagcgccggagagttcaagaagttctgtttcaccgtgcgcaagctgatcgggtcaaatgacctgccggagtacgatttgaaggaggaggcggggcaggctggcccgatcctagtcatgcgctaccgcaacctgatcgagggcgaagcatccgccggttcctaatgtacggagcagatgctagggcaaattgccctagcaggggaaaaaggtcgaaaaggtctctttcctgtggatagcacgtacattgggaacccaaagccgtacattgggaaccggaacccgtacattgggaacccaaagccgtacattgggaaccggtcacacatgtaagtgactgatataaaagagaaaaaaggcgatttttccgcctaaaactctttaaaacttattaaaactcttaaaacccgcctggcctgtgcataactgtctggccagcgcacagccgaagagctgcaaaaagcgcctacccttcggtcgctgcgctccctacgccccgccgcttcgcgtcggcctatcgcggccgctggccgctcaaaaatggctggcctacggccaggcaatctaccagggcgcggacaagccgcgccgtcgccactcgaccgccggcgcccacatcaaggcaccctgcctcgcgcgtttcggtgatgacggtgaaaacctctgacacatgcagctcccggagacggtcacagcttgtctgtaagcggatgccgggagcagacaagcccgtcagggcgcgtcagcgggtgttggcgggtgtcggggcgcagccatgacccagtcacgtagcgatagcggagtgtatactggcttaactatgcggcatcagagcagattgtactgagagtgcaccatatgcggtgtgaaataccgcacagatgcgtaaggagaaaataccgcatcaggcgctcttccgcttcctcgctcactgactcgctgcgctcggtcgttcggctgcggcgagcggtatcagctcactcaaaggcggtaatacggttatccacagaatcaggggataacgcaggaaagaacatgtgagcaaaaggccagcaaaaggccaggaaccgtaaaaaggccgcgttgctggcgtttttccataggctccgcccccctgacgagcatcacaaaaatcgacgctcaagtcagaggtggcgaaacccgacaggactataaagataccaggcgtttccccctggaagctccctcgtgcgctctcctgttccgaccctgccgcttaccggatacctgtccgcctttctcccttcgggaagcgtggcgctttctcatagctcacgctgtaggtatctcagttcggtgtaggtcgttcgctccaagctgggctgtgtgcacgaaccccccgttcagcccgaccgctgcgccttatccggtaactatcgtcttgagtccaacccggtaagacacgacttatcgccactggcagcagccactggtaacaggattagcagagcgaggtatgtaggcggtgctacagagttcttgaagtggtggcctaactacggctacactagaaggacagtatttggtatctgcgctctgctgaagccagttaccttcggaaaaagagttggtagctcttgatccggcaaacaaaccaccgctggtagcggtggtttttttgtttgcaagcagcagattacgcgcagaaaaaaaggatctcaagaagatcctttgatcttttctacggggtctgacgctcagtggaacgaaaactcacgttaagggattttggtcatgcattctaggtactaaaacaattcatccagtaaaatataatattttattttctcccaatcaggcttgatccccagtaagtcaaaaaatagctcgacatactgttcttccccgatatcctccctgatcgaccggacgcagaaggcaatgtcataccacttgtccgccctgccgcttctcccaagatcaataaagccacttactttgccatctttcacaaagatgttgctgtctcccaggtcgccgtgggaaaagacaagttcctcttcgggcttttccgtctttaaaaaatcatacagctcgcgcggatctttaaatggagtgtcttcttcccagttttcgcaatccacatcggccagatcgttattcagtaagtaatccaattcggctaagcggctgtctaagctattcgtatagggacaatccgatatgtcgatggagtgaaagagcctgatgcactccgcatacagctcgataatcttttcagggctttgttcatcttcatactcttccgagcaaaggacgccatcggcctcactcatgagcagattgctccagccatcatgccgttcaaagtgcaggacctttggaacaggcagctttccttccagccatagcatcatgtccttttcccgttccacatcataggtggtccctttataccggctgtccgtcatttttaaatataggttttcattttctcccaccagcttatataccttagcaggagacattccttccgtatcttttacgcagcggtatttttcgatcagttttttcaattccggtgatattctcattttagccatttattatttccttcctcttttctacagtatttaaagataccccaagaagctaattataacaagacgaactccaattcactgttccttgcattctaaaaccttaaataccagaaaacagctttttcaaagttgttttcaaagttggcgtataacatagtatcgacggagccgattttgaaaccgcggtgatcacaggcagcaacgctctgtcatcgttacaatcaacatgctaccctccgcgagatcatccgtgtttcaaacccggcagcttagttgccgttcttccgaatagcatcggtaacatgagcaaagtctgccgccttacaacggctctcccgctgacgccgtcccggactgatgggctgcctgtatcgagtggtgattttgtgccgagctgccggtcggggagctgttggctggctggtggcaggatatattgtggtgtaaacaaattgacgcttagacaacttaataacacattgcggacgtttttaatgtactgaattaacgccgaatta

SEQ ID NO: 8437 - DNA, 9043 bp, Artificial
  plasmid VC-MME489-1QCZ
agctttgggcggatcctctagaggacaatcagtaaattgaacggagaatattattcataaaaatacgatagtaacgggtgatatattcattagaatgaaccgaaaccggcggtaaggatctgagctacacatgctcaggttttttacaacgtgcacaacagaattgaaagcaaatatcatgcgatcataggcgtctcgcatatctcattaaagcagggcatgccggtcgagtcaaatctcggtgacgggcaggaccggacggggcggtaccggcaggctgaagtccagctgccagaaacccacgtcatgccagttcccgtgcttgaagccggccgcccgcagcatgccgcggggggcatatccgagcgcctcgtgcatgcgcacgctcgggtcgttgggcagcccgatgacagcgaccacgctcttgaagccctgtgcctccagggacttcagcaggtgggtgtagagcgtggagcccagtcccgtccgctggtggcggggggagacgtacacggtcgactcggccgtccagtcgtaggcgttgcgtgccttccaggggcccgcgtaggcgatgccggcgacctcgccgtccacctcggcgacgagccagggatagcgctcccgcagacggacgaggtcgtccgtccactcctgcggttcctgcggctcggtacggaagttgaccgtgcttgtctcgatgtagtggttgacgatggtgcagaccgccggcatgtccgcctcggtggcacggcggatgtcggccgggcgtcgttctgggctcatggtagactcgacggatccacgtgtggaagatatgaatttttttgagaaactagataagattaatgaatatcggtgttttggttttttcttgtggccgtctttgtttatattgagatttttcaaatcagtgcgcaagacgtgacgtaagtatccgagtcagtttttatttttctactaatttggtcgaatctagattcgacggtatcgataagctcgcggatccctgaaagcgacgttggatgttaacatctacaaattgccttttcttatcgaccatgtacgtaagcgcttacgtttttggtggacccttgaggaaactggtagctgttgtgggcctgtggtctcaagatggatcattaatttccaccttcacctacgatggggggcatcgcaccggtgagtaatattgtacggctaagagcgaatttggcctgtaggatccctgaaagcgacgttggatgttaacatctacaaattgccttttcttatcgaccatgtacgtaagcgcttacgtttttggtggacccttgaggaaactggtagctgttgtgggcctgtggtctcaagatggatcattaatttccaccttcacctacgatggggggcatcgcaccggtgagtaatattgtacggctaagagcgaatttggcctgtaggatccctgaaagcgacgttggatgttaacatctacaaattgccttttcttatcgaccatgtacgtaagcgcttacgtttttggtggacccttgaggaaactggtagctgttgtgggcctgtggtctcaagatggatcattaatttccaccttcacctacgatggggggcatcgcaccggtgagtaatattgtacggctaagagcgaatttggcctgtaggatccgcgagctggtcaatcccattgcttttgaagcagctcaacattgatctctttctcgatcgagggagatttttcaaatcagtgcgcaagacgtgacgtaagtatccgagtcagtttttatttttctactaatttggtcgtttatttcggcgtgtaggacatggcaaccgggcctgaatttcgcgggtattctgtttctattccaactttttcttgatccgcagccattaacgacttttgaatagatacgctgacacgccaagcctcgctagtcaaaagtgtaccaaacaacgctttacagcaagaacggaatgcgcgtgacgctcgcggtgacgccatttcgccttttcagaaatggataaatagccttgcttcctattatatcttcccaaattaccaatacattacactagcatctgaatttcataaccaatctcgatacaccaaatcgaagatctccctggaattccagctgaccaccatggcaattcccggggatcagctcgaatttccccgatcgttcaaacatttggcaataaagtttcttaagattgaatcctgttgccggtcttgcgatgattatcatataatttctgttgaattacgttaagcatgtaataattaacatgtaatgcatgacgttatttatgagatgggtttttatgattagagtcccgcaattatacatttaatacgcgatagaaaacaaaatatagcgcgcaaactaggataaattatcgcgcgcggtgtcatctatgttactagatcgggaattggcatgcaagcttggcactggccgtcgttttacaacgtcgtgactgggaaaaccctggcgttacccaacttaatcgccttgcagcacatccccctttcgccagctggcgtaatagcgaagaggcccgcaccgatcgcccttcccaacagttgcgcagcctgaatggcgaatgctagagcagcttgagcttggatcagattgtcgtttcccgccttcagtttaaactatcagtgtttgacaggatatattggcgggtaaacctaagagaaaagagcgtttattagaataatcggatatttaaaagggcgtgaaaaggtttatccgttcgtccatttgtatgtgcatgccaaccacagggttcccctcgggatcaaagtactttgatccaacccctccgctgctatagtgcagtcggcttctgacgttcagtgcagccgtcttctgaaaacgacatgtcgcacaagtcctaagttacgcgacaggctgccgccctgcccttttcctggcgttttcttgtcgcgtgttttagtcgcataaagtagaatacttgcgactagaaccggagacattacgccatgaacaagagcgccgccgctggcctgctgggctatgcccgcgtcagcaccgacgaccaggacttgaccaaccaacgggccgaactgcacgcggccggctgcaccaagctgttttccgagaagatcaccggcaccaggcgcgaccgcccggagctggccaggatgcttgaccacctacgccctggcgacgttgtgacagtgaccaggctagaccgcctggcccgcagcacccgcgacctactggacattgccgagcgcatccaggaggccggcgcgggcctgcgtagcctggcagagccgtgggccgacaccaccacgccggccggccgcatggtgttgaccgtgttcgccggcattgccgagttcgagcgttccctaatcatcgaccgcacccggagcgggcgcgaggccgccaaggcccgaggcgtgaagtttggcccccgccctaccctcaccccggcacagatcgcgcacgcccgcgagctgatcgaccaggaaggccgcaccgtgaaagaggcggctgcactgcttggcgtgcatcgctcgaccctgtaccgcgcacttgagcgcagcgaggaagtgacgcccaccgaggccaggcggcgcggtgccttccgtgaggacgcattgaccgaggccgacgccctggcggccgccgagaatgaacgccaagaggaacaagcatgaaaccgcaccaggacggccaggacgaaccgtttttcattaccgaagagatcgaggcggagatgatcgcggccgggtacgtgttcgagccgcccgcgcacgtctcaaccgtgcggctgcatgaaatcctggccggtttgtctgatgccaagctggcggcctggccggccagcttggccgctgaagaaaccgagcgccgccgtctaaaaaggtgatgtgtatttgagtaaaacagcttgcgtcatgcggtcgctgcgtatatgatgcgatgagtaaataaacaaatacgcaaggggaacgcatgaaggttatcgctgtacttaaccagaaaggcgggtcaggcaagacgaccatcgcaacccatctagcccgcgccctgcaactcgccggggccgatgttctgttagtcgattccgatccccagggcagtgcccgcgattgggcggccgtgcgggaagatcaaccgctaaccgttgtcggcatcgaccgcccgacgattgaccgcgacgtgaaggccatcggccggcgcgacttcgtagtgatcgacggagcgccccaggcggcggacttggctgtgtccgcgatcaaggcagccgacttcgtgctgattccggtgcagccaagcccttacgacatatgggccaccgccgacctggtggagctggttaagcagcgcattgaggtcacggatggaaggctacaagcggcctttgtcgtgtcgcgggcgatcaaaggcacgcgcatcggcggtgaggttgccgaggcgctggccgggtacgagctgcccattcttgagtcccgtatcacgcagcgcgtgagctacccaggcactgccgccgccggcacaaccgttcttgaatcagaacccgagggcgacgctgcccgcgaggtccaggcgctggccgctgaaattaaatcaaaactcatttgagttaatgaggtaaagagaaaatgagcaaaagcacaaacacgctaagtgccggccgtccgagcgcacgcagcagcaaggctgcaacgttggccagcctggcagacacgccagccatgaagcgggtcaactttcagttgccggcggaggatcacaccaagctgaagatgtacgcggtacgccaaggcaagaccattaccgagctgctatctgaatacatcgcgcagctaccagagtaaatgagcaaatgaataaatgagtagatgaattttagcggctaaaggaggcggcatggaaaatcaagaacaaccaggcaccgacgccgtggaatgccccatgtgtggaggaacgggcggttggccaggcgtaagcggctgggttgtctgccggccctgcaatggcactggaacccccaagcccgaggaatcggcgtgacggtcgcaaaccatccggcccggtacaaatcggcgcggcgctgggtgatgacctggtggagaagttgaaggccgcgcaggccgcccagcggcaacgcatcgaggcagaagcacgccccggtgaatcgtggcaagcggccgctgatcgaatccgcaaagaatcccggcaaccgccggcagccggtgcgccgtcgattaggaagccgcccaagggcgacgagcaaccagattttttcgttccgatgctctatgacgtgggcacccgcgatagtcgcagcatcatggacgtggccgttttccgtctgtcgaagcgtgaccgacgagctggcgaggtgatccgctacgagcttccagacgggcacgtagaggtttccgcagggccggccggcatggccagtgtgtgggattacgacctggtactgatggcggtttcccatctaaccgaatccatgaaccgataccgggaagggaagggagacaagcccggccgcgtgttccgtccacacgttgcggacgtactcaagttctgccggcgagccgatggcggaaagcagaaagacgacctggtagaaacctgcattcggttaaacaccacgcacgttgccatgcagcgtacgaagaaggccaagaacggccgcctggtgacggtatccgagggtgaagccttgattagccgctacaagatcgtaaagagcgaaaccgggcggccggagtacatcgagatcgagctagctgattggatgtaccgcgagatcacagaaggcaagaacccggacgtgctgacggttcaccccgattactttttgatcgatcccggcatcggccgttttctctaccgcctggcacgccgcgccgcaggcaaggcagaagccagatggttgttcaagacgatctacgaacgcagtggcagcgccggagagttcaagaagttctgtttcaccgtgcgcaagctgatcgggtcaaatgacctgccggagtacgatttgaaggaggaggcggggcaggctggcccgatcctagtcatgcgctaccgcaacctgatcgagggcgaagcatccgccggttcctaatgtacggagcagatgctagggcaaattgccctagcaggggaaaaaggtcgaaaaggtctctttcctgtggatagcacgtacattgggaacccaaagccgtacattgggaaccggaacccgtacattgggaacccaaagccgtacattgggaaccggtcacacatgtaagtgactgatataaaagagaaaaaaggcgatttttccgcctaaaactctttaaaacttattaaaactcttaaaacccgcctggcctgtgcataactgtctggccagcgcacagccgaagagctgcaaaaagcgcctacccttcggtcgctgcgctccctacgccccgccgcttcgcgtcggcctatcgcggccgctggccgctcaaaaatggctggcctacggccaggcaatctaccagggcgcggacaagccgcgccgtcgccactcgaccgccggcgcccacatcaaggcaccctgcctcgcgcgtttcggtgatgacggtgaaaacctctgacacatgcagctcccggagacggtcacagcttgtctgtaagcggatgccgggagcagacaagcccgtcagggcgcgtcagcgggtgttggcgggtgtcggggcgcagccatgacccagtcacgtagcgatagcggagtgtatactggcttaactatgcggcatcagagcagattgtactgagagtgcaccatatgcggtgtgaaataccgcacagatgcgtaaggagaaaataccgcatcaggcgctcttccgcttcctcgctcactgactcgctgcgctcggtcgttcggctgcggcgagcggtatcagctcactcaaaggcggtaatacggttatccacagaatcaggggataacgcaggaaagaacatgtgagcaaaaggccagcaaaaggccaggaaccgtaaaaaggccgcgttgctggcgtttttccataggctccgcccccctgacgagcatcacaaaaatcgacgctcaagtcagaggtggcgaaacccgacaggactataaagataccaggcgtttccccctggaagctccctcgtgcgctctcctgttccgaccctgccgcttaccggatacctgtccgcctttctcccttcgggaagcgtggcgctttctcatagctcacgctgtaggtatctcagttcggtgtaggtcgttcgctccaagctgggctgtgtgcacgaaccccccgttcagcccgaccgctgcgccttatccggtaactatcgtcttgagtccaacccggtaagacacgacttatcgccactggcagcagccactggtaacaggattagcagagcgaggtatgtaggcggtgctacagagttcttgaagtggtggcctaactacggctacactagaaggacagtatttggtatctgcgctctgctgaagccagttaccttcggaaaaagagttggtagctcttgatccggcaaacaaaccaccgctggtagcggtggtttttttgtttgcaagcagcagattacgcgcagaaaaaaaggatctcaagaagatcctttgatcttttctacggggtctgacgctcagtggaacgaaaactcacgttaagggattttggtcatgcattctaggtactaaaacaattcatccagtaaaatataatattttattttctcccaatcaggcttgatccccagtaagtcaaaaaatagctcgacatactgttcttccccgatatcctccctgatcgaccggacgcagaaggcaatgtcataccacttgtccgccctgccgcttctcccaagatcaataaagccacttactttgccatctttcacaaagatgttgctgtctcccaggtcgccgtgggaaaagacaagttcctcttcgggcttttccgtctttaaaaaatcatacagctcgcgcggatctttaaatggagtgtcttcttcccagttttcgcaatccacatcggccagatcgttattcagtaagtaatccaattcggctaagcggctgtctaagctattcgtatagggacaatccgatatgtcgatggagtgaaagagcctgatgcactccgcatacagctcgataatcttttcagggctttgttcatcttcatactcttccgagcaaaggacgccatcggcctcactcatgagcagattgctccagccatcatgccgttcaaagtgcaggacctttggaacaggcagctttccttccagccatagcatcatgtccttttcccgttccacatcataggtggtccctttataccggctgtccgtcatttttaaatataggttttcattttctcccaccagcttatataccttagcaggagacattccttccgtatcttttacgcagcggtatttttcgatcagttttttcaattccggtgatattctcattttagccatttattatttccttcctcttttctacagtatttaaagataccccaagaagctaattataacaagacgaactccaattcactgttccttgcattctaaaaccttaaataccagaaaacagctttttcaaagttgttttcaaagttggcgtataacatagtatcgacggagccgattttgaaaccgcggtgatcacaggcagcaacgctctgtcatcgttacaatcaacatgctaccctccgcgagatcatccgtgtttcaaacccggcagcttagttgccgttcttccgaatagcatcggtaacatgagcaaagtctgccgccttacaacggctctcccgctgacgccgtcccggactgatgggctgcctgtatcgagtggtgattttgtgccgagctgccggtcggggagctgttggctggctggtggcaggatatattgtggtgtaaacaaattgacgcttagacaacttaataacacattgcggacgtttttaatgtactgaattaacgccgaatta

SEQ ID NO: 8438 - DNA, 801 bp, ESCHERICHIA COLI
  CDS (1)..(801): transl_table=11
atgcttaatctgaccccctcggcaatcagtcagtctattcagaaactgcgcgttatattccctgacccattgtttattcgcaaaggccagggtgtcactcctaccgcatttgcgatgcatctacatgagtatatcagtcagggccttgagtccattcttggcgcgctggatatcgaaggaagctatgataagcaacgaacgataactattgcgaccactccctcggtcggagcactggtccttcctgtcatctatcgggcgattaaaactcactatccgcagcttttactgcgcaacccgcccatcagcgacgcggaaaaccaactcagtcagtttcaaaccgatctcatcatcgataacatgttttgcaccaatcgtacggtgcaacatcatgttctgttcaccgacaatatggtgttaatttgccgcgagggaaatccactactctctttagaagatgacagagagactatcgacaacgctgcgcatgtacttctgttaccggaagagcaaaatttcagcggtctgcggcagagagttcaagaaatgtttccggaccggcaaatcaatttcaccagctacaacattttgacaatcgctgcactggttgccaacagtgacatgttagcgattattcccagccgtttttataacctgtttagccgctgctggccgctggaaaaactgccttttccgtccttaaatgaggagcaaatagatttctctatccactacaacaaattcagcctgcgtgatcccatcctgcacggagtaatagatgttatccgtaatgcattttga

SEQ ID NO: 8439 - protein, 266 aa, ESCHERICHIA COLI
MLNLTPSAISQSIQKLRVIFPDPLFIRKGQGVTPTAFAMHLHEYISQGLESILGALDIEGSYDKQRTITIATTPSVGALVLPVIYRAIKTHYPQLLLRNPPISDAENQLSQFQTDLIIDNMFCTNRTVQHHVLFTDNMVLICREGNPLLSLEDDRETIDNAAHVLLLPEEQNFSGLRQRVQEMFPDRQINFTSYNILTIAALVANSDMLAIIPSRFYNLFSRCWPLEKLPFPSLNEEQIDFSIHYNKFSLRDPILHGVIDVIRNAF

SEQ ID NO: 8440 - DNA, 801 bp, Escherichia coli O157:H7 EDL933; identical to SEQ ID NO: 145
  CDS (1)..(801): transl_table=11

SEQ ID NO: 8441 - protein, 266 aa, Escherichia coli O157:H7 EDL933; identical to SEQ ID NO: 146

SEQ ID NO: 8442 - DNA, 801 bp, Shigella flexneri 2a str. 301; identical to SEQ ID NO: 149
  CDS (1)..(801): transl_table=11

SEQ ID NO: 8443 - protein, 266 aa, Shigella flexneri 2a str. 301; identical to SEQ ID NO: 150

SEQ ID NO: 8444 - DNA, 897 bp, Klebsiella pneumoniae subsp. pneumoniae MGH 78578
  CDS (1)..(897): transl_table=11
atgtttcgcatcctgcgtaatattgacctcaatctgttgacgatctttgaagcggtatacgtacataaaggtatcgtcaacgccgcgaagatactcaatatcacaccgtcggcgattagccagtcaattaacaaactgcgggcgttgttccccgatccgctatttatccgcaaaggacagggcgtcacccccaccgcctatgccacccatcttcatcaatacatcagccgcggcatggaagctttcctcagcgcgctggatatcaccggtagcccgcaccagcagcgggtgatcactatcgccactacgccagcgatgggagcgctgctgatgcctggcctggccagcgcgctgaagccgacctttccgcagatcctgttgcacaatatcgccatcgtcgacgccgcgcggcagcttgaccagcgccaggtggatctgctcattgatacccacctgcacagcggccaggcgataagccatcatgtgctgtatcaggatcgggtacagatgtactgccgcgcagggcatcccgcgctggacggtccgcaggatgaaacgaccctcgcggagtacgaatttgcgctgctgctgccggaaggccagcgctaccccaccctccatcgccgactacaggaagagatgggcgagcgccgctgcggctttagcacctttaacctgatgacccaggcggcgatgatcgccgggagcgatatgctgggtctgaccaccgaacgcctgttcgccatggtgtcccgtctctggccgctgcagaccctggatttcccttccctgggtggagagcagattgacgttgcgctgcactttaataagctgagcgggaaagagccattgctgaaagagatcatcgagacggtgatccgctcgtttaaggcgtag

SEQ ID NO: 8445 - protein, 298 aa, Klebsiella pneumoniae subsp. pneumoniae MGH 78578
MFRILRNIDLNLLTIFEAVYVHKGIVNAAKILNITPSAISQSINKLRALFPDPLFIRKGQGVTPTAYATHLHQYISRGMEAFLSALDITGSPHQQRVITIATTPAMGALLMPGLASALKPTFPQILLHNIAIVDAARQLDQRQVDLLIDTHLHSGQAISHHVLYQDRVQMYCRAGHPALDGPQDETTLAEYEFALLLPEGQRYPTLHRRLQEEMGERRCGFSTFNLMTQAAMIAGSDMLGLTTERLFAMVSRLWPLQTLDFPSLGGEQIDVALHFNKLSGKEPLLKEIIETVIRSFKA

SEQ ID NO: 8446 - DNA, 954 bp, Salmonella enterica subsp. arizonae serovar 62:z4,z23:--
  CDS (1)..(954): transl_table=11
gtgagtgataataatcagacagaaagacaacctgccgctcaacacctacaagacaaaccgcaaattttcagaacactgagaaatatcgacctcaatctgttgacgattttcgaagctgtgtatgttcataaagggatcgtcaatgcagcgaaaattcttaatttgacgccgtcagctatcagccagtcaattcaaaaattacggaccatatttcccgatccgctgtttattcggaaaggacagggcgtaacgcccacgacatatgctacacatctgcacgaatacatcagccaggggctggaatctattcttggcgccctggatctcacgggcagctatgataagcaacgcactattacgattggcactacgccctcggtcggcgcgttggtgatgccggttatttaccaggccatcaggacgcgttatcctcaacttttgctacgcaatattccggtagacgatgccgaaagccagcttagtcagtttcagaccgatcttattattaatacccatagctataacaaccggagcattcagcatcatgtcctgtttagcgatacgcttgaaattgtttgccgccagcatcacccttgtctggcgagcgccatttctgaagagaggctgaacagcgcggatcacacctttctgatgatggagggacaaaatctctcccttctgcgcctgcgactgcaggagacctttcccgatcagcaaatcagttttagcagttacaatatttttaccattgcctcgctgatcgccagcagcgatctgttgggactgatgcccacccgcttctacaccttatttagccgctgctggccacttgaacgccttgcctatacgccggtaaataatgaacagatcgagttctcgctgcattacaataagctaagtctgcgcgatccggtgctggagagcgtcattgatattatccgtgaggcgttctga

SEQ ID NO: 8447 - protein, 317 aa, Salmonella enterica subsp. arizonae serovar 62:z4,z23:--
MSDNNQTERQPAAQHLQDKPQIFRTLRNIDLNLLTIFEAVYVHKGIVNAAKILNLTPSAISQSIQKLRTIFPDPLFIRKGQGVTPTTYATHLHEYISQGLESILGALDLTGSYDKQRTITIGTTPSVGALVMPVIYQAIRTRYPQLLLRNIPVDDAESQLSQFQTDLIINTHSYNNRSIQHHVLFSDTLEIVCRQHHPCLASAISEERLNSADHTFLMMEGQNLSLLRLRLQETFPDQQISFSSYNIFTIASLIASSDLLGLMPTRFYTLFSRCWPLERLAYTPVNNEQIEFSLHYNKLSLRDPVLESVIDIIREAF

SEQ ID NO: 8448 - DNA, 954 bp, Salmonella enterica subsp. enterica serovar Paratyphi B str. SPB7
  CDS (1)..(954): transl_table=11
gtgagtgataataatcaggcagaaagacaaccggccgatcaacacctacaggacaaaccgcaaattttcagaacactgagaaatattgacctcaatctgttgacgattttcgaggccgtatatgtccataaagggatcgtcaatgcagcgaaaattcttaacctgacgccgtcagccattagccagtccattcaaaaattacggactatatttcccgatccgctgtttattcgcaaaggccagggcgtaacgcccacgacgtatgctacgcatctgcacgaatacatcagccaggggctggaatctattcttggcgccctggatcttacgggcagctatgataagcaacgcaccattacaattggcacgacgccttcggtcggcgcgctagtgatgccgattatttaccaggccatcaggccgcgttatcctcagcttttgctgcgcaacattccggtagacgatgccgaaagccagcttagtcagtttcagaccgatctcattatcaatacccatagctataacaaccggagcattcagcatcacgtcctgtttagcgatacgcttgagattgtctgccgccagcatcatccgtgtctggcgaacgccattactgaagagagactgaacagcgcggatcacacctttctgatgctggagggacaacatctttccctgctgcgccagcgactgcaggagacatttcccgatcagcaaatcagttttagcagctacaatatttttaccattgcctcgctgatcgccagcagcgatctgctgggactgatgcccacccgcttctacgacttatttagccgttgctggccgcttgaacgccttccctacgcgccggtgaatagtgaacaggtcgagttctcgctgcattacaataaactgagtctgcgcgatccggtgctggagaacgtcattgatatcatccgtgaggcgttctga

SEQ ID NO: 8449 - protein, 317 aa, Salmonella enterica subsp. enterica serovar Paratyphi B str. SPB7; identical to SEQ ID NO: 148

SEQ ID NO: 8450 - DNA, 996 bp, Enterobacter sakazakii; identical to SEQ ID NO: 151
  CDS (1)..(996): transl_table=11

SEQ ID NO: 8451 - protein, 331 aa, Enterobacter sakazakii; identical to SEQ ID NO: 152

SEQ ID NO: 8452 - DNA, 23 bp, Artificial sequence
  primer
atgcttaatctgaccccctcggc

SEQ ID NO: 8453 - DNA, 28 bp, Artificial sequence
  primer
tcaaaatgcattacggataacatctatt

SEQ ID NO: 8454 - protein, 267 aa, Artificial sequence
  consensus sequence
  Variant (17)..(17): Xaa in position 17 is any amino acid
  Variant (35)..(36): Xaa in position 35 to 36 is any amino acid
  Variant (38)..(38): Xaa in position 38 is any amino acid
  Variant (57)..(58): Xaa in position 57 to 58 is any amino acid
  Variant (61)..(62): Xaa in position 61 to 62 is any amino acid
  Variant (70)..(70): Xaa in position 70 is any amino acid
  Variant (75)..(75): Xaa in position 75 is any amino acid
  Variant (80)..(80): Xaa in position 80 is any amino acid
  Variant (82)..(82): Xaa in position 82 is any amino acid
  Variant (85)..(85): Xaa in position 85 is any amino acid
  Variant (88)..(91): Xaa in position 88 to 91 is any amino acid
  Variant (99)..(99): Xaa in position 99 is any amino acid
  Variant (101)..(102): Xaa in position 101 to 102 is any amino acid
  Variant (106)..(106): Xaa in position 106 is any amino acid
  Variant (116)..(116): Xaa in position 116 is any amino acid
  Variant (118)..(124): Xaa in position 118 to 124 is any amino acid
  Variant (126)..(128): Xaa in position 126 to 128 is any amino acid
  Variant (134)..(134): Xaa in position 134 is any amino acid
  Variant (136)..(140): Xaa in position 136 to 140 is any amino acid
  Variant (143)..(145): Xaa in position 143 to 145 is any amino acid
  Variant (147)..(147): Xaa in position 147 is any amino acid
  Variant (149)..(161): Xaa in position 149 to 161 is any amino acid
  Variant (162)..(163): Xaa in position 162 to 163 is any or no amino acid
  Variant (165)..(166): Xaa in position 165 to 166 is any amino acid
  Variant (168)..(169): Xaa in position 168 to 169 is any amino acid
  Variant (173)..(176): Xaa in position 173 to 176 is any amino acid
  Variant (179)..(179): Xaa in position 179 is any amino acid
  Variant (181)..(181): Xaa in position 181 is any amino acid
  Variant (184)..(185): Xaa in position 184 to 185 is any amino acid
  Variant (188)..(191): Xaa in position 188 to 191 is any amino acid
  Variant (193)..(193): Xaa in position 193 is any amino acid
  Variant (197)..(198): Xaa in position 197 to 198 is any amino acid
  Variant (202)..(204): Xaa in position 202 to 204 is any amino acid
  Variant (206)..(206): Xaa in position 206 is any amino acid
  Variant (209)..(209): Xaa in position 209 is any amino acid
  Variant (211)..(213): Xaa in position 211 to 213 is any amino acid
  Variant (215)..(215): Xaa in position 215 is any amino acid
  Variant (217)..(219): Xaa in position 217 to 219 is any amino acid
  Variant (224)..(224): Xaa in position 224 is any amino acid
  Variant (228)..(229): Xaa in position 228 to 229 is any amino acid
  Variant (231)..(237): Xaa in position 231 to 237 is any amino acid
  Variant (241)..(242): Xaa in position 241 to 242 is any amino acid
  Variant (244)..(244): Xaa in position 244 is any amino acid
  Variant (249)..(249): Xaa in position 249 is any amino acid
  Variant (255)..(255): Xaa in position 255 is any amino acid
  Variant (257)..(258): Xaa in position 257 to 258 is any amino acid
  Variant (261)..(262): Xaa in position 261 to 262 is any amino acid
  Variant (264)..(266): Xaa in position 264 to 266 is any amino acid
LNLTPSAISQSIQKLRXIFPDPLFIRKGQGVTPTXXAXHLHEYISQGLESILGALDXXGSXXKQRTITIXTTPSXGALVXPXIYXAIXXXXPQLLLRNXPXXDAEXQLSQFQTDLXIXXXXXXXRXXXHHVLFXDXXXXXCRXXXPXLXXXXXXXXXXXXXXXHXXLXXEGQXXXXLRXRXQEXXPDXXXXFXSYNXXTIAXXXAXSDXLXXXPXRXXXLFSRXWPLXXLXXXXXXXEQIXXSXHYNKXSLRDPXLXXVIXXIXXXF

SEQ ID NO: 8455 - protein, 60 aa, Artificial sequence
  protein pattern
  Variant (12)..(12): Xaa in position 12 is any amino acid
  Variant (30)..(30): Xaa in position 30 is Ala or Thr
  Variant (31)..(31): Xaa in position 31 is Phe or Tyr
  Variant (33)..(33): Xaa in position 33 is any amino acid
  Variant (35)..(35): Xaa in position 35 is Leu or Met
  Variant (52)..(52): Xaa in position 52 is Ile or Leu
  Variant (53)..(53): Xaa in position 53 is Glu, Gln or Thr
  Variant (55)..(55): Xaa in position 55 is Glu or Ser
  Variant (56)..(56): Xaa in position 56 is His or Tyr
  Variant (57)..(57): Xaa in position 57 is Asp or Glu
SAISQSIQKLRXIFPDPLFIRKGQGVTPTXXAXHXHEYISQGLESILGALDXXGXXXKQR

SEQ ID NO: 8456 - protein, 59 aa, Artificial sequence
  protein pattern
  Variant (2)..(3): Xaa in position 2 to 3 is any amino acid
  Variant (7)..(7): Xaa in position 7 is Ala or Ser
  Variant (8)..(8): Xaa in position 8 is Ile or Leu
  Variant (9)..(9): Xaa in position 9 is Ile or Val
  Variant (10)..(10): Xaa in position 10 is Ala or Gly
  Variant (11)..(11): Xaa in position 11 is Asn or Ser
  Variant (14)..(14): Xaa in position 14 is Leu or Met
  Variant (15)..(15): Xaa in position 15 is Ile or Leu
  Variant (16)..(16): Xaa in position 16 is Ala or Gly
  Variant (17)..(17): Xaa in position 17 is Phe, Ile or Leu
  Variant (18)..(18): Xaa in position 18 is Ile or Met
  Variant (20)..(20): Xaa in position 20 is Ala, Ser or Thr
  Variant (22)..(22): Xaa in position 22 is Phe or Ile
  Variant (23)..(23): Xaa in position 23 is Phe or Tyr
  Variant (24)..(24): Xaa in position 24 is Asp, Asn or Thr
  Variant (27)..(27): Xaa in position 27 is any amino acid
  Variant (28)..(28): Xaa in position 28 is Asp or Arg
  Variant (29)..(29): Xaa in position 29 is Cys or Ser
  Variant (30)..(30): Xaa in position 30 is Phe or Trp
  Variant (31)..(31): Xaa in position 31 is Gly or Pro
  Variant (33)..(33): Xaa in position 33 is any amino acid
  Variant (34)..(34): Xaa in position 34 is Glu, Lys or Arg
  Variant (35)..(35): Xaa in position 35 is Leu or Val
  Variant (36)..(37): Xaa in position 36 to 37 is any amino acid
  Variant (38)..(38): Xaa in position 38 is Ala, Asp, Pro or Thr
  Variant (39)..(39): Xaa in position 39 is any amino acid
  Variant (40)..(40): Xaa in position 40 is Leu or Val
  Variant (41)..(42): Xaa in position 41 to 42 is any amino acid
  Variant (44)..(44): Xaa in position 44 is Gln or Thr
  Variant (45)..(45): Xaa in position 45 is Ile or Val
  Variant (46)..(46): Xaa in position 46 is Asp or Glu
  Variant (47)..(47): Xaa in position 47 is Phe or Ile
  Variant (49)..(49): Xaa in position 49 is Ile or Leu
  Variant (54)..(54): Xaa in position 54 is Phe or Leu
  Variant (55)..(55): Xaa in position 55 is any amino acid
NXXTIAXXXXXSDXXXXXPXRXXXLFXXXXXLXXXXXXXXXXEXXXXSXHYNKXXLRDP

SEQ ID NO: 8457 - protein, 60 aa, Artificial sequence
  protein pattern
  Variant (4)..(4): Xaa in position 4 is Ala or Gly
  Variant (8)..(8): Xaa in position 8 is Ala or Ser
  Variant (9)..(9): Xaa in position 9 is Met or Val
  Variant (13)..(13): Xaa in position 13 is Leu or Val
  Variant (14)..(14): Xaa in position 14 is Leu or Met
  Variant (16)..(16): Xaa in position 16 is Gly, Ile or Val
  Variant (17)..(17): Xaa in position 17 is Ile or Leu
  Variant (18)..(18): Xaa in position 18 is any amino acid
  Variant (19)..(19): Xaa in position 19 is Gln, Arg or Ser
  Variant (21)..(21): Xaa in position 21 is Ile or Leu
  Variant (22)..(22): Xaa in position 22 is Lys or Arg
  Variant (23)..(23): Xaa in position 23 is Pro or Thr
  Variant (24)..(24): Xaa in position 24 is any amino acid
  Variant (25)..(25): Xaa in position 25 is Phe or Tyr
  Variant (28)..(28): Xaa in position 28 is any or no amino acid
  Variant (31)..(31): Xaa in position 31 is any amino acid
  Variant (32)..(32): Xaa in position 32 is any or no amino acid
  Variant (34)..(34): Xaa in position 34 is Ile or Pro
  Variant (35)..(35): Xaa in position 35 is Ala or Pro
  Variant (36)..(36): Xaa in position 36 is Ile or Val
  Variant (37)..(37): Xaa in position 37 is Asp, Ser or Val
  Variant (40)..(40): Xaa in position 40 is Ala or Glu
  Variant (41)..(41): Xaa in position 41 is Asn, Arg or Ser
  Variant (44)..(44): Xaa in position 44 is Asp or Ser
  Variant (46)..(46): Xaa in position 46 is any amino acid
  Variant (48)..(48): Xaa in position 48 is Thr or Val
  Variant (51)..(51): Xaa in position 51 is Ile or Leu
  Variant (53)..(53): Xaa in position 53 is Asp or Asn
  Variant (54)..(54): Xaa in position 54 is Asn or Thr
  Variant (55)..(57): Xaa in position 55 to 57 is any amino acid
  Variant (58)..(58): Xaa in position 58 is Asn, Ser or Thr
  Variant (59)..(59): Xaa in position 59 is Gly or Asn
  Variant (60)..(60): Xaa in position 60 is Gln or Arg
ITIXTTPXXGALXXPXXXXAXXXXXPQXLLXXNXXXXDAXXQLXQXQXDLXIXXXXXXXX

SEQ ID NO: 8458 - protein, 18 aa, Artificial sequence
  protein pattern
  Variant (3)..(3): Xaa in position 3 is Phe or Tyr
  Variant (4)..(4): Xaa in position 4 is Gln, Ser or Thr
  Variant (6)..(6): Xaa in position 6 is any amino acid
  Variant (7)..(7): Xaa in position 7 is Leu, Met or Val
  Variant (8)..(8): Xaa in position 8 is any amino acid
  Variant (9)..(9): Xaa in position 9 is Ile, Leu or Met
  Variant (10)..(10): Xaa in position 10 is any amino acid
  Variant (13)..(15): Xaa in position 13 to 15 is any amino acid
  Variant (17)..(17): Xaa in position 17 is any or no amino acid
VLXXDXXXXXCRXXXPXL

SEQ ID NO: 8459 - protein, 37 aa, Artificial sequence
  protein pattern
  Variant (2)..(6): Xaa in position 2 to 6 is any or no amino acid
  Variant (8)..(8): Xaa in position 8 is Thr or Val
  Variant (9)..(9): Xaa in position 9 is Phe or Leu
  Variant (10)..(10): Xaa in position 10 is Ile or Leu
  Variant (11)..(11): Xaa in position 11 is Leu or Met
  Variant (12)..(12): Xaa in position 12 is any amino acid
  Variant (13)..(13): Xaa in position 13 is Glu or Pro
  Variant (14)..(14): Xaa in position 14 is Glu or Gly
  Variant (15)..(15): Xaa in position 15 is Gly or Gln
  Variant (16)..(16): Xaa in position 16 is any amino acid
  Variant (17)..(17): Xaa in position 17 is Phe, Leu or Val
  Variant (18)..(18): Xaa in position 18 is Asn or Ser
  Variant (19)..(19): Xaa in position 19 is Gly or Leu
  Variant (20)..(20): Xaa in position 20 is Leu or Val
  Variant (22)..(22): Xaa in position 22 is any amino acid
  Variant (23)..(23): Xaa in position 23 is Gln or Arg
  Variant (24)..(24): Xaa in position 24 is Ile, Leu or Val
  Variant (25)..(25): Xaa in position 25 is Asn or Gln
  Variant (26)..(26): Xaa in position 26 is Glu or Thr
  Variant (27)..(27): Xaa in position 27 is any amino acid
  Variant (28)..(28): Xaa in position 28 is Phe or Leu
  Variant (31)..(31): Xaa in position 31 is Gln or Arg
  Variant (32)..(32): Xaa in position 32 is Asn or Gln
  Variant (33)..(33): Xaa in position 33 is Ile or Val
  Variant (34)..(34): Xaa in position 34 is Asn or Ser
  Variant (36)..(36): Xaa in position 36 is Ser or Thr
DXXXXXHXXXXXXXXXXXXXRXXXXXXXPDXXXXFXS

SEQ ID NO: 8460 - protein, 21 aa, Artificial sequence
  protein pattern
  Variant (4)..(4): Xaa in position 4 is any or no amino acid
  Variant (6)..(8): Xaa in position 6 to 8 is any or no amino acid
  Variant (10)..(10): Xaa in position 10 is any amino acid
  Variant (11)..(11): Xaa in position 11 is Glu or Gln
  Variant (12)..(12): Xaa in position 12 is Ala or Ser
  Variant (13)..(13): Xaa in position 13 is Ile or Val
  Variant (14)..(16): Xaa in position 14 to 16 is any amino acid
  Variant (17)..(17): Xaa in position 17 is Lys or Arg
  Variant (18)..(18): Xaa in position 18 is Gly or Val
  Variant (20)..(20): Xaa in position 20 is Phe or Val
  Variant (21)..(21): Xaa in position 21 is Asn or Pro
LNLXTXXXIXXXXXXXXXIXX

SEQ ID NO: 8461 - protein, 9 aa, Artificial sequence
  protein pattern
  Variant (3)..(3): Xaa in position 3 is Asp or Glu
  Variant (4)..(4): Xaa in position 4 is Ala, Ile or Val
  Variant (6)..(6): Xaa in position 6 is any amino acid
  Variant (7)..(7): Xaa in position 7 is Glu or Asn
  Variant (8)..(8): Xaa in position 8 is Ala or Gly
VIXXIXXXF

SEQ ID NO: 8462 - DNA, 1209 bp, Escherichia coli K12
  CDS (1)..(1209): transl_table=11
atgaccgtaaattcttcacgtaatgcattgaaacgccgaacctgggcgctgtttatgttcttctttttgccaggcctgttaatggcgtcctgggcaacccgtacgcctgctatccgcgatattctctctgtctcgatcgctgaaatgggcggtgttctctttggtctgtcgatcggttcgatgagcggtattctctgctcggcgtggttagtgaaacgctttgggacacgtaatgtcatcctggtcacgatgtccagcgcattgatcgggatgatgatattaagtctggcactctggctgacatcgcccctgctctttgccgttggtctcggcgtctttggggcaagttttggttctgcggaagtggcgataaacgttgaaggtgctgccgttgagcgagaaatgaataagacggttttgccgatgatgcacggtttttatagcctgggcacgctggcaggcgcaggtgtcgggatggcactgacggcctttggcgttccggcaacggtgcacattttattggcggcgctggtaggtatcgcacctatttatatcgccattcaggcaatccctgacggtacgggcaaaaatgctgccgatggcacccagcatggcgaaaaaggcgtacctttttatcgcgatatccagttgctgctgataggtgttgtggtgctggcgatggcctttgccgaaggttctgccaacgactggttacccttattaatggttgacggtcacggttttagccctacttccggctcgctgatttatgccggttttaccctggggatgaccgttggacgcttcaccggcggttggttcatcgaccgttacagtcgcgttgccgtggttcgggccagtgcactaatgggggcgttgggtattgggctgattatttttgtcgatagcgcctgggtcgctggggtgtctgttgtactctggggactgggtgcctcgctgggcttcccgctgaccatttctgccgccagcgataccggccccgatgcaccaacccgcgtcagtgtggtagcaacgaccggttatctggctttcctcgtcgggccgccgctgctgggctatctcggcgaacattatggattacgtagtgcaatgctggttgtactggcgctggttattctcgcggctattgtcgcgaaagccgtcgccaaacccgataccaaaacgcagacggcgatggagaatagttga

SEQ ID NO: 8463 - protein, 402 aa, Escherichia coli K12
MTVNSSRNALKRRTWALFMFFFLPGLLMASWATRTPAIRDILSVSIAEMGGVLFGLSIGSMSGILCSAWLVKRFGTRNVILVTMSSALIGMMILSLALWLTSPLLFAVGLGVFGASFGSAEVAINVEGAAVEREMNKTVLPMMHGFYSLGTLAGAGVGMALTAFGVPATVHILLAALVGIAPIYIAIQAIPDGTGKNAADGTQHGEKGVPFYRDIQLLLIGVVVLAMAFAEGSANDWLPLLMVDGHGFSPTSGSLIYAGFTLGMTVGRFTGGWFIDRYSRVAVVRASALMGALGIGLIIFVDSAWVAGVSVVLWGLGASLGFPLTISAASDTGPDAPTRVSVVATTGYLAFLVGPPLLGYLGEHYGLRSAMLVVLALVILAAIVAKAVAKPDTKTQTAMENS

SEQ ID NO: 8464 - DNA, 1212 bp, Salmonella enterica subsp. enterica serovar Typhi str. CT18; identical to SEQ ID NO: 422
  CDS (1)..(1212): transl_table=11

SEQ ID NO: 8465 - protein, 403 aa, Salmonella enterica subsp. enterica serovar Typhi str. CT18; identical to SEQ ID NO: 423

SEQ ID NO: 8466 - DNA, 1212 bp, Salmonella typhimurium LT2; identical to SEQ ID NO: 424
  CDS (1)..(1212): transl_table=11

SEQ ID NO: 8467 - protein, 403 aa, Salmonella typhimurium LT2; identical to SEQ ID NO: 425

SEQ ID NO: 8468 - DNA, 1248 bp, Streptomyces coelicolor A3(2); identical to SEQ ID NO: 426
  CDS (1)..(1248): transl_table=11

SEQ ID NO: 8469 - protein, 415 aa, Streptomyces coelicolor A3(2); identical to SEQ ID NO: 427

SEQ ID NO: 8470 - DNA, 1194 bp, Bacillus anthracis str. Ames; identical to SEQ ID NO: 428
  CDS (1)..(1194): transl_table=11

SEQ ID NO: 8471 - protein, 397 aa, Bacillus anthracis str. Ames; identical to SEQ ID NO: 429

SEQ ID NO: 8472 - DNA, 1194 bp, Bacillus anthracis str. Sterne; identical to SEQ ID NO: 430
  CDS (1)..(1194): transl_table=11

SEQ ID NO: 8473 - protein, 397 aa, Bacillus anthracis str. Sterne; identical to SEQ ID NO: 431

SEQ ID NO: 8474 - DNA, 1197 bp, Erwinia carotovora subsp. atroseptica SCRI1043; identical to SEQ ID NO: 432
  CDS (1)..(1197): transl_table=11

SEQ ID NO: 8475 - protein, 398 aa, Erwinia carotovora subsp. atroseptica SCRI1043; identical to SEQ ID NO: 433

SEQ ID NO: 8476 - DNA, 1176 bp, Methylobacillus flagellatus KT; identical to SEQ ID NO: 434
  CDS (1)..(1176): transl_table=11

SEQ ID NO: 8477 - protein, 391 aa, Methylobacillus flagellatus KT; identical to SEQ ID NO: 435

SEQ ID NO: 8478 - DNA, 1194 bp, Bacillus anthracis str. A2012; identical to SEQ ID NO: 436
  CDS (1)..(1194)
  misc_feature (992)..(992): m is a or c

SEQ ID NO: 8479 - protein, 397 aa, Bacillus anthracis str. A2012; identical to SEQ ID NO: 437
  misc_feature (331)..(331): The Xaa at location 331 stands for Ala, or Asp.

SEQ ID NO: 8480 - DNA, 1230 bp, Kineococcus radiotolerans SRS30216; identical to SEQ ID NO: 438
  CDS (1)..(1230): transl_table=11

SEQ ID NO: 8481 - protein, 409 aa, Kineococcus radiotolerans SRS30216; identical to SEQ ID NO: 439

SEQ ID NO: 8482 - DNA, 1176 bp, Kineococcus radiotolerans SRS30216; identical to SEQ ID NO: 440
  CDS (1)..(1176): transl_table=11

SEQ ID NO: 8483 - protein, 391 aa, Kineococcus radiotolerans SRS30216; identical to SEQ ID NO: 441

SEQ ID NO: 8484 - DNA, 1167 bp, Nocardioides sp. JS614; identical to SEQ ID NO: 442
  CDS (1)..(1167): transl_table=11

SEQ ID NO: 8485 - protein, 388 aa, Nocardioides sp. JS614; identical to SEQ ID NO: 443

SEQ ID NO: 8486 - DNA, 25 bp, Artificial sequence
  primer
atgaccgtaaattcttcacgtaatg

SEQ ID NO: 8487 - DNA, 25 bp, Artificial sequence
  primer
ttaactattctccatcgccgtctgc

SEQ ID NO: 8488 - protein, 369 aa, Artificial sequence; identical to SEQ ID NO: 446
  consensus sequence
  Variant (3)..(5): Xaa in position 3 to 5 is any amino acid
  Variant (7)..(7): Xaa in position 7 is any amino acid
  Variant (9)..(9): Xaa in position 9 is any amino acid
  Variant (11)..(13): Xaa in position 11 to 13 is any amino acid
  Variant (15)..(15): Xaa in position 15 is any amino acid
  Variant (17)..(18): Xaa in position 17 to 18 is any amino acid
  Variant (21)..(23): Xaa in position 21 to 23 is any amino acid
  Variant (26)..(26): Xaa in position 26 is any amino acid
  Variant (28)..(29): Xaa in position 28 to 29 is any amino acid
  Variant (31)..(33): Xaa in position 31 to 33 is any amino acid
  Variant (36)..(37): Xaa in position 36 to 37 is any amino acid
  Variant (39)..(41): Xaa in position 39 to 41 is any amino acid
  Variant (43)..(43): Xaa in position 43 is any amino acid
  Variant (46)..(47): Xaa in position 46 to 47 is any amino acid
  Variant (49)..(59): Xaa in position 49 to 59 is any amino acid
  Variant (61)..(61): Xaa in position 61 is any amino acid
  Variant (63)..(74): Xaa in position 63 to 74 is any amino acid
  Variant (76)..(94): Xaa in position 76 to 94 is any amino acid
  Variant (95)..(95): Xaa in position 95 is any or no amino acid
  Variant (97)..(99): Xaa in position 97 to 99 is any amino acid
  Variant (101)..(103): Xaa in position 101 to 103 is any amino acid
  Variant (105)..(108): Xaa in position 105 to 108 is any amino acid
  Variant (110)..(110): Xaa in position 110 is any amino acid
  Variant (115)..(117): Xaa in position 115 to 117 is any amino acid
  Variant (119)..(129): Xaa in position 119 to 129 is any amino acid
  Variant (131)..(133): Xaa in position 131 to 133 is any amino acid
  Variant (135)..(135): Xaa in position 135 is any amino acid
  Variant (138)..(139): Xaa in position 138 to 139 is any amino acid
  Variant (142)..(143): Xaa in position 142 to 143 is any amino acid
  Variant (145)..(152): Xaa in position 145 to 152 is any amino acid
  Variant (154)..(173): Xaa in position 154 to 173 is any amino acid
  Variant (175)..(176): Xaa in position 175 to 176 is any amino acid
  Variant (178)..(198): Xaa in position 178 to 198 is any amino acid
  Variant (199)..(206): Xaa in position 199 to 206 is any or no amino acid
  Variant (208)..(209): Xaa in position 208 to 209 is any amino acid
  Variant (211)..(212): Xaa in position 211 to 212 is any amino acid
  Variant (215)..(215): Xaa in position 215 is any amino acid
  Variant (218)..(218): Xaa in position 218 is any amino acid
  Variant (229)..(231): Xaa in position 229 to 231 is any amino acid
  Variant (236)..(241): Xaa in position 236 to 241 is any amino acid
  Variant (243)..(245): Xaa in position 243 to 245 is any amino acid
  Variant (247)..(248): Xaa in position 247 to 248 is any amino acid
  Variant (250)..(252): Xaa in position 250 to 252 is any amino acid
  Variant (255)..(256): Xaa in position 255 to 256 is any amino acid
  Variant (258)..(262): Xaa in position 258 to 262 is any amino acid
  Variant (264)..(264): Xaa in position 264 is any amino acid
  Variant (267)..(268): Xaa in position 267 to 268 is any amino acid
  Variant (270)..(271): Xaa in position 270 to 271 is any amino acid
  Variant (273)..(273): Xaa in position 273 is any amino acid
  Variant (275)..(282): Xaa in position 275 to 282 is any amino acid
  Variant (284)..(299): Xaa in position 284 to 299 is any amino acid
  Variant (301)..(302): Xaa in position 301 to 302 is any amino acid
  Variant (305)..(305): Xaa in position 305 is any amino acid
  Variant (308)..(308): Xaa in position 308 is any amino acid
  Variant (313)..(315): Xaa in position 313 to 315 is any amino acid
  Variant (319)..(319): Xaa in position 319 is any amino acid
  Variant (321)..(328): Xaa in position 321 to 328 is any amino acid
  Variant (329)..(330): Xaa in position 329 to 330 is any or no amino acid
  Variant (332)..(333): Xaa in position 332 to 333 is any amino acid
  Variant (335)..(337): Xaa in position 335 to 337 is any amino acid
  Variant (339)..(340): Xaa in position 339 to 340 is any amino acid
  Variant (344)..(344): Xaa in position 344 is any amino acid
  Variant (348)..(348): Xaa in position 348 is any amino acid
  Variant (351)..(351): Xaa in position 351 is any amino acid
  Variant (354)..(356): Xaa in position 354 to 356 is any amino acid
  Variant (358)..(358): Xaa in position 358 is any amino acid
  Variant (360)..(360): Xaa in position 360 is any amino acid
  Variant (362)..(364): Xaa in position 362 to 364 is any amino acid
  Variant (367)..(368): Xaa in position 367 to 368 is any amino acid

SEQ ID NO: 8489 - protein, 38 aa, Artificial sequence; identical to SEQ ID NO: 447
  protein pattern
  Variant (2)..(4): Xaa in position 2 to 4 is any amino acid
  Variant (5)..(6): Xaa in position 5 to 6 is any or no amino acid
  Variant (8)..(9): Xaa in position 8 to 9 is any or no amino acid
  Variant (11)..(11): Xaa in position 11 is Ala, Leu or Val
  Variant (12)..(12): Xaa in position 12 is Phe, Ile, Leu or Val
  Variant (13)..(13): Xaa in position 13 is Ile or Val
  Variant (15)..(15): Xaa in position 15 is Ala, Cys or Gly
  Variant (16)..(16): Xaa in position 16 is Met or Val
  Variant (18)..(18): Xaa in position 18 is Phe or Leu
  Variant (19)..(19): Xaa in position 19 is Ala or Val
  Variant (22)..(22): Xaa in position 22 is Ala, Ser or Thr
  Variant (28)..(28): Xaa in position 28 is Ala or Pro
  Variant (29)..(29): Xaa in position 29 is Ile or Leu
  Variant (30)..(30): Xaa in position 30 is Gly, Ile, Leu or Val
  Variant (31)..(31): Xaa in position 31 is Met or Val
  Variant (32)..(32): Xaa in position 32 is Ile or Val
  Variant (35)..(35): Xaa in position 35 is Phe or His
  Variant (36)..(36): Xaa in position 36 is Gly, Asn or Gln
  Variant (37)..(37): Xaa in position 37 is any amino acid
  Variant (38)..(38): Xaa in position 38 is Ala, Asp, Gly or Ser

SEQ ID NO: 8490 - protein, 39 aa, Artificial sequence; identical to SEQ ID NO: 448
  protein pattern
  Variant (2)..(4): Xaa in position 2 to 4 is any amino acid
  Variant (5)..(5): Xaa in position 5 is any or no amino acid
  Variant (7)..(9): Xaa in position 7 to 9 is any or no amino acid
  Variant (11)..(11): Xaa in position 11 is Ile, Leu or Met
  Variant (13)..(13): Xaa in position 13 is Ile or Val
  Variant (14)..(14): Xaa in position 14 is Asp or Glu
  Variant (16)..(16): Xaa in position 16 is Ala or Ser
  Variant (17)..(17): Xaa in position 17 is Ala, Asp, Glu or Ser
  Variant (18)..(18): Xaa in position 18 is Phe, Ile or Val
  Variant (20)..(20): Xaa in position 20 is Gln or Arg
  Variant (21)..(24): Xaa in position 21 to 24 is any amino acid
  Variant (25)..(25): Xaa in position 25 is Pro, Ser or Thr
  Variant (26)..(26): Xaa in position 26 is any amino acid
  Variant (27)..(27): Xaa in position 27 is Leu or Met
  Variant (28)..(28): Xaa in position 28 is Ala, Pro or Thr
  Variant (29)..(29): Xaa in position 29 is any amino acid
  Variant (30)..(30): Xaa in position 30 is Phe, Leu or Met
  Variant (32)..(32): Xaa in position 32 is Ala or Gly
  Variant (33)..(33): Xaa in position 33 is any amino acid
  Variant (34)..(34): Xaa in position 34 is Phe or Tyr
  Variant (36)..(36): Xaa in position 36 is Phe, Leu or Val
  Variant (39)..(39): Xaa in position 39 is Phe, Ile, Leu or Val

SEQ ID NO: 8491 - protein, 39 aa, Artificial sequence; identical to SEQ ID NO: 449
  protein pattern
  Variant (2)..(2): Xaa in position 2 is any amino acid
  Variant (3)..(4): Xaa in position 3 to 4 is any or no amino acid
  Variant (6)..(6): Xaa in position 6 is any amino acid
  Variant (7)..(8): Xaa in position 7 to 8 is any or no amino acid
  Variant (10)..(10): Xaa in position 10 is Ala, Ile or Val
  Variant (11)..(11): Xaa in position 11 is Ser or Thr
  Variant (14)..(14): Xaa in position 14 is Ala or Pro
  Variant (15)..(15): Xaa in position 15 is Ala, Asp or Val
  Variant (16)..(16): Xaa in position 16 is any amino acid
  Variant (19)..(21): Xaa in position 19 to 21 is any amino acid
  Variant (22)..(22): Xaa in position 22 is Ala, Ser or Val
  Variant (24)..(24): Xaa in position 24 is any amino acid
  Variant (25)..(25): Xaa in position 25 is Ala or Glu
  Variant (26)..(26): Xaa in position 26 is Ala, Glu, Gln or Thr
  Variant (29)..(29): Xaa in position 29 is any amino acid
  Variant (30)..(30): Xaa in position 30 is Ile or Val
  Variant (31)..(31): Xaa in position 31 is Ile or Leu
  Variant (32)..(32): Xaa in position 32 is any amino acid
  Variant (33)..(33): Xaa in position 33 is Gly or Ser
  Variant (34)..(34): Xaa in position 34 is Phe, Ile, Leu or Met
  Variant (36)..(36): Xaa in position 36 is any amino acid
  Variant (38)..(38): Xaa in position 38 is Ala or Ser
  Variant (39)..(39): Xaa in position 39 is Ile or Met

SEQ ID NO: 8492 - protein, 32 aa, Artificial sequence; identical to SEQ ID NO: 450
  protein pattern
  Variant (2)..(2): Xaa in position 2 is any or no amino acid
  Variant (4)..(4): Xaa in position 4 is any amino acid
  Variant (5)..(7): Xaa in position 5 to 7 is any or no amino acid
  Variant (9)..(9): Xaa in position 9 is Phe or Tyr
  Variant (10)..(10): Xaa in position 10 is any amino acid
  Variant (14)..(14): Xaa in position 14 is Ala or Val
  Variant (18)..(18): Xaa in position 18 is any amino acid
  Variant (21)..(21): Xaa in position 21 is any amino acid
  Variant (22)..(22): Xaa in position 22 is Leu or Val
  Variant (24)..(24): Xaa in position 24 is Asp, Glu or Gln
  Variant (25)..(26): Xaa in position 25 to 26 is any amino acid
  Variant (27)..(27): Xaa in position 27 is Gly or Ser
  Variant (28)..(28): Xaa in position 28 is Ile or Leu
  Variant (30)..(30): Xaa in position 30 is any amino acid
  Variant (32)..(32): Xaa in position 32 is Ile, Leu or Met

SEQ ID NO: 8493 - protein, 39 aa, Artificial sequence; identical to SEQ ID NO: 451
  protein pattern
  Variant (2)..(4): Xaa in position 2 to 4 is any amino acid
  Variant (6)..(6): Xaa in position 6 is Ala, Thr or Val
  Variant (7)..(7): Xaa in position 7 is Gly, Ile or Val
  Variant (9)..(9): Xaa in position 9 is Ala, Thr or Val
  Variant (10)..(10): Xaa in position 10 is Ala, Gly, Leu or Val
  Variant (11)..(11): Xaa in position 11 is any amino acid
  Variant (13)..(13): Xaa in position 13 is Ala or Thr
  Variant (14)..(14): Xaa in position 14 is any amino acid
  Variant (15)..(15): Xaa in position 15 is Ala or Gly
  Variant (17)..(17): Xaa in position 17 is Phe, Leu or Met
  Variant (18)..(18): Xaa in position 18 is any amino acid
  Variant (19)..(19): Xaa in position 19 is Gly or Ser
  Variant (20)..(21): Xaa in position 20 to 21 is any amino acid
  Variant (22)..(22): Xaa in position 22 is Phe or Leu
  Variant (23)..(23): Xaa in position 23 is Ile, Leu or Val
  Variant (24)..(24): Xaa in position 24 is Asp, Glu or Ser
  Variant (26)..(26): Xaa in position 26 is Phe, His or Tyr
  Variant (27)..(27): Xaa in position 27 is Gly or Ser
  Variant (28)..(28): Xaa in position 28 is Lys or Arg
  Variant (29)..(29): Xaa in position 29 is Ala or Val
  Variant (30)..(30): Xaa in position 30 is Ala, Asn, Pro, Ser or Thr
  Variant (31)..(31): Xaa in position 31 is Ala or Val
  Variant (32)..(32): Xaa in position 32 is Leu or Val
  Variant (34)..(34): Xaa in position 34 is any amino acid
  Variant (35)..(35): Xaa in position 35 is Ser or Thr
  Variant (36)..(36): Xaa in position 36 is Ala or Ile
  Variant (37)..(38): Xaa in position 37 to 38 is any amino acid
  Variant (39)..(39): Xaa in position 39 is Ala or Gly

SEQ ID NO: 8494 - protein, 14 aa, Artificial sequence
  protein pattern
  Variant (3)..(3): Xaa in position 3 is Ile or Leu
  Variant (6)..(6): Xaa in position 6 is Ala or Ser
  Variant (11)..(11): Xaa in position 11 is Ile, Leu or Val
  Variant (12)..(12): Xaa in position 12 is Ala, Gly or Thr
  Variant (13)..(13): Xaa in position 13 is Ile, Leu or Met
WGXGAXLGFPXXXS

SEQ ID NO: 8495 - protein, 28 aa, Artificial sequence
  protein pattern
  Variant (2)..(2): Xaa in position 2 is Ile, Leu or Val
  Variant (3)..(3): Xaa in position 3 is Ala or Leu
  Variant (4)..(4): Xaa in position 4 is Ala, Cys, Ser or Val
  Variant (5)..(6): Xaa in position 5 to 6 is Ala, Gly or Ser
  Variant (7)..(8): Xaa in position 7 to 8 is any amino acid
  Variant (9)..(9): Xaa in position 9 is Ile or Val
  Variant (10)..(12): Xaa in position 10 to 12 is any amino acid
  Variant (14)..(14): Xaa in position 14 is any amino acid
  Variant (16)..(20): Xaa in position 16 to 20 is any amino acid
  Variant (21)..(27): Xaa in position 21 to 27 is any or no amino acid
GXXXXXXXXXXXGXRXXXXXXXXXXXXG

SEQ ID NO: 8496 - protein, 19 aa, Artificial sequence
  protein pattern
  Variant (3)..(3): Xaa in position 3 is any amino acid
  Variant (4)..(4): Xaa in position 4 is Phe, Leu, Met or Val
  Variant (6)..(6): Xaa in position 6 is Ala, Gly or Ile
  Variant (7)..(7): Xaa in position 7 is Ala or Leu
  Variant (8)..(8): Xaa in position 8 is Ala, Gly or Ser
  Variant (9)..(9): Xaa in position 9 is any amino acid
  Variant (10)..(10): Xaa in position 10 is Phe, Ile or Leu
  Variant (11)..(11): Xaa in position 11 is any amino acid
  Variant (12)..(12): Xaa in position 12 is Ala or Ser
  Variant (13)..(13): Xaa in position 13 is any amino acid
  Variant (14)..(14): Xaa in position 14 is Ala, Ser or Val
  Variant (15)..(15): Xaa in position 15 is Ala, Thr or Val
  Variant (16)..(18): Xaa in position 16 to 18 is any amino acid
  Variant (19)..(19): Xaa in position 19 is Ala, Asp, Gly, Thr or Val
VLXXVXXXXXXXXXXXXXX

SEQ ID NO: 8497 - DNA, 468 bp, Escherichia coli
  CDS (1)..(468): transl_table=11
atgtacattatggaactgacgactcgcactttacctgcgcggaaacatattgcgctggtggcacacgatcactgcaaacaaatgctgatgagctgggtggaacggcatcaaccgttactggaacaacacgtactgtatgcaacaggcactaccggtaacttaatttcccgcgcgaccggcatgaacgtcaacgcgatgttgagtggcccaatggggggtgaccagcaggttggcgcattgatctcagaagggaaaattgatgtattgattttcttctgggatccactaaatgccgtgccgcacgatcctgacgtgaaagccttgctgcgtctggcgacggtatggaacattccggtcgccaccaacgtggcaacggcagacttcataatccagtcgccgcatttcaacgacgcggtcgatattctgatccccgattatcagcgttatctcgcggaccgtctgaagtaa

SEQ ID NO: 8498 - protein, 155 aa, Escherichia coli
MYIMELTTRTLPARKHIALVAHDHCKQMLMSWVERHQPLLEQHVLYATGTTGNLISRATGMNVNAMLSGPMGGDQQVGALISEGKIDVLIFFWDPLNAVPHDPDVKALLRLATVWNIPVATNVATADFIIQSPHFNDAVDILIPDYQRYLADRLK

SEQ ID NO: 8499 - DNA, 501 bp, Thermotoga maritima MSB8; identical to SEQ ID NO: 537
  CDS (1)..(501): transl_table=11

SEQ ID NO: 8500 - protein, 166 aa, Thermotoga maritima MSB8; identical to SEQ ID NO: 538

SEQ ID NO: 8501 - DNA, 450 bp, Clostridium acetobutylicum ATCC 824; identical to SEQ ID NO: 539
  CDS (1)..(450): transl_table=11

SEQ ID NO: 8502 - protein, 149 aa, Clostridium acetobutylicum ATCC 824; identical to SEQ ID NO: 540

SEQ ID NO: 8503 - DNA, 537 bp, Bacteroides thetaiotaomicron VPI-5482; identical to SEQ ID NO: 541
  CDS (1)..(537): transl_table=11

SEQ ID NO: 8504 - protein, 178 aa, Bacteroides thetaiotaomicron VPI-5482; identical to SEQ ID NO: 542

SEQ ID NO: 8505 - DNA, 525 bp, Bacteroides thetaiotaomicron VPI-5482; identical to SEQ ID NO: 543
  CDS (1)..(525): transl_table=11

SEQ ID NO: 8506 - protein, 174 aa, Bacteroides thetaiotaomicron VPI-5482; identical to SEQ ID NO: 544

SEQ ID NO: 8507 - DNA, 384 bp, Bdellovibrio bacteriovorus HD100
  CDS (1)..(384): transl_table=11
atgaaaaaacaaaagaaaaagacattggccttgattgctcacgacggaaagaaagctctgatggtttctttcgtgcgtgatcatctggagactttcaaaaacttcactttggtgggcaccggcaataccggccgcctgatccaggccgcgggattgaaagtcacacgcaggctttcgggaccattgggtggggacgcccagatcgctgccgaggttgcgactggcaagtgccaaggcgtgatctttttccgtgatccgctgggcatgcatccccatgacccggacatctcgatgctgatgcgaatctgtgacgttcataacgttcctttggcgaccaatccggcgacggctgaactgctgattacgggcctttcccacgactag

SEQ ID NO: 8508 - protein, 127 aa, Bdellovibrio bacteriovorus HD100
MKKQKKKTLALIAHDGKKALMVSFVRDHLETFKNFTLVGTGNTGRLIQAAGLKVTRRLSGPLGGDAQIAAEVATGKCQGVIFFRDPLGMHPHDPDISMLMRICDVHNVPLATNPATAELLITGLSHD

SEQ ID NO: 8509 - DNA, 387 bp, Thermus thermophilus HB27
  CDS (1)..(387): transl_table=11
atgcccatgaaggccctggccctcatcgcccacgacgccaagaaggacgagatggtggccttttgcctgcggcacaaggacgtcctggcccgctaccccctactcgccacggggaccacgggggcccgcatccaggaggccacgggcctcgccgtggagcgggtgctctccggtcccttgggcggggacctgcagatcggggcccgggtggccgagggaaaggtgttggcggtggtcttcctccaggaccccctgaccgccaagccccacgaaccggacgtccaggccctgatgcgggtctgcaacgtgcacggggtgcccctggccaccaacttggtggcggcggaggccctcatcgcctggatccgcaagggaaccccccaatag

SEQ ID NO: 8510 - protein, 128 aa, Thermus thermophilus HB27
MPMKALALIAHDAKKDEMVAFCLRHKDVLARYPLLATGTTGARIQEATGLAVERVLSGPLGGDLQIGARVAEGKVLAVVFLQDPLTAKPHEPDVQALMRVCNVHGVPLATNLVAAEALIAWIRKGTPQ

SEQ ID NO: 8511 - DNA, 414 bp, Bacillus licheniformis ATCC 14580
  CDS (1)..(414): transl_table=11
ttgaaaatcgccttaattgcccatgaccgaaaaaaacaggatatgattcagctgacgaccgcttataaagacattttaaaaaagcatgagctgtttgcgacaggaacgaccggtttaaaaatcactgaagcgacagggctgcccgtcgtgcgctttcaatcggggccgcttggcggtgaccagcagatcggcgctttgatcgcgaaaaatgacatcgatcttgtgatttttctgagagacccgctgacggcccagccgcacgaacctgacgtgtcagcgcttatccgcttgtctgacgtttatgccattccgctcgccaccaacatgggaactgcggaaatcttgatccgttctgtcgaggaaggcgcgtttgagttcagaaacattgtccacggcagggatcgcgatgcttga

SEQ ID NO: 8512 - protein, 137 aa, Bacillus licheniformis ATCC 14580
MKIALIAHDRKKQDMIQLTTAYKDILKKHELFATGTTGLKITEATGLPVVRFQSGPLGGDQQIGALIAKNDIDLVIFLRDPLTAQPHEPDVSALIRLSDVYAIPLATNMGTAEILIRSVEEGAFEFRNIVHGRDRDA

SEQ ID NO: 8513 - DNA, 507 bp, Mannheimia succiniciproducens MBEL55E; identical to SEQ ID NO: 545
  CDS (1)..(507): transl_table=11

SEQ ID NO: 8514 - protein, 168 aa, Mannheimia succiniciproducens MBEL55E; identical to SEQ ID NO: 546

SEQ ID NO: 8515 - DNA, 390 bp, Silicibacter pomeroyi DSS-3
  CDS (1)..(390): transl_table=11
atgctgaaatctaagccaaaaaacatcgccctcatcgcacacgatctgaagaagcgatctttggccacctgggtattcaacaatcaaaccaagctgaagcgccacaacattctcgccacggctacgaccgggggcatcatacagaaacattgtccgcaattgcgtatccgggtgacaaaaagcggccctcttggcggggatcagcaaatcggagcgatgattgccgatgacggtatcgacctgctgatattcttcacggatccgctttccccacatccacatgacgtcgacgtgaaggcgttgagcagacttgccgtcgtctatgacgtgcccatggcctgcagcggagccacagcagacctgatcgcggcctctggctacctggattag

SEQ ID NO: 8516 - protein, 129 aa, Silicibacter pomeroyi DSS-3
MLKSKPKNIALIAHDLKKRSLATWVFNNQTKLKRHNILATATTGGIIQKHCPQLRIRVTKSGPLGGDQQIGAMIADDGIDLLIFFTDPLSPHPHDVDVKALSRLAVVYDVPMACSGATADLIAASGYLD

SEQ ID NO: 8517 - DNA, 435 bp, Dehalococcoides ethenogenes 195
  CDS (1)..(435): transl_table=11
atggaaagaataactttggctctggtagcccatgataacaagaagcaggaaatagtagacctggtaaagaagcacgaaaccgacttggcaggtcttaatctggtagccacccgcaccaccggtaagctcattcaggccagcactgatctgaatgtaaatttactccaaagcggccctctgggaggtgaccagcagattggtgccatggtagccagcggggtagtaacggctatcatattccttcgtgaccccctgaccgcccagccccatgaacctgacatttccgccctgatgcgcgtgtgtgacgtacataacgtacccttagctaccaacgtatctaccgctgaagctgttttgcaccttatattcgagcatccggaggaacttaaggagcacaggctgaagagccagcttttaaatagtttaaacagctga

SEQ ID NO: 8518 - protein, 144 aa, Dehalococcoides ethenogenes 195
MERITLALVAHDNKKQEIVDLVKKHETDLAGLNLVATRTTGKLIQASTDLNVNLLQSGPLGGDQQIGAMVASGVVTAIIFLRDPLTAQPHEPDISALMRVCDVHNVPLATNVSTAEAVLHLIFEHPEELKEHRLKSQLLNSLNS

SEQ ID NO: 8519 - DNA, 432 bp, Dehalococcoides ethenogenes 195
  CDS (1)..(432): transl_table=11
atggaagaacctaagattactctgggtcttattgcccacaataactgcaaaaaggacatggtacacctgattcaagcttatgcccacctgatgaaggggcatcaccttattgctactaaaagcaccggcgaacttatccggaaacataccgggctgccggttatactcaaggaaagcggccctgacggcggggaactgcagctgggagggtttgtggccagcggcataatcaaagccgtaatcttcctgcgtgacccgctgaaacgcaaaagccatgaaccggatgttaccgccctgatgcgggtatgcgatgcccataatatcccgctggctaccaaccgggctacggctgcctgtgtccttcatacagtacttttccaccccgacaaactggaggatatgccgcctaaagaaagcgacgacgacccttaa

SEQ ID NO: 8520 - protein, 143 aa, Dehalococcoides ethenogenes 195
MEEPKITLGLIAHNNCKKDMVHLIQAYAHLMKGHHLIATKSTGELIRKHTGLPVILKESGPDGGELQLGGFVASGIIKAVIFLRDPLKRKSHEPDVTALMRVCDAHNIPLATNRATAACVLHTVLFHPDKLEDMPPKESDDDP

SEQ ID NO: 8521 - DNA, 519 bp, Bacteroides fragilis NCTC 9343; identical to SEQ ID NO: 547
  CDS (1)..(519): transl_table=11

SEQ ID NO: 8522 - protein, 172 aa, Bacteroides fragilis NCTC 9343; identical to SEQ ID NO: 548

SEQ ID NO: 8523 - DNA, 465 bp, Pseudomonas fluorescens Pf-5; identical to SEQ ID NO: 551
  CDS (1)..(465): transl_table=11

SEQ ID NO: 8524 - protein, 154 aa, Pseudomonas fluorescens Pf-5; identical to SEQ ID NO: 552

SEQ ID NO: 8525 - DNA, 393 bp, Ralstonia eutropha JMP134
  CDS (1)..(393): transl_table=11
ttgatgacccgcccacgtatcgccctgattgcacacgaccacaagaaagacgacatcgttgcctttgccacgcgtcaccgcgaattcctttcgcagtgcgaactgctcgcgaccggcaccaccggcggccggctgatcgatgaagtcaagctcgatgtgacccgcatgctgtcggggccgtggggcggcgacctgcagatcggcgcgcaactcgcggaagggcgcgtgcgtgccgtaatcttcctgcgcgatccgatgacgccgcagccgcacgaaccggacatcaatgcgctggtgcgcgcctgcgacgtgcacaacgtgccgtgcgcgaccaacgtggccacggccgacctgctgatcgccgagctgagccgcgtcgaagcgcagccctga

SEQ ID NO: 8526 - protein, 130 aa, Ralstonia eutropha JMP134
MMTRPRIALIAHDHKKDDIVAFATRHREFLSQCELLATGTTGGRLIDEVKLDVTRMLSGPWGGDLQIGAQLAEGRVRAVIFLRDPMTPQPHEPDINALVRACDVHNVPCATNVATADLLIAELSRVEAQP

SEQ ID NO: 8527 - DNA, 435 bp, Dehalococcoides sp. CBDB1
  CDS (1)..(435): transl_table=11
atggaaagaataactttagctctggtagcccatgataacaagaagcaggaaatggttgaactggtgaagaagcatgaaacagacttggcaagccttaatctggtagccacccgcaccaccggtaagctgattcaggcaagcacaagtctgaatgttaccctgttgcaaagcggccctctgggaggtgaccagcagattggtgccatggtagccagcggggtagtaaccgctatcatatttcttcgtgaccccctgaccgcccagccccatgaacctgatatctccgccctgatgcgcgtgtgtgacgtacataatgtacccttagctaccaacgtatctaccgctgaggctgtattgcaccttatattcgagcatccggaggaacttaaggagcataggctgaagagccagcttttaaatagtctgaatagctaa

SEQ ID NO: 8528 - protein, 144 aa, Dehalococcoides sp. CBDB1
MERITLALVAHDNKKQEMVELVKKHETDLASLNLVATRTTGKLIQASTSLNVTLLQSGPLGGDQQIGAMVASGVVTAIIFLRDPLTAQPHEPDISALMRVCDVHNVPLATNVSTAEAVLHLIFEHPEELKEHRLKSQLLNSLNS

SEQ ID NO: 8529 - DNA, 366 bp, Carboxydothermus hydrogenoformans Z-2901
  CDS (1)..(366): transl_table=11
ttgatgaaagttgctttaatagcccacgacgataaaaaggatgatcttcttgcttttgtaaaaactcaccgggagttttttgcccgccatgaactttttgccaccggaacgacagggaaaattatttcagaaaatacggggctgacggtccaccgttttttgtccgggccccttgggggagatcaacaaattggagctatggtagcggcgggagagattaaactggtaattttctttcgcgatcccttaacggctcaacctcatgagccggatataacagctcttttacgggtatgtgacgttcataatgtgccaattgccaccaactggagcagtgccgaattgtttttacgagccttaaattaa

SEQ ID NO: 8530 - protein, 121 aa, Carboxydothermus hydrogenoformans Z-2901
MMKVALIAHDDKKDDLLAFVKTHREFFARHELFATGTTGKIISENTGLTVHRFLSGPLGGDQQIGAMVAAGEIKLVIFFRDPLTAQPHEPDITALLRVCDVHNVPIATNWSSAELFLRALN

SEQ ID NO: 8531 - DNA, 393 bp, Burkholderia sp. 383
  CDS (1)..(393): transl_table=11
atgagcaaaccccgcatcgcattgattgcgcacgacgcgaagaaggacgagatcgtcgcgctcgcgggcgaattccgcgcgacgctcgcgcaatgccggctggtggcgaccggcacgacgggcggccgcatcgcggacgcgcacgggctcgaagtcgagcgcaagctgtcggggccgctcggcggcgatctgcagatcggtgcggaactggccgacggccgcatcgacatcgtcgtgttcctgcgcgacccgatgaccgcacagccgcacgaccccgacatcaccgcgctcgtgcgcgcatgcgacgtgcacgacgtgccggtcgcgaccaacgtcgccaccgcgcggatgctgctcgacgatctggcgcgcaacatgcaggacgtttgctag

SEQ ID NO: 8532 - protein, 130 aa, Burkholderia sp. 383
MSKPRIALIAHDAKKDEIVALAGEFRATLAQCRLVATGTTGGRIADAHGLEVERKLSGPLGGDLQIGAELADGRIDIVVFLRDPMTAQPHDPDITALVRACDVHDVPVATNVATARMLLDDLARNMQDVC

SEQ ID NO: 8533 - DNA, 444 bp, Desulfovibrio desulfuricans G20; identical to SEQ ID NO: 553
  CDS (1)..(444): transl_table=11

SEQ ID NO: 8534 - protein, 147 aa, Desulfovibrio desulfuricans G20; identical to SEQ ID NO: 554

SEQ ID NO: 8535 - DNA, 468 bp, Rhodospirillum rubrum ATCC 11170; identical to SEQ ID NO: 555
  CDS (1)..(468): transl_table=11

SEQ ID NO: 8536 - protein, 155 aa, Rhodospirillum rubrum ATCC 11170; identical to SEQ ID NO: 556

SEQ ID NO: 8537 - DNA, 387 bp, Moorella thermoacetica ATCC 39073
  CDS (1)..(387): transl_table=11
atgcgtattgccctcattgcccacgaccgcaagaaggatgacctggttaattttgttgatgaacataaggagttatttgccggccatcgcctggtggctaccggtactaccgggaaaaggattatggagcgcaccggcctgaaggttcaccggcttatgtccggtcccctgggtggcgaccagcagatggggtccctggtggccaggggacgattggacctggttatcttcctgcgcgatcccctgacgccccagccccatgaaccggatatcaacgcccttctgcgcatctgtgacgttcataatgtaccggccgctaccaacctggccacagcggccatctttctgcggtacatgcaagaccatcccggcaaccgccaggcttaa

SEQ ID NO: 8538 - protein, 128 aa, Moorella thermoacetica ATCC 39073
MRIALIAHDRKKDDLVNFVDEHKELFAGHRLVATGTTGKRIMERTGLKVHRLMSGPLGGDQQMGSLVARGRLDLVIFLRDPLTPQPHEPDINALLRICDVHNVPAATNLATAAIFLRYMQDHPGNRQA

SEQ ID NO: 8539 - DNA, 393 bp, Burkholderia thailandensis E264
  CDS (1)..(393): transl_table=11
atgagcacaccccgcattgcgctgatcgcgcacgatgcgaagaaggacgaaatcgtcgcgctcgcgggcgcgtaccgcgcggcgctcgcgcaatgccggctcgtcgcgacgggcacgacgggcgggcggatcgcgcaggcgcacgggctcgatgtcgagcgcaagctgtcggggccgctcggcggcgacttgcagatcggcgcggagcttgccgacgggcgcgtcgacatcgtgatcttcctgcgcgatccgatgaccgcgcagccgcacgaccccgacatcaccgcgctcgtgcgcgcctgcgacgtgcacgacgtgccggtcgcgacgaacgtcgcgacggcgcgcgtgctgctcgacgatctggcgcgccggctgccggtgaaagcgtga

SEQ ID NO: 8540 - protein, 130 aa, Burkholderia thailandensis E264
MSTPRIALIAHDAKKDEIVALAGAYRAALAQCRLVATGTTGGRIAQAHGLDVERKLSGPLGGDLQIGAELADGRVDIVIFLRDPMTAQPHDPDITALVRACDVHDVPVATNVATARVLLDDLARRLPVKA

SEQ ID NO: 8541 - DNA, 465 bp, Saccharophagus degradans 2-40; identical to SEQ ID NO: 557
  CDS (1)..(465): transl_table=11

SEQ ID NO: 8542 - protein, 154 aa, Saccharophagus degradans 2-40; identical to SEQ ID NO: 558

SEQ ID NO: 8543 - DNA, 390 bp, Burkholderia xenovorans LB400
  CDS (1)..(390): transl_table=11
atgaccacccgtatcgcgctgatcgcgcacgatcataaaaaggatgacatcgtcaaactggccggcgaatacgtcgacacgctcaggcgttgcgacatcgtggcaaccggcacgaccggcgggcgcattgccgacgcgcacggcctcgcggtcgagcggatgttgtccggcccgcatggcggcgacctgcagatcggcgcgcagctcgcggaagggcgggtggacatggtgatcttcctgcgcgacccgatgacgccgcagccgcacgaaccggacatcaacgccctcgtgcgcgcgtgcgacgtgcacaacattccgtgcgccaccaacatttcgacagcgcgaatggtgctcgactcgctgaccttgcgcctcacgcagcaggtctga

SEQ ID NO: 8544 - protein, 129 aa, Burkholderia xenovorans LB400
MTTRIALIAHDHKKDDIVKLAGEYVDTLRRCDIVATGTTGGRIADAHGLAVERMLSGPHGGDLQIGAQLAEGRVDMVIFLRDPMTPQPHEPDINALVRACDVHNIPCATNISTARMVLDSLTLRLTQQV

SEQ ID NO: 8545 - DNA, 423 bp, Ralstonia metallidurans CH34
  CDS (1)..(423): transl_table=11
atgcgcagcaagccacgcatcgcgctgatcgcgcacgatcgcaagaaggatgacatcgtcgcgttcgcgggtcgccatcgggacttcctggctcaatgcgacctgttggccaccggcaccaccggcggccggatcgctgccgaaacggggctgcctgtcgcgcggatgctgtccggcccgtggggcggtgacctgcagatcggcgcgcaactcgcggaaggccgcgtcaccgcggtggtcttcctgcgcgatccgatgacgccgcagccgcacgaaccggatatcaacgcgctggtgcgcgcgtgtgacgtgcacaacgtgccatgcgcgacgaaccttgccacggcggaactggtggtcgtggaactagcgcggatctgctttgaggaagatcaggcagccgccgacgacgcggcaccctga

SEQ ID NO: 8546 - protein, 140 aa, Ralstonia metallidurans CH34
MRSKPRIALIAHDRKKDDIVAFAGRHRDFLAQCDLLATGTTGGRIAAETGLPVARMLSGPWGGDLQIGAQLAEGRVTAVVFLRDPMTPQPHEPDINALVRACDVHNVPCATNLATAELVVVELARICFEEDQAAADDAAP

SEQ ID NO: 8547 - DNA, 471 bp, Acidobacteria bacterium Ellin345; identical to SEQ ID NO: 559
  CDS (1)..(471): transl_table=11

SEQ ID NO: 8548 - protein, 156 aa, Acidobacteria bacterium Ellin345; identical to SEQ ID NO: 560

SEQ ID NO: 8549 - DNA, 414 bp, Mesorhizobium sp. BNC1; identical to SEQ ID NO: 569
  CDS (1)..(414): transl_table=11

SEQ ID NO: 8550 - protein, 137 aa, Mesorhizobium sp. BNC1; identical to SEQ ID NO: 570

SEQ ID NO: 8551 - DNA, 360 bp, Clostridium perfringens ATCC 13124
  CDS (1)..(360): transl_table=11
atgaaaatagcattaatagcacatgataagaaaaaagaagaaatgatagagcttgcaaaagattttgaagataagttaagtaaacatatacttgttgcaacaggtactacaggacttaaagttatgcaaaatacatctttagacgttaaaagatgtaaaagtggcccactagggggagatcaagaaataggagcgatggtagcaaaccatgatgttgatatggtaattttcttaagagatccattaacagctcaacctcatgaaccagatattagtgcattacttagactttgtgatgtttacaaggttccactagctacaaatacagaaagcgctaagcttataatggctgatatttag

SEQ ID NO: 8552 - protein, 119 aa, Clostridium perfringens ATCC 13124
MKIALIAHDKKKEEMIELAKDFEDKLSKHILVATGTTGLKVMQNTSLDVKRCKSGPLGGDQEIGAMVANHDVDMVIFLRDPLTAQPHEPDISALLRLCDVYKVPLATNTESAKLIMADI

SEQ ID NO: 8553 - DNA, 381 bp, Rhizobium leguminosarum bv. viciae 3841
  CDS (1)..(381): transl_table=11
atggccggcggcaaatgccttgcgctgatcgcgcatgaccagaagaaggacgacatggcggcgttcgcccgcgccaaccgggacattctctcgcgctggaagatcgtcgcgacgggcacgaccggcgggcgggtgctcgatgccgctcccgatcttgacgtcgtcaggctgaaaagcgggccgctcggcggcgaccagcagatcggcgcgctgatttcgaccggcgaggtcgacgccctgatcttcttcgtcgaccccttgacgccgatgccgcacgatgtcgacgtgaaggcactgatgcggctggcgatcgtctacgatattccgatggcgctcaaccacgcgaccgctataaaacttcttcccacactcgaagcctga

SEQ ID NO: 8554 - protein, 126 aa, Rhizobium leguminosarum bv. viciae 3841
MAGGKCLALIAHDQKKDDMAAFARANRDILSRWKIVATGTTGGRVLDAAPDLDVVRLKSGPLGGDQQIGALISTGEVDALIFFVDPLTPMPHDVDVKALMRLAIVYDIPMALNHATAIKLLPTLEA

SEQ ID NO: 8555 - DNA, 459 bp, Haemophilus somnus 2336; identical to SEQ ID NO: 563
  CDS (1)..(459): transl_table=11

SEQ ID NO: 8556 - protein, 152 aa, Haemophilus somnus 2336; identical to SEQ ID NO: 564

SEQ ID NO: 8557 - DNA, 459 bp, Haemophilus influenzae R2846; identical to SEQ ID NO: 565
  CDS (1)..(459): transl_table=11

SEQ ID NO: 8558 - protein, 152 aa, Haemophilus influenzae R2846; identical to SEQ ID NO: 566

SEQ ID NO: 8559 - DNA, 459 bp, Haemophilus influenzae R2866; identical to SEQ ID NO: 567
  CDS (1)..(459): transl_table=11

SEQ ID NO: 8560 - protein, 152 aa, Haemophilus influenzae R2866; identical to SEQ ID NO: 568

SEQ ID NO: 8561 - DNA, 435 bp, Exiguobacterium sibiricum 255-15
  CDS (1)..(435): transl_table=11
atgaatattgccttaattgcacacgatgagaaaaaagacgagatgatgatgtttacacgggcatatgaagcctactttgccaaaaataccttatatgccacgggtacgacagggcaacggatcatggaggcgaccgcattgacggtccaccgctgtaagtcgggaccgctcggcggcgatcaggaaatcggggcgatggttgcccgtggagaaattgatatcgtcatttttttgcgggacccactgaccgcccaaccccacgaaccggacgtatcggcgttaattcgtttgtgtgatgtttacgatttgccgcttgcgacaaatgtcggaaccgccgaaattttgataaacggattggaacagggagagtttcaatggcgggaaatcattcggaaacgtcatgaagaagaacagcggaaatttttaaccgattaa

SEQ ID NO: 8562 - protein, 144 aa, Exiguobacterium sibiricum 255-15
MNIALIAHDEKKDEMMMFTRAYEAYFAKNTLYATGTTGQRIMEATALTVHRCKSGPLGGDQEIGAMVARGEIDIVIFLRDPLTAQPHEPDVSALIRLCDVYDLPLATNVGTAEILINGLEQGEFQWREIIRKRHEEEQRKFLTD

SEQ ID NO: 8563 - DNA, 462 bp, Pseudoalteromonas tunicata D2; identical to SEQ ID NO: 571
  CDS (1)..(462): transl_table=11

SEQ ID NO: 8564 - protein, 153 aa, Pseudoalteromonas tunicata D2; identical to SEQ ID NO: 572

SEQ ID NO: 8565 - DNA, 459 bp, Photobacterium sp. SKA34; identical to SEQ ID NO: 573
  CDS (1)..(459): transl_table=11

SEQ ID NO: 8566 - protein, 152 aa, Photobacterium sp. SKA34; identical to SEQ ID NO: 574

SEQ ID NO: 8567 - DNA, 456 bp, Vibrio sp. Ex25
  CDS (1)..(456): transl_table=11
atgcaaaaaaccattcgtaccatgccaacccacaaacatgtggctttggttgcccatgacaactgcaaacctgagctacttcgctgggtaaaagaaaacaaagaaaaactgcagagtcactttctttacgcgactggcacaaccggacacatgttgagcaaagaaactggactggcgattaagagcatgatcagtggcccaatgggcggtgaccaacaacttggcgcgctcatttcagaaggtaagatcgacgttctcgttttcttctgggatccgctaaacgccgtacctcacgacccagacgttaaagcgcttcttcgtattgctagcgtttggaatattcctgtggcaacgaaccgagccaccgctaagttcttgtttaactcccctcttcttgagcaagaagtggatattgaagtaccggattacgaagcgtatcttgctgaacgcatgtaa

SEQ ID NO: 8568 - protein, 151 aa, Vibrio sp. Ex25
MQKTIRTMPTHKHVALVAHDNCKPELLRWVKENKEKLQSHFLYATGTTGHMLSKETGLAIKSMISGPMGGDQQLGALISEGKIDVLVFFWDPLNAVPHDPDVKALLRIASVWNIPVATNRATAKFLFNSPLLEQEVDIEVPDYEAYLAERM

SEQ ID NO: 8569 - DNA, 465 bp, Alteromonadales bacterium TW-7
  CDS (1)..(465): transl_table=11
atggaacaaaaaacgcaatctctccctgcaaagaaaaatattgcccttgttgctcacgatggcaaaaaagccgcgctaaagctgtggtgcgacaaacataaaaatacacttagcaagcacaccttatacggcacaggtacaacggggcatttaattcaaaaaagtacagggcttgatgttgttcagcttttaagtggccctatgggtggcgaccaacaattgggcgcaaaaatagcagaacatgaaattcatgttttaatatttttttgggaccctttagcttctcagcctcatgaccctgatgtaaaagcattactgcgcttagcggcagtgtggaatattcctgtagcgtgtaacgaggtaagtgctgatatgctgttaagctctcctttaatggaaaacgagcttgagcgtaccttgccagattacgaaaaatacctcgcaacccgacaaataagtctttaa

SEQ ID NO: 8570 - protein, 154 aa, Alteromonadales bacterium TW-7
MEQKTQSLPAKKNIALVAHDGKKAALKLWCDKHKNTLSKHTLYGTGTTGHLIQKSTGLDVVQLLSGPMGGDQQLGAKIAEHEIHVLIFFWDPLASQPHDPDVKALLRLAAVWNIPVACNEVSADMLLSSPLMENELERTLPDYEKYLATRQISL

SEQ ID NO: 8571 - DNA, 465 bp, Pseudomonas chlororaphis; identical to SEQ ID NO: 575
  CDS (1)..(465): transl_table=11

SEQ ID NO: 8572 - protein, 154 aa, Pseudomonas chlororaphis; identical to SEQ ID NO: 576

SEQ ID NO: 8573 - DNA, 384 bp, Agrobacterium tumefaciens; identical to SEQ ID NO: 577
  CDS (1)..(384): transl_table=11

SEQ ID NO: 8574 - protein, 127 aa, Agrobacterium tumefaciens; identical to SEQ ID NO: 578

SEQ ID NO: 8575 - DNA, 396 bp, Bacillus anthracis
  CDS (1)..(396): transl_table=11
atgaaaattgccttaatcgcacatgacaaaaagaaagaagacatggtttcgtttgcatacgcatataaaccaatttttgaacaacatgaattatttgcaacaggaacgacaggacttcgtattatggaagcgaccggcttagttgtaacaagatatcaatctggtcctcttggcggcgatcaagaaattggtgcaatgattgcaaaaaatgatttagacatggtaattttcttccgcgatccattaacagcacaaccgcatgaaccggatgtgaatgcattgcttcgtttatgtgatgtatatgcaattccacttgcaacgaatatggcaagtgctgaaatgttaatgcacgcattagagcgaggagatttagattaccgcaagttaagaaaatga

SEQ ID NO: 8576 - protein, 131 aa, Bacillus anthracis
MKIALIAHDKKKEDMVSFAYAYKPIFEQHELFATGTTGLRIMEATGLVVTRYQSGPLGGDQEIGAMIAKNDLDMVIFFRDPLTAQPHEPDVNALLRLCDVYAIPLATNMASAEMLMHALERGDLDYRKLRK

SEQ ID NO: 8577 - DNA, 417 bp, Bacillus halodurans
  CDS (1)..(417): transl_table=11
atgagaatcgccctaattgcccacgataagaaaaaagatgaaatggttcaatttacgattgcctataaagacgtattaaaagatcacgaattgtatgctacaggtacgacaggtatgagaatcatggaagccgcacaattaccggtgaaacgattcaaatcaggaccgttaggaggcgaccagcaaattggtgcccttgtagcagaaaataaatttgaccttattatctttttacgcgatcctttaactgcccagccacatgaaccggatgtgaccgcccttgttcgcctatgtgacgtacaacgagtccctcttgcgacgaatatagggacggccgagatcttaataaaagggctagcccggggtgattttacatggcgtgaacttgtccatgatgaggaggagccacgtgtctaa

SEQ ID NO: 8578 - protein, 138 aa, Bacillus halodurans
MRIALIAHDKKKDEMVQFTIAYKDVLKDHELYATGTTGMRIMEAAQLPVKRFKSGPLGGDQQIGALVAENKFDLIIFLRDPLTAQPHEPDVTALVRLCDVQRVPLATNIGTAEILIKGLARGDFTWRELVHDEEEPRV

SEQ ID NO: 8579 - DNA, 594 bp, Bacillus subtilis
  CDS (128)..(541): transl_table=11
acgccatgattcttataaccgtgcttctttcatgtcaggcgttaaactgtcagtcgaacaagtcatgaagattgatcagcttgtgtatggtttagaaaatatcattgattagacggggggataaacaatgaaaattgctttgatcgcgcatgacaagaaaaaacaggatatggttcaatttacgactgcctatcgggatattttaaagaatcatgatctatacgcaaccggaaccacagggttgaaaattcatgaggcgacaggtcttcaaattgaacgttttcaatccggccctttagggggagaccagcaaatcggtgcactgatcgctgccaatgcactcgatcttgtcatttttttgcgcgacccgctgaccgcgcagccgcatgaaccggatgtctcggcattaatccgtttatgtgatgtgtattccattccgctcgccacaaatatgggtactgcggaaattcttgtgcgcacacttgatgaaggtgttttcgaattccgtgaccttcttcggggagaagagccgaatgtataatgctgacgttcttgcttttggcgcccacagtgatgatgtcgagatcggaatgg

SEQ ID NO: 8580 - protein, 137 aa, Bacillus subtilis
MKIALIAHDKKKQDMVQFTTAYRDILKNHDLYATGTTGLKIHEATGLQIERFQSGPLGGDQQIGALIAANALDLVIFLRDPLTAQPHEPDVSALIRLCDVYSIPLATNMGTAEILVRTLDEGVFEFRDLLRGEEPNV

SEQ ID NO: 8581 - DNA, 381 bp, Borrelia garinii
  CDS (1)..(381): transl_table=11
atggaaaaaaaaatagcattaattgcacatgataaaaaaaaggatgatttggtaaattttgtaaaacaaaactatctcttcttatccaaattcaagcttattgcaacagggacaacagggtccagaatccagcaagctactgatcttacaattattaaatataaatcgggccctatggggggagatcagcaaattggagctgaagtagctgaagggaatgtcttagctatattcttctttagagatcccctaacaaatcagcctcacgaaccagatgtgtcagctcttattagactttgcgatgtacataatataccgcttgcaaccaacgtaaaaacagcagaaattttaataaaaggatttgagggtttgaatacttaa

SEQ ID NO: 8582 - protein, 126 aa, Borrelia garinii
MEKKIALIAHDKKKDDLVNFVKQNYLFLSKFKLIATGTTGSRIQQATDLTIIKYKSGPMGGDQQIGAEVAEGNVLAIFFFRDPLTNQPHEPDVSALIRLCDVHNIPLATNVKTAEILIKGFEGLNT

SEQ ID NO: 8583 - DNA, 378 bp, Brucella abortus
  CDS (1)..(378): transl_table=11
atgacccaacgcctgcgcatcgcactgattgcccatgaccagaaaaaggacgacatggttgcttttgcccgggctcatgagcaggcattgtcccgctatgatatcgtagcaacgggaacgacgggtgggctcattcaggatgcctgcccttcgctgaacattcaccgggtcaaaagcggtcctcttggcggcgaccagcagatcggcgcgatgattgcggaaggcacggtggaagtgctcatcttctttatcgatccgctctcgccgcttccccatgatgtggatgtgaaggccctgacgcgccttggcagcgtctacgatattccaatggcgttgaaccgcgcgaccgctgaaaagctggtcagggcgctggactga

SEQ ID NO: 8584 - protein, 125 aa, Brucella abortus
MTQRLRIALIAHDQKKDDMVAFARAHEQALSRYDIVATGTTGGLIQDACPSLNIHRVKSGPLGGDQQIGAMIAEGTVEVLIFFIDPLSPLPHDVDVKALTRLGSVYDIPMALNRATAEKLVRALD

SEQ ID NO: 8585 - DNA, 393 bp, Burkholderia mallei
  CDS (1)..(393): transl_table=11
atgagcacaccccgcattgcgctgattgcgcacgatgcgaagaaggacgacatcgtcgcgctcgcgggcgcgtaccgcgcgacgctcgcgcaatgccggctcgtcgcgacgggcacgacgggcgggcggatcgcgcaggcgcatgggctcgacgtcgagcgcaagctgtcagggccgctcggcggcgatttgcagatcggcgcggagctcgccgacgggcgcgtcgacatcgtgatcttcctgcgcgatccgatgaccgcgcagccacacgatccggatatcaccgcgctcgtgcgcgcgtgcgacgtgcacgacgtgccggtggccaccaacgtcgcgacggcgcgggtgctgctcgacgatctggcgcgccggctgaccgcgaacgcgtga

SEQ ID NO: 8586 - protein, 130 aa, Burkholderia mallei
MSTPRIALIAHDAKKDDIVALAGAYRATLAQCRLVATGTTGGRIAQAHGLDVERKLSGPLGGDLQIGAELADGRVDIVIFLRDPMTAQPHDPDITALVRACDVHDVPVATNVATARVLLDDLARRLTANA

SEQ ID NO: 8587 - DNA, 360 bp, Clostridium perfringens
  CDS (1)..(360): transl_table=11
atgaaaatagcattaatagcacatgataagaaaaaagaagaaatgatagagcttgcaaaagattttgaagataagttaagtaaacatatacttgttgcaacaggtactacaggacttaaaattatgcaaaatacatctttagaagttaaaagatgtaagagtggcccactagggggagatcaggagataggagcgatggtagcaaaccacgatgttgatatggtaattttcttaagagatccattaacagctcaacctcatgaaccagatattagtgcattacttagactttgtgatgtttacaaggttccactagctacaaatacagaaagcgctaagcttataatggctgatatttag

SEQ ID NO: 8588 - protein, 119 aa, Clostridium perfringens
MKIALIAHDKKKEEMIELAKDFEDKLSKHILVATGTTGLKIMQNTSLEVKRCKSGPLGGDQEIGAMVANHDVDMVIFLRDPLTAQPHEPDISALLRLCDVYKVPLATNTESAKLIMADI

SEQ ID NO: 8589 - DNA, 432 bp, Coxiella burnetii; identical to SEQ ID NO: 581
  CDS (1)..(432): transl_table=11

SEQ ID NO: 8590 - protein, 143 aa, Coxiella burnetii; identical to SEQ ID NO: 582

SEQ ID NO: 8591 - DNA, 459 bp, Escherichia coli O6
  CDS (1)..(459): transl_table=11
atggaactgacgactcgcactttaccttcgcggaaacatattgcgctggtggcacacgatcactgcaaacaaatgctgatgagctgggtggaacggcatcaaccgttactggaacaacacgtactgtatgcaacaggcactaccggtaacttaatttcccgcgcgaccggcatgaacgtcaacgcgatgttgagtggcccaatggggggtgaccagcaggttggcgcattgatctcagaagggaaaattgatgtattgattttcttctgggacccactaaatgccgtgccgcacgatcctgacgtgaaagccttgctgcgtctggcaacggtatggaacattccggtcgccaccaacgtggcaacggcagacttcattatccagtcaccgcattttaacgacgcggtcgatattctgatccccgattatcagcgttatctcgcagaccgtctgaagtaa

SEQ ID NO: 8592 - protein, 152 aa, Escherichia coli O6
MELTTRTLPSRKHIALVAHDHCKQMLMSWVERHQPLLEQHVLYATGTTGNLISRATGMNVNAMLSGPMGGDQQVGALISEGKIDVLIFFWDPLNAVPHDPDVKALLRLATVWNIPVATNVATADFIIQSPHFNDAVDILIPDYQRYLADRLK

SEQ ID NO: 8593 - DNA, 423 bp, Enterococcus faecalis
  CDS (1)..(423): transl_table=11
atgaaaatcgctttaatcgctcatgatcgtaaaaaaacattaatgatcaaactagcaaccgcttataaacatattttagaaaaacatgaattgtatgcaacgggaacgacaggcatgaaagtgatggaagcaactggcttacccgtgcattgctttaaatcggggccattaggtggggatcaacagattggcgcaatgatatcagaagacaacattgatttagttatttttttaagagatcctctttccgcgcaaccgcatgaaccagacgtgacggctttgattcgtctaagtgatgtctatgaaattcctttagcgaccaatattggcagtgctgaaattcttttgagaggtgtcgaggcggggtttgcggacttccgtgaggttatccatgaaggggatcgtcgaccgttagctttttag

SEQ ID NO: 8594 - protein, 140 aa, Enterococcus faecalis
MKIALIAHDRKKTLMIKLATAYKHILEKHELYATGTTGMKVMEATGLPVHCFKSGPLGGDQQIGAMISEDNIDLVIFLRDPLSAQPHEPDVTALIRLSDVYEIPLATNIGSAEILLRGVEAGFADFREVIHEGDRRPLAF

SEQ ID NO: 8595 - DNA, 435 bp, Geobacillus kaustophilus
  CDS (1)..(435): transl_table=11
atgaaaatcgcgttaattgcccatgaccaaaaaaaggaagagatggtcgcatttgcgaccgcctatgcgcctgtgcttgccaaccatgaattgtacgccaccggcacgaccggcttgcgcatccaggaggcgaccggtcttcccgttcatcgcttccaatcagggccgtacggaggcgaccaagaaatcggggcgatgatcgcccgcaatgaaatggatctggtcatttttttccgcgatccgctcaccgcccagccgcatgagccggacatcagcgcattgatgcggctttgcgacgtctatgccgtgccgttggcgacgaacatcggcacggccgagctgctcatccgcgcgttggagcgcggcgatttggcatggcgcagcattgtgcgcggccaaacaaaaggcggggaggaatcgaaaacagaaaggtga

SEQ ID NO: 8596 - protein, 144 aa, Geobacillus kaustophilus
MKIALIAHDQKKEEMVAFATAYAPVLANHELYATGTTGLRIQEATGLPVHRFQSGPYGGDQEIGAMIARNEMDLVIFFRDPLTAQPHEPDISALMRLCDVYAVPLATNIGTAELLIRALERGDLAWRSIVRGQTKGGEESKTER

SEQ ID NO: 8597 - DNA, 459 bp, Haemophilus influenzae; identical to SEQ ID NO: 585
  CDS (1)..(459): transl_table=11
  misc_feature (273)..(273): w is a or t

SEQ ID NO: 8598 - protein, 152 aa, Haemophilus influenzae; identical to SEQ ID NO: 586
  misc_feature (91)..(91): The Xaa at location 91 stands for Asp, or Glu.

SEQ ID NO: 8599 - DNA, 405 bp, Listeria innocua; identical to SEQ ID NO: 589
  CDS (1)..(405): transl_table=11

SEQ ID NO: 8600 - protein, 134 aa, Listeria innocua; identical to SEQ ID NO: 590

SEQ ID NO: 8601 - DNA, 405 bp, Listeria monocytogenes serotype 4b; identical to SEQ ID NO: 591
  CDS (1)..(405): transl_table=11

SEQ ID NO: 8602 - protein, 134 aa, Listeria monocytogenes serotype 4b; identical to SEQ ID NO: 592

SEQ ID NO: 8603 - DNA, 423 bp, Oceanobacillus iheyensis
  CDS (1)..(423): transl_table=11
atgaatatagcattaatcgcacatgacgaaaagaaagaagacatgattcaatttacgactgcatatacccatgtgttgtcaaaacatagattatttgctaccggtactaccggcatgaaaatttcgaatgctacaggcttacaaattcaccgttttcaatccggtccacttggtggagatcaacaaattggagctatgattgcgaacggagagatggatatgattatctttttccgagatccactaactgctcaacctcatgaacctgacgtaagtgcattaatgcgtttatgtgatgttcatcagataccattagtaacgaatattgcaggtgcagagatctttattcatggccttagcagaggagatttgaaatggagagagataatcaaagagagacaagagaaagaagggacaccgtga

SEQ ID NO: 8604 - protein, 140 aa, Oceanobacillus iheyensis
MNIALIAHDEKKEDMIQFTTAYTHVLSKHRLFATGTTGMKISNATGLQIHRFQSGPLGGDQQIGAMIANGEMDMIIFFRDPLTAQPHEPDVSALMRLCDVHQIPLVTNIAGAEIFIHGLSRGDLKWREIIKERQEKEGTP

SEQ ID NO: 8605 - DNA, 459 bp, Pasteurella multocida; identical to SEQ ID NO: 595
  CDS (1)..(459): transl_table=11

SEQ ID NO: 8606 - protein, 152 aa, Pasteurella multocida; identical to SEQ ID NO: 596

SEQ ID NO: 8607 - DNA, 459 bp, Photobacterium profundum; identical to SEQ ID NO: 599
  CDS (1)..(459): transl_table=11

SEQ ID NO: 8608 - protein, 152 aa, Photobacterium profundum; identical to SEQ ID NO: 600

SEQ ID NO: 8609 - DNA, 408 bp, Ralstonia solanacearum
  CDS (1)..(408): transl_table=11
gtgcccaagcgccgccgcatcgccctgatcgcgcacgaccacaagaaggacgacatgatcgccttcgcgcagacgcacaaggccttcctgatgcgatgcgacctgctggccaccggcaccaccggcggccggctgcaggacgaagtcggcctgagcgtgcagcgcatgctgtccggcccgtggggcggcgacctgcagatcggggcgcaactggccgagggccgcgtcgatgccgtcatcttcctgcgcgacccgatgacgccgcagccgcacgagcccgacatcaacgcgctggtccgcgcctgcgacgtccacaacattccctgcgccaccaatctggcgacggccgacctggtgatgattgcactgggcctggcgcaacccgaccccaaggagatccacgcatga

SEQ ID NO: 8610 - protein, 135 aa, Ralstonia solanacearum
MPKRRRIALIAHDHKKDDMIAFAQTHKAFLMRCDLLATGTTGGRLQDEVGLSVQRMLSGPWGGDLQIGAQLAEGRVDAVIFLRDPMTPQPHEPDINALVRACDVHNIPCATNLATADLVMIALGLAQPDPKEIHA

SEQ ID NO: 8611 - DNA, 381 bp, Rhizobium meliloti
  CDS (1)..(381): transl_table=11
atggcagatcggaaatgtctcgccctgatcgcccatgatcagaagaaggatgacctcgcggcttttgcaaaggcgaacgaggcggtcctgtccaagtggaagatcgtcgccacggggaccaccggcggccgtgttctcgacgtgtgtccggcgctcgacatcgtccggttgaagagcggtccgctcggcggcgaccagcagataggcgcgctgatcgccacgggcgacgtggactgcctgatcttcttcgtcgatccgttgacggccatgccgcacgacgtcgatgtcaaggcactgatgcgcctggcgatcgtctatgacatcccgatggcgctcaaccgcgcgactgccgagcagttgatcgacttcaggcgcaactga

SEQ ID NO: 8612 - protein, 126 aa, Rhizobium meliloti
MADRKCLALIAHDQKKDDLAAFAKANEAVLSKWKIVATGTTGGRVLDVCPALDIVRLKSGPLGGDQQIGALIATGDVDCLIFFVDPLTAMPHDVDVKALMRLAIVYDIPMALNRATAEQLIDFRRN

SEQ ID NO: 8613 - DNA, 390 bp, Thermoanaerobacter tengcongensis
  CDS (1)..(390): transl_table=11
atgaatatcgctcttattgcgcatgaccagaagaaagaacttatggttaactttgctatcgcttataagcacatatttgaaaaatgcaatttgtacgctacggggcacaccggacagcttataaaagaagcaacaggacttgatgttcactgcctcttgccgggacctctgggaggagaccagcagataggggctttgattgctgagaataaaattgaccttgtcattttcttgagagaccctctcactgttcagcctcatgaacctgatatacttgctcttttgagggtatgcgatgtccattcaatccctgttgctactaatattgctactgctgaagtgcttttgaaaggaatggaaatgggacttttagactggagacaaatttga

SEQ ID NO: 8614 - protein, 129 aa, Thermoanaerobacter tengcongensis
MNIALIAHDQKKELMVNFAIAYKHIFEKCNLYATGHTGQLIKEATGLDVHCLLPGPLGGDQQIGALIAENKIDLVIFLRDPLTVQPHEPDILALLRVCDVHSIPVATNIATAEVLLKGMEMGLLDWRQI

SEQ ID NO: 8615 - DNA, 477 bp, Treponema socranskii
  CDS (1)..(477): transl_table=11
atgagacggaaattacggatcgcgcttgtagcgcacgataaccgaaaagccgatatcgtcgactgggcgttaaacaatgcggaaatgctttcacagcacaggcttttcggtacggggacgacgggcacgctcgtgcgggaatcctttatgaagcgcggcatcgccagcgatatcacgtgcatgcattcggggccgatgggcggggatgctgaaatcgcggcgctcgtcgttcgaaaggaaatcgattttgcggttttttttatagacgatttgaatccgcagccgcacgaagccgatattcaaatgcttttgcgccagtgcaggatccacaatataccgatcgcgtgcaaccgctacagcgccgatttaatgatcacgagttcgctgtgggacgatgccggctatgtgccgaaagatccgatttacgcgccgtttgacagaaaagcgttcgaagaaagccttaaagtaaaagagtga

SEQ ID NO: 8616 - protein, 158 aa, Treponema socranskii
MRRKLRIALVAHDNRKADIVDWALNNAEMLSQHRLFGTGTTGTLVRESFMKRGIASDITCMHSGPMGGDAEIAALVVRKEIDFAVFFIDDLNPQPHEADIQMLLRQCRIHNIPIACNRYSADLMITSSLWDDAGYVPKDPIYAPFDRKAFEESLKVKE

SEQ ID NO: 8617 - DNA, 456 bp, Vibrio cholerae; identical to SEQ ID NO: 605
  CDS (1)..(456): transl_table=11

SEQ ID NO: 8618 - protein, 151 aa, Vibrio cholerae; identical to SEQ ID NO: 606

SEQ ID NO: 8619 - DNA, 456 bp, Vibrio parahaemolyticus; identical to SEQ ID NO: 607
  CDS (1)..(456): transl_table=11

SEQ ID NO: 8620 - protein, 151 aa, Vibrio parahaemolyticus; identical to SEQ ID NO: 608

SEQ ID NO: 8621 - DNA, 456 bp, Vibrio vulnificus; identical to SEQ ID NO: 609
  CDS (1)..(456): transl_table=11

SEQ ID NO: 8622 - protein, 151 aa, Vibrio vulnificus; identical to SEQ ID NO: 610

SEQ ID NO: 8623 - DNA, 465 bp, Yersinia pestis; identical to SEQ ID NO: 611
  CDS (1)..(465): transl_table=11

SEQ ID NO: 8624 - protein, 154 aa, Yersinia pestis; identical to SEQ ID NO: 612

SEQ ID NO: 8625 - DNA, 25 bp, Artificial sequence
  primer
atgtacattatggaactgacgactc

SEQ ID NO: 8626 - DNA, 22 bp, Artificial sequence
  primer
ttacttcagacggtccgcgaga

SEQ ID NO: 8627 - protein, 122 aa, Artificial sequence
  consensus sequence
  Variant (4)..(4): Xaa in position 4 is any amino acid
  Variant (8)..(9): Xaa in position 8 to 9 is any amino acid
  Variant (11)..(23): Xaa in position 11 to 23 is any amino acid
  Variant (25)..(28): Xaa in position 25 to 28 is any amino acid
  Variant (30)..(30): Xaa in position 30 is any amino acid
  Variant (37)..(43): Xaa in position 37 to 43 is any amino acid
  Variant (44)..(49): Xaa in position 44 to 49 is any or no amino acid
  Variant (51)..(56): Xaa in position 51 to 56 is any amino acid
  Variant (57)..(63): Xaa in position 57 to 63 is any or no amino acid
  Variant (67)..(67): Xaa in position 67 is any amino acid
  Variant (73)..(73): Xaa in position 73 is any amino acid
  Variant (76)..(82): Xaa in position 76 to 82 is any amino acid
  Variant (84)..(85): Xaa in position 84 to 85 is any amino acid
  Variant (88)..(89): Xaa in position 88 to 89 is any amino acid
  Variant (92)..(95): Xaa in position 92 to 95 is any amino acid
  Variant (98)..(99): Xaa in position 98 to 99 is any amino acid
  Variant (101)..(102): Xaa in position 101 to 102 is any amino acid
  Variant (105)..(105): Xaa in position 105 is any amino acid
  Variant (107)..(109): Xaa in position 107 to 109 is any amino acid
  Variant (111)..(113): Xaa in position 111 to 113 is any amino acid
  Variant (115)..(115): Xaa in position 115 is any amino acid
  Variant (117)..(117): Xaa in position 117 is any amino acid
  Variant (119)..(121): Xaa in position 119 to 121 is any amino acid
IALXAHDXXKXXXXXXXXXXXXXLXXXXLXATGTTGXXXXXXXXXXXXXLXXXXXXXXXXXXXSGPXGGDQQXGAXXXXXXXDXXIFXXDPXXXXPHXXDXXALXRXXXVXXXPXAXNXXXA

SEQ ID NO: 8628 - protein, 58 aa, Artificial sequence
  protein pattern
  Variant (3)..(3): Xaa in position 3 is any amino acid
  Variant (8)..(8): Xaa in position 8 is Glu or Gln
  Variant (9)..(9): Xaa in position 9 is Ile, Leu, Met or Val
  Variant (11)..(11): Xaa in position 11 is Ala, Gly or Ser
  Variant (12)..(12): Xaa in position 12 is any amino acid
  Variant (13)..(13): Xaa in position 13 is Ile or Val
  Variant (14)..(14): Xaa in position 14 is Ala, Ser or Val
  Variant (15)..(17): Xaa in position 15 to 17 is any amino acid
  Variant (18)..(18): Xaa in position 18 is Phe, Ile, Leu, Met or Val
  Variant (19)..(20): Xaa in position 19 to 20 is any amino acid
  Variant (21)..(21): Xaa in position 21 is Ile, Leu, Met or Val
  Variant (22)..(22): Xaa in position 22 is Phe, Ile or Val
  Variant (24)..(24): Xaa in position 24 is Phe or Leu
  Variant (25)..(25): Xaa in position 25 is any amino acid
  Variant (28)..(28): Xaa in position 28 is Phe, Leu or Met
  Variant (29)..(29): Xaa in position 29 is Ala, Glu, Asn, Ser or Thr
  Variant (30)..(31): Xaa in position 30 to 31 is any amino acid
  Variant (32)..(32): Xaa in position 32 is Ala or Pro
  Variant (34)..(34): Xaa in position 34 is Asp or Glu
  Variant (35)..(35): Xaa in position 35 is Pro, Thr or Val
  Variant (37)..(37): Xaa in position 37 is Ile or Val
  Variant (38)..(38): Xaa in position 38 is any amino acid
  Variant (41)..(41): Xaa in position 41 is any amino acid
  Variant (43)..(44): Xaa in position 43 to 44 is any amino acid
  Variant (45)..(45): Xaa in position 45 is any or no amino acid
  Variant (47)..(49): Xaa in position 47 to 49 is any amino acid
  Variant (50)..(50): Xaa in position 50 is Ile, Pro or Val
  Variant (51)..(56): Xaa in position 51 to 56 is any amino acid
  Variant (57)..(57): Xaa in position 57 is Ala, Gly, Ser or Thr
  Variant (58)..(58): Xaa in position 58 is Ala or Thr
GPXGGDQXXGXXXXXXXXXXXXFXXDPXXXXXHXXDXXALXRXXXVXXXXXXXXXXXX

SEQ ID NO: 8629 - protein, 21 aa, Artificial sequence
  protein pattern
  Variant (2)..(5): Xaa in position 2 to 5 is any amino acid
  Variant (6)..(6): Xaa in position 6 is Phe, Ile or Leu
  Variant (7)..(7): Xaa in position 7 is any amino acid
  Variant (8)..(8): Xaa in position 8 is Ala, Cys or Gly
  Variant (13)..(20): Xaa in position 13 to 20 is any or no amino acid
LXXXXXXXTGTTXXXXXXXXG

SEQ ID NO: 8630 - DNA, 459 bp, ESCHERICHIA COLI
  CDS (1)..(459): transl_table=11
atgtcctgcatgggcgcggcggtcaatattatcaccacggacggtccagccgggcgcgccgggttcaccgccagcgccgtctgcagtgtgaccgatacgccgcccacattactggtgtgcctgaatcgtggggcgtccgtctggccggcattcaatgaaaatcgaacgctgtgtgtaaatacacttagcgccgggcaggagccgctttcaaacctttttggcggcaaaacgcccatggaacaccgctttgccgccgcccgctggcagacgggggtgaccggatgcccgcaactggaagaggctctggtttcgtttgactgccgtatcagccaggtggtgagcgtcggcacccacgacattctgttttgcgccatcgaagcgattcatcgtcacaccacaccctacgggctggtgtggttcgatcgcagttatcacgcgctgatgcgccctgcttgttaa

SEQ ID NO: 8631 - protein, 152 aa, ESCHERICHIA COLI
MSCMGAAVNIITTDGPAGRAGFTASAVCSVTDTPPTLLVCLNRGASVWPAFNENRTLCVNTLSAGQEPLSNLFGGKTPMEHRFAAARWQTGVTGCPQLEEALVSFDCRISQVVSVGTHDILFCAIEAIHRHTTPYGLVWFDRSYHALMRPAC

SEQ ID NO: 8632 - DNA, 528 bp, Mesorhizobium loti MAFF303099; identical to SEQ ID NO: 673
  CDS (1)..(528): transl_table=11

SEQ ID NO: 8633 - protein, 175 aa, Mesorhizobium loti MAFF303099; identical to SEQ ID NO: 674

SEQ ID NO: 8634 - DNA, 513 bp, Pseudomonas aeruginosa PAO1; identical to SEQ ID NO: 677
  CDS (1)..(513): transl_table=11

SEQ ID NO: 8635 - protein, 170 aa, Pseudomonas aeruginosa PAO1; identical to SEQ ID NO: 678

SEQ ID NO: 8636 - DNA, 501 bp, Neisseria meningitidis MC58
  CDS (1)..(501): transl_table=11
atggcggatttgcagaaaaattttcaaacttcgttccgtgatgcgatggcatcttgcgcggcaggcgttcatgtcatcacgacagacggtgcggcagggcgttacggcattacaatgacggcggtcgcgccggttaccgacgagccgccgaccgtgatgctgtgcatcaaccggagtgcgcgaatcattccgatcctgtcggaaaacggcagcctctgcatcaatacgctggcggacgaacatcaggatgttgccgaacattttgccgggctgaccggcctgtcgcccgaagagcggtttgcctaccacatctggcatcgcggcaaaacgggacaacttgaaatagagggcgcgttggcgcacctgcacgggcatattgtcggcaaacatgaaatcggcacgcattttgtgttttacgtcaggctcgacgaaatcaaaaactgcgggtgcaaacgccccgcgctgctgtatttcagacggcagtttagatttttagactga

SEQ ID NO: 8637 - protein, 166 aa, Neisseria meningitidis MC58
MADLQKNFQTSFRDAMASCAAGVHVITTDGAAGRYGITMTAVAPVTDEPPTVMLCINRSARIIPILSENGSLCINTLADEHQDVAEHFAGLTGLSPEERFAYHIWHRGKTGQLEIEGALAHLHGHIVGKHEIGTHFVFYVRLDEIKNCGCKRPALLYFRRQFRFLD

SEQ ID NO: 8638 - DNA, 459 bp, Escherichia coli O157:H7 EDL933; identical to SEQ ID NO: 679
  CDS (1)..(459): transl_table=11

SEQ ID NO: 8639 - protein, 152 aa, Escherichia coli O157:H7 EDL933; identical to SEQ ID NO: 680

SEQ ID NO: 8640 - DNA, 525 bp, Agrobacterium tumefaciens str. C58; identical to SEQ ID NO: 681
  CDS (1)..(525): transl_table=11

SEQ ID NO: 8641 - protein, 174 aa, Agrobacterium tumefaciens str. C58; identical to SEQ ID NO: 682

SEQ ID NO: 8642 - DNA, 459 bp, Shigella flexneri 2a str. 301; identical to SEQ ID NO: 685
  CDS (1)..(459): transl_table=11

SEQ ID NO: 8643 - protein, 152 aa, Shigella flexneri 2a str. 301; identical to SEQ ID NO: 686

SEQ ID NO: 8644 - DNA, 555 bp, Escherichia coli CFT073
  CDS (1)..(555): transl_table=11
ttgcgcgcctgccacgtctgtcctttgaagaagcctgcgggctgttgtaaggagcaaacaatgaacattgtcgatcaacaaacctttcgcgatgcgatgtcctgtatgggcgcggcggtcaatatcatcactacggacggtccagccgggcgcgccgggttcaccgccagcgccgtctgcagcgtgaccgacacgccgcccacattactggtgtgcctgaatcgtggggcgtccgtctggccggtattcaatgaaaatcgaacgctgtgtgtaaatacacttagcgccgggcaggagtcgctttcaaacctttttggcggcaaaacgcccatggaacaccgctttgccgccgcccgctggcagactggtgtgaccggatgcccgcaactggaagaggcactggtttcgtttgactgccgtatcagccaggtggtgagcgtcggcacccacgacattttgttttgcgccatcgaagcgattcatcgtcacgccacaccctacgggctggtgtggttcgatcgcagttatcacgcgctgatgcgccctgcttgttaa

SEQ ID NO: 8645 - protein, 184 aa, Escherichia coli CFT073
MRACHVCPLKKPAGCCKEQTMNIVDQQTFRDAMSCMGAAVNIITTDGPAGRAGFTASAVCSVTDTPPTLLVCLNRGASVWPVFNENRTLCVNTLSAGQESLSNLFGGKTPMEHRFAAARWQTGVTGCPQLEEALVSFDCRISQVVSVGTHDILFCAIEAIHRHATPYGLVWFDRSYHALMRPAC

SEQ ID NO: 8646 - DNA, 543 bp, Bradyrhizobium japonicum USDA 110; identical to SEQ ID NO: 689
  CDS (1)..(543): transl_table=11

SEQ ID NO: 8647 - protein, 180 aa, Bradyrhizobium japonicum USDA 110; identical to SEQ ID NO: 690

SEQ ID NO: 8648 - DNA, 585 bp, Bradyrhizobium japonicum USDA 110
  CDS (1)..(585): transl_table=11
gtggcaaggtcgcaggcgaagccgtttcggcgtaacgcaaccggcgagaagcgagcccggaggtacgtcatgggatgtcagatgtctcaaatgaccgatttccgctcagtcgaagccgcggagtttcggctggccatgcgtaacctcgcgagcggcgtcgcaatcgtggcgacgggaacagagacggcgcggcgcgggctgacggtcagctccgtgacctcgctgtgcatggacccgccctgcctgctcgtcggcgtcaattcgagctccgaaacccacaccgccatcctagccaacggccgcttcgggatcagtctcctcggcagcgggcaggaagatctggcgctgcgtttcgccggtggcgccaagggcatcgaccgcttcgcgacggcgccgtgggagcaaggcgtgcttgacgtgccattgctcgagcctgcgatcggcgcgctggaatgcgtgctgcaccatcatcaaatggtcggcacgcacggcctcttcatcggcaggatcgtggccacccgcggtgggaacggcaatcccctggtcaattttcagggcgcgctgcgcgcgttgccgcagggttaa

SEQ ID NO: 8649 - protein, 194 aa, Bradyrhizobium japonicum USDA 110
MARSQAKPFRRNATGEKRARRYVMGCQMSQMTDFRSVEAAEFRLAMRNLASGVAIVATGTETARRGLTVSSVTSLCMDPPCLLVGVNSSSETHTAILANGRFGISLLGSGQEDLALRFAGGAKGIDRFATAPWEQGVLDVPLLEPAIGALECVLHHHQMVGTHGLFIGRIVATRGGNGNPLVNFQGALRALPQG

SEQ ID NO: 8650 - DNA, 543 bp, Pseudomonas syringae pv. tomato str. DC3000; identical to SEQ ID NO: 691
  CDS (1)..(543): transl_table=11

SEQ ID NO: 8651 - protein, 180 aa, Pseudomonas syringae pv. tomato str. DC3000; identical to SEQ ID NO: 692

SEQ ID NO: 8652 - DNA, 513 bp, Salmonella enterica subsp. enterica serovar Typhi str. Ty2; identical to SEQ ID NO: 693
  CDS (1)..(513): transl_table=11

SEQ ID NO: 8653 - protein, 170 aa, Salmonella enterica subsp. enterica serovar Typhi str. Ty2; identical to SEQ ID NO: 694

SEQ ID NO: 8654 - DNA, 510 bp, Haemophilus ducreyi 35000HP; identical to SEQ ID NO: 695
  CDS (1)..(510): transl_table=11

SEQ ID NO: 8655 - protein, 169 aa, Haemophilus ducreyi 35000HP; identical to SEQ ID NO: 696

SEQ ID NO: 8656 - DNA, 519 bp, Photorhabdus luminescens subsp. laumondii TTO1; identical to SEQ ID NO: 697
  CDS (1)..(519): transl_table=11

SEQ ID NO: 8657 - protein, 172 aa, Photorhabdus luminescens subsp. laumondii TTO1; identical to SEQ ID NO: 698

SEQ ID NO: 8658 - DNA, 507 bp, Vibrio vulnificus YJ016
  CDS (1)..(507): transl_table=11
atgtctctacaacaggattttcgcgacgcaatgtctaagcttgctgcagcagtgaatattgtcactacaggcggtgaagctggtactgtcggtattactgctactgcggtttgttcagtcagtgactcgcctgcaacggttttggtctgcgttaaccgtaacagtgcatctaacgccatcttcaagcaaaacggcaatatgtgtatcaatgtttgtgcaagcgaacaccaagaaatgtcgatgcatttcgcgggtatgacaggccttgcaatggaagagcgctttgcccttgaaggctggaaaaacaacgcagaccaagttccagttttacacggcgctctggcaacactggaaggtaaaatagcttctagccaggaagttggtacgcacacagtgttctttgttgagttacacactatccattcgaacaacaaagacggtttgatttactttgaccgtgaattcaagaatgttgacgctcgtgaagtggttgctgctgtcgcttaa

SEQ ID NO: 8659 - protein, 168 aa, Vibrio vulnificus YJ016
MSLQQDFRDAMSKLAAAVNIVTTGGEAGTVGITATAVCSVSDSPATVLVCVNRNSASNAIFKQNGNMCINVCASEHQEMSMHFAGMTGLAMEERFALEGWKNNADQVPVLHGALATLEGKIASSQEVGTHTVFFVELHTIHSNNKDGLIYFDREFKNVDAREVVAAVA

SEQ ID NO: 8660 - DNA, 582 bp, Burkholderia vietnamiensis G4; identical to SEQ ID NO: 737
  CDS (1)..(582): transl_table=11

SEQ ID NO: 8661 - protein, 193 aa, Burkholderia vietnamiensis G4; identical to SEQ ID NO: 738

SEQ ID NO: 8662 - DNA, 495 bp, Klebsiella pneumoniae subsp. pneumoniae MGH 78578
  CDS (1)..(495): transl_table=11
atggagttaacggacaaagcgagtttccgtgacgccatggcccacgtcggcgccgcggttaacattattaccaccgatggcccggcgggccgggcggggttcaccgccagcgcggtctgcagcgttaccgacacgccgccgaccctgctggtctgcctgaaccgctcggcttcggtgtggccggtgttcagcgaacaccacacgctgtgcgtcaataccctggcggccggacaggaggccctgtcgacgctgtttggcggtaaaacggcaatggacgagcgttttgccgccgccgactggcagaccggcgccaccggctgtccgcggctggaggcggctctggtcagctttgactgccgcatcgaccagcgcgtcagcgtcgggacgcacgacattctgttttgtcacgtcgtggccattacccgtcacccggagccccggggactgatgtggtttgaccgcggctatcacacgcttatgcgacccgcttgttaa

SEQ ID NO: 8663 - protein, 164 aa, Klebsiella pneumoniae subsp. pneumoniae MGH 78578
MELTDKASFRDAMAHVGAAVNIITTDGPAGRAGFTASAVCSVTDTPPTLLVCLNRSASVWPVFSEHHTLCVNTLAAGQEALSTLFGGKTAMDERFAAADWQTGATGCPRLEAALVSFDCRIDQRVSVGTHDILFCHVVAITRHPEPRGLMWFDRGYHTLMRPAC

SEQ ID NO: 8664 - DNA, 513 bp, Klebsiella pneumoniae subsp. pneumoniae MGH 78578
  CDS (1)..(513): transl_table=11
atgcaattagatgaacaacgcctgcgttttcgcgatgccatggccagcctgtcggctgcggttaacgttgtcaccaccgcaggtgaagccggccgctgcggcattaccgccacggcggtttgctcggtgacggatacgccgccatcggtgatggtttgtatcaacgccaacagcgcgatgaacccggtctttcagggcaacggcaagttgtgcatcaacgtgctgaaccacgagcaggaaatcatggcccgtcatttcgccgggatgaccggggtgacgatggaagagcggtttgccctcagcggctggcagcagggcgcgctcgggcagccggtgctgaagggctcgctggccagcctcgaaggcgaaattagccaggtgcaaaccatcggtacccacctggtgtatctggtggagatccgcaatattaccctgagcccgcaagggcacggcctgatttactttaaacgccgtttccacccggtgatgatggaaatggaagtggcagtctaa

SEQ ID NO: 8665 - protein, 170 aa, Klebsiella pneumoniae subsp. pneumoniae MGH 78578
MQLDEQRLRFRDAMASLSAAVNVVTTAGEAGRCGITATAVCSVTDTPPSVMVCINANSAMNPVFQGNGKLCINVLNHEQEIMARHFAGMTGVTMEERFALSGWQQGALGQPVLKGSLASLEGEISQVQTIGTHLVYLVEIRNITLSPQGHGLIYFKRRFHPVMMEMEVAV

SEQ ID NO: 8666 - DNA, 513 bp, Salmonella enterica subsp. arizonae serovar 62:z4,z23:--
  CDS (1)..(513): transl_table=11
atgcaagtagatgaacaacgtctgcgttttcgcgatgcgatggcgagtctggcggcagcggtcaacattgtaaccacagcaggtcacgccggacgctgcggcatcaccgcaacagcggtatgctccgtcacggatacgccgccctccgtgatggtatgtattaatgccaatagcgccatgaatcccgtttttcagggcaacggcaggctatgcattaatgtgcttaaccatgagcaggagctgatggcgcgccactttgccggtatgacagggatggcgatggaggatcgttttcaccagccatgttggcaaagcgggccgctgggccagccggtacttaacggcgcgctggccggtcttgaaggcgaaatcagcgatgtgcaaactatcggtacgcatctggtgtatctggtggcaatcaaaaatattatccttagccaggatgggcatggcctgatttatttcaaacgccgttttcatccggtcaggcttgagatggaagcgccggtttaa

SEQ ID NO: 8667 - protein, 170 aa, Salmonella enterica subsp. arizonae serovar 62:z4,z23:--
MQVDEQRLRFRDAMASLAAAVNIVTTAGHAGRCGITATAVCSVTDTPPSVMVCINANSAMNPVFQGNGRLCINVLNHEQELMARHFAGMTGMAMEDRFHQPCWQSGPLGQPVLNGALAGLEGEISDVQTIGTHLVYLVAIKNIILSQDGHGLIYFKRRFHPVRLEMEAPV

SEQ ID NO: 8668 - DNA, 498 bp, Pseudomonas putida GB-1
  CDS (1)..(498): transl_table=11
atggtagaggtaacccgttttcgcaacgcgatggccatgctcggtggcgccgtctcggtcattaccaccgacggcccggccgggcgcttcggcttcaccgcttcggcggtgtgcagcgtgaccgactcaccgcccaccttgctggtttgcatgaaccgtgcttcgtattccaacgagcagttcaaggccaacggcgcattgtgcgtgaatgtgctggccggcacccatcaggagttgtccggggtgttcgccaaccgcaacctgagcatggaagcacgctttgcctcgacgttgtggacggtcctggagagcggggcgccggtgatgcaggaggcgttggtgaacttcgactgccgcattgcccaggtgcatgaagttggctcgcacagcattttctactgcgagatccaggacatccgccagggcggtgccgatgatgggctggtgtacttcaaccgcgcgtatcaccgggtgtgcgaaacctccaaggcctgctga

SEQ ID NO: 8669 - protein, 165 aa, Pseudomonas putida GB-1
MVEVTRFRNAMAMLGGAVSVITTDGPAGRFGFTASAVCSVTDSPPTLLVCMNRASYSNEQFKANGALCVNVLAGTHQELSGVFANRNLSMEARFASTLWTVLESGAPVMQEALVNFDCRIAQVHEVGSHSIFYCEIQDIRQGGADDGLVYFNRAYHRVCETSKAC

SEQ ID NO: 8670 - DNA, 510 bp, Bartonella quintana str. Toulouse; identical to SEQ ID NO: 699
  CDS (1)..(510): transl_table=11

SEQ ID NO: 8671 - protein, 169 aa, Bartonella quintana str. Toulouse; identical to SEQ ID NO: 700

SEQ ID NO: 8672 - DNA, 510 bp, Bartonella henselae str. Houston-1; identical to SEQ ID NO: 701
  CDS (1)..(510): transl_table=11

SEQ ID NO: 8673 - protein, 169 aa, Bartonella henselae str. Houston-1; identical to SEQ ID NO: 702

SEQ ID NO: 8674 - DNA, 567 bp, Acinetobacter sp. ADP1; identical to SEQ ID NO: 703
  CDS (1)..(567): transl_table=11

SEQ ID NO: 8675 - protein, 188 aa, Acinetobacter sp. ADP1; identical to SEQ ID NO: 704

SEQ ID NO: 8676 - DNA, 507 bp, Acinetobacter sp. ADP1; identical to SEQ ID NO: 705
  CDS (1)..(507): transl_table=11

SEQ ID NO: 8677 - protein, 168 aa, Acinetobacter sp. ADP1; identical to SEQ ID NO: 706

SEQ ID NO: 8678 - DNA, 546 bp, Pectobacterium atrosepticum SCRI1043; identical to SEQ ID NO: 707
  CDS (1)..(546): transl_table=11

SEQ ID NO: 8679 - protein, 181 aa, Pectobacterium atrosepticum SCRI1043; identical to SEQ ID NO: 708

SEQ ID NO: 8680 - DNA, 537 bp, Pseudomonas syringae pv. syringae B728a; identical to SEQ ID NO: 709
  CDS (1)..(537): transl_table=11

SEQ ID NO: 8681 - protein, 178 aa, Pseudomonas syringae pv. syringae B728a; identical to SEQ ID NO: 710

SEQ ID NO: 8682 - DNA, 513 bp, Pseudomonas fluorescens Pf-5; identical to SEQ ID NO: 711
  CDS (1)..(513): transl_table=11

SEQ ID NO: 8683 - protein, 170 aa, Pseudomonas fluorescens Pf-5; identical to SEQ ID NO: 712

SEQ ID NO: 8684 - DNA, 516 bp, Psychrobacter arcticus 273-4; identical to SEQ ID NO: 713
  CDS (1)..(516): transl_table=11

SEQ ID NO: 8685 - protein, 171 aa, Psychrobacter arcticus 273-4; identical to SEQ ID NO: 714

SEQ ID NO: 8686 - DNA, 537 bp, Pseudomonas syringae pv. phaseolicola 1448A; identical to SEQ ID NO: 715
  CDS (1)..(537): transl_table=11

SEQ ID NO: 8687 - protein, 178 aa, Pseudomonas syringae pv. phaseolicola 1448A; identical to SEQ ID NO: 716

SEQ ID NO: 8688 - DNA, 510 bp, Pseudomonas fluorescens PfO-1; identical to SEQ ID NO: 717
  CDS (1)..(510): transl_table=11

SEQ ID NO: 8689 - protein, 169 aa, Pseudomonas fluorescens PfO-1; identical to SEQ ID NO: 718

SEQ ID NO: 8690 - DNA, 498 bp, Burkholderia sp. 383; identical to SEQ ID NO: 719
  CDS (1)..(498): transl_table=11

SEQ ID NO: 8691 - protein, 165 aa, Burkholderia sp. 383; identical to SEQ ID NO: 720

SEQ ID NO: 8692 - DNA, 651 bp, Burkholderia sp. 383; identical to SEQ ID NO: 721
  CDS (1)..(651): transl_table=11

SEQ ID NO: 8693 - protein, 216 aa, Burkholderia sp. 383; identical to SEQ ID NO: 722

SEQ ID NO: 8694 - DNA, 543 bp, Burkholderia thailandensis E264; identical to SEQ ID NO: 723
  CDS (1)..(543): transl_table=11

SEQ ID NO: 8695 - protein, 180 aa, Burkholderia thailandensis E264; identical to SEQ ID NO: 724

SEQ ID NO: 8696 - DNA, 552 bp, Burkholderia xenovorans LB400; identical to SEQ ID NO: 725
  CDS (1)..(552): transl_table=11

SEQ ID NO: 8697 - protein, 183 aa, Burkholderia xenovorans LB400; identical to SEQ ID NO: 726

SEQ ID NO: 8698 - DNA, 495 bp, Mesorhizobium sp. BNC1; identical to SEQ ID NO: 741
  CDS (1)..(495): transl_table=11

SEQ ID NO: 8699 - protein, 164 aa, Mesorhizobium sp. BNC1; identical to SEQ ID NO: 742

SEQ ID NO: 8700 - DNA, 513 bp, Mesorhizobium sp. BNC1
  CDS (1)..(513): transl_table=11
atgggaaccgcagtctccaagaccgaattccgcgatgcgatggctcgggtctgcgctccggtcaacgtgatcaccaccaacggacccgccgggcggggcgggttcaccgccaccgcgatgtgctcggtcaccgatgagccgcccacgcttctggtctgcatgaacagccgctcggcccaggcaggtctcttcatcgagaaccgccgcttttgcgtcaacgtgcttacgcaggaacacaaggaccttgccggctatttcgccgggcagcaagcggacatggatgcccgctacgctgccgcggagtgggtcaatttgctctccggcaatctggcgctcagtgacgcaatcgtctctttcgactgccaattgatcgacgcgcgtcctgtcggcacgcacaatatcttcatgggccaggttgtcgaaattcgcacccgtaaggatggtcacgcccttctctatttcgaccgcaattttgtgcacgtgcctacccaaacgggcagcttcggcgggtaa

SEQ ID NO: 8701 - protein, 170 aa, Mesorhizobium sp. BNC1
MGTAVSKTEFRDAMARVCAPVNVITTNGPAGRGGFTATAMCSVTDEPPTLLVCMNSRSAQAGLFIENRRFCVNVLTQEHKDLAGYFAGQQADMDARYAAAEWVNLLSGNLALSDAIVSFDCQLIDARPVGTHNIFMGQVVEIRTRKDGHALLYFDRNFVHVPTQTGSFGG

SEQ ID NO: 8702 - DNA, 621 bp, Rhodococcus sp. RHA1
  CDS (1)..(621): transl_table=11
atgccgatcgctgaccgtcacccagccgtcgaaacgacggcccgaacatcggtggccccaccgatgccggacaactcgaccgcgaacttcgtcatggccatgagcgccgtcgcgaccggagtcaccgtcgtcgcgaccgacggtccaggcgggcgcgccgcccagaccgtgagtgcgatgtgctccgtctcggccgacccggcactggtgctggtctgcctgcacggacgaagcccggtcaacgacgcgatctccgagaacggcgtcttctgcgtcaatgtgcttgccacccagcacgatcacgtcgccgacaccttcgccggccgcccctggccgggcaagcggcggtgggacttcacctgcgggcactggaccgtggccgaatccggctcaccccgcgtccacgacgcgatcgcgtcgttcgactgcaccgtccacgacgtcatcgaggccggtacccaccgcgtctacatcggacgcgtcgccgccgtggaggcacaccccggcgaacccctcgtgtacgcctcccacacctacagcaagcctgcagcgttcgaaccttccacctttcccgactacccggacgcacaccccgcgccgaggacgaggagcacgaaatga

SEQ ID NO: 8703 - protein, 206 aa, Rhodococcus sp. RHA1
MPIADRHPAVETTARTSVAPPMPDNSTANFVMAMSAVATGVTVVATDGPGGRAAQTVSAMCSVSADPALVLVCLHGRSPVNDAISENGVFCVNVLATQHDHVADTFAGRPWPGKRRWDFTCGHWTVAESGSPRVHDAIASFDCTVHDVIEAGTHRVYIGRVAAVEAHPGEPLVYASHTYSKPAAFEPSTFPDYPDAHPAPRTRSTK

SEQ ID NO: 8704 - DNA, 594 bp, Rhodococcus sp. RHA1
  CDS (1)..(594): transl_table=11
atgcccgaactcactaccatgcaattgagctttcgcaccgccatggcgaacctgcccgccgcggtcaacatcgtgacgaccgacggccctgccgggcgctgcggaatgacggtgaccgccgtctgctcggtcaccgactccccgcccactgccctggtgtgcgtgaatcagaacagtgcgatgcacaacgtgttccggaacaacggccgagtcggaatcaatgttctctccggcgacgacgaagagctggccatgcatttcgcgggcgcaacgaaagtcgcgatggcggaccgcttccactgggacatctgggaggaagacaccggcgacggtgttccgatcctgcgcgccgcccacgtggtgctcgccggccggatcgcggacagcaagaccgtgggttcgcattcggtgctgttcgtcgaactggaccgcgtgcagacgcgcgaacacggcgacagcctcgtctacttccaacgcaagttccaccgtttgtcggttccggtcgagtcccccgactggctgttctacgacgaatggtccgacccgatcaccgtgacgcccaccctcgttcccgccgcagccggaggtaaatag

SEQ ID NO: 8705 - protein, 197 aa, Rhodococcus sp. RHA1
MPELTTMQLSFRTAMANLPAAVNIVTTDGPAGRCGMTVTAVCSVTDSPPTALVCVNQNSAMHNVFRNNGRVGINVLSGDDEELAMHFAGATKVAMADRFHWDIWEEDTGDGVPILRAAHVVLAGRIADSKTVGSHSVLFVELDRVQTREHGDSLVYFQRKFHRLSVPVESPDWLFYDEWSDPITVTPTLVPAAAGGK

SEQ ID NO: 8706 - DNA, 444 bp, Haemophilus somnus 129PT
  CDS (1)..(444): transl_table=11
atggcacaacttgcctcagcagttcatattgtgaccacaagtggtgaaacagggcagcatggttttacagcatcagccgtttgtagcgtgactgactccccacctaccttgcttgtttgtataaatagcaatgcacgtgcctatgagcattttgtaaaaaatcgggtactgatggttaatactttgacagccgaacaatcttctttatcaaatatattcgcctcaccattaagtcaagaagaacgtttttccaacgcttcttggacaacgttgactacaggatcaccgatgttacaggatgctctgattaattttgattgcgaaattacagaaattaagcacgttggcactcacgatattttaatttgtaaaattgtagatatacaccaaagtaatgcaaaaaatgctttggtctatcgaaatcgagtttatcattcggtttaa

SEQ ID NO: 8707 - protein, 147 aa, Haemophilus somnus 129PT
MAQLASAVHIVTTSGETGQHGFTASAVCSVTDSPPTLLVCINSNARAYEHFVKNRVLMVNTLTAEQSSLSNIFASPLSQEERFSNASWTTLTTGSPMLQDALINFDCEITEIKHVGTHDILICKIVDIHQSNAKNALVYRNRVYHSV

SEQ ID NO: 8708 - DNA, 513 bp, Pseudomonas aeruginosa UCBPP-PA14; identical to SEQ ID NO: 735
  CDS (1)..(513): transl_table=11

SEQ ID NO: 8709 - protein, 170 aa, Pseudomonas aeruginosa UCBPP-PA14; identical to SEQ ID NO: 736

SEQ ID NO: 8710 - DNA, 612 bp, Magnetospirillum magnetotacticum MS-1; identical to SEQ ID NO: 727
  CDS (1)..(612): transl_table=11

SEQ ID NO: 8711 - protein, 203 aa, Magnetospirillum magnetotacticum MS-1; identical to SEQ ID NO: 728

SEQ ID NO: 8712 - DNA, 477 bp, Haemophilus somnus 2336; identical to SEQ ID NO: 731
  CDS (1)..(477): transl_table=11

SEQ ID NO: 8713 - protein, 158 aa, Haemophilus somnus 2336; identical to SEQ ID NO: 732

SEQ ID NO: 8714 - DNA, 492 bp, Roseovarius nubinhibens ISM
  CDS (1)..(492): transl_table=11
atgagcgatcatcgacagaatttcatcgacgccatgcggcaggtcgcctcgaccgtgaccgttgtgaccaccgatggcccggcgggccagatgggggccaccgtcagcgccttcagctcgctttcggccgatccgccttcggttctggtctgtctcaaggcggattcgcggattgcccaggcggtgcgcgacaatggcacgttttgcgtcaatatcctgtcggaaggggcggtcgagattgcccagcgctttgccggggcgtttgaccgcgacaatcccgaccggtttgacgggctcgacgtgaatatcaccgagttcggcccgaccctgccgcgcgcgacctcgttcacctgcaccctgcggcaccgccatgtgcatggcagccatgccatctgcatcggcgatgtgaccggaatttccaacgcgggcgaaaagcccctgacctatctgagcggcgcctttcatatcgtgcgcccgcaatccgaggagtga

SEQ ID NO: 8715 - protein, 163 aa, Roseovarius nubinhibens ISM
MSDHRQNFIDAMRQVASTVTVVTTDGPAGQMGATVSAFSSLSADPPSVLVCLKADSRIAQAVRDNGTFCVNILSEGAVEIAQRFAGAFDRDNPDRFDGLDVNITEFGPTLPRATSFTCTLRHRHVHGSHAICIGDVTGISNAGEKPLTYLSGAFHIVRPQSEE

SEQ ID NO: 8716 - DNA, 498 bp, Pseudomonas putida
  CDS (1)..(498): transl_table=11
atggtagacgtaacccaatttcgcaacgcgatggcgatgctcggtggcgccgtgtcggtcatcaccaccgatggcccagccggacgcttcggtttcacggcctctgcggtatgcagcgtgaccgactcaccgcccaccttgctggtatgcatgaaccggtcttcgtactccaacgagcagttcaaggccaacggcgcgctgtgcgtcaacgtgctggccggcacccaccaggagttgtcgggcgctttcgccaaccgcaacctgaacatggacgagcgcttcgcaaccactggctggaccgtactggagagtggggcgccggtgatgcaggaagcgctggtcaacttcgactgccgcatcgcccaggtgcacgaggtgggctcgcacagcatcttctattgcgagatccaggacatccgccatggcggcgccgacgatgggctggtgtatttcaaccgggcctatcaccgcgtgtgcgaagactccaaggcctgctga

SEQ ID NO: 8717 - protein, 165 aa, Pseudomonas putida
MVDVTQFRNAMAMLGGAVSVITTDGPAGRFGFTASAVCSVTDSPPTLLVCMNRSSYSNEQFKANGALCVNVLAGTHQELSGAFANRNLNMDERFATTGWTVLESGAPVMQEALVNFDCRIAQVHEVGSHSIFYCEIQDIRHGGADDGLVYFNRAYHRVCEDSKAC

SEQ ID NO: 8718 - DNA, 519 bp, Photorhabdus luminescens; identical to SEQ ID NO: 743
  CDS (1)..(519): transl_table=11

SEQ ID NO: 8719 - protein, 172 aa, Photorhabdus luminescens; identical to SEQ ID NO: 744

SEQ ID NO: 8720 - DNA, 540 bp, Burkholderia cepacia; identical to SEQ ID NO: 745
  CDS (1)..(540): transl_table=11

SEQ ID NO: 8721 - protein, 179 aa, Burkholderia cepacia; identical to SEQ ID NO: 746

SEQ ID NO: 8722 - DNA, 513 bp, Escherichia coli; identical to SEQ ID NO: 747
  CDS (1)..(513): transl_table=11

SEQ ID NO: 8723 - protein, 170 aa, Escherichia coli; identical to SEQ ID NO: 748

SEQ ID NO: 8724 - DNA, 519 bp, Photorhabdus luminescens; identical to SEQ ID NO: 749
  CDS (1)..(519): transl_table=11

SEQ ID NO: 8725 - protein, 172 aa, Photorhabdus luminescens; identical to SEQ ID NO: 750

SEQ ID NO: 8726 - DNA, 513 bp, Escherichia coli; identical to SEQ ID NO: 751
  CDS (1)..(513): transl_table=11

SEQ ID NO: 8727 - protein, 170 aa, Escherichia coli; identical to SEQ ID NO: 752

SEQ ID NO: 8728 - DNA, 513 bp, Klebsiella oxytoca
  CDS (1)..(513): transl_table=11
atgcaattagatgaacaacgtctgcgttttcgcgatgccatggccagtctgtcgccagccgttaacgtcatcaccaccgaagccgaggcgggcgctgcggtatcaccccaccggccgtcctgttcggtgaccgatacgccgccgtcggtgatggtctgcatcaacgccaatagcgcgatgaatccggtgtttcagggcaacggcaagctgtgcatcaacgtgctgaaccacgagcaagaggagatggcccgccacttcgccggcatgaccgggatgacgatggacgaccgcttcggcctcagcggctggcaaaaaggcgcgctgggccagccggtgctgaaaggcgcgctggcgagcctcgaaggcgaaattagccaggtgcagaccatcggtagccatctggtctatctggtggaaatcaggaatattaccctgagccagcaaggtcacgggctgatttactttaagcgccgcttccatccggtgatgatggagatggacgtcgtggcgtaa

SEQ ID NO: 8729 - protein, 170 aa, Klebsiella oxytoca
MQLDEQRLRFRDAMASLSPAVNVITTEAEAGAAVSPHRPSCSVTDTPPSVMVCINANSAMNPVFQGNGKLCINVLNHEQEEMARHFAGMTGMTMDDRFGLSGWQKGALGQPVLKGALASLEGEISQVQTIGSHLVYLVEIRNITLSQQGHGLIYFKRRFHPVMMEMDVVA

SEQ ID NO: 8730 - DNA, 513 bp, Salmonella dublin; identical to SEQ ID NO: 753
  CDS (1)..(513): transl_table=11

SEQ ID NO: 8731 - protein, 170 aa, Salmonella dublin; identical to SEQ ID NO: 754

SEQ ID NO: 8732 - DNA, 513 bp, Salmonella typhi; identical to SEQ ID NO: 755
  CDS (1)..(513): transl_table=11

SEQ ID NO: 8733 - protein, 170 aa, Salmonella typhi; identical to SEQ ID NO: 756

SEQ ID NO: 8734 - DNA, 513 bp, Salmonella typhimurium; identical to SEQ ID NO: 757
  CDS (1)..(513): transl_table=11

SEQ ID NO: 8735 - protein, 170 aa, Salmonella typhimurium; identical to SEQ ID NO: 758

SEQ ID NO: 8736 - DNA, 495 bp, Escherichia coli; identical to SEQ ID NO: 671
  CDS (1)..(495): transl_table=11

SEQ ID NO: 8737 - protein, 164 aa, Escherichia coli; identical to SEQ ID NO: 672

SEQ ID NO: 8738 - DNA, 20 bp, Artificial sequence
  primer
atgtcctgcatgggcgcggc

SEQ ID NO: 8739 - DNA, 21 bp, Artificial sequence
  primer
ttaacaagcagggcgcatcag

SEQ ID NO: 8740 - protein, 152 aa, Artificial sequence
  consensus sequence
  Variant (2)..(2): Xaa in position 2 is any amino acid
  Variant (5)..(9): Xaa in position 5 to 9 is any amino acid
  Variant (12)..(14): Xaa in position 12 to 14 is any amino acid
  Variant (17)..(17): Xaa in position 17 is any amino acid
  Variant (19)..(20): Xaa in position 19 to 20 is any amino acid
  Variant (22)..(23): Xaa in position 22 to 23 is any amino acid
  Variant (25)..(25): Xaa in position 25 is any amino acid
  Variant (27)..(28): Xaa in position 27 to 28 is any amino acid
  Variant (34)..(34): Xaa in position 34 is any amino acid
  Variant (36)..(36): Xaa in position 36 is any amino acid
  Variant (39)..(41): Xaa in position 39 to 41 is any amino acid
  Variant (44)..(44): Xaa in position 44 is any amino acid
  Variant (46)..(53): Xaa in position 46 to 53 is any amino acid
  Variant (55)..(56): Xaa in position 55 to 56 is any amino acid
  Variant (58)..(60): Xaa in position 58 to 60 is any amino acid
  Variant (62)..(62): Xaa in position 62 is any amino acid
  Variant (64)..(64): Xaa in position 64 is any amino acid
  Variant (66)..(75): Xaa in position 66 to 75 is any amino acid
  Variant (77)..(84): Xaa in position 77 to 84 is any amino acid
  Variant (85)..(86): Xaa in position 85 to 86 is any or no amino acid
  Variant (89)..(92): Xaa in position 89 to 92 is any amino acid
  Variant (94)..(98): Xaa in position 94 to 98 is any amino acid
  Variant (99)..(99): Xaa in position 99 is any or no amino acid
  Variant (101)..(101): Xaa in position 101 is any amino acid
  Variant (103)..(103): Xaa in position 103 is any amino acid
  Variant (105)..(106): Xaa in position 105 to 106 is any amino acid
  Variant (108)..(121): Xaa in position 108 to 121 is any amino acid
  Variant (125)..(141): Xaa in position 125 to 141 is any amino acid
  Variant (142)..(146): Xaa in position 142 to 146 is any or no amino acid
  Variant (148)..(148): Xaa in position 148 is any amino acid
  Variant (150)..(151): Xaa in position 150 to 151 is any amino acid
RXAMXXXXXAVXXXTTXGXXGXXGXTXXAVCSVXDXPPXXXVCXNXXXXXXXXFXXNXXXCXNXLXXXXXXXXXXFXXXXXXXXXXRFXXXXWXXXXXXGXPXLXXAXXXXXXXXXXXXXXGTHXXXXXXXXXXXXXXXXXXXXXXLXYXXR

SEQ ID NO: 8741 - protein, 61 aa, Artificial sequence
  protein pattern
  Variant (2)..(3): Xaa in position 2 to 3 is any amino acid
  Variant (4)..(5): Xaa in position 4 to 5 is any or no amino acid
  Variant (7)..(8): Xaa in position 7 to 8 is any or no amino acid
  Variant (10)..(10): Xaa in position 10 is any amino acid
  Variant (11)..(11): Xaa in position 11 is Ile, Leu or Val
  Variant (12)..(12): Xaa in position 12 is Ile or Val
  Variant (15)..(15): Xaa in position 15 is Ala, Asp, Glu, Gly, Asn or Ser
  Variant (17)..(18): Xaa in position 17 to 18 is any amino acid
  Variant (19)..(19): Xaa in position 19 is Asp or Gly
  Variant (20)..(21): Xaa in position 20 to 21 is any amino acid
  Variant (23)..(23): Xaa in position 23 is any amino acid
  Variant (24)..(24): Xaa in position 24 is Ala or Thr
  Variant (25)..(26): Xaa in position 25 to 26 is any amino acid
  Variant (27)..(27): Xaa in position 27 is Ala or Ser
  Variant (28)..(28): Xaa in position 28 is any amino acid
  Variant (29)..(29): Xaa in position 29 is Ala, Cys or Ser
  Variant (30)..(30): Xaa in position 30 is Pro or Ser
  Variant (31)..(31): Xaa in position 31 is Ile, Leu or Val
  Variant (32)..(32): Xaa in position 32 is Ser or Thr
  Variant (33)..(33): Xaa in position 33 is Ala or Asp
  Variant (34)..(34): Xaa in position 34 is Ala, Asp, Glu, Asn, Gln, Ser or Thr
  Variant (36)..(36): Xaa in position 36 is Ala, Gly or Pro
  Variant (37)..(37): Xaa in position 37 is Ser or Thr
  Variant (38)..(38): Xaa in position 38 is any amino acid
  Variant (39)..(39): Xaa in position 39 is Leu or Met
  Variant (40)..(40): Xaa in position 40 is any amino acid
  Variant (42)..(42): Xaa in position 42 is Ile, Leu, Met or Val
  Variant (43)..(45): Xaa in position 43 to 45 is any amino acid
  Variant (46)..(46): Xaa in position 46 is Ala, Asn or Ser
  Variant (47)..(51): Xaa in position 47 to 51 is any amino acid
  Variant (52)..(52): Xaa in position 52 is Phe, Ile, Leu or Val
  Variant (53)..(57): Xaa in position 53 to 57 is any amino acid
  Variant (58)..(58): Xaa in position 58 is Phe, Ile, Leu, Met or Val
  Variant (59)..(59): Xaa in position 59 is any amino acid
  Variant (60)..(60): Xaa in position 60 is Ile, Leu or Val
MXXXXAXXVXXXTTXGXXXXXGXXXXXXXXXXXXPXXXXXCXXXXXXXXXXXXXXXXXXXN

SEQ ID NO: 8742 - DNA, 1497 bp, Escherichia coli
  CDS (1)..(1497): transl_table=11
atgcatacagattcgaatggtggtcattatattttacgctttgataacgagcggaaaacaaaccaaaggcgaagaatcatggaaaccaatatcgttgaagtagagaactttgttcagcagtcagaagagaggcggggtagcgcctttacgcaggaagtgaaacgctacctggagcgctacccgaatacgcaatatgttgatgttttacttaccgatttaaatggttgcttccgtggaaagcgtattcctgtttcaagcctgaagaagctcgagaaagggtgttatttcccggcctcggtatttgcaatggatattctgggcaacgtagtagaagaagcaggtctgggtcaggaaatgggcgagccggatcgtacctgtgttcctgttctcggttccttaactccttctgccgccgatccagagtttatcggtcagatgctcctgaccatggtcgatgaagatggcgctccctttgacgttgagccgcggaacgttcttaaccgcctgtggcagcagctgcgccagcgcggattgttcccggtcgtagcggtagagctggagttctatttactggatcgccagcgcgacgctgaagggtatctgcaaccgccctgcgcgcctggcaccgatgaccgcaatacacaaagccaggtttactccgttgataacctcaaccacttcgccgacgtgctcaatgatattgatgaactggcgcagttacagctgattccggcagatggcgcggtcgctgaggcctcgccgggtcagtttgaaatcaacctttaccatactgataacgtgctggaagcctgcgatgatgcgctggcactaaaacgcctggtgcgtctgatggcagaaaagcataagatgcacgccacttttatggcgaagccgtatgaagagcacgcgggcagcggaatgcatatccatatcagtatgcaaaataatcgtggcgagaacgtgctttctgacgcggaaggcgaagattcgccgctgctgaaaaagatgctcgccgggatgattgacctgatgccgtcgtcgatggcgttgctggcaccaaacgtgaactcgtatcgccgcttccagccgggaatgtatgtgccgacgcaggcgtcgtggggccataacaaccgcaccgtcgccctgcgtattccgtgcggcgaccgtcataatcaccgcgtggaatatcgcgtggcgggtgccgatgccaacccatatctggtgatggcagcgatttttgccggtattttgcatggccttgataacgagctgccgttgcaggaagaagtcgaaggcaacgggctggaacaggaaggcttaccctttccgattcgccagagcgatgccctgggtgagtttatcgagaatgatcacctgcgccgctatttaggcgaacgcttctgccatgtctatcacgcctgtaaaaatgatgagctgttgcagtttgagcgcctcatcacagaaacagaaattgagtggatgttgaaaaacgcgtaa

SEQ ID NO: 8743 - protein, 498 aa, Escherichia coli
MHTDSNGGHYILRFDNERKTNQRRRIMETNIVEVENFVQQSEERRGSAFTQEVKRYLERYPNTQYVDVLLTDLNGCFRGKRIPVSSLKKLEKGCYFPASVFAMDILGNVVEEAGLGQEMGEPDRTCVPVLGSLTPSAADPEFIGQMLLTMVDEDGAPFDVEPRNVLNRLWQQLRQRGLFPVVAVELEFYLLDRQRDAEGYLQPPCAPGTDDRNTQSQVYSVDNLNHFADVLNDIDELAQLQLIPADGAVAEASPGQFEINLYHTDNVLEACDDALALKRLVRLMAEKHKMHATFMAKPYEEHAGSGMHIHISMQNNRGENVLSDAEGEDSPLLKKMLAGMIDLMPSSMALLAPNVNSYRRFQPGMYVPTQASWGHNNRTVALRIPCGDRHNHRVEYRVAGADANPYLVMAAIFAGILHGLDNELPLQEEVEGNGLEQEGLPFPIRQSDALGEFIENDHLRRYLGERFCHVYHACKNDELLQFERLITETEIEWMLKNA

SEQ ID NO: 8744 - DNA, 1401 bp, Mesorhizobium loti MAFF303099; identical to SEQ ID NO: 1214
  CDS (1)..(1401): transl_table=11

SEQ ID NO: 8745 - protein, 466 aa, Mesorhizobium loti MAFF303099; identical to SEQ ID NO: 1215

SEQ ID NO: 8746 - DNA, 1377 bp, Pseudomonas aeruginosa PAO1; identical to SEQ ID NO: 1222
  CDS (1)..(1377): transl_table=11

SEQ ID NO: 8747 - protein, 458 aa, Pseudomonas aeruginosa PAO1; identical to SEQ ID NO: 1223

SEQ ID NO: 8748 - DNA, 1497 bp, Escherichia coli O157:H7 EDL933; identical to SEQ ID NO: 1226
  CDS (1)..(1497): transl_table=11

SEQ ID NO: 8749 - protein, 498 aa, Escherichia coli O157:H7 EDL933; identical to SEQ ID NO: 1227

SEQ ID NO: 8750 - DNA, 1359 bp, Agrobacterium tumefaciens str. C58; identical to SEQ ID NO: 1228
  CDS (1)..(1359): transl_table=11

SEQ ID NO: 8751 - protein, 452 aa, Agrobacterium tumefaciens str. C58; identical to SEQ ID NO: 1229

SEQ ID NO: 8752 - DNA, 1440 bp, Agrobacterium tumefaciens str. C58
  CDS (1)..(1440): transl_table=11
atgcccgccaaaaaaaccatgctccgcccgaagaaacaggcaaccatggcaaagaagtctcctcccctcgatctctcctccacccgtggcgtttcctcctggcgcgaagccgcgcaatggctgcgcgtgcgcgggatcgaagacatagaatgcatcacgcccgaccttgccggggttgcgcgcggaaagatgatgccgacggcgaaattcacgggcgatacctcgctcgcgctgccgtccgcgctctaccgccacacgatatcaggcgaatatcctgatgagacggcgaacttccgttacgagccgcgcgacagcgacctgaaactagtgccggatctttcgacgctgtccgtcgtgccgtgggagagcgacccaaccgcgcaggtgatctgcgacgttgtggatgccgagggtaatttcgttccctacacgccgcgcaacgtgctgaagaacgtgctttcgctctataccgaaaagggctggaagccggtcgtagcacccgaaatcgaattttatctcgtcgccatgaatgacgatccggattatccgctgcatccgccgaagggccgctccggccgctccatcgttggcggtcagagctattccatcgccggcatcaacgaattcgacgagctgatcgacgacatctaccatttctcggaaaaacagggtctcgagatcgatacgctgatccacgaggaaggcccggcgcagctggaaatcaacctgcgccacggcgacccgatcgaacttgccgaccaggtgtttcttttcaagcgcaccattcgcgaggccgcgctgaaacacggcatctacgccaccttcatggcaaagccgatgcagggccagccaggttcggccatgcatatccatcagtcggtggtggaaatcgatggcggacgcaatatcttctccaatgccgatggcagtccttcgaaggtattcttctccttcgtcggcggcatgcagcgttatgttccaaacgcactcgtcatgctggcgccctatgtgaattcctatcgccgcctgacgcccgacatggcctgcccggtcaacaatgcctggggttacgacaaccgcaccacggctttccgggtgccgatttccagcccgcaggcgcgtcgcgtcgaaaaccgcctgccgagttcggacgccaatccgtacctggcgcttgccgcttcgctcggctgcggctggcttggcatcgtcaacaatatcgagccgaccgaacccaccgccgatacggccaatgaaggctccatcgaactgccgcgtggtctccttgaggccgtggcgctgctggaaggcgaggaacagttcgaccgggtgttcggccatgaattcgtgggcctttatgccggcctgaaacgcggggaattcgagaccttcatgcaggtcatcagcccctgggagcgcgagttcctgcttctcaacgtgtga

SEQ ID NO: 8753 - protein, 479 aa, Agrobacterium tumefaciens str. C58
MPAKKTMLRPKKQATMAKKSPPLDLSSTRGVSSWREAAQWLRVRGIEDIECITPDLAGVARGKMMPTAKFTGDTSLALPSALYRHTISGEYPDETANFRYEPRDSDLKLVPDLSTLSVVPWESDPTAQVICDVVDAEGNFVPYTPRNVLKNVLSLYTEKGWKPVVAPEIEFYLVAMNDDPDYPLHPPKGRSGRSIVGGQSYSIAGINEFDELIDDIYHFSEKQGLEIDTLIHEEGPAQLEINLRHGDPIELADQVFLFKRTIREAALKHGIYATFMAKPMQGQPGSAMHIHQSVVEIDGGRNIFSNADGSPSKVFFSFVGGMQRYVPNALVMLAPYVNSYRRLTPDMACPVNNAWGYDNRTTAFRVPISSPQARRVENRLPSSDANPYLALAASLGCGWLGIVNNIEPTEPTADTANEGSIELPRGLLEAVALLEGEEQFDRVFGHEFVGLYAGLKRGEFETFMQVISPWEREFLLLNV

SEQ ID NO: 8754 - DNA, 1368 bp, Sinorhizobium meliloti 1021; identical to SEQ ID NO: 1230
  CDS (1)..(1368): transl_table=11

SEQ ID NO: 8755 - protein, 455 aa, Sinorhizobium meliloti 1021; identical to SEQ ID NO: 1231

SEQ ID NO: 8756 - DNA, 1383 bp, Caulobacter crescentus CB15; identical to SEQ ID NO: 1232
  CDS (1)..(1383): transl_table=11

SEQ ID NO: 8757 - protein, 460 aa, Caulobacter crescentus CB15; identical to SEQ ID NO: 1233

SEQ ID NO: 8758 - DNA, 1383 bp, Agrobacterium tumefaciens str. C58; identical to SEQ ID NO: 1234
  CDS (1)..(1383): transl_table=11

SEQ ID NO: 8759 - protein, 460 aa, Agrobacterium tumefaciens str. C58; identical to SEQ ID NO: 1235

SEQ ID NO: 8760 - DNA, 1395 bp, Agrobacterium tumefaciens str. C58
  CDS (1)..(1395): transl_table=11
atggcaaagaagtctcctcccctcgatctctcctccacccgtggcgtttcctcctggcgcgaagccgcgcaatggctgcgcgtgcgcgggatcgaagacatagaatgcatcacgcccgaccttgccggggttgcgcgcggaaagatgatgccgacggcgaaattcacgggcgatacctcgctcgcgctgccgtccgcgctctaccgccacacgatatcaggcgaatatcctgatgagacggcgaacttccgttacgagccgcgcgacagcgacctgaaactagtgccggatctttcgacgctgtccgtcgtgccgtgggagagcgacccaaccgcgcaggtgatctgcgacgttgtggatgccgagggtaatttcgttccctacacgccgcgcaacgtgctgaagaacgtgctttcgctctataccgaaaagggctggaagccggtcgtagcacccgaaatcgaattttatctcgtcgccatgaatgacgatccggattatccgctgcatccgccgaagggccgctccggccgctccatcgttggcggtcagagctattccatcgccggcatcaacgaattcgacgagctgatcgacgacatctaccatttctcggaaaaacagggtctcgagatcgatacgctgatccacgaggaaggcccggcgcagctggaaatcaacctgcgccacggcgacccgatcgaacttgccgaccaggtgtttcttttcaagcgcaccattcgcgaggccgcgctgaaacacggcatctacgccaccttcatggcaaagccgatgcagggccagccaggttcggccatgcatatccatcagtcggtggtggaaatcgatggcggacgcaatatcttctccaatgccgatggcagtccttcgaaggtattcttctccttcgtcggcggcatgcagcgttatgttccaaacgcactcgtcatgctggcgccctatgtgaattcctatcgccgcctgacgcccgacatggcctgcccggtcaacaatgcctggggttacgacaaccgcaccacggctttccgggtgccgatttccagcccgcaggcgcgtcgcgtcgaaaaccgcctgccgagttcggacgccaatccgtacctggcgcttgccgcttcgctcggctgcggctggcttggcatcgtcaacaatatcgagccgaccgaacccaccgccgatacggccaatgaaggctccatcgaactgccgcgtggtctccttgaggccgtggcgctgctggaaggcgaggaacagttcgaccgggtgttcggccatgaattcgtgggcctttatgccggcctgaaacgcggggaattcgagaccttcatgcaggtcatcagcccctgggagcgcgagttcctgcttctcaacgtgtga

SEQ ID NO: 8761 - protein, 464 aa, Agrobacterium tumefaciens str. C58
MAKKSPPLDLSSTRGVSSWREAAQWLRVRGIEDIECITPDLAGVARGKMMPTAKFTGDTSLALPSALYRHTISGEYPDETANFRYEPRDSDLKLVPDLSTLSVVPWESDPTAQVICDVVDAEGNFVPYTPRNVLKNVLSLYTEKGWKPVVAPEIEFYLVAMNDDPDYPLHPPKGRSGRSIVGGQSYSIAGINEFDELIDDIYHFSEKQGLEIDTLIHEEGPAQLEINLRHGDPIELADQVFLFKRTIREAALKHGIYATFMAKPMQGQPGSAMHIHQSVVEIDGGRNIFSNADGSPSKVFFSFVGGMQRYVPNALVMLAPYVNSYRRLTPDMACPVNNAWGYDNRTTAFRVPISSPQARRVENRLPSSDANPYLALAASLGCGWLGIVNNIEPTEPTADTANEGSIELPRGLLEAVALLEGEEQFDRVFGHEFVGLYAGLKRGEFETFMQVISPWEREFLLLNV

SEQ ID NO: 8762 - DNA, 1380 bp, Xanthomonas campestris pv. campestris str. ATCC 33913; identical to SEQ ID NO: 1236
  CDS (1)..(1380): transl_table=11

SEQ ID NO: 8763 - protein, 459 aa, Xanthomonas campestris pv. campestris str. ATCC 33913; identical to SEQ ID NO: 1237

SEQ ID NO: 8764 - DNA, 1380 bp, Xanthomonas axonopodis pv. citri str. 306; identical to SEQ ID NO: 1238
  CDS (1)..(1380): transl_table=11

SEQ ID NO: 8765 - protein, 459 aa, Xanthomonas axonopodis pv. citri str. 306; identical to SEQ ID NO: 1239

SEQ ID NO: 8766 - DNA, 1431 bp, Brucella suis 1330
  CDS (1)..(1431): transl_table=11
atgtctgctgatacgacggaaaagaaggctacgcgcacaccgcgtcgccgtacgcctgcttatgtcaaatctctgcgcggggtgaaaaactggaaacaggcaactgaatggctggcctggcgcgatattgaagatattgagtgcattacccccgatcaggcgggggttgcgcgcggcaagatgatgccatcgaagaaattcacatccaacacatcgctggcgctgccttccgccgttttcatgacgacgatttccggcgcttaccccgaggatggctatggtttccattatcccgaagacgatggcgacctgaagcttctgcccgatcttaccaccctctctgccgtgccatgggaaacggattcgacggcgcaggtgatctgcgatctcgtctatcaggacgggcgcgcggtggaattcaccccgcgcaatgtgctgcgcaatgtcattgccgcctatagcaagcgcggcctgaagccggttgtcgccccggaaatcgagttttatctggtgcgcaaaaacccggatccggactatccgctgacgccgcctgttggccgttcgggccgggccattggtggcggacagggctattccattgccggtgtcaacgagttcgatgaactgatcgacgatatctatcatttctcggaaggtcaggggctggagatcgacacgctgatccatgaagaaggtgctggccagcttgaaataaacctgcgccatggcgacccggtggaactggccgatcaggttttcatgttcaagcgcacgatccgcgaggcggcactgaaacacgatatgtacgccacgttcatggccaagcccattcagggccagccgggctcggccatgcatatccaccagtccatcgtggacaagaagaccggacgaaacatcttcaccaatgaagacggcagcgaaagccaagccttccaccatttccttggcgggatgcagcgccatgtgcccaatgcactcgtcatgttcgccccttatgtgaactcctaccgccgcctcacgccggacgcctcggccccggtcaacgtcaaatggggctatgacaaccgcacaaccgccttccgcgtgccgcgttcagaccccagtgcgcgccgcgtggaaaaccgcatcccctcttccgacgccaatccctaccttgcccttgctgcttcgcttgcttgcggcctgatcggccttgtaaacaagatcgagccggaacagcccgcgaccacgagcgtcaacaccaaggaggtcgagttgccccgcggcctcatcgacgcggtggagcttttcgaggaagacgccgaattgcgcaatctgttcggcagttccttcatgaccacctatgccgccatcaaacgcgccgagttcgagaccttcatggaagtcatcagcccctgggaacgggagtttttgttgctcaatgtttaa

SEQ ID NO: 8767 - protein, 476 aa, Brucella suis 1330
MSADTTEKKATRTPRRRTPAYVKSLRGVKNWKQATEWLAWRDIEDIECITPDQAGVARGKMMPSKKFTSNTSLALPSAVFMTTISGAYPEDGYGFHYPEDDGDLKLLPDLTTLSAVPWETDSTAQVICDLVYQDGRAVEFTPRNVLRNVIAAYSKRGLKPVVAPEIEFYLVRKNPDPDYPLTPPVGRSGRAIGGGQGYSIAGVNEFDELIDDIYHFSEGQGLEIDTLIHEEGAGQLEINLRHGDPVELADQVFMFKRTIREAALKHDMYATFMAKPIQGQPGSAMHIHQSIVDKKTGRNIFTNEDGSESQAFHHFLGGMQRHVPNALVMFAPYVNSYRRLTPDASAPVNVKWGYDNRTTAFRVPRSDPSARRVENRIPSSDANPYLALAASLACGLIGLVNKIEPEQPATTSVNTKEVELPRGLIDAVELFEEDAELRNLFGSSFMTTYAAIKRAEFETFMEVISPWEREFLLLNV

SEQ ID NO: 8768 - DNA, 1419 bp, Shigella flexneri 2a str. 301; identical to SEQ ID NO: 1240
  CDS (1)..(1419): transl_table=11

SEQ ID NO: 8769 - protein, 472 aa, Shigella flexneri 2a str. 301; identical to SEQ ID NO: 1241

SEQ ID NO: 8770 - DNA, 1359 bp, Pseudomonas putida KT2440
  CDS (1)..(1359): transl_table=11
atgaacgcccccttcgatcagctgtccacctggctgaaagaacaccggatcaccgaagtcgaatgcgtgatcagcgacttgaccggcatcgcccgcggcaagattgcgcctaccgccaagttcctccatgagcgaggcatgcgtctgccagaaagcgtgctgctgcagacagtcaccggcgactacgtcgacgatgacatctattacaacctgctcgacgccgccgacatcgacatggtctgccgccccgatcccaccgccgtttaccagatcccgtgggcgatcgagccaaccgcgatcgtgatccacgacaccttcgacaagcaaggcaaccctatcgagctttcgccacgcaacgtcctgaaaaaggtgctcaagctgtacgccgacaagggctggcagccgatcgtcgcgcccgagatggagttctacctgaccaagcgctgcgaagacccggatttgccactgcaggtaccactggggcgttccggccgtgctgaaagtggccgccagtcgttctcgatcgacgccgccaacgaattcgacccactgttcgaagacgtctacgactggtgcgagatccagggcttggacctggatacgctgatccacgaagacggcccggcgcagatggagatcaacttccgccacggcgacgcgctggacctggccgaccagatcaccgtgttcaagcgcaccatgcgcgaggccgcgctcaagcacaacgtggccgccacgttcatggccaagccgatcaccgatgaacccggcagtgccatgcacctgcaccagagcgtggtcgacatcgccactggcaaaccgatctttgccaacgaagacggcagcatgagccagctgtttttgcatcacatcggcggcttgcagaagtacatccccaagctgctgccgatgttcgcgcccaacgtcaactcgttccgccgcttcctgccggatacctcggcaccggtcaacgtcgagtggggcgaagaaaaccgcacggccggcctgcgcgtgcccacctccagccctgaggcgatgcgggtggaaaaccgcctgccgggcgccgatgccaacccgtacctggccatcgctgccagcctgctgtgcggctacctgggcatggtcgagcagatcgaccctagcgcaccggtgcagggccgcgcctatgaacgccgcaacctgcgcctgccgatcaccatcgaggatgcgctgcagcacatggaggactgcgaaaccgtgcagcagtacctgggcaagcagttcgtccagggctacgtggcggtcaagcgcgccgagcacgagaactacaagcgcgtcatcagctcatgggagcgtgaattcctgatgctgagtgtctga

SEQ ID NO: 8771 - protein, 452 aa, Pseudomonas putida KT2440
MNAPFDQLSTWLKEHRITEVECVISDLTGIARGKIAPTAKFLHERGMRLPESVLLQTVTGDYVDDDIYYNLLDAADIDMVCRPDPTAVYQIPWAIEPTAIVIHDTFDKQGNPIELSPRNVLKKVLKLYADKGWQPIVAPEMEFYLTKRCEDPDLPLQVPLGRSGRAESGRQSFSIDAANEFDPLFEDVYDWCEIQGLDLDTLIHEDGPAQMEINFRHGDALDLADQITVFKRTMREAALKHNVAATFMAKPITDEPGSAMHLHQSVVDIATGKPIFANEDGSMSQLFLHHIGGLQKYIPKLLPMFAPNVNSFRRFLPDTSAPVNVEWGEENRTAGLRVPTSSPEAMRVENRLPGADANPYLAIAASLLCGYLGMVEQIDPSAPVQGRAYERRNLRLPITIEDALQHMEDCETVQQYLGKQFVQGYVAVKRAEHENYKRVISSWEREFLMLSV

SEQ ID NO: 8772 - DNA, 1365 bp, Pseudomonas putida KT2440; identical to SEQ ID NO: 1244
  CDS (1)..(1365): transl_table=11

SEQ ID NO: 8773 - protein, 454 aa, Pseudomonas putida KT2440; identical to SEQ ID NO: 1245

SEQ ID NO: 8774 - DNA, 1359 bp, Pseudomonas putida KT2440
  CDS (1)..(1359): transl_table=11
atgagtaacaacctcgaccagctcaccgattggttgaaagagcacaagatcaccgaagtcgaatgcatgatcagcgacctgaccggcatcacgcgcggcaagatttcgccaaccaacaaattcatcgctgaaaaaggcatgcggctgcccgagagcgtgctgctgcagaccgtgaccggcgactacgtcgacgacgacatctattacgaactgctcgacccggcagacatcgacatgatctgccgccctgacgagaacgctgtgttcctcgtgccgtgggccatcgagccgaccgcacaggtcatccacgacacctacgacaagaagggcaacccggtcgaactgtcgccgcgcaacgtgctgaagaaagtgctcaagctatacgccgacaagggctggcagccgatcgtcgcccccgagatggagttctacctgaccaagcgcagcgaagacccggactttccgctgcagcccccggtaggccgttccggtcgcccggaaaccggccgtcagtctttctcgatcgaagctgccaacgaattcgacccgctgttcgaagacgtctacgactggtgcgagctgcagcagctggacctcgacacgctgatccacgaagacggcacggcgcagatggaaatcaacttccgtcacggcgacgctctgcacctggccgaccagatcctggtgttcaagcgcaccatgcgcgaggcggcgctcaagcacaacgtggctgccactttcatggccaaaccgatgaccggcgagccgggcagtgccatgcacctgcaccagagtgtggtcgacgtggccaccggcaagaacatcttcagcaatgaagacggcagcatgagcgcgctgttcctcaaccacatcggcggcctgcagaagttcatccccgaggcgctgccgctgttcgcgcccaacgtcaactcgttccgccgcttcctgcccgacacttcggcgccggtgaatgtggagtggggcgaagaaaaccgcaccgtcggcctgcgcgtaccggatgccggcccgcaaagccggcgcgtcgagaaccgcctgccgggcgccgacgccaacccgtacctggccatcgccgccagcctactgtgtggctacatcggcatggtcgaaggtatcgaggccagcgcgccagtgcagggccgtggctacgaacgccgcaacctgcgcctgcccctgaccatcgaggacgccttggaacgcatggaaaacagccgtgcgctggtgcagtacctgggcaagaaattcatcaccgggtatgtcgctaccaagcgcgccgagcatgaaaacttcaagcgcgtcatcagttcgtgggagcgtgagttcctgctgttcgctgtctga

SEQ ID NO: 8775 - protein, 452 aa, Pseudomonas putida KT2440
MSNNLDQLTDWLKEHKITEVECMISDLTGITRGKISPTNKFIAEKGMRLPESVLLQTVTGDYVDDDIYYELLDPADIDMICRPDENAVFLVPWAIEPTAQVIHDTYDKKGNPVELSPRNVLKKVLKLYADKGWQPIVAPEMEFYLTKRSEDPDFPLQPPVGRSGRPETGRQSFSIEAANEFDPLFEDVYDWCELQQLDLDTLIHEDGTAQMEINFRHGDALHLADQILVFKRTMREAALKHNVAATFMAKPMTGEPGSAMHLHQSVVDVATGKNIFSNEDGSMSALFLNHIGGLQKFIPEALPLFAPNVNSFRRFLPDTSAPVNVEWGEENRTVGLRVPDAGPQSRRVENRLPGADANPYLAIAASLLCGYIGMVEGIEASAPVQGRGYERRNLRLPLTIEDALERMENSRALVQYLGKKFITGYVATKRAEHENFKRVISSWEREFLLFAV

SEQ ID NO: 8776 - DNA, 1377 bp, Pseudomonas putida KT2440; identical to SEQ ID NO: 1246
  CDS (1)..(1377): transl_table=11

SEQ ID NO: 8777 - protein, 458 aa, Pseudomonas putida KT2440; identical to SEQ ID NO: 1247

SEQ ID NO: 8778 - DNA, 1383 bp, Pseudomonas putida KT2440; identical to SEQ ID NO: 1248
  CDS (1)..(1383): transl_table=11

SEQ ID NO: 8779 - protein, 460 aa, Pseudomonas putida KT2440; identical to SEQ ID NO: 1249

SEQ ID NO: 8780 - DNA, 1377 bp, Pseudomonas syringae pv. tomato str. DC3000; identical to SEQ ID NO: 1250
  CDS (1)..(1377): transl_table=11

SEQ ID NO: 8781 - protein, 458 aa, Pseudomonas syringae pv. tomato str. DC3000; identical to SEQ ID NO: 1251

SEQ ID NO: 8782 - DNA, 1389 bp, Vibrio parahaemolyticus RIMD 2210633; identical to SEQ ID NO: 1252
  CDS (1)..(1389): transl_table=11

SEQ ID NO: 8783 - protein, 462 aa, Vibrio parahaemolyticus RIMD 2210633; identical to SEQ ID NO: 1253

SEQ ID NO: 8784 - DNA, 1419 bp, Shigella flexneri 2a str. 2457T; identical to SEQ ID NO: 1254
  CDS (1)..(1419): transl_table=11

SEQ ID NO: 8785 - protein, 472 aa, Shigella flexneri 2a str. 2457T; identical to SEQ ID NO: 1255

SEQ ID NO: 8786 - DNA, 1335 bp, Chromobacterium violaceum ATCC 12472
  CDS (1)..(1335): transl_table=11
atgaatcaccagatcaacgagtggttgcgagagcaccgcatcaccgaagtcgaatgcatcgtgccggacatgaccggcatcgcccgcggaaagatcgtgcccaaggacaagttcgtttccgacccggaaatgcgtctgcccgaggcggtgctgatccagaccgtgaccggcgactatcccgacgacagcctgctggatctgaccgatccggacatggtgctggagcccgatccgaataccttgcgctacgtgccgtgggcggtggacccgaccgcgcaattgatttacgactgctgccgcgccgacggcagcccggtggacgtggcgccgcgcaatgtgctcaagcgcgtgctgggcctgttcgacgagatgggtctggagccggtgctggcgccggagatggagttctacctgctgtcgcccaaccccgacccggacatcccgctggccgcgccgatcggccgcaccggtcgggcggaattcggccgtcgttcctactcgatcgacgcagtcaacgagttcgacccgctgttcgaggacatctacgactattgccacgcgcagaacctggaagtggacacgctgatccacgagatcggcactgcgcagatggaaatcaacttcctgcatggcaatccgctggagctggccgaccaggtgttcctgttcaagcgcaccgtgcgcgaggcggcgttccgccacaatatgtacgccactttcatggccaagccgatggagaacgagccgggcagcgccatgcacatccaccagagcctggtggacaagaacaccggccgcaacgtgttcaccaacgaggacggcagcccgtccgacatctttttccatttcatcgccggcctgcagaaatacgtgccgcagaccatgccgctgttcgccccctacgtgaactcattccgtcgtttgtctcgctacaccgcggcgccgaccaatgtcgaatggggttacgacaaccgcaccgtcgggctgcgcatcccgcattcgtcgccggccgcgcgccgcatcgaaaaccgggtgcccggcgtcgacgtcaatccctatatcgcgatcgcggccacgctggcctgcggctacctgggcatggtgaacaagctgcggccgaccgagcccaggcagaccgacgcttacgagctgccctaccaattccccaacagctcggaagagtcgctgctgcagctggccggctgcagcgagatcgccgaggtgttggggccgcgcttcgtcaagatgtacgtggcgatgaaggagaaggagttttccgagtatttccgcgtgatcagcccgtgggagcgcaagttcctgctgctgcacgtgtga

SEQ ID NO: 8787 - protein, 444 aa, Chromobacterium violaceum ATCC 12472
MNHQINEWLREHRITEVECIVPDMTGIARGKIVPKDKFVSDPEMRLPEAVLIQTVTGDYPDDSLLDLTDPDMVLEPDPNTLRYVPWAVDPTAQLIYDCCRADGSPVDVAPRNVLKRVLGLFDEMGLEPVLAPEMEFYLLSPNPDPDIPLAAPIGRTGRAEFGRRSYSIDAVNEFDPLFEDIYDYCHAQNLEVDTLIHEIGTAQMEINFLHGNPLELADQVFLFKRTVREAAFRHNMYATFMAKPMENEPGSAMHIHQSLVDKNTGRNVFTNEDGSPSDIFFHFIAGLQKYVPQTMPLFAPYVNSFRRLSRYTAAPTNVEWGYDNRTVGLRIPHSSPAARRIENRVPGVDVNPYIAIAATLACGYLGMVNKLRPTEPRQTDAYELPYQFPNSSEESLLQLAGCSEIAEVLGPRFVKMYVAMKEKEFSEYFRVISPWERKFLLLHV

SEQ ID NO: 8788 - DNA, 1311 bp, Gloeobacter violaceus PCC 7421
  CDS (1)..(1311): transl_table=11
atgactgttccactttcagagcttgcccgcgaaaagggcatccggtactttttgatctcttttaccgacttgttcggcacccagcgggccaaactggtgccgacccaggccatcgacgcgatagccgccagtggtgcggggttcgcgggcttcgccgcctggatggacatgagccccgccgacccggacatgttcgcccatcccgatgcaggctctgtgttccaactgccctggcagccggaggtggcctggatgccggcggacctgttcacccccgaaggcacggcgatcgcccagactccgaggctggtgctcaagcgggtgctgaaactggccctggagctaggttatcgcgtccgtacgggtgtcgagtgcgagtattttctgctggcggcggacgaggtgcagattgccgactcccgtgattttcagagcaaaccctgctacgaccagcaggcgctgatgcgccgctacgcggtgatctcggagatttgcgacgccatgaacgcccttgggtggggtgcctatcagaacgaccacgaggatgccaacggccagttcgagatgaactggacctacgccgacgcgctggtgaccgccgatcgccacgcctttttcaagtacatggtgaaaaccgttgccgagaagcacagcctgcgggctacttttatgcccaaaccgtttatgcacctcaccggcaacggctgccacacccacctctcggtctgggacagcgagggcaaggtcaaccgcttcgacgatccccggggagaactgggcctctcgccgctcgcctatcactttatcggcggtgtgcagcattcggcggaggcgctgtgcgcctttgccaatccgaccgtcaattcctacaaacgcatcaacgctcccattaccgcctccggcgccacctggtcgcccaacaccatcagctacagcggcaacaaccgcacccacgccatccgcatccccgaaccgggccgcttcgagttgcgcctggccgacggagcggccaacccctacttgctgcccgccgccctcaccgccgtgggcctcgacggcatcgcccaccagcgcgatgccggcccgcgccgtgacaacaacagctacaccaaccctctgcccccggagagcgccaaacccctgccggccaacctgctcgacgccctgcgcgccctggagagcgacaccgttttgtccgaagcgatgggtgcggattttgtcgcgtcttacttgaagctcaaacaccgcgaatggcaggattactgcgcccgtgtcactccttgggaactggaacataccctcgattgctag

SEQ ID NO: 8789 - protein, 436 aa, Gloeobacter violaceus PCC 7421
MTVPLSELAREKGIRYFLISFTDLFGTQRAKLVPTQAIDAIAASGAGFAGFAAWMDMSPADPDMFAHPDAGSVFQLPWQPEVAWMPADLFTPEGTAIAQTPRLVLKRVLKLALELGYRVRTGVECEYFLLAADEVQIADSRDFQSKPCYDQQALMRRYAVISEICDAMNALGWGAYQNDHEDANGQFEMNWTYADALVTADRHAFFKYMVKTVAEKHSLRATFMPKPFMHLTGNGCHTHLSVWDSEGKVNRFDDPRGELGLSPLAYHFIGGVQHSAEALCAFANPTVNSYKRINAPITASGATWSPNTISYSGNNRTHAIRIPEPGRFELRLADGAANPYLLPAALTAVGLDGIAHQRDAGPRRDNNSYTNPLPPESAKPLPANLLDALRALESDTVLSEAMGADFVASYLKLKHREWQDYCARVTPWELEHTLDC

SEQ ID NO: 8790 - DNA, 1386 bp, Rhodopseudomonas palustris CGA009
  CDS (1)..(1386): transl_table=11
atgctgaagacgatcgatacgccgcaggtccgcgatgccacgccgaaactgaagctgtactcgcgcgaggaggcggatgcttttgtcgccaaggtgaaggccgccggctacgactacgtgcggttcgaatttcccgatatggccgggctgtctcgggggaagaccattccgatcgggcacgtctctagttatatgcgctctggcctcaatctgtatggcggcacggtggcgctcgacagttattcgatcccggtccgtgattccggctacaatgaggaaatgaactacaccgattgcgtgatggtggtcgacaccgacacgctgacgccggtgccgtggctggagaagaccggtcgagtgatctgcgacacgatgtggtacgacggcacgccgcaaatggcgacgccgcggctgctgctcaagaagatgctgaacgtcgcggcctcgatgggctatacggtgaagtcgggacacgaatacgaattctacgtcgtcgaccacgcgacgcgcgcgccgctgttcggtggccagccgatcttcgtgacctcgcgcacccatcagacacctgctatcgacgacctgatccgcgtgctcgaagcccagggcatcgacatcatcacttggaacgtcgagcatggtccgggccagatcgagatcaactactcggcactcgacgatatcgcggccgccgatcgggcctttgtgttcaagggcaccgtcaaggagtatctcgccaagcacggtctgctcgcgacgttcatgaccaagccctacaaggggctgtctggaagctgctcgcactttcacatctcgctgctcgacagcaagaccggcgaaaacgccttcctggacaaggaagccgagaacggtctatcccgcctgatgcgcagcttcattcagggaatcctcgatcacacccgtgcctgcatggcgctgtggagtccgaccccgaattgctatcgccggatccggccccgcacctatgcaccctcgaacatctcctggggcattcaggatcgttccgcgagcatccgggtcaaggcgagttacgatcaggcgacgcatctcgaagttcgggtgccgtcggcgctgtcgaatccctatctcgtctctgcctcggtgatcgcctccggcctgctcggtgtgatgcagaaccgcgagctgtcaccggcggcggcgggtcctaaggaagacgatgcgcgcttcgagaagctgccgaccgctatcgaggacgccctcgaagcgttcgaggccgacgtcgccttgcgcgagatgctgggcgatgagtttgccaaggtctatctcgcgatgaagtggcaggaagccgcgcgcctgcgtgacgaaatcccggccgccgaaaccaatgaatatttcgagctttactga

SEQ ID NO: 8791 - protein, 461 aa, Rhodopseudomonas palustris CGA009
MLKTIDTPQVRDATPKLKLYSREEADAFVAKVKAAGYDYVRFEFPDMAGLSRGKTIPIGHVSSYMRSGLNLYGGTVALDSYSIPVRDSGYNEEMNYTDCVMVVDTDTLTPVPWLEKTGRVICDTMWYDGTPQMATPRLLLKKMLNVAASMGYTVKSGHEYEFYVVDHATRAPLFGGQPIFVTSRTHQTPAIDDLIRVLEAQGIDIITWNVEHGPGQIEINYSALDDIAAADRAFVFKGTVKEYLAKHGLLATFMTKPYKGLSGSCSHFHISLLDSKTGENAFLDKEAENGLSRLMRSFIQGILDHTRACMALWSPTPNCYRRIRPRTYAPSNISWGIQDRSASIRVKASYDQATHLEVRVPSALSNPYLVSASVIASGLLGVMQNRELSPAAAGPKEDDARFEKLPTAIEDALEAFEADVALREMLGDEFAKVYLAMKWQEAARLRDEIPAAETNEYFELY

SEQ ID NO: 8792 - DNA, 1401 bp, Mycobacterium sp. JLS
  CDS (1)..(1401): transl_table=11
atgatcgactcacgcaccgcccccaccgcctcggaggtcctcgcccgactgcacgccgaggacatcgcgacggtgatcctcggcggcaccgacacccacggggtgatgcgcggcaagcgggtcccgatcagccagctgccccggatgctcgagcacgggatgccgatgtgcgacgtgttctgggtgatgcacgtcgacgaatccgacctcgtcgcacgccccgacggataccgcggatacttccccaccgaacggcagggctaccccgacatcctggccgtccccgacctgaccaccctgcggatcgtgccctggcacaacgacaccgcgctgttgctgtgtgactgggagctgccggccgaccaccggccggtgcccatcgcgccgcggtcggtgctgcgccgcgtcgtcgaacgtgccgacgcgatgggctaccggccgctgagcgcgctggagttggagttctatctgctgcgcgagaaggcgggcaccacgcaccgcaaacgggccgacgaactcgtcccgctgcaggaggcgcccagcacctacggcgtggtgatgggttcgctgcaggaggacatcggagcgctgatccggcgccacatgctcgactacggcctgcccgtcgaggcctgcaaccccgagacgggtcccgggcagttcgagatcacgctgcggtacggcaacagcctgaagtccgccgacgacgccttcctgttcaagtcggcggtcaaggaggtcgccgcccagaacgacctgctcgcgacgttcatggcgaaacccgtgaccgactgggcgggtaacagctgccacgtgcacctgagcctgcgcgacatcgccgggggcggggtcttcttcgaccaggacgcccccgatcagctctccaccgcgctgcgccacttcgccggcggaatcctgcacaccatgcgggaattcaccgcgctgatggcgccgacaccgaactcctaccgccgcttcgtgccgtactcgtgggccggcaccaccgccacctggggtgtcgacaaccgttcggtcggcttgcgcgtcattcgcgaaggcgaccacggcacccgcgtcgagcaccgtcagcccggtggtgacgccaacccgtatctggccaccgccgccgccctcgcgggcggactgcacggactgctcaacgagatcgaaccccgcgaactgtccacgaccgacatctacagccagccgagcgaggatctgccggtcctgcctgccaccctcgccgaggcggtggacctgctcgcggacagcgcggcggcacgggagtggttcggggacgacttcgtcgaccattacgtgctgatgaagcgcgcagagatcgcggcccagtcggtggcggtcaccgactgggaggtcgcccggtacctcgaggcgatgtaa

SEQ ID NO: 8793 - protein, 466 aa, Mycobacterium sp. JLS
MIDSRTAPTASEVLARLHAEDIATVILGGTDTHGVMRGKRVPISQLPRMLEHGMPMCDVFWVMHVDESDLVARPDGYRGYFPTERQGYPDILAVPDLTTLRIVPWHNDTALLLCDWELPADHRPVPIAPRSVLRRVVERADAMGYRPLSALELEFYLLREKAGTTHRKRADELVPLQEAPSTYGVVMGSLQEDIGALIRRHMLDYGLPVEACNPETGPGQFEITLRYGNSLKSADDAFLFKSAVKEVAAQNDLLATFMAKPVTDWAGNSCHVHLSLRDIAGGGVFFDQDAPDQLSTALRHFAGGILHTMREFTALMAPTPNSYRRFVPYSWAGTTATWGVDNRSVGLRVIREGDHGTRVEHRQPGGDANPYLATAAALAGGLHGLLNEIEPRELSTTDIYSQPSEDLPVLPATLAEAVDLLADSAAAREWFGDDFVDHYVLMKRAEIAAQSVAVTDWEVARYLEAM

SEQ ID NO: 8794 - DNA, 1422 bp, Bartonella quintana str. Toulouse
  CDS (1)..(1422): transl_table=11
atgaaaaatggtaaacaaatgaaaagtaaaggttctaaacctgtttctcagtttctcaaaaatttacgcggtgtcgataattgggagcaagtttcgcagtggcttgctttgcgtaatgtagaagatattgaatgtattacgcctgatcaagcgggggtagcgcgtggcaagatgatgctttctaaaaaatttatatcggaaacatcattggcattgccttcagcggtttttatggcgacaatttcaggagattatcctgaggatggtcatggttttgaatatcccaaaacagatggtgatttacgccttgagcctgatctttctacgttaagcattgttccatgggaagaagctcctacagcacaagtgatttgtgatcttgtgtatcaaaatgggcaaggtgttgattatacaccgcgaaatgttttgcgaaaagtgattaatttttacacgaaaatgggtctaaaacccgttgtttcaccagaaattgaattttatttggtagagaaaaatcccgatcctgattatcctttagttcctccaattggtcggtctggacgttcaattggtgggggacaggggtattcgattgctggtgtgaatgaatttgatgatctgattgatgatatttatcatttttcggaagcacaagggctagaaattgatacgctcattcatgaggaaggggctggtcagtttgaaatcaatttacgccatggcgatccgatcgaattagctgatcaggtttttatatttaaacgaacaattcgtgaagtggcactgaaacataatatgtatgcaacttttatggccaagcctattcaagggcaaccagggtctgctatgcatattcaccaatcggttgttgataagaaaacaggtatgaacatttttacacaggaggatggtaaagaaaatatccgttttcgccattttattggtggattacaaagacatatacctggggttcttgtgatgcttgctccttatgtgaattcttataggcgtcttgtgcctgatctttcggcgcctgttaacttgcgatggggatatgataatcgtactacagcttttcgtgtgccgcgttcttctccccagggacggcgtgttgagaataggcttccttcatcagatgctaacccttatttagcgcttgcggcttctttggcttgtggtctcattgggttgcagcaagagcttgaaccggatgagccaacaacaaagaatgtgaatactgataacattgaattaccgcgtggactcattgaggctgttaacttatttgaacaagatacggcgatacgtgctattttaggagatgtatttgtcagtacttatgctgcaatcaaacgccaagagtttgaaacttttatggaagtcattagcccgtgggagcgtgaatatctcttgctgaatgtttaa

SEQ ID NO: 8795 - protein, 473 aa, Bartonella quintana str. Toulouse
MKNGKQMKSKGSKPVSQFLKNLRGVDNWEQVSQWLALRNVEDIECITPDQAGVARGKMMLSKKFISETSLALPSAVFMATISGDYPEDGHGFEYPKTDGDLRLEPDLSTLSIVPWEEAPTAQVICDLVYQNGQGVDYTPRNVLRKVINFYTKMGLKPVVSPEIEFYLVEKNPDPDYPLVPPIGRSGRSIGGGQGYSIAGVNEFDDLIDDIYHFSEAQGLEIDTLIHEEGAGQFEINLRHGDPIELADQVFIFKRTIREVALKHNMYATFMAKPIQGQPGSAMHIHQSVVDKKTGMNIFTQEDGKENIRFRHFIGGLQRHIPGVLVMLAPYVNSYRRLVPDLSAPVNLRWGYDNRTTAFRVPRSSPQGRRVENRLPSSDANPYLALAASLACGLIGLQQELEPDEPTTKNVNTDNIELPRGLIEAVNLFEQDTAIRAILGDVFVSTYAAIKRQEFETFMEVISPWEREYLLLNV

SEQ ID NO: 8796 - DNA, 1392 bp, Acinetobacter sp. ADP1
  CDS (1)..(1392): transl_table=11
atgttgcagcaagccgtgaaggagatgtttgatcatcatgaattgaccagtcaacccatgtaccgaccagaagtacaaaaggtcattgatcagcatcatttaaaatatgttttggcgcaatttgttgatattcatggtgctgccaaaaccaagtcggttcccatttcaggtttgaaagcgattgaaaaagacggtgttggatttgcaggttttgctatttctggtatgggaatgcaaccccatggtcctgactttatggtgaaaggcgatttatccactctaactcctgtgccttggcaaccgggttacggacgtgtagtttgtgaaggctatgttaacggcaagccgcatccttacgattcacgctatgtattacgtcagcaagtagaacgtttgagtgcgcaaggctggaccttaaatactgggcttgagccagagtttagcctgtttcgccgtagcgaagatggcaaactgaaaatggtcgatgactccgataatctggataaaccttgttatgactataaaggcttgtctcgttcacgtgagtttttagagcgtttaaccgaagctctcattccagtcgggtttgatatttaccagattgatcatgaagatgccaatggtcagtttgagatcaattatacctatgcagacgccatgaagtcggcagatatgtttacctttttccgtatggctgcgggtgaaatcgccaatgatttgggcatgatctgttcatttatgccaaaacctgatccaaaacgtgcgggcaatggtatgcacttccacctatcaattggcagtgatgaatgcagcaacctgttccatgatgccagtgatccaagtgggatgggcttatccaaaatggcctatcactttattgcaggtttacttgagcatggtccagcactctgtgctttttgtgcgcccacggtaaattcttataaacgccttgtggtgggccgttcactctctggcgcgacatgggcacctgcgttcattgcttatggtggcaacaaccgttcagccatggtgcgtattccatatggtcgtatcgagctgcgcttacccgatgcaggctgtaatccttatctggtgtcggctgccattattgcagcagggcttgacggaatcgaacgtgaattgatgccaccaactgcatgcaatgaaaacctctatagccttgggcttgaagagattgcagcacgcggcattcaaaccttaccgcagtcactcaaagaagccattgatgcacttaaggcagatccattgtttgcacagaaaatgggatctgaaattgtgaatgagtttattgaacaaaaaagcatggagtgggtggaatactgccgtcatgtgtccgactgggaaattcagcgttataccgagtttttctaa

SEQ ID NO: 8797 - protein, 463 aa, Acinetobacter sp. ADP1
MLQQAVKEMFDHHELTSQPMYRPEVQKVIDQHHLKYVLAQFVDIHGAAKTKSVPISGLKAIEKDGVGFAGFAISGMGMQPHGPDFMVKGDLSTLTPVPWQPGYGRVVCEGYVNGKPHPYDSRYVLRQQVERLSAQGWTLNTGLEPEFSLFRRSEDGKLKMVDDSDNLDKPCYDYKGLSRSREFLERLTEALIPVGFDIYQIDHEDANGQFEINYTYADAMKSADMFTFFRMAAGEIANDLGMICSFMPKPDPKRAGNGMHFHLSIGSDECSNLFHDASDPSGMGLSKMAYHFIAGLLEHGPALCAFCAPTVNSYKRLVVGRSLSGATWAPAFIAYGGNNRSAMVRIPYGRIELRLPDAGCNPYLVSAAIIAAGLDGIERELMPPTACNENLYSLGLEEIAARGIQTLPQSLKEAIDALKADPLFAQKMGSEIVNEFIEQKSMEWVEYCRHVSDWEIQRYTEFF

SEQ ID NO: 8798 - DNA, 1371 bp, Burkholderia mallei ATCC 23344
  CDS (1)..(1371): transl_table=11
gtgacggccgtcgacgcttatcgaagagaggctcacatgcaagacatcgatgattttttgaggcagcaccggatcaccgaagtggaagcgatcattcccgacatggcgggcatcgcgcgcggcaagatcattccgcgcaacaagttcgaaaccggcgaatcgatgcgcctgccgcaagcggtgatggtgcagaccgtcaccggcgattatccggaggacggcacgctcacgggcgtcacggatcccgacatggtatgcgtggccgacgcgtcgacgatctgcctgattccgtgggcagtcgaccccaccgcgcaggtgatccacgattgcgtgcatttcgacggctcgcccgtcgaaatctcgccgcgctacgtgctgcgccgcgtgctcgacctgtatcgcgcgagggggtggaagcccgtcgtcgcgccggagctcgagttctatctggtcgacatgaacaagggcccggacctgccgctgcggccgcccgtcggacgcacggggcgcgcggaaacggggcggcagtcgtactcgatcgaagcggtcaacgaattcgatccgctcttcgaggacatctacgagtactgcgagctgcagggcctcgacatcgacacgctgattcacgaagtcggcgccgcgcagatggaaatcaacttcctgcacggcgatgcgctatcgctcgccgaccaggtgtttctgttcaagcgcacggtgcgcgaggcggcgctgcgccacaacatgtacgccaccttcatggcaaagccgatggagagcgagcccggctcggcgatgcacattcatcagagcgtcgtcgacatcgagaccgggcgcaatctcttcatcggcgcgagcggcgacgtgacgccgatgttccgcagctatctcgccgggctgcagaagtacacgcccgcgctgatgccgatcttcgcgccgtacatcaactcgtaccggcggctgtcgcgcttcatggccgcgccgatcaacgtgcaatggggctacgacaaccgcacggtcggcttccggattccgcactcggcggccgccgcgcggcggatcgagaaccggattccgggcgtcgactgcaacccgtacctcgcgatcgcgggcacgctcgcggcgggctacctcggcgtcacgcaggggctcgagccgaccgagccgctcgcgagcgacggctacagcctgccgtatcaactgccgcgcaatctggaggaagggctcacgctgatgagcgcatgcgcgccgcttgccgagatgctcggcgagaaattcgtgaaagcctatctcgcattgaaggaaacggagtacgaagcatttttccgcgtgatcagctcgtgggagcgcaggcacctgctgctgcacgtttga

SEQ ID NO: 8799 - protein, 456 aa, Burkholderia mallei ATCC 23344
MTAVDAYRREAHMQDIDDFLRQHRITEVEAIIPDMAGIARGKIIPRNKFETGESMRLPQAVMVQTVTGDYPEDGTLTGVTDPDMVCVADASTICLIPWAVDPTAQVIHDCVHFDGSPVEISPRYVLRRVLDLYRARGWKPVVAPELEFYLVDMNKGPDLPLRPPVGRTGRAETGRQSYSIEAVNEFDPLFEDIYEYCELQGLDIDTLIHEVGAAQMEINFLHGDALSLADQVFLFKRTVREAALRHNMYATFMAKPMESEPGSAMHIHQSVVDIETGRNLFIGASGDVTPMFRSYLAGLQKYTPALMPIFAPYINSYRRLSRFMAAPINVQWGYDNRTVGFRIPHSAAAARRIENRIPGVDCNPYLAIAGTLAAGYLGVTQGLEPTEPLASDGYSLPYQLPRNLEEGLTLMSACAPLAEMLGEKFVKAYLALKETEYEAFFRVISSWERRHLLLHV

SEQ ID NO: 8800 - DNA, 1335 bp, Burkholderia pseudomallei K96243
  CDS (1)..(1335): transl_table=11
atgcaagacatcgatgattttttgaggcagcaccggatcaccgaagtggaagcgatcattcccgacatggcgggcatcgcgcgcggcaagatcattccgcgcaacaagttcgaaaccggcgaatcgatgcgcctgccgcaagcggtgatggtgcagaccgtcaccggcgattatccggaggacggcacgctcacgggcgtcacggatcccgacatggtgtgcgtggccgacgcgtcgacgatctgcctgattccgtgggcagtcgaccccaccgcgcaggtgattcacgattgcgtgcatttcgacggctcgcccgtcgaaatttcgccgcgctacgtgctgcgccgcgtgctcgacctgtatcgcgcgagggggtggaagcccgtcgtcgcgccggagctcgagttctatctggtcgacatgaacaaggacccggacctgccgctgcggccgcccgtcggacgcacggggcgcgcggaaacggggcggcagtcgtactcgatcgaagcggtcaacgaattcgatccgctcttcgaggacatctacgagtactgcgagctgcagggcctcgacatcgacacgctgattcacgaagtcggcgccgcgcagatggagatcaacttcctgcacggcgatgcgctatcgctcgccgaccaggtgtttctgttcaagcgcacggtgcgcgaggcggcgctgcgccacaacatgtacgccaccttcatggcaaagccgatggagagcgagcccggctcggcgatgcacattcatcagagcgtcgtcgacatcgagaccgggcgcaatctcttcatcggcgcgagcggcgacgtgacgccgatgttccgcagctatctcgccgggctgcagaagtacacgcccgcgctgatgccgatcttcgcgccgtacatcaactcgtaccggcggctgtcgcgcttcatggccgcgccgatcaacgtgcaatggggctacgacaaccgcacggtcggcttccggattccgcactcggcggccgccgcgcggcggatcgagaaccggattccgggcgtcgactgcaacccgtatctcgcgatcgcgggcacgctcgcggcgggctacctcggcgtcacgcaggggctcgagccgaccgagccgctcgcgagcgacggctacagcctgccgtatcaactgccgcgcaatctggaggaagggctcacgctgatgagcgcatgcgcgccgcttgccgagatgctcggcgagaaattcgtgaaagcctatctcgcattgaaggaaacggagtacgaagcatttttccgcgtgatcagctcgtgggagcgcaggcacctgctgctgcacgtttga

SEQ ID NO: 8801 - protein, 444 aa, Burkholderia pseudomallei K96243
MQDIDDFLRQHRITEVEAIIPDMAGIARGKIIPRNKFETGESMRLPQAVMVQTVTGDYPEDGTLTGVTDPDMVCVADASTICLIPWAVDPTAQVIHDCVHFDGSPVEISPRYVLRRVLDLYRARGWKPVVAPELEFYLVDMNKDPDLPLRPPVGRTGRAETGRQSYSIEAVNEFDPLFEDIYEYCELQGLDIDTLIHEVGAAQMEINFLHGDALSLADQVFLFKRTVREAALRHNMYATFMAKPMESEPGSAMHIHQSVVDIETGRNLFIGASGDVTPMFRSYLAGLQKYTPALMPIFAPYINSYRRLSRFMAAPINVQWGYDNRTVGFRIPHSAAAARRIENRIPGVDCNPYLAIAGTLAAGYLGVTQGLEPTEPLASDGYSLPYQLPRNLEEGLTLMSACAPLAEMLGEKFVKAYLALKETEYEAFFRVISSWERRHLLLHV

SEQ ID NO: 8802 - DNA, 1341 bp, Silicibacter pomeroyi DSS-3
  CDS (1)..(1341): transl_table=11
atgcaagccaaaaactggctgcggaagaacccgcaggtaagaaccattcgtgtggccgcggccgatctgaacggccagccgcgcggcaagcgcgtgcccggacgctttgccgacaaggcgatcgagggcggcacccgctttccgctgtcggtgatgaatctcgacatctggggcgaggatatcgaggacagcccgctggtgctggcctcgggtgaccgcgacggcgttctgcaaccgaccgagcgtggtttcatgccgatgccctggctcgacacgcccaccggcctgctgccgatctggatgttccacgaagatggccgcccctatgagggcgatccgcgccatgcgctgaacaccgttgtcaaacgctacaaggcgcgcgggctgaaacccgttgtcgccgtcgagctggagttctttctgatcgacgacagcggtcgccaccttcaggtgccgcaatcgccccggtccggcaagcggcgcaaggcgggcgagatcctgtcgctgcgcgcgctcgaccagtttgatcatttcttcaccgagctctacgacgcctgcgaagtgatggacatccccgccgataccgccatttccgaggccggtgtcggccagttcgaaatcaacctgatgcatcaggacgacgccctgcgcgccgccgacgatgcctggctgttcaagatgctggtcaaggggctggcccgcaaacacggatttgccgccagcttcatggccaaaccctacgaggactatgccggatcgggcatgcatatgcatttctcggtgctggatgaggatggcaacaacgtctttgatgatggcaccgagcgcggcagcgacaccatgctgcatgcggtgcgcggctgtctggacgcaatgtccggaagcacgctgatctttgcccctcatgacaacagctatgcccggctggtgcccaatgcccatgcccccaccggggtcgcctgggcctatgaaaaccgcaccgccgccatccgcatcccctcgggcagcccggtcgcgcgccggatcgaacaccgggtcgcgggcggcgacgtcaatccctatctgatgatcgccgcggttctgggcgccgccctgaacgggatcgaggatggccagatgccgccgcagccgatctcgggcaatgcctacaaggcgaacctggcgcagatccccgaccgttgggacacggcgatcgacgccttcgaatccgatccggccgtcgcgcggattttcgcgcccgagctgatccgcaactttgtcatgaccaagcggcaggaattccgctactttcaggagttgaccgagaaggaaaaaaccgaagtctatctggacacggtctga

SEQ ID NO: 8803 - protein, 446 aa, Silicibacter pomeroyi DSS-3
MQAKNWLRKNPQVRTIRVAAADLNGQPRGKRVPGRFADKAIEGGTRFPLSVMNLDIWGEDIEDSPLVLASGDRDGVLQPTERGFMPMPWLDTPTGLLPIWMFHEDGRPYEGDPRHALNTVVKRYKARGLKPVVAVELEFFLIDDSGRHLQVPQSPRSGKRRKAGEILSLRALDQFDHFFTELYDACEVMDIPADTAISEAGVGQFEINLMHQDDALRAADDAWLFKMLVKGLARKHGFAASFMAKPYEDYAGSGMHMHFSVLDEDGNNVFDDGTERGSDTMLHAVRGCLDAMSGSTLIFAPHDNSYARLVPNAHAPTGVAWAYENRTAAIRIPSGSPVARRIEHRVAGGDVNPYLMIAAVLGAALNGIEDGQMPPQPISGNAYKANLAQIPDRWDTAIDAFESDPAVARIFAPELIRNFVMTKRQEFRYFQELTEKEKTEVYLDTV

SEQ ID NO: 8804 - DNA, 1323 bp, Synechococcus elongatus PCC 6301
  CDS (1)..(1323): transl_table=11
gtgggtgtggaacgagacatggattctttggcagccttggcgcgcgatcggggcattcgttactttctgattgccttcaccgatctatttggcgtacagcgagccaagctggtgccagccagcagcatcgacctcatggccactagtggtgcgggctttgccggttttgcagcttggcttgatctcagcccagcggatgcggacgttttagccattcccgatcgcgacagtctgttccaactgccttggcaaccggaagtcgcttggatgccagcagatctctacctcaacgatcaaccgctggagcaagcgccgcgctgggtactaaagcgggttctctcggtggctgagtccctcggctatcgccccaaaacaggggtggagtgtgagttcttccttctggatgaaaccggagatgcgatcgctgatccgcgcgatcgccaggcgaaaccttgctacgaccagcagtccctgatgcggcgctacgacctgattacccagatcagtgaagcgatggaggaactgggctgggggccgtatcaaagtgatcatgaagatgccgacggtcagtttgaaatgaactggacctatgcggatgcgctagtcactgccgatcgccaggctttcttcaagtacatggtcaaaactctcgcggaacggcaaggattaagggctacctttatgcccaagcccttcgcggatttgaccggcaatggttgccacatgcacctttcactctggaatcgggagggcacaaccaatacttttgtcgatccggttgcgactgctcccctctcgaccctgggctatcagtttattggtggattgctgcattcggcggcatccctctgcgccctcaccaacccaaccatcaactcctataagcggattaatgcaccggcgacgacctcgggtgcgacttggtctccgaacggtattagctacagtggcaacaaccgcacccacctgatccgtattcccgatgccggtcgctttgagttgcgactcgccgatggggctgctaacccttacctgttgcctgctgccgcgatcgctgccggcttagatggtattcagaacaaacgcgatccaggcccccgctacgacaatgacaactatgctcagcccttaccacccggcacagttccgaccttgcccgagcatttgctggatgccctgcgatcgctacaagaaagcactgttctcaccgaaggtttgggagctgcgttcacaagtgcatacctcaagcttaagcatcaggaatggcgcagtttttgtgctgaaattaccccttgggagcgcgctacaaccttggattgctag

SEQ ID NO: 8805 - protein, 440 aa, Synechococcus elongatus PCC 6301
MGVERDMDSLAALARDRGIRYFLIAFTDLFGVQRAKLVPASSIDLMATSGAGFAGFAAWLDLSPADADVLAIPDRDSLFQLPWQPEVAWMPADLYLNDQPLEQAPRWVLKRVLSVAESLGYRPKTGVECEFFLLDETGDAIADPRDRQAKPCYDQQSLMRRYDLITQISEAMEELGWGPYQSDHEDADGQFEMNWTYADALVTADRQAFFKYMVKTLAERQGLRATFMPKPFADLTGNGCHMHLSLWNREGTTNTFVDPVATAPLSTLGYQFIGGLLHSAASLCALTNPTINSYKRINAPATTSGATWSPNGISYSGNNRTHLIRIPDAGRFELRLADGAANPYLLPAAAIAAGLDGIQNKRDPGPRYDNDNYAQPLPPGTVPTLPEHLLDALRSLQESTVLTEGLGAAFTSAYLKLKHQEWRSFCAEITPWERATTLDC

SEQ ID NO: 8806 - DNA, 1377 bp, Pseudomonas syringae pv. syringae B728a; identical to SEQ ID NO: 1256
  CDS (1)..(1377): transl_table=11

SEQ ID NO: 8807 - protein, 458 aa, Pseudomonas syringae pv. syringae B728a; identical to SEQ ID NO: 1257

SEQ ID NO: 8808 - DNA, 1377 bp, Pseudomonas fluorescens Pf-5; identical to SEQ ID NO: 1258
  CDS (1)..(1377): transl_table=11

SEQ ID NO: 8809 - protein, 458 aa, Pseudomonas fluorescens Pf-5; identical to SEQ ID NO: 1259

SEQ ID NO: 8810 - DNA, 1371 bp, Colwellia psychrerythraea 34H; identical to SEQ ID NO: 1264
  CDS (1)..(1371): transl_table=11

SEQ ID NO: 8811 - protein, 456 aa, Colwellia psychrerythraea 34H; identical to SEQ ID NO: 1265

SEQ ID NO: 8812 - DNA, 1377 bp, Pseudomonas fluorescens PfO-1; identical to SEQ ID NO: 1266
  CDS (1)..(1377): transl_table=11

SEQ ID NO: 8813 - protein, 458 aa, Pseudomonas fluorescens PfO-1; identical to SEQ ID NO: 1267

SEQ ID NO: 8814 - DNA, 1407 bp, Rhodobacter sphaeroides 2.4.1; identical to SEQ ID NO: 1272
  CDS (1)..(1407): transl_table=11

SEQ ID NO: 8815 - protein, 468 aa, Rhodobacter sphaeroides 2.4.1; identical to SEQ ID NO: 1273

SEQ ID NO: 8816 - DNA, 1347 bp, Burkholderia sp. 383; identical to SEQ ID NO: 1274
  CDS (1)..(1347): transl_table=11

SEQ ID NO: 8817 - protein, 448 aa, Burkholderia sp. 383; identical to SEQ ID NO: 1275

SEQ ID NO: 8818 - DNA, 1365 bp, Rhodospirillum rubrum ATCC 11170; identical to SEQ ID NO: 1276
  CDS (1)..(1365): transl_table=11

SEQ ID NO: 8819 - protein, 454 aa, Rhodospirillum rubrum ATCC 11170; identical to SEQ ID NO: 1277

SEQ ID NO: 8820 - DNA, 1371 bp, Burkholderia thailandensis E264
  CDS (1)..(1371): transl_table=11
gtgacggccgtcgacgcttatcgaagagaggctcacatgcaagacatcgatgattttctgaggcagcaccggatcaccgaagtggaggcgatcatccccgacatggcgggcatcgcgcgcggcaagatcattccgcgcaacaagttcgaaaccggcgaatcgatgcgcctgccgcaagcggtgatggtgcagaccgtcaccggcgactatccggaggacggcgcgctcacgggcgtcaccgatcccgacatggtgtgcgtggctgacgcgtcgacgatctgcctgattccgtgggcggtcgatccgaccgcgcaggtgattcacgattgcgtgcatttcgacggctcgcccgtcgagatctcgccgcgctacgtgctgcgccgggtgctcgatctgtatcgcgcgaaaggatggaagcccgtcgtcgcgccggagctcgagttctatctggtcgacatgaacaaggatccggacctgccgctgcggccgcccgtcggccgcacggggcgtgcggagacggggcgccagtcgtattcgatcgaggcggtcaacgaattcgatccgctcttcgaggacatctacgaatactgcgagctgcaggggctcgacatcgacacgctgattcacgaggtcggcgccgcgcagatggagatcaacttcctgcacggcgacgcgctgtcgctcgccgaccaggtgttcctgttcaagcgcaccgtgcgcgaagcggcgctgcgccacaacatgtacgcaacgttcatggcgaagccgatggagaacgagccgggttcggcgatgcacattcatcagagcgtcgtcgacatcgagacgggccgcaacctcttcatcggcgcgagcggcgacgtcacgccgatgttccgcggctatctcgccggactgcagaagtacacgcccgcgctgatgccgatcttcgcgccgtacatcaactcgtatcgccggctgtcgcgcttcatggccgcgccgatcaacgtgcagtggggttacgacaaccgcacggtcggcttccggattccgcattcggccgccgccgcgcggcgaatcgagaaccggattccgggcgtcgactgcaatccgtatctcgcgatcgcggccacgctcgcggccggctatctcggcgtcacgcaggcgctcgagccgaccgagccgctcgcgagcgacggctacagcctgccttatcaactgccgcgcaatctggaggaggggctcacgctgatgagcgcgtgcgcgccgctcgccgagatgctaggcgagaagttcgtgaaggcctatctcgcgttgaaggaaacggagtacgaagcatttttccgcgtgatcagctcgtgggagcgcaagcacctgctgctgcacgtttga

SEQ ID NO: 8821 - protein, 456 aa, Burkholderia thailandensis E264
MTAVDAYRREAHMQDIDDFLRQHRITEVEAIIPDMAGIARGKIIPRNKFETGESMRLPQAVMVQTVTGDYPEDGALTGVTDPDMVCVADASTICLIPWAVDPTAQVIHDCVHFDGSPVEISPRYVLRRVLDLYRAKGWKPVVAPELEFYLVDMNKDPDLPLRPPVGRTGRAETGRQSYSIEAVNEFDPLFEDIYEYCELQGLDIDTLIHEVGAAQMEINFLHGDALSLADQVFLFKRTVREAALRHNMYATFMAKPMENEPGSAMHIHQSVVDIETGRNLFIGASGDVTPMFRGYLAGLQKYTPALMPIFAPYINSYRRLSRFMAAPINVQWGYDNRTVGFRIPHSAAAARRIENRIPGVDCNPYLAIAATLAAGYLGVTQALEPTEPLASDGYSLPYQLPRNLEEGLTLMSACAPLAEMLGEKFVKAYLALKETEYEAFFRVISSWERKHLLLHV

SEQ ID NO: 8822 - DNA, 1368 bp, Silicibacter sp. TM1040
  CDS (1)..(1368): transl_table=11
atgccgaccccgacgcgctggcaggaaaaactgcccgaagctgccacgacctatctggagggccgtcgtctcgacgaggttgaatgcgttatctcggacttgccgggcatcgcccggggcaaggcggtgccagcgtcgaaatttgccaagcaggactatttttacctgcccgacagcatcttttatcagaccatcaccggggattgggccgaagccgccgacgaggacggctggatcgaaaaggacatgctgctgcgcccggacatgagcaccgcaaccgccgccccctggaccggcgactggactctgcaggtcatccacgatgcctatgaccgcgacggcaacccgatccccttcagcccgcgcaacgtgctgaaacatgtggtgagcctctatgaggcgcagggctggaaacccgtggtggcgccggagatggaattctatctcgtggcccgcaacgtcgaccccgcgcgcgacatccagcccatgatgggccgctctggccgtccggcggcggcgcgtcaggcctattcgatgacagcggtggacgaatttggccccgtcatcgacgacatctatgattttgccgaggcgcaaggctttgaaatcgacggcatcacccaggaaggcggtgccgggcagctggaaatcaacctgcgccatggctcgccggtgaagctagccgatgaggtgttttacttcaaacgcctgatccgcgaggccgcgctgcgccatgattgctttgccaccttcatggcaaaaccgatcgctgatgagccgggctctgccatgcatatccaccactcggtgatcgacatcgagagcggcgagaacatcttttccggtccccaaggtggtgaaacggatgcgttttatcactttatcggcgggctgcagaaccaccttcctgccggtctcgcggtgatggcgccctatgtgaattcctatcgccgctatgtgaagaaccacgccgcgccgatcaatctggaatgggcgcgcgacaaccgcaccaccggcattcgggtgccgctctccagttccgcctcgcgccgggttgaaaaccgcatcgccgggatggattgcaacccctatctcggtatcgcggtatcgctggcctgcggctacctcggcctgatggaagagcgccgccccacccgccagttcaaaggcgatgcctatgagggcgaaggtgactttccgcaggtcatgggtcaggcgctcgatctctttgacgagtccaaggcgcttcacgaggtgctcggccccgaattcgcccgggtctacagcacggtgaagcgcgcagaatacgaagagttcctgcaagtgatctcgccgtgggagcgtgagcacctgttgctcaacgtctga

SEQ ID NO: 8823 - protein, 455 aa, Silicibacter sp. TM1040
MPTPTRWQEKLPEAATTYLEGRRLDEVECVISDLPGIARGKAVPASKFAKQDYFYLPDSIFYQTITGDWAEAADEDGWIEKDMLLRPDMSTATAAPWTGDWTLQVIHDAYDRDGNPIPFSPRNVLKHVVSLYEAQGWKPVVAPEMEFYLVARNVDPARDIQPMMGRSGRPAAARQAYSMTAVDEFGPVIDDIYDFAEAQGFEIDGITQEGGAGQLEINLRHGSPVKLADEVFYFKRLIREAALRHDCFATFMAKPIADEPGSAMHIHHSVIDIESGENIFSGPQGGETDAFYHFIGGLQNHLPAGLAVMAPYVNSYRRYVKNHAAPINLEWARDNRTTGIRVPLSSSASRRVENRIAGMDCNPYLGIAVSLACGYLGLMEERRPTRQFKGDAYEGEGDFPQVMGQALDLFDESKALHEVLGPEFARVYSTVKRAEYEEFLQVISPWEREHLLLNV

SEQ ID NO: 8824 - DNA, 1350 bp, Myxococcus xanthus DK 1622
  CDS (1)..(1350): transl_table=11
gtggacacgctgcgccgctggctggatgagaagggcgtccagaaggtgaaggtgggcgcggtggacgtcgatggcgtctggcgcggcaagtacatctccctggagaagttcctcagcgccgccaaaggcggcctgggcttctgtgacgtcgtcttcggctgggacttgagcgacgacttgctcgacaacacccaggtgacgggctggcacaccggttacccggatgcccacgcgaaggtggacccgtccaccggccgcgtcattccctgggagccggacaccgcggcgttcctgctcgacttcgaaaaccccgacggcacgcctttcgaggcgagcccccggcagttgctccagaaggtggccgcccgcgcgcgctcgctggggtacctgccgcgcttcggcgcggagtacgagttcttcatcttcaaggagcagccgcagagcctgcgcgacaaggacttccaggggctgacgccgctgacgccaggcatgttcggctattcgtggctgcgcacgtcgctcaacgcgccgctggtgcatgcgctcatcgacgggtgcaacgccttcggcctgggcatcgagggcttccacacggagacggggccgggcgtcttcgaggcggccatccgctacgacgacatcgagaagtcggcggacaaggccgcgctcttcaagacggtggtgaaggagatttgcgcccgccacggcgtcaccgcgtgcttcatggcgaaggtggacgcgaagctgccggggtgctcggggcacgtccaccagtcgctgtgggatttggacggggagcagaacctcttccacgacgcgaaggcgccccacggcatgagcaagctgctgcgccactacatcggcgggcaggtggcgctgatgccggagctcaccgcgctctactggcccaccatcaacagctacaagcgcagcgtggagaatacctgggcgcccaccaccgtgacgtggggcctggagaaccgcaccaccgccatccgcgtcatcggtgagagcgccaaggcgatgcgcctggagtaccggcagttgggcgcggacatgaatgcgtacatcggcatggcggtcagcctggccgcgggcctgtggggcatcgagaacgaggtggagcctcccgcgccctgcgagtccaacgcctacgcgaagaacgacgcgccgcccttgccccgcaacctcaaggacgcggtggcgctgctgaagggcagcgagcgcgcgcgggagttgctgggctacggcttcgtggaccacttcgtgcgcacgcgcgagtgggaggtgcgtcagtacgagcgcgccgtcaccaactgggagttggagcgttacctggagctcatctga

SEQ ID NO: 8825 - protein, 449 aa, Myxococcus xanthus DK 1622
MDTLRRWLDEKGVQKVKVGAVDVDGVWRGKYISLEKFLSAAKGGLGFCDVVFGWDLSDDLLDNTQVTGWHTGYPDAHAKVDPSTGRVIPWEPDTAAFLLDFENPDGTPFEASPRQLLQKVAARARSLGYLPRFGAEYEFFIFKEQPQSLRDKDFQGLTPLTPGMFGYSWLRTSLNAPLVHALIDGCNAFGLGIEGFHTETGPGVFEAAIRYDDIEKSADKAALFKTVVKEICARHGVTACFMAKVDAKLPGCSGHVHQSLWDLDGEQNLFHDAKAPHGMSKLLRHYIGGQVALMPELTALYWPTINSYKRSVENTWAPTTVTWGLENRTTAIRVIGESAKAMRLEYRQLGADMNAYIGMAVSLAAGLWGIENEVEPPAPCESNAYAKNDAPPLPRNLKDAVALLKGSERARELLGYGFVDHFVRTREWEVRQYERAVTNWELERYLELI

SEQ ID NO: 8826 - DNA, 1335 bp, Rubrobacter xylanophilus DSM 9941
  CDS (1)..(1335): transl_table=11
gtgatcgagcagagaagaccggcggtccttccgcccgagctctcggacggctccgtcacgtcggtgcgggtgctgtacgccgacctgcacggcgtggcgcgcggcaaggacgtgcccatcggcgagttcgagcgcgccgtcgagcacgggctggcgttctgctcggcgatcatgggcaccgacctgcggcacacccccgtggtgggcggggaggagggctacccggacctcgtggcctaccccgacctctcgaccatgacgctcgtgccctgggagcccggggtggcgtgctgcctcgccgacctgcggccggtcggggaccacgcgccgcccgccgaccccaggggggcggtgcgccgggcggtcgcggccttcgaggagctggggctctcgcccgtggtggggccggagctcgagttcttcctgtgcgagcgcgacccggcgggcggcgtgcgccgctacgtggacaacctcagcatggtctacaccgtggggccgcaggccgacccgcgggggatagtgcgcgagatcgcggagatgctctcggggatgggcctcggggccttcgccgccaaccacgagttcatgaactcgcagtacgagatcaatttgcaccacgcggacgccctcgccgccgccgaccgggccttccggctcaagtgcgcggtgaaggacgtggccgcgatgcgggggctcgtcgccaccttcatgggcaagccgttcaacgaccagggcggctcgggcttccacatccacttctcgctcgagcgcgggggcgagaacgccttcgccgggggcgaagaaggaggcgtcaccggcctcctgaggcacttcgtggcgggcgtgctcgagcacgcctccgggctcatggcgttcctcaacccgaccataaacgcctaccggcgcctggtgcccgactcgctcgcgccgacccacgccaactggggctgggacaaccgcaccgcgttcgtgcgcatcccgcccgagcgcggcggggccacgcgggtcgaggtgcgcgtgggcgacgggagcgccaacccgtacctggcgaccgcggcgaccctcttcgccgggctgcacggggtgcgcgagcggctgccgctcggcccgccggtggggggcgacgcctacgcgctcgcgggcgagaaggcggggccgccgctcccggccacgctcgaggaggcgctggacgcgctggaggccgacgaggtgctgcgcggggcgatgggggagcagatcgtgggcaccttcctcgcgctcaagaggtacgaggcagagcggcaccgcacgtgggtctcggactgggagatctccgagtacctgcaccacctgtag

SEQ ID NO: 8827 - protein, 444 aa, Rubrobacter xylanophilus DSM 9941
MIEQRRPAVLPPELSDGSVTSVRVLYADLHGVARGKDVPIGEFERAVEHGLAFCSAIMGTDLRHTPVVGGEEGYPDLVAYPDLSTMTLVPWEPGVACCLADLRPVGDHAPPADPRGAVRRAVAAFEELGLSPVVGPELEFFLCERDPAGGVRRYVDNLSMVYTVGPQADPRGIVREIAEMLSGMGLGAFAANHEFMNSQYEINLHHADALAAADRAFRLKCAVKDVAAMRGLVATFMGKPFNDQGGSGFHIHFSLERGGENAFAGGEEGGVTGLLRHFVAGVLEHASGLMAFLNPTINAYRRLVPDSLAPTHANWGWDNRTAFVRIPPERGGATRVEVRVGDGSANPYLATAATLFAGLHGVRERLPLGPPVGGDAYALAGEKAGPPLPATLEEALDALEADEVLRGAMGEQIVGTFLALKRYEAERHRTWVSDWEISEYLHHL

SEQ ID NO: 8828 - DNA, 1428 bp, Mesorhizobium sp. BNC1
  CDS (1)..(1428): transl_table=11
atgttagatgacagcaaggcaggccgcaccaacagaggcggacgccggacgcccgcttttttgaagaatttgcgcggagttaagggctggaaagaagcgcgagcctggctcgaatggcgcggtatcgaggatatcgaatgcattgcgccggaccaagcaggcgtcgcgcgcggcaagatgatgccgtcgaagaagttcatttcgaacacgtccctcgctcttccgtccgccgttttcatggcaaccatctccggcgaatatcctgaagacggcaacgggttcacctatcccgaggacgacggtgacctgaaactcgtgccggatctctctaccctctcagtggttccatgggagacggacccgaccgcccaggtgatctgcgacctggcgcatcaggacgggcgagcggtcgaattcagcccgcgcaacgtcctgaggcgggtcgtcgccaaatatgcggagcacggcctgaagccgattgtcgcccctgagatcgaattctatctcgttcacaagaatcctgatcccgactacccgctgacgcctcctgtcgggcgttcgggaaggccgatcggtggcggacagggctattcgatcgcgggtgtcaacgagttcgacgaactcattgacgacatctaccacttctccgaaggccaggggctggagatcgatacgctcatccacgaagagggcgcggggcaactggagatcaatctgcgccacggcgacccggttgaacttgccgatcaggtcttcctcttcaagcggacaatccgggaagccgcgctcaaacacgagatgtacgccaccttcatggccaagccgatccaggatcagccgggctcggcgatgcatatccatcaatccgtggtaacgttgaagggggggcgcaacgtcttctccgatgagaacggcgaagaaacagacgtttttcgtcacttcatcggcggcttacagcagcatatcccgaacgcgctgatcatgctggcgccttatgtgaactcctacaggcggctgacacaggcgggctcggcgccggtcaacacgcgctggggttatgacaacaggacgactgcctttcgcgtgccccgctcggatccgaactccaggcgcgtggaaaaccgcataccctcctccgatgccaatccttatttggcgcttgccgcctccctggcgtgcggactgatcggaatactccaaaagatcgaacccgacgcaccggccggcacagcggtcaacacggacgtgatcaacctgccccgcggtctcctcgaggcggtcgccctgtttgaagcggacgagagcctcaggaatattgtcggcgatcttttcgcgagcacctatgccgcaatcaagcgggctgaattcgagacgttcatgaaggtcatcagcccttgggagcgggagtatctgttgttgaatgtgtga

SEQ ID NO: 8829 - protein, 475 aa, Mesorhizobium sp. BNC1
MLDDSKAGRTNRGGRRTPAFLKNLRGVKGWKEARAWLEWRGIEDIECIAPDQAGVARGKMMPSKKFISNTSLALPSAVFMATISGEYPEDGNGFTYPEDDGDLKLVPDLSTLSVVPWETDPTAQVICDLAHQDGRAVEFSPRNVLRRVVAKYAEHGLKPIVAPEIEFYLVHKNPDPDYPLTPPVGRSGRPIGGGQGYSIAGVNEFDELIDDIYHFSEGQGLEIDTLIHEEGAGQLEINLRHGDPVELADQVFLFKRTIREAALKHEMYATFMAKPIQDQPGSAMHIHQSVVTLKGGRNVFSDENGEETDVFRHFIGGLQQHIPNALIMLAPYVNSYRRLTQAGSAPVNTRWGYDNRTTAFRVPRSDPNSRRVENRIPSSDANPYLALAASLACGLIGILQKIEPDAPAGTAVNTDVINLPRGLLEAVALFEADESLRNIVGDLFASTYAAIKRAEFETFMKVISPWEREYLLLNV

SEQ ID NO: 8830 - DNA, 1359 bp, Cytophaga hutchinsonii ATCC 33406
  CDS (1)..(1359): transl_table=11
atgactgaaaaagaaatcgttgattatattaagaacaatgacattcaaaagataaaatttgcctttgcagatatagatggtgtcttacgcggcaaactcattcataccgataaatttttagatggtttaaaagaaggcctgggattttgtgatgttgtcttcggctgggatagtgcagatgctggctacgataatgtatccgctacaggctggcacacgggttaccccgataaacttgcgcagatagatctttctacattccgtttaattccctgggaaaacaatacaccgttcttcttagctgattataaaaacaacgaccagacagctttgcctatctgcccgcgtactttattaaaaaggatcgctcaggaatgctctgctatgggctaccatgcagcgtttgcacaggagtttgaatggtttaatttcagagaaacgcaacagtcgctcgttgaaaaaaactttcacgacctcactcctctaaccaacggcatgttcggctattcaatccttcgcccttcattagaagatgcctattacaatgacctgtttgatctgttaggtgcatttgatattccgctggaagggctgcatacagaaacaggtccgggtgtgtatgagtgtgcttacttccacgatgaagtagtacgcgctgctgataaagcaaccttactaaaaaccgctgtaaaagaaatcgccaataaacatggtatcattgctacgtttatggctaagatcagtgacaagcttccgggctgcagcggtcatatccaccagagcttatggaataccggtaaaacagaaaatttattttatgatccgaatcaggaacataacatgagtgacctgtttaaacactatgtagccggacaattatattgcctgccgcatattgttcccatgcttgcacctaccgtgaacagttacaaacgcctggtcgaaggtgcctgggcgcccacaaccctcacctggggttttgataaccgcacaactgccttgcgtgtattaaatcattcgaaaaaaactgcccgtctcgaacaacgtgtttccggatcagataccaatccgtatttagctatagcggcttcgcttgcatcgggtttatacggtattaagcataaactttcattagacgttccccctactacaggtaatggctatgccaacaaaagcaacggctctattgcatccaacttaatggatgcaacccaattaatgaaaaattcgtctatagcaaaagaattattcggagaggcgtttgttcagcattttactgctacacgtgaatgggaatggagacaattttccaaacacgtaagtgattgggaaatgaagcgctacatggaaattatttaa

SEQ ID NO: 8831 - protein, 452 aa, Cytophaga hutchinsonii ATCC 33406
MTEKEIVDYIKNNDIQKIKFAFADIDGVLRGKLIHTDKFLDGLKEGLGFCDVVFGWDSADAGYDNVSATGWHTGYPDKLAQIDLSTFRLIPWENNTPFFLADYKNNDQTALPICPRTLLKRIAQECSAMGYHAAFAQEFEWFNFRETQQSLVEKNFHDLTPLTNGMFGYSILRPSLEDAYYNDLFDLLGAFDIPLEGLHTETGPGVYECAYFHDEVVRAADKATLLKTAVKEIANKHGIIATFMAKISDKLPGCSGHIHQSLWNTGKTENLFYDPNQEHNMSDLFKHYVAGQLYCLPHIVPMLAPTVNSYKRLVEGAWAPTTLTWGFDNRTTALRVLNHSKKTARLEQRVSGSDTNPYLAIAASLASGLYGIKHKLSLDVPPTTGNGYANKSNGSIASNLMDATQLMKNSSIAKELFGEAFVQHFTATREWEWRQFSKHVSDWEMKRYMEII

SEQ ID NO: 8832 - DNA, 1356 bp, Trichodesmium erythraeum IMS101
  CDS (1)..(1356): transl_table=11
atgagcgataaaaaaccaaacctagaaaaagacattttcaaatatctcaaaaaaaaaggtacaaaatttgttcgtatcctcttttgtgacaatgctaacattatccgctccaaagcattccatattgaccaattaccagaacacttcgatacaggagttagcattacagtcgctcaacaagcatttacagttatgtctgatgtggtaatacctgaaacaggtctggctccggtgggagaagcttggttagttcctgactggtctaccctccatatattaccctatgctcctactcatgctagtgtagttagtgatatgtttaaagatggctccccttggtctttgtgtcctcgtagatttctcaaacaagcgatcgctactgcggaaaaagtaggtttacaaataaaagctgcttttgaaaatgaattctatctgttgaaatctacttctgatggtattgcccccacagataatacagtttttgcctctaccttcggaatggatattaaccgtctagtcattgatgacattgctgagtctctcattgctcaaaaaattcaagtggaaaagtattatccagagtcaggtcctggtcaacaggaaatttctatccgctataccgatgctttacaagctgctgatagacaaataagttttcgggaaacagtgcgaggagtagctctcaaatatggacttactgcttcttttctgccgaaaatttttgctaacaaagcaggtagcggttgccacttacatctaagtctctgggaaggagagcaaaatattgttcctgactcagatgaaatagggaaaatttccaaaactgctcgttgtttcattgctggtattctcaaacatttacctgctttaatggcactgacaactccgagtgttaattcttatcgtcgcattcgccctcatttttggagtggtgcttttcgtacttgggggttggataaccgggaagctgctgtgagggtgccgagtaattttgctcccccttctcctactcattttgaattgaaaactgttgatgcttctgctaatccttatttggctttgggtagtgttattgtagctggtttggatggtattaactgtggtcttgatgtgggagaacctgtgtcggttgaccctggtaatatgatgcaggcagaaagggaggcgcggggaatagatgctttgcctagttcgttggcagaggcgatcgctcatctgaataataatgatgtgctgaaaaatgctttggggtctgagttggctcaagcgtttattgctgttcggcaagctgagtgggaggaaatgaagaatatggaaatagaagaggaggttaaaattttgttgtctagatattga

SEQ ID NO: 8833 - protein, 451 aa, Trichodesmium erythraeum IMS101
MSDKKPNLEKDIFKYLKKKGTKFVRILFCDNANIIRSKAFHIDQLPEHFDTGVSITVAQQAFTVMSDVVIPETGLAPVGEAWLVPDWSTLHILPYAPTHASVVSDMFKDGSPWSLCPRRFLKQAIATAEKVGLQIKAAFENEFYLLKSTSDGIAPTDNTVFASTFGMDINRLVIDDIAESLIAQKIQVEKYYPESGPGQQEISIRYTDALQAADRQISFRETVRGVALKYGLTASFLPKIFANKAGSGCHLHLSLWEGEQNIVPDSDEIGKISKTARCFIAGILKHLPALMALTTPSVNSYRRIRPHFWSGAFRTWGLDNREAAVRVPSNFAPPSPTHFELKTVDASANPYLALGSVIVAGLDGINCGLDVGEPVSVDPGNMMQAEREARGIDALPSSLAEAIAHLNNNDVLKNALGSELAQAFIAVRQAEWEEMKNMEIEEEVKILLSRY

SEQ ID NO: 8834 - DNA, 1356 bp, Shewanella sp. MR-7
  CDS (1)..(1356): transl_table=11
atgaataagctaatcgcttttttaaaagaacgaaaaatcacagaagtcgaatgtgttatcagcgatatgacaggtatcgcccgcggaaaaattgccccagtggataagttcctcgacgaaaaaggcatgcgcttacccgaaagcgtgttgctgcaaaccgtgaccggtgactttgtcgacgatgatatttattacagcttgctcgacgatgccgacatcgattttgtctgtgtccccgatgaaaatgccgtatttatgctgccttggaccattgaagccacagcgcaagtgatccacgattgctacgacagaatgggcaatcccatcgaattatcgccacgtaacgtgttgaagaaagtgctttcgctatacgagcaaaaaggctgggagccagttattgcacctgagatggagttttatcttaccagtcgtagcgatgaccacgatttaccccttaagccacctattggtcgctcgggcagacccgaagcgggacgtcagtctttctcgattgatgcggctaacgaatacgatccgcttttcgaagatatgtatgactggtgtgagctgcaaggtttagatatcgatacgctgatccacgaagacggccctgcgcaaatggagattaacttcagccacggtaatccattatctcttgcagatcaggtgtttgtattcaagcgtaccctgcgtgaggcggcattaaaacacaatgtgtgcgccacctttatggctaaacctgtgaccgatgagccaggcagtgcgatgcacattcaccaaagcgtgattaataaggagacgggcaaaaacatcttcactaatgaagacggtactcaaagcccattattcctgagctatatcgctggtttacaaaagtttattcctgaactcttgccgttgatggcgcctaatgccaattcgttccgtcgtttcttaccgggcacctctgcgccagtaaacttggaatggggcgttgagaacagaacctgcggcctgcgaattcctgagtcatcaccgcaaaaccgccgcattgaaaaccgtattccaggggcggatgcaaactgctatttagccatcgcggcgagcttactctgcggttacatcggtatggtggaagggttaaaaccttcgacaccagtgcagggtaaatcgaacgaaagccgtagcaacaatccacattgcctgccgttaaccttagaagaagcgttagcggcgatgcaagagagtgatgcctgtaaggaatatttaggtgaagcctttaccaccggctttgtggcggtcaaacaggccgagcttgaaaactttcgccgcgtcgtgagttcgtgggagcgggagttcctgttactcagtgtgtaa

SEQ ID NO: 8835 - protein, 451 aa, Shewanella sp. MR-7
MNKLIAFLKERKITEVECVISDMTGIARGKIAPVDKFLDEKGMRLPESVLLQTVTGDFVDDDIYYSLLDDADIDFVCVPDENAVFMLPWTIEATAQVIHDCYDRMGNPIELSPRNVLKKVLSLYEQKGWEPVIAPEMEFYLTSRSDDHDLPLKPPIGRSGRPEAGRQSFSIDAANEYDPLFEDMYDWCELQGLDIDTLIHEDGPAQMEINFSHGNPLSLADQVFVFKRTLREAALKHNVCATFMAKPVTDEPGSAMHIHQSVINKETGKNIFTNEDGTQSPLFLSYIAGLQKFIPELLPLMAPNANSFRRFLPGTSAPVNLEWGVENRTCGLRIPESSPQNRRIENRIPGADANCYLAIAASLLCGYIGMVEGLKPSTPVQGKSNESRSNNPHCLPLTLEEALAAMQESDACKEYLGEAFTTGFVAVKQAELENFRRVVSSWEREFLLLSV

SEQ ID NO: 8836 - DNA, 1383 bp, Rhizobium leguminosarum bv. viciae 3841
  CDS (1)..(1383): transl_table=11
ttggccttgtcccggaggattttcaaggtcatggcaagcgacaggatgcacggcaaggccgacaacggtgacccgcgtttcgaggtcctgatcgtcggcatgaacggcgacctgcgcggcaagcagcttccgcctggcaccgaagacaaggtctgggccggcgacatccgcctgccgacctcgacgcaatcgctcgacatctggggcgacgacaatgacgatatcaccgggctgtcgctgacgatcggcgatcccgacggcaaggtcatccccgaccggcgcagcctggcgccgatgccctgggcgcccgagggctcgatgcaggtgctcgcaaccatgcatgaattcgacggcagcccgagcttcatggatccgcgcgccatcctcgcctcggtggtcgagcgctatgcggcgcgcgggctgacgcccgtcgtcgccaccgaactggaattttacgtgatgtcgggtgactggcgcgagaccggacgcccctgcccgccggaaagcctgacctatcgcggcgaaccgaacggtttccagctctacgacatgagcgccgtcgacgcgctcgatggctatttgcagacgctgagggcctatgcgaaggcgcagaacctgccggcggatgcgacgacggcggagttcggtccgggccagttcgagttcaacctgctgcaccgcgcggatgcgctggcagccgcagacgattgcctctatctcaagcgcatcgccgaacaggcggcgcgccggcatgggctgaaatcgacctgcatggccaagccctattccgaacatgccggctccggcctgcatgtgcatgcgagcatcatcgacgggcaaggccgcaacattctcgatgccaagggcggcgaaccgaagctcatcaaatcggtgatatcaggcctgctcgataccatgcgcgcggcgcaactgatctttgctccctttgccaattcctaccgccgcttccagccgggctcgtttgcgcctgtggatctgacatggggcagcggccatcgcggcacggcgatccgcatccccgacaaggatggcccggccgcacgcatcgaacaccgcgtcgccggcgccgacgccaatccctatctgctgctggcagcgatcctcggcggcatgctcgccggtctcgatggcgaactcgaccccggcgaagagacgacgccctcgcacatacctgcgaatacgacgcgactgacgcatgatttcctcagcgccgtcgagaccttccgcacctcgccgttcatcgccgatatcttcggcgcgcgctatcaggcgctctacggcgacaccaagcgcaaggaagcgcttgcgcatctgcgcaccgtttcggatttcgactaccgcacctatctgccgcggctctga

SEQ ID NO: 8837 - protein, 460 aa, Rhizobium leguminosarum bv. viciae 3841
MALSRRIFKVMASDRMHGKADNGDPRFEVLIVGMNGDLRGKQLPPGTEDKVWAGDIRLPTSTQSLDIWGDDNDDITGLSLTIGDPDGKVIPDRRSLAPMPWAPEGSMQVLATMHEFDGSPSFMDPRAILASVVERYAARGLTPVVATELEFYVMSGDWRETGRPCPPESLTYRGEPNGFQLYDMSAVDALDGYLQTLRAYAKAQNLPADATTAEFGPGQFEFNLLHRADALAAADDCLYLKRIAEQAARRHGLKSTCMAKPYSEHAGSGLHVHASIIDGQGRNILDAKGGEPKLIKSVISGLLDTMRAAQLIFAPFANSYRRFQPGSFAPVDLTWGSGHRGTAIRIPDKDGPAARIEHRVAGADANPYLLLAAILGGMLAGLDGELDPGEETTPSHIPANTTRLTHDFLSAVETFRTSPFIADIFGARYQALYGDTKRKEALAHLRTVSDFDYRTYLPRL

SEQ ID NO: 8838 - DNA, 1377 bp, Pseudomonas aeruginosa UCBPP-PA14
  CDS (1)..(1377): transl_table=11
atgtcggtaccccagcgtgccgttcagctcactgaaccgagcgagttcctcaaggaacatcccgaggtccagttcgtcgacctccttattgcagacatgaatggcgtggttcgcggcaagcggatcgaacgcaacagtctgaacaaagtcttcgaaaaaggtatcaatctccccgcttccctgttcgccctcgatatcaccggctccaccgtagagagtaccggcctgggtctcgacatcggcgacgccgaccggatctgctacccgatccccggcaccctctccatggaaccctggcagaagcgcccgaccgcgcaactgctgatgaccatgcacgaactggaaggcgagccgttcttcgccgacccccgcgaagtcctgcgccaggtggtggccaggttcaccgagatggaactgaccatcgtcgccgcattcgagctggagttctacctgatcgaccaggagaacgtgaacggccggccgcagccgccacgctcgccgatctccggcaagcgtccgcagtcggtgcaggtgtactccatcgacgacctcgacgaatacgtcgagtgcctccaggacatcatcgacggcgcccgcgcccagggcatcccggccgacgccatcgtcgccgaatccgcaccggcgcagttcgaggtcaacctcaaccacgtcaacgacgccctcaaggcctgcgaccacgcggtgctgctcaagcgcctggtcaagaacatcgcctacgaccacgagatggacaccaccttcatggccaagccctatccgggccaggccgggaacggactgcacgtgcatatctcgctgctcgacaagcacggcaacaacatcttcaccagcgaggatcccgagcagaacgccgcattgcgccatgcgatcggcggtgtgctcgagaccctgccggcctccatggccttcctctgcccgaacgtcaactcctaccgccgcttcggttcgcagttctacgtgccgaacgcgccgagctggggcctggacaaccgcaccgtggccctgcgcgtgcccaccggcagcccggacgcggtacgcctggaacaccgcgtggccggcgccgacgccaacccctacctgctactggcagcggtgctggcaggcgttcatcacgggctgaccaacaaggtcgagccgggcgcgccgatcgaaggcaactcctacgagcagatggagccgagcctgccgaacaacctgcgcgacgccctgcgcgagctggacgaaagcgagatcatggcgaagtacatcgacccgaagtacatcgacatcttcgtcgcctgcaaggaaagcgagctggaggagttcgagcactcgatctccgacctcgagtacaactggtacctgcataccgtctga

SEQ ID NO: 8839 - protein, 458 aa, Pseudomonas aeruginosa UCBPP-PA14; identical to SEQ ID NO: 1219

SEQ ID NO: 8840 - DNA, 1401 bp, Mycobacterium sp. KMS
  CDS (1)..(1401): transl_table=11
atgatcgacgcacgcaccgcccccaccgcctcggaggtcctcgcccgactgcacgctgaggacatcgcgacggtgatcctcggcggcaccgacacccacggggtgatgcgcggcaagcgggtcccgatcagccagctgccccggatgctcgagcacgggatgccgatgtgcgacgtgttctgggtgatgcacgtcgacgaatccgacctcgtcgcacgccccgacggataccgcggatacttccccaccgaacggcagggctaccccgacatcctggccgtccccgacctgaccaccctgcggatcgtgccctggcacaacgacaccgcgctgttgctgtgtgactgggagctgccggccgaccaccggccggtgcccatcgcgccgcggtcggtgctgcgccgcgtcgtcgaacgtgccgacgcgatgggctaccagccgctgagcgcgctggagttggagttctatctgctgcgcgagaaggcgggcaccacgcaccgcaaacgggccgacgaactcgtcccgctgcaggaggcgcccagcacctacggcgtggtgatgggttcgctgcaggaggacatcggagcgctgatccggcgccacatgctcgactacggcctgcccgtcgaggcctgcaaccccgagacgggtcccgggcagttcgagatcacgctgcggtacggcaacagcctgaagtccgccgacgacgccttcctgttcaaatcggcggtcaaggaggtcgccgcccagaacgacctgctcgcgacgttcatggcgaaacccgtgaccgactgggcgggtaacagctgccacgtgcacctgagcctgcgcgacatcgccgggggcggggtcttcttcgaccaggacgcccccgatcagctctccaccgcgctgcgccacttcgccggcggaatcctgcacaccatgcgggaattcaccgcgctgatggcgccgacaccgaactcctaccgccgcttcgtgccgtactcgtgggccggcaccaccgccacctggggtgtcgacaaccgttcggtcggcttgcgcgtcattcgcgaaggcgaccacggcacccgcgtcgagcaccgtcagcccggtggtgacgccaacccgtatctggccaccgccgccgccctcgcgggcggactgcacggactgctcaacgagatcgaaccccgcgaactgtccacgaccgacatctacagccagccgagcgaggatctgccggtcctgcctgccaccctcgccgaggcggtggacctgctcgcggacagcgcggcggcacgagagtggttcggggacgacttcgtcgaccattacgtgctgatgaagcgcgcagagatcgcggcccagtcggtggcggtcaccgactgggaggtcgcccggtacctcgaggcgatgtaa

SEQ ID NO: 8841 - protein, 466 aa, Mycobacterium sp. KMS
MIDARTAPTASEVLARLHAEDIATVILGGTDTHGVMRGKRVPISQLPRMLEHGMPMCDVFWVMHVDESDLVARPDGYRGYFPTERQGYPDILAVPDLTTLRIVPWHNDTALLLCDWELPADHRPVPIAPRSVLRRVVERADAMGYQPLSALELEFYLLREKAGTTHRKRADELVPLQEAPSTYGVVMGSLQEDIGALIRRHMLDYGLPVEACNPETGPGQFEITLRYGNSLKSADDAFLFKSAVKEVAAQNDLLATFMAKPVTDWAGNSCHVHLSLRDIAGGGVFFDQDAPDQLSTALRHFAGGILHTMREFTALMAPTPNSYRRFVPYSWAGTTATWGVDNRSVGLRVIREGDHGTRVEHRQPGGDANPYLATAAALAGGLHGLLNEIEPRELSTTDIYSQPSEDLPVLPATLAEAVDLLADSAAAREWFGDDFVDHYVLMKRAEIAAQSVAVTDWEVARYLEAM

SEQ ID NO: 8842 - DNA, 1359 bp, Sulfitobacter sp. EE-36
  CDS (1)..(1359): transl_table=11
atgtccgactggcttgaagagcttccccccgcagcacgcgaatatctggagggcaagcggctcgacgaagttgaatgtatcatccccgacctccccggcattgctcgcggcaaagcggtgcccgccacaaaattcgcacggcaggaatattttcacctgcccgacagcatcttctaccagaccatcaccggtgaatggggcgacgccgccggtgccgatgggttcatcgaaaaagacatgatcctgcgccccgatatctcgaccgcgaccgccgccccctggaccggcgactggacactgcaagtgatccacgacgcctttgaccgcgacggcaatccggtggaatattcgccgcgcaatgtcctgaaacgcgttgtcgatctttatcgcgcgcaagggtgggagccggttgtcgcccccgagatggaattctttctggtcgcgcgcaaccttgaccccgcgcatgagatcaaaccgatgatgggccgctccggccgccctgctgccgcgcgtcaggcctattccatgaccgccgtcgatgaattcggccccgtgatcgacgacatctacgactttgccgaggcacagggattcgagattgacggtatcacccaggaaggcggcgcgggccagcttgagatcaacctgatccacggtgacccggtgcggctggccgacgaggtgttctatttcaaacgtctgatccgcgaagccgccctgcgccacgattgctacgccaccttcatggcgaaacccatcgccaacgaacccggcagcgccatgcatatccaccattcggtgctggatgccacgacgggcaagaacatcttctctggcccgcaagggggcgagacggacgcgttttaccactttatcgccggcatgcagaaccacatgcccgacgcgctggccgtcattgcgccctatgtgaacagctaccggcgctacgtcaaagaccatgccgcgccgatcaatctggaatggggccgcgacaaccgcaccaccggcatccgcgtgcccctctccggccccgcgtcgcgccgggtcgagaaccgcctcgccgggatggactgcaacccctacctcggcatcgccgcctcgctcgcctgcggctatctgggcctgattgaacagaaaaagcccaaagccgaattcaagggcgacgcctatgacggcgacggggatatcccgcaggtgctgggatccgcgctggatctgtttgaagaggccacgaccctgcacgaggtgttgggccccgagttcgcccgcgtctacgccatcgtcaaacgcgcggaatacgaagagttcctgcatgtgatttccccctgggaacgcgagcacctgttgatgaacgtctag

SEQ ID NO: 8843 - protein, 452 aa, Sulfitobacter sp. EE-36
MSDWLEELPPAAREYLEGKRLDEVECIIPDLPGIARGKAVPATKFARQEYFHLPDSIFYQTITGEWGDAAGADGFIEKDMILRPDISTATAAPWTGDWTLQVIHDAFDRDGNPVEYSPRNVLKRVVDLYRAQGWEPVVAPEMEFFLVARNLDPAHEIKPMMGRSGRPAAARQAYSMTAVDEFGPVIDDIYDFAEAQGFEIDGITQEGGAGQLEINLIHGDPVRLADEVFYFKRLIREAALRHDCYATFMAKPIANEPGSAMHIHHSVLDATTGKNIFSGPQGGETDAFYHFIAGMQNHMPDALAVIAPYVNSYRRYVKDHAAPINLEWGRDNRTTGIRVPLSGPASRRVENRLAGMDCNPYLGIAASLACGYLGLIEQKKPKAEFKGDAYDGDGDIPQVLGSALDLFEEATTLHEVLGPEFARVYAIVKRAEYEEFLHVISPWEREHLLMNV

SEQ ID NO: 8844 - DNA, 1359 bp, Roseovarius nubinhibens ISM
  CDS (1)..(1359): transl_table=11
atggcccaatggaccgactccctgcccgaagccgcgaatgcctatctcgaaggccgccggcttgacgaagtcgaatgtatcgtctccgacctgcccggcattgcccgcggcaaggcggtgcccgcatcgaaattcgcccgtcaggattactttcacctgccggattcgatcttttaccaaaccatcaccgggggctgggccgaggccgccggcgacgaaggctttatcgagcgcgacatgctcttgcgcccggatatgagcaccgccaccgccgcgccctggacggcggactggacgctgcaagtgatccatgacgcctttgacaagaccggcgcaccgatcccctattcgccgcgcaacgtgctcaaacgggtggtgcagctctatcgcgatcagggtctcgaacccgttgtcgccccggagatggaatttttcatcgtcgcgcgcaacatcgacccggcacaggaaattcagccgatgatgggccgctccggccgtcccgccgccgcgcgccaatcctattcgatgaccgccgtcgacgaattcggccccgtcatcgacgacatctatgatttcgccgaggcgcaaggctttgaaatcgacggcatcacccaagagggcggcgcaggccagctcgagatcaatctcaaccacggcgatcccgtggcgctggccgatgaggtcttttacttcaagcggctgatccgcgaggcggcgctgcgccacggcagtttcgcgaccttcatggccaaacccatcgccgacgagccgggcagcgccatgcatatccaccaatccgtcctcgatctgaaaaccggcgagaacatcttttccacccccgagggcgaagaaaccgatgccttccgccatttcctcggcggcatgcagaaacacctgcccgcggccatcgcggtgctcgccccttacgtcaattcctaccgccgctacgtcaaggatcacgccgccccgatcaacctcgcctgggcgcgcgacaaccgcaccacggggctgcgcatcccgatctcgggccccaaggcacggcgcatcgaaaaccgcctcgccgggatggattgcaacccctatctcggcatcgcggccagcctcgcctgcggccttctcggcatgatgaacaaggtcgagcccgccgccgaattccatggcgacgcctatgagggcgacgaggacatcccgcgcgtgcaaggcgaggcgctcgatctcttcgaggaggccaccgatctgcacgaggtgctgggccgcgagtttgcccgcgtctatgccatcgtgaaacgcgccgaatatgacgagttcctgcaggtcatctcgccttgggaacgggaacatctgctgctcaacgtctag

SEQ ID NO: 8845 - protein, 452 aa, Roseovarius nubinhibens ISM
MAQWTDSLPEAANAYLEGRRLDEVECIVSDLPGIARGKAVPASKFARQDYFHLPDSIFYQTITGGWAEAAGDEGFIERDMLLRPDMSTATAAPWTADWTLQVIHDAFDKTGAPIPYSPRNVLKRVVQLYRDQGLEPVVAPEMEFFIVARNIDPAQEIQPMMGRSGRPAAARQSYSMTAVDEFGPVIDDIYDFAEAQGFEIDGITQEGGAGQLEINLNHGDPVALADEVFYFKRLIREAALRHGSFATFMAKPIADEPGSAMHIHQSVLDLKTGENIFSTPEGEETDAFRHFLGGMQKHLPAAIAVLAPYVNSYRRYVKDHAAPINLAWARDNRTTGLRIPISGPKARRIENRLAGMDCNPYLGIAASLACGLLGMMNKVEPAAEFHGDAYEGDEDIPRVQGEALDLFEEATDLHEVLGREFARVYAIVKRAEYDEFLQVISPWEREHLLLNV

SEQ ID NO: 8846 - DNA, 1362 bp, Oceanicola batsensis HTCC2597
  CDS (1)..(1362): transl_table=11
atgagcgacgactggaccacgcagatcccggcggccgcgcaggcctatctggaaaaccgccgcctcgacgaggtggagtgcatcatctcggacctgccgggcatcgcccgcgggaaggccgtgccggcttccaagttcgcgcgccagcagttcttccatctgcccaattcgatcttcttccagaccatcaccggcgactggggcgaagccgccggcgacgagggcttcatcgagcccgacatgaccctgcgccccgatctctccaccaccagcgccgcgccctggaccggcgactggacgctgcaggtgatccacgacgcctacgaccgcaagggtaatccgatcccgttctcgccccgcaacgtgctgaaacgggtggtcagcctctacgaggcgcagggctggaaaccggtggtcgcgcccgagatggaattctatctcatcgcgcgcaatctcgacccggccaagccgatcctgccgatgaccggccgctcggggcggcccgccgccgcgcgccaggcctattccatgaccgccgtggacgaattcggcccggtgatcgacgacatctacgactttgccgaggcgcaggggttcgagatcgacggcatcacccaggagggcggggccggccagctcgagatcaacctgcgccacggcaacccggtcaagctggcggacgaagtcttctatttcaagcgtctgatccgcgaggccgcgctgcgccacgactgcttcgccaccttcatggccaagccgatcggggacgagcccggcagcgccatgcatatccaccactcgatcctcgatctcgagaccgggcggaacatcttcaccggcccccagggcggcgagacggacgccttctacagcttcatcggcgggctgcagcaccacctgccgcaggtgatcccgctgctggcaccctacgtcaacagctaccgccgctacgtcaaggatcacgccgcgccgatcaacctcgaatggggtcgcgacaaccggaccacgggcatccgggtgccgatctccgaccccgccgcgcgccgggtcgagaaccgggtggcggggatggactgcaacccctatctcggaatcgccgcctcgctcgcggcgggctatctcggcctgatgcgcgaggaacgggccgaaaagcagttccgcggcgacgcctacgaaggcgaaggcgactttccccgcaccctgggcgaggccctgaacgaaatggaagaggcgaccggcatcgccgaagtcctgggcgaggaattcctgcgcgtctactccatcgtgaaacgcacggaatacgaggaattcctcggcgtcatcagcccatgggagcgggaacacctcctgctcaacgtctga

SEQ ID NO: 8847 - protein, 453 aa, Oceanicola batsensis HTCC2597
MSDDWTTQIPAAAQAYLENRRLDEVECIISDLPGIARGKAVPASKFARQQFFHLPNSIFFQTITGDWGEAAGDEGFIEPDMTLRPDLSTTSAAPWTGDWTLQVIHDAYDRKGNPIPFSPRNVLKRVVSLYEAQGWKPVVAPEMEFYLIARNLDPAKPILPMTGRSGRPAAARQAYSMTAVDEFGPVIDDIYDFAEAQGFEIDGITQEGGAGQLEINLRHGNPVKLADEVFYFKRLIREAALRHDCFATFMAKPIGDEPGSAMHIHHSILDLETGRNIFTGPQGGETDAFYSFIGGLQHHLPQVIPLLAPYVNSYRRYVKDHAAPINLEWGRDNRTTGIRVPISDPAARRVENRVAGMDCNPYLGIAASLAAGYLGLMREERAEKQFRGDAYEGEGDFPRTLGEALNEMEEATGIAEVLGEEFLRVYSIVKRTEYEEFLGVISPWEREHLLLNV

SEQ ID NO: 8848 - DNA, 1338 bp, Oceanospirillum sp. MED92; identical to SEQ ID NO: 1286
  CDS (1)..(1338): transl_table=11

SEQ ID NO: 8849 - protein, 445 aa, Oceanospirillum sp. MED92; identical to SEQ ID NO: 1287

SEQ ID NO: 8850 - DNA, 1401 bp, Xanthobacter autotrophicus Py2; identical to SEQ ID NO: 1288
  CDS (1)..(1401): transl_table=11

SEQ ID NO: 8851 - protein, 466 aa, Xanthobacter autotrophicus Py2; identical to SEQ ID NO: 1289

SEQ ID NO: 8852 - DNA, 1395 bp, gamma proteobacterium HTCC2207; identical to SEQ ID NO: 1292
  CDS (1)..(1395): transl_table=11

SEQ ID NO: 8853 - protein, 464 aa, gamma proteobacterium HTCC2207; identical to SEQ ID NO: 1293

SEQ ID NO: 8854 - DNA, 1365 bp, Oceanobacter sp. RED65; identical to SEQ ID NO: 1294
  CDS (1)..(1365): transl_table=11

SEQ ID NO: 8855 - protein, 454 aa, Oceanobacter sp. RED65; identical to SEQ ID NO: 1295

SEQ ID NO: 8856 - DNA, 1344 bp, marine gamma proteobacterium HTCC2080
  CDS (1)..(1344): transl_table=11
gtgcaacgcgaagtcgaattattcttgaaggcctacccatctgtcgaaatgatagaggcgcttattacggactgtaatggggtcgctaggggtaagtggatacctcgaggaaaaatacaatctatcctagacgacggattgaagctgccaaaatccgcgttaggtctggatatttggggaagagatattcccgaattggcccatgccaacggtgatatcgatggttactgcatggctgtagaagattctttaaagcctgtgctcaccccccgtggtaccgatcagggacaactgatcatgactatggttgacgaaaccggcgccccttatatgggtgatcccaggcaaattcttgccaaagttttagaagggttttcagagcgaaacctcaagccctgcatggctgctgagctggagttctacctgctgccggatcctgggcgagacaagccactgagagaatccctcgacagcctagatactttgggcggcaatctttatgcgctcaacgagctcgaccaccacagtgaaatgctggatctgctgcgggaaacatttaaaacacaagatctcccttacgaggggattatcaaagaatctgccccagctcagtttgagatcaacatggcacacagcgacaatgtgatgctgatggcggatcaaatcataagaatgcagcgctgcattcgcagagtggccagccagtgtaatctgatcgctagcttcatgcccaaacctctagataacgaggctgggaatggtatgcacattcactgcagcgtattggaggaacggggtctcaatatctttaatgacggtaatgatgaaggcagccccctgctaaagcaggccatcgcaggatgcttagagttaatgcctgattccatgctaatttttgcacccagcttcaacgcctatcggcgttttcaagcgggcaatcatgctccaactgttccaacatggggttatgacaatcgcaccaccgcactgcgggttccttcgggcccccaagctgctttacgtatcgagcatcgtgtggccggtgccgatgcaaacccctatttagtgatggccgtgatgctcgctggcattttgcacgggttagaaaataaaatggagccccccgcagcgatcgagggcaacgcttgggacatgaagcacgatactccagacctcccatgcctaatgaacgtagccgtggagaaatttcttaactcaccactcatcgagaagtacctaagcgcagagttccagttgctttatgggaaaaccaaagagcaggaactgaatgaatttcaacgccgggtgaccgactttgaaattgaaagctatctacggggttaa

SEQ ID NO: 8857 - protein, 447 aa, marine gamma proteobacterium HTCC2080
MQREVELFLKAYPSVEMIEALITDCNGVARGKWIPRGKIQSILDDGLKLPKSALGLDIWGRDIPELAHANGDIDGYCMAVEDSLKPVLTPRGTDQGQLIMTMVDETGAPYMGDPRQILAKVLEGFSERNLKPCMAAELEFYLLPDPGRDKPLRESLDSLDTLGGNLYALNELDHHSEMLDLLRETFKTQDLPYEGIIKESAPAQFEINMAHSDNVMLMADQIIRMQRCIRRVASQCNLIASFMPKPLDNEAGNGMHIHCSVLEERGLNIFNDGNDEGSPLLKQAIAGCLELMPDSMLIFAPSFNAYRRFQAGNHAPTVPTWGYDNRTTALRVPSGPQAALRIEHRVAGADANPYLVMAVMLAGILHGLENKMEPPAAIEGNAWDMKHDTPDLPCLMNVAVEKFLNSPLIEKYLSAEFQLLYGKTKEQELNEFQRRVTDFEIESYLRG

SEQ ID NO: 8858 - DNA, 1359 bp, Pseudomonas putida GB-1
  CDS (1)..(1359): transl_table=11
atgaacgcccccttcgatcagctgtccacctggctgaaagaacaccggatcaccgaagtcgaatgcgtgatcagcgacctgaccggcattgcccgcggcaagatcgcgcccaccgccaagttcctccacgagcgcggcatgcgcctgcctgaaagcgtgctgttgcagacggtcaccggcgactacgttgacgatgacatctactacaacctgctcgacgctgccgacatcgacatggtctgccgccccgacccgaccgccgtgtaccagatcccgtgggccatcgagccgaccgcgatcgtgatccacgacaccttcgacaaacaaggcaacccgatcgagctgtcgccgcgcaacgtattgaagaaggtcctcaagctctacgccgacaagggctggcagccgattgtcgcaccagagatggagttctacctgaccaagcgctgcgaagacccggatttgccactgcaggtgccactggggcgttccggtcgtgccgaaagcggccgccagtcgttctcgatcgatgccgccaacgaattcgacccgttgttcgaagacgtctacgactggtgcgagatccagggcctggacctggacacgctgatccacgaagacggcccggcgcaaatggagatcaacttccgccacggcgacgcgctggacctggcggaccagatcaccgtgttcaagcgcaccatgcgcgaggcggcactcaagcacaacgtggccgccacgttcatggccaagccgatcaccgacgaaccgggcagtgccatgcacctgcaccagagcgtggtcgacatcgccaccggcaaaccggtcttcgccaacgaagacggcagcatgagccagctgttcctgcaccacatcggtggcctgcagaagtacatccccaaactgctgccgatgttcgcgcccaacgtcaactcgttccgccgtttcctgccggacacttcggcgccggtcaacgtcgagtggggtgaagaaaaccgcaccgccggcttgcgcgtgcccacgtccagccccgaggcgatgcgcgtggaaaaccgcctgccaggcgccgatgccaacccgtacctggccatcgccgctagcctgctgtgcggctacctgggcatggtggagcggatcgacccgagcgcgccggtacagggccgcgcctatgaacggcgcaacctgcgcctgccgatcaccatcgaggacgcgctgcagcacatggaagactgcgagaccgtacagcagtacctgggcaagcagttcgtccagggctacgtggcggtcaaacgggccgagcacgaaaactacaagcgtgtgatcagctcgtgggagcgtgaattcctgatgctgagcgtctga

SEQ ID NO: 8859 - protein, 452 aa, Pseudomonas putida GB-1
MNAPFDQLSTWLKEHRITEVECVISDLTGIARGKIAPTAKFLHERGMRLPESVLLQTVTGDYVDDDIYYNLLDAADIDMVCRPDPTAVYQIPWAIEPTAIVIHDTFDKQGNPIELSPRNVLKKVLKLYADKGWQPIVAPEMEFYLTKRCEDPDLPLQVPLGRSGRAESGRQSFSIDAANEFDPLFEDVYDWCEIQGLDLDTLIHEDGPAQMEINFRHGDALDLADQITVFKRTMREAALKHNVAATFMAKPITDEPGSAMHLHQSVVDIATGKPVFANEDGSMSQLFLHHIGGLQKYIPKLLPMFAPNVNSFRRFLPDTSAPVNVEWGEENRTAGLRVPTSSPEAMRVENRLPGADANPYLAIAASLLCGYLGMVERIDPSAPVQGRAYERRNLRLPITIEDALQHMEDCETVQQYLGKQFVQGYVAVKRAEHENYKRVISSWEREFLMLSV

SEQ ID NO: 8860 - DNA, 1335 bp, Pseudomonas putida GB-1
  CDS (1)..(1335): transl_table=11
atgttgccagcagaaacccagcgcacgctcgaccaacacggcatcaagtacgtgctggcgcagttcgtcgatattcatggctcggcgaagaccaaatcggtgccggtctccggcctgaagatggtcgccgaagagggcgccggttttgccggcttcgccatctgcggcatgggcatggagccacacggaccggacttcatggcccgcggcgacctgacgaccttgattccggtgccatggcagccgggttatggccgcgtggtatgcgtgggccatgtaaacggccagccgtggccctacgacagccgtcacgtgttgcaacagcaggtgcagcgcctggccgaaaaggggtggacgctgaacaccggccttgagcccgagttcagcctgtttcgccgcgacgagggtggcaagctgcaactggtggatgcctccgacaacctcgacaagccgtgttacgactacaagggcctgtcacgctcgcggctgttcctcgagcgcctgaccgaggcgttgcaaccggtgggtttcgacatctaccagatcgaccacgaagacgccaacggccagttcgagatcaactacacctacagtgacgccatggagtcggccgaccgtttcaccttcttccgcatggccgccggcgagatcgccaacgacctggggatgatctgctcgttcatgcccaagcccgaccccaagcgcgctggcaatggcatgcactttcatctgtcgctggccagcagcaccaacaagaacctgttccacgacccgtccgacagcagcggcatgggcctgtcgaagctggcctaccactttgctgcagggctgctggcccacggcccggcgttgtgtgccttcgcggcgccaacggtcaactcctacaagcgtctggtggtggggcgctcgttgtcgggttcgacgtgggccccggccttcgtagcctggggggccaacaaccgctcggcgatggtgcgcattccttatggtcgcctggaattccgcttgccggacgccggttgcaacccgtacctggtcaccgccgcaatcattgccgccggcctcgatggcatcgaccgccagttggagccaggcgagatgtgcaatgaaaacctctacaacctgagccttgaagacattgccgcgcgcggcatcaaaaccctgccgcaatcgctgaaggaagccgttgacgcacttcaaaccgacccgctgttccgcgaggtgctgggcgccgagatcgtcgacgagttcatcaagctcaagcgcatggagtgggtggagtactgccggcacgtttccgactgggaaatccagcgctacaccgaattcttctga

SEQ ID NO: 8861 - protein, 444 aa, Pseudomonas putida GB-1
MLPAETQRTLDQHGIKYVLAQFVDIHGSAKTKSVPVSGLKMVAEEGAGFAGFAICGMGMEPHGPDFMARGDLTTLIPVPWQPGYGRVVCVGHVNGQPWPYDSRHVLQQQVQRLAEKGWTLNTGLEPEFSLFRRDEGGKLQLVDASDNLDKPCYDYKGLSRSRLFLERLTEALQPVGFDIYQIDHEDANGQFEINYTYSDAMESADRFTFFRMAAGEIANDLGMICSFMPKPDPKRAGNGMHFHLSLASSTNKNLFHDPSDSSGMGLSKLAYHFAAGLLAHGPALCAFAAPTVNSYKRLVVGRSLSGSTWAPAFVAWGANNRSAMVRIPYGRLEFRLPDAGCNPYLVTAAIIAAGLDGIDRQLEPGEMCNENLYNLSLEDIAARGIKTLPQSLKEAVDALQTDPLFREVLGAEIVDEFIKLKRMEWVEYCRHVSDWEIQRYTEFF

SEQ ID NO: 8862 - DNA, 1383 bp, Pseudomonas putida GB-1
  CDS (1)..(1383): transl_table=11
atgacgtcggtaaccccgtgcgccagttcttccagcgagatgaatgacttcctccaggcccatccggacacgcagtatgtagacctgctgatctccgacatgaatggcgtggtacgtggcaagcgcatcgagcgggccagcctgcacaaggtgtacgagaagggcatcaacctgccggcttcgctgttcgccctggacatcaacggctccacggtcgagagcaccggccttggcctggacatcggcgatgccgaccgcatctgcttcccgatccccggcacgctgtcggacgaaccctggcagaagcgccccaccgcgcagctgctgatgaccatgcacgaactggatggccagccgttcttcgccgacccgcgtgaagtgctgcgccaggtggtgagcaagttcgacgacctgggcctggatatctgcgcggcgttcgagctggagttctacctgattgaccaggacaacctcaacggtcgcccacagccgccgcgctcaccgatttccggcaagcgcccgcagtcaacccaggtgtacctgatcgacgacctcgacgaatacgccgactgcctgcaggacatgctcgaagcagccaaggaacaaggcctgcccgccgacgccatcgtcaaggaaagcgccccggcgcagttcgaggtcaacctgcaccatgtggctgatccgctgaaagcgtgcgactacgcgattctgctcaagcgcctgatcaagaacgtggcctacgaccatgaaatggacaccaccttcatggccaagccctacccaggtcaggcaggcaatggtctgcacgtgcacatttcgctgctggacaagaaaaccggcaagaacatcttcgccagtgacgacccgctgcaaagcgacacgctgcgccacgccattggcggcgtgctggaaaccatgccggcgtcgatggccttcctgtgcccgaacatcaactcctaccgccgcttcggtgcgcagttctacgtgcccaatgcgcctagctggggcctggacaaccgcaccgtggcagtacgcgtgcccaccgacagcagcgacaacgtgcgcctggagcaccgtgtggctggcgccgacgccaacccgtacctgatgctcgccgcgatccttgccggtgttcaccacggcctgaccaacaaggtcgagccccaggcgccgatcgaaggcaactcctacgaacagctggagcaaagcctgccgaacaacctgcgcgacgctctgcgcgcgctggatgacagcgaagttctcaaccaatacatcagcccggactacatcgatatcttcgtggcctgcaaggaaagcgaactggccgagttcgaagtgtcgatttccgacctcgagtacaactggtacctgcacacggtgtaa

SEQ ID NO: 8863 - protein, 460 aa, Pseudomonas putida GB-1
MTSVTPCASSSSEMNDFLQAHPDTQYVDLLISDMNGVVRGKRIERASLHKVYEKGINLPASLFALDINGSTVESTGLGLDIGDADRICFPIPGTLSDEPWQKRPTAQLLMTMHELDGQPFFADPREVLRQVVSKFDDLGLDICAAFELEFYLIDQDNLNGRPQPPRSPISGKRPQSTQVYLIDDLDEYADCLQDMLEAAKEQGLPADAIVKESAPAQFEVNLHHVADPLKACDYAILLKRLIKNVAYDHEMDTTFMAKPYPGQAGNGLHVHISLLDKKTGKNIFASDDPLQSDTLRHAIGGVLETMPASMAFLCPNINSYRRFGAQFYVPNAPSWGLDNRTVAVRVPTDSSDNVRLEHRVAGADANPYLMLAAILAGVHHGLTNKVEPQAPIEGNSYEQLEQSLPNNLRDALRALDDSEVLNQYISPDYIDIFVACKESELAEFEVSISDLEYNWYLHTV

SEQ ID NO: 8864 - DNA, 1377 bp, Pseudomonas putida GB-1
  CDS (1)..(1377): transl_table=11
atgtcggtacccccgcgtgccgttcagcttaacgaagcgaacgcgttccttaaggaacatcctgaggttctctacgttgaccttctgattgcagatatgaatggtgtggtgcgtggcaagcgcattgagcgcaccagcctccacaaggtttacgagaaaggcatcaacctgccggcctccctcttcgccctggacatcaacggttccaccgtcgaaagtaccgggctgggcctggacatcggcgatgctgaccgcatctgctatccaatccccgacacgctctgtaacgagccgtggcaaaaacgccccaccgcccagctgctgatgaccatgcacgaactggaaggcgagccattcttcgccgacccacgcgaagtgctgcgtcaggtggtgagcaagttcgatgaattgggcctgactatctgcgccgcattcgaactggagttctacctgatcgaccaggagaacgtgaacggccgcccgcagccaccacgctcgccaatttcgggtaagcgcccgcagtcgacccaggtgtacctgatcgacgacctcgacgaatatgccgactgcctgcaggacatcctcgaaggcgcgaaagagcaaggcatcccagccgacgccatcgtcaaggaaagcgccccggcgcagttcgaagtcaacctgcaccacgtggccgacccgctcaaggcctgcgactacgcggtactgctcaagcggttgatcaagaacatcgcctacgaccatgaaatggacaccaccttcatggccaagccctacccgggccaggcaggcaacggcctgcatgtacacatttccgtgctggacaaagatggcaacaacatcttcaccagcgaggatcccgagcagaacgccgcgctacgtcatgctgtcggcggtgtgctcgagaccctgcccgcgtccatggcgttcctttgcccgaacgtcaactcgtaccgccgctttggcgcacagttctacgtgccgaacgcgccaagctggggcctggacaaccgcactgtcgcactgcgcgtgccaaccggctcggcggacgctgtacgtctcgagcaccgcgtggccggtgccgacgccaacccgtacctgatgatggctgccgtgctggcaggcgtgcaccatggcctgaccaacaagatcgagccaggcgcgccgatcgaaggcaactcgtacgagcagctggagcagagcctgccgaacaacctgcgtgatgccctgcgcgagttggacgacagcgagatcctcaacaagtacatcgatcctaagtacatcgacatctttgtcgcgtgcaaggagagcgagctggaggagttcgaacactcgatctccgacctcgagtacaactggtacctgcataccgtgtaa

SEQ ID NO: 8865 - protein, 458 aa, Pseudomonas putida GB-1
MSVPPRAVQLNEANAFLKEHPEVLYVDLLIADMNGVVRGKRIERTSLHKVYEKGINLPASLFALDINGSTVESTGLGLDIGDADRICYPIPDTLCNEPWQKRPTAQLLMTMHELEGEPFFADPREVLRQVVSKFDELGLTICAAFELEFYLIDQENVNGRPQPPRSPISGKRPQSTQVYLIDDLDEYADCLQDILEGAKEQGIPADAIVKESAPAQFEVNLHHVADPLKACDYAVLLKRLIKNIAYDHEMDTTFMAKPYPGQAGNGLHVHISVLDKDGNNIFTSEDPEQNAALRHAVGGVLETLPASMAFLCPNVNSYRRFGAQFYVPNAPSWGLDNRTVALRVPTGSADAVRLEHRVAGADANPYLMMAAVLAGVHHGLTNKIEPGAPIEGNSYEQLEQSLPNNLRDALRELDDSEILNKYIDPKYIDIFVACKESELEEFEHSISDLEYNWYLHTV

SEQ ID NO: 8866 - DNA, 1359 bp, Pseudomonas putida GB-1
  CDS (1)..(1359): transl_table=11
atgagtaacaacctcgaccagctcaccgattggttgaaagagcacaagatcaccgaagtcgaatgcatgatcagtgacctgaccggcatcacgcgcggcaagatttcgcccaccaacaaattcatcgccgaaaaaggcatgcgcctgcccgagagcgtgttgctgcagacggtgaccggcgactacgtcgacgacgacatctattacgaactgctcgacccggccgacatcgacatgatctgccgccccgacgaaaacgccgtgttccttgtaccgtgggccatcgagccgaccgcccaggtcatccacgacacctacgacaaaaagggcaacccggtcgaactgtcgccgcgcaacgtgctgaagaaagtcctgcagctgtacgccgacaagggctggcagccgatcgtcgcgcccgagatggagttctacctgaccaagcgcagcgaagacccggacttcccgctgcagcccccggtaggccgctccggccgcccagagaccggccgtcagtcgttctccatcgaagccgccaacgaattcgacccgctgttcgaagacgtctacgactggtgcgaactgcagcagctggacctcgacacgctgatccacgaagacggcacggcgcagatggaaatcaacttccgtcacggcgacgccctgcacctggccgaccagattctggtgttcaagcgcaccatgcgcgaggcggcgctcaagcacaacgtggccgccaccttcatggccaagccgatgaccggcgagccgggcagtgccatgcacctgcaccagagcgtggtcgatgtggctaccggcaagaacatcttcagcaatgaagacggcagcatgagcgcgctattcctcaaccacattggtggcctgcagaagttcatccccgaggcgctgccgctgttcgcgcccaacgtcaactcgttccgccgcttcctgcccgacacctcggcgccggtgaacgtggagtggggcgaagaaaaccgcacggtcggcttgcgcgtaccggatgccggcccgcaaagccgccgggtcgagaaccgcctgccgggcgccgacgccaacccttacctggccatcgccgccagcttgctgtgtggctacatcggtatggtcgaaggcatcgaggccagcgcgccggtacagggccgtggttatgagcgccgcaacctgcgcctgccactgaccatcgaagatgccttggaacgcatggaaaacagccgtgcgctggtgcaatacctgggcaaaaaattcattaccggatatgtcgccaccaagcgcgccgagcacgaaaacttcaaacgcgtcatcagttcgtgggagcgtgagttcctgctgttcgctgtctga

SEQ ID NO: 8867 - protein, 452 aa, Pseudomonas putida GB-1
MSNNLDQLTDWLKEHKITEVECMISDLTGITRGKISPTNKFIAEKGMRLPESVLLQTVTGDYVDDDIYYELLDPADIDMICRPDENAVFLVPWAIEPTAQVIHDTYDKKGNPVELSPRNVLKKVLQLYADKGWQPIVAPEMEFYLTKRSEDPDFPLQPPVGRSGRPETGRQSFSIEAANEFDPLFEDVYDWCELQQLDLDTLIHEDGTAQMEINFRHGDALHLADQILVFKRTMREAALKHNVAATFMAKPMTGEPGSAMHLHQSVVDVATGKNIFSNEDGSMSALFLNHIGGLQKFIPEALPLFAPNVNSFRRFLPDTSAPVNVEWGEENRTVGLRVPDAGPQSRRVENRLPGADANPYLAIAASLLCGYIGMVEGIEASAPVQGRGYERRNLRLPLTIEDALERMENSRALVQYLGKKFITGYVATKRAEHENFKRVISSWEREFLLFAV

SEQ ID NO: 8868 - DNA, 1323 bp, Pseudomonas putida GB-1
  CDS (1)..(1323): transl_table=11
atgagcatcgctcagctccagggcatcgatgaaatcgaatgcgtcacccccgacctcaacggcgtcccacgcggcaaggtgatgaccgccgaaggctttcttgaaggccgccgcctgcagatggcccgtggggtgctgctgcaatgcatcatgggcggctacccgccggcgaaattctacggcagtgacgacggcgacctggcgttggtagccgaacccagccaggttcatcgcttgccctggagcgatgacggtcgcgccctggccatctgcgatgccaatgaactggatggccggccctcggcactgtccacccggggccagcttaaggccgtgatcgcccgctacgcagcgttgggtctggcaccggtagtggcgaccgagcttgagttcttcgtgtttgcccccaacagtgacccgcagcagccgttccagccaccgctgggcaccgacggccgccgcgagctgggccattcagcgttcagtgtcagctccaacaacggcctgcgcccgttcttcaaagaggtgtaccagtgcatggccgcgctcggcctgccgcgcgacaccttcatgcacgaaatgggcgtcagccagttcgagatcaacttgctgcatggcgacccgctgctgctggccgaccagacgttcctgttcaagcacctgctcaaggaagtggcgctcaagcatgggctgaccgtggtgtgcatggccaagccgttggcgcgtacgcctggcagttccatgcatatccaccagagcctggtcgaggccagcagcgggcgtaatgtgttcagcgacgagcagggcctgccgaccgataccttctaccacttcatcggcggtttgcaggcgtgcatggccgatttcaccgcgctgttcgctcccaacgtcaattcctatcagcgcctgtgccacccctatgcctcgccgaacaatgcctgctggtccgaggacaaccgtgccgccggtttgcgtattccggccagtgcgccggccgcgcgacgggtcgaaaaccgtttacccggtgccgacgccaacccctacctggccatcgccgccagcctggccgccgggctgcacggcatcgagcagcgcctgcagccgtcgcccgccatccagggcgagttcgaagtgcccgagcacctgagcctgccgtgtaccctgcatgcagcccttgaaaggctcaagcgcagcacactggcacgggaactgttcggcagcgagttcatcgaaggctacatcgccagcaagaccctggaactgaccgatttctacgatgagatcaccccgtgggagcgccgggtgctggcggcacaggcctga

SEQ ID NO: 8869 - protein, 440 aa, Pseudomonas putida GB-1
MSIAQLQGIDEIECVTPDLNGVPRGKVMTAEGFLEGRRLQMARGVLLQCIMGGYPPAKFYGSDDGDLALVAEPSQVHRLPWSDDGRALAICDANELDGRPSALSTRGQLKAVIARYAALGLAPVVATELEFFVFAPNSDPQQPFQPPLGTDGRRELGHSAFSVSSNNGLRPFFKEVYQCMAALGLPRDTFMHEMGVSQFEINLLHGDPLLLADQTFLFKHLLKEVALKHGLTVVCMAKPLARTPGSSMHIHQSLVEASSGRNVFSDEQGLPTDTFYHFIGGLQACMADFTALFAPNVNSYQRLCHPYASPNNACWSEDNRAAGLRIPASAPAARRVENRLPGADANPYLAIAASLAAGLHGIEQRLQPSPAIQGEFEVPEHLSLPCTLHAALERLKRSTLARELFGSEFIEGYIASKTLELTDFYDEITPWERRVLAAQA

SEQ ID NO: 8870 - DNA, 1347 bp, Pseudomonas putida GB-1
  CDS (1)..(1347): transl_table=11
atgagtgtcatctttccggatctgctggctgaagtgcgctcgttccgagcagaacacccggcattacgctatgtcgacttgattgcactggatatccccgggcatttctatggcaagcgctaccccatcgacatgctggagaaagtcgcagccggtgcgcctttgaagctgccgcagaactgcgtgctgctgggcacccagggtgggctctacccgattggtgactactgcttcgccgacggcgacccggatgccgcgcggcgcctggtaccgggcaccctcaagccggtgcgctgggaaaaggaagtgatcgcccagatgctcatcacctccgacggcactgccaagccgatcgagttcgaaccccgagaagtgctggctcgcgtgcttcagcgcctggccaagcgtggtatccgcccggtggtggcgttcgaactggagttctacctgttcgaccgcaagctcgataacggcctgccgcagtacccgcgcgacacggcgaccggggacgaagacgaccaaccgaacatgcacatcgagcggctgtcgcgcttctcgtcggtgctgcacgagatggtcgatggcgccaacgagcagggcgtgccggcgaacgtgatcaccgcagagctaggccccggccagttcgaaatcaacttctcccacagcgacgatgccctgagcgcggcggactggtcggcgctgttctgccgcagtacccggggtatcgcgatgaagcacggctaccgcgccagcttcatgagcaagccgtacctggacgcgccaggcagcggcatgcatgtgcatgtcagcctgtacgacgacgccggcaacaacatcctggccggtgccgagcagcgcaagctgcgtcatgcggtggcagggtgcctggagctgctgccgcactgcatgccgatctttgcccccaaccacaatgcctaccgccgttatggcgcgatggtcaacgcggcgagcaaggccagctggggcttcgaggaccgtgatgcgtgcattcgcatccctgaatccgacccgcgcaacctgcgcatcgagcaccgcctcgcgggcgccgatgccaacccgtatctggtgctggcggccatcctgaccgggatggagcatggcctggaccgtggcgtggaacccattgcgccgttgaacgacaaccgccagagcggcatcgacttccccaaggatgccctcagcgctctggccgccatgcgtcaccacccggtggtcaacgaaggcctgggcagtgagttcgtgatggtttattgcgaaaacaaataccaggagcaactggacttcatgcgccacatcgatgcccgcgaataccgctggttcctttga

SEQ ID NO: 8871 - protein, 448 aa, Pseudomonas putida GB-1
MSVIFPDLLAEVRSFRAEHPALRYVDLIALDIPGHFYGKRYPIDMLEKVAAGAPLKLPQNCVLLGTQGGLYPIGDYCFADGDPDAARRLVPGTLKPVRWEKEVIAQMLITSDGTAKPIEFEPREVLARVLQRLAKRGIRPVVAFELEFYLFDRKLDNGLPQYPRDTATGDEDDQPNMHIERLSRFSSVLHEMVDGANEQGVPANVITAELGPGQFEINFSHSDDALSAADWSALFCRSTRGIAMKHGYRASFMSKPYLDAPGSGMHVHVSLYDDAGNNILAGAEQRKLRHAVAGCLELLPHCMPIFAPNHNAYRRYGAMVNAASKASWGFEDRDACIRIPESDPRNLRIEHRLAGADANPYLVLAAILTGMEHGLDRGVEPIAPLNDNRQSGIDFPKDALSALAAMRHHPVVNEGLGSEFVMVYCENKYQEQLDFMRHIDAREYRWFL

SEQ ID NO: 8872 - DNA, 1350 bp, Marinobacter sp. ELB17
  CDS (1)..(1350): transl_table=11
atgtctgacaataaggccgaaatttggctggcacagcatccagagattgattccatttttgcctgcgtttgcgatttaaacggcacgatgcgtggcaagcgcgttccggttgatcagttgtccaaggtaatagacggcgggctacggatgccgttgtcgattgttggcatggatgtttggggcgaggatgtcgaaaacagtgagttggttttcgagacgggcgattccgatggcttgtgcgattttaccggccgcccattgatgccgatcacctggaccagtcgcccgacggcgctggcgatgctgtggatgcggcaagaagaaggcgcaccgtttccgggcgacccgcgcagggcccttgcgcgtattgccgagcaatacaagcagcgcggactgacgcctgtggtggcgaccgagctggaattctatctggtcgacccctcggaagattacccgcaggcgccacgatctccggttaccggcaagcgactggaatccgacggcgcgatgtcgctggacgaattgcaacatttcgatgaatttctgaacgacgtttacgatgcctgcgaattgcagggcattcctgccgatgctgcgatttcggaaaacggggcgggccagtttgagatcaacatgcaccacgttgcggaccctctgcgcgccgctgacgatgccgtgctgttcaagcgtctcgtgcgcggcattgcccgcaagcacgggcttgcggctaccttcatggcgaaaccttatggcgacctgtctggcagcgggtttcacacgcatttctcattgatcgatgaaaacgggataaacgtgttcgacaacggcggcgacgaaggcacgcccctgttgttgaacgcggtggccgggttgttggccacgatgcagcaaaacacgctgacatttgcgccgcacgaaaattcgtatcgccgcctgctgcccggcgctcacgcgccgacaagcgtctcttggggctatgagaaccgaaccgcggccatccgtattcccggcggtgatcccatagcgcggcgtatagagcatcgcgtcgcgggcgccgatgccaacccctatctggtgctggccagcattctgggcggggcactgcttggcatcgaaaacgagatgcagccggcggcacccatcaccggcaatgcgtattcgatgaacctcgacaatttgccgctggactgggcaaccgccatcgacgcctttcgcaagggtgccgatgtgccgaccatcttctccaaacggctgcaaaccatgttggtcgaatgcaaaatgcaggaattgcgtaaatttgcccgctacgtgaccaagtttgaatatgacagctacctggagatcgtgtga

SEQ ID NO: 8873 - protein, 449 aa, Marinobacter sp. ELB17
MSDNKAEIWLAQHPEIDSIFACVCDLNGTMRGKRVPVDQLSKVIDGGLRMPLSIVGMDVWGEDVENSELVFETGDSDGLCDFTGRPLMPITWTSRPTALAMLWMRQEEGAPFPGDPRRALARIAEQYKQRGLTPVVATELEFYLVDPSEDYPQAPRSPVTGKRLESDGAMSLDELQHFDEFLNDVYDACELQGIPADAAISENGAGQFEINMHHVADPLRAADDAVLFKRLVRGIARKHGLAATFMAKPYGDLSGSGFHTHFSLIDENGINVFDNGGDEGTPLLLNAVAGLLATMQQNTLTFAPHENSYRRLLPGAHAPTSVSWGYENRTAAIRIPGGDPIARRIEHRVAGADANPYLVLASILGGALLGIENEMQPAAPITGNAYSMNLDNLPLDWATAIDAFRKGADVPTIFSKRLQTMLVECKMQELRKFARYVTKFEYDSYLEIV

SEQ ID NO: 8874 - DNA, 1308 bp, Rhizobium meliloti
  CDS (1)..(1308): transl_table=11
gtgacactggatctctccacattcgcccgcgaaaagggcgtcaaatatttcatgatcagctacaccgatctcttcggcgggcagcgtgccaaactggttcccgcggaagcgatcgccgacatgcagaagggcggcgcaggcttcgcaggttttgccacctggttcgatctcacgcctgcgcatcccgatctcttcgctctcccggatgcgtccgcggtcatccagctcccctggaagaaggacgtcgcctgggtggcggcagactgcatcatggacgacgcgcccgtggaacaggcaccgcgcgtggtgctgaagaagctcgtcgccgaggcggcccaggaagggcttcgcgtcaagaccggcgtcgaaccggagttctttctgatctcgccggatggatcgaagatttccgacacgttcgatacggcggaaaagccttgctatgaccagcaggcgatcatgcgccgctacgacgtgatcgccgagatctgcgactacatgctcgaactcggatggaagccctaccagaacgaccatgaggatgcgaacggccagttcgagatgaactgggagtatgacgacgcgctccggaccgccgacaagcactccttcttcaagttcatggtgaagtcgatcgccgagaagcacgggctgcgcgcgaccttcatgccgaagccgttcaagggtctgacgggcaacggttgccattgccacatttcggtctgggatctggcaggcgaggtgaatgcctttgccgacaacaaggcggagttcggcctttcagccgagggacgccacttcctgggcggcatcatgaaacatgcaagcgcgctcgccgcggtcaccaatccgacggtcaactcctacaagcgcatcaacgcgccgcgcacgatctccggcgcgacctgggcgccgaattcggtgacctggaccggcaacaaccgcacccacatggtgcgcgttcccggccccggccgtttcgagctgcgcctgccggacggcgccgtcaatccctatctcctgcaggcgatcatcattgcggccggcctttcgggcgttcgctccaaagccgatcccggccgtcactacgacatcgacatgtacaaggacggccacaaggtaaccgatgcaccgaagcttccgctgaacctgctcgacgcattgcgggaatacaatcgggacgaggagttgcaggaggccttgggacgagagttctccgcggcctatctgaaactcaagcaaggcgagtggaacacctattgttcgcaattcaccgaatgggaacaccaaaccacgctcgacgtgtag

SEQ ID NO: 8875 - protein, 435 aa, Rhizobium meliloti
MTLDLSTFAREKGVKYFMISYTDLFGGQRAKLVPAEAIADMQKGGAGFAGFATWFDLTPAHPDLFALPDASAVIQLPWKKDVAWVAADCIMDDAPVEQAPRVVLKKLVAEAAQEGLRVKTGVEPEFFLISPDGSKISDTFDTAEKPCYDQQAIMRRYDVIAEICDYMLELGWKPYQNDHEDANGQFEMNWEYDDALRTADKHSFFKFMVKSIAEKHGLRATFMPKPFKGLTGNGCHCHISVWDLAGEVNAFADNKAEFGLSAEGRHFLGGIMKHASALAAVTNPTVNSYKRINAPRTISGATWAPNSVTWTGNNRTHMVRVPGPGRFELRLPDGAVNPYLLQAIIIAAGLSGVRSKADPGRHYDIDMYKDGHKVTDAPKLPLNLLDALREYNRDEELQEALGREFSAAYLKLKQGEWNTYCSQFTEWEHQTTLDV

SEQ ID NO: 8876 - DNA, 1335 bp, Bacillus cereus
  CDS (1)..(1335): transl_table=11
atggctaggtacacaaaagaagatattttccgtttggcgaaagaagagaatgtaaagtatatacgtttacaatttacggaccttttaggagtaattaagaacgtagaaattccagtgagccaattaacaaaagctcttgataacaaaatgatgtttgatggatcttctattgaaggtttcgtacgtattgaagaatctgatatgtacttatatccagacttagatacttgggtgattttcccttggacagctgaaaaaggtaaagtagctcgattgatctgtgatatttacaatgcagatggcactccatttgaaggggatccacgtaacaacttaaaacgtgtattaaaagaaatggaagctttaggattctcagatttcaatcttggaccagagccagaattcttcctattcaaagtagatgaaaaaggaaatccaacattagaattaaacgataacggtggatacttcgaccttgcgccgatggatctaggggaaaactgtcgtcgtgatatcgttcttgaacttgaagaaatgggctttgaaattgaagcgtctcaccatgaggttgctccagggcagcacgaaattgacttcaaatatgcaaatgcaattcgttcatgtgatgacattcaaacattcaaacttgttgtaaaaacaattgctcgtaaacacggtttacacgcaacatttatgccaaaaccattatacggtgtgaacggttcaggtatgcactgtaacttatcactattcaaaaatggtgagaacgtattctatgatcaaaacggtgacttacaattaagtgatgatgctcgtcacttcatcgcaggtattttaaaacacgcaccagcatttacagcggtggcaaacccaactgtaaactcttacaagcgtttagtacctggatacgaagctccttgttacgtagcatggtctgcacaaaaccgtagtccattagtacgtatccctgcatctcgtggtattagtacacgcgtagaagtacgtagtgttgacccagctgcaaacccatatttagtaatggctacattattagcagcaggtcttgatggaattaaaaacaaattaactccaccagctgcagtagatcgtaacatctacgtaatgacaaaagaagagcgcgaagaagcaggtatcgttgacttaccagcaacattagcgcaagctttagttacattacaatctaacgaagtaattagtaacgcattaggagatcacttacttgagcacttcatcgaagcgaaagaatttgagtgggatatcttccgtacgcaagttcaccaatgggaacgcgatcaatatatgtctctttactaa

SEQ ID NO: 8877 - protein, 444 aa, Bacillus cereus; identical to SEQ ID NO: 1213

SEQ ID NO: 8878 - DNA, 1335 bp, Bacillus subtilis; identical to SEQ ID NO: 1210
  CDS (1)..(1335): transl_table=11

SEQ ID NO: 8879 - protein, 444 aa, Bacillus subtilis; identical to SEQ ID NO: 1211

SEQ ID NO: 8880 - DNA, 1320 bp, Thermotoga maritima
  CDS (1)..(1320): transl_table=11
atgacaattgagaccatcaaaagaatcatcgaagaggagaatgttcgattcatcaggctgcaattcaccgacatcaacgggaccttgaagaatttagagataacgccggatgtttttctcgaatcctgggaggacggaatcatgttcgacggttcatccatcgagggttttgtgagaatcgaagagtctgatatgtacctcaagcccgtcctcgacaccttcgccgttcttccgtggacggtcgatggtgcaaagagtgcaagagtcatctgtgacgtttacactccagatggtaaaccctttgagggagatccccgttacagactaagaagaatgatggaaaaagcagaacagctgggttacacaccgtatgcgggtcccgagatggaatttttcatccttcccatcaacgaaaaaggagaacctgttcctgagtttcttgaccatggaggatatttcgatcttctgccgctcagtaaagtcgaggagatcagaagggacatcgcgatagctctcgaaaagatggggatcactgttgaagcaacgcaccacgaagttgctccctcacagcacgaggtggacttcaggtacgacactttcctgagaaccgccgacaatgcccagaccgtgaaactcgtcatcaaaaccatggcaatcttccacggatatcatgcaaccttcatgcccaaacccttctacggtgtgaacggatcgggaatgcatgtccacatgagtcttttcaggggtgacaaaaatgccttctacgatcccgacgatcctcttgggctttctaaagaactcagatacttcgttggtggtatattgaagcacgccaaagctctcgcagccgtcacaaatcccacgataaacagctacaagagactcgttcccggttacgaagcgcccgtttacatctcctggtcagttggaaacagaagcgccctcatcagaattccaaaggcaagaggaaaagcgacaagattggagtacagatcacccgatccatcctgtaacatctatcttgccttcgcggctatcctcgcggcaggtctggacggtatcatcaacaaaatcgagcctcccgcgccggttgaagaaaacatttaccacatgacgtctgagagaagggaagaactcaacatagaatcgcttccaggatcactgaaagaggctgtcgaagaactcaagaaagacgatgttataatagatgcactgggagaacatatattcgaaaaatttgtggaggctgccgaaaaggattggaaggaattcagcacctacgttacaaactgggaactgcagcgctacttgtatctctga

SEQ ID NO: 8881 - protein, 439 aa, Thermotoga maritima
MTIETIKRIIEEENVRFIRLQFTDINGTLKNLEITPDVFLESWEDGIMFDGSSIEGFVRIEESDMYLKPVLDTFAVLPWTVDGAKSARVICDVYTPDGKPFEGDPRYRLRRMMEKAEQLGYTPYAGPEMEFFILPINEKGEPVPEFLDHGGYFDLLPLSKVEEIRRDIAIALEKMGITVEATHHEVAPSQHEVDFRYDTFLRTADNAQTVKLVIKTMAIFHGYHATFMPKPFYGVNGSGMHVHMSLFRGDKNAFYDPDDPLGLSKELRYFVGGILKHAKALAAVTNPTINSYKRLVPGYEAPVYISWSVGNRSALIRIPKARGKATRLEYRSPDPSCNIYLAFAAILAAGLDGIINKIEPPAPVEENIYHMTSERREELNIESLPGSLKEAVEELKKDDVIIDALGEHIFEKFVEAAEKDWKEFSTYVTNWELQRYLYL

SEQ ID NO: 8882 - DNA, 1419 bp, Escherichia coli; identical to SEQ ID NO: 1201
  CDS (1)..(1419): transl_table=11

SEQ ID NO: 8883 - protein, 472 aa, Escherichia coli; identical to SEQ ID NO: 1202

SEQ ID NO: 8884 - DNA, 25 bp, Artificial sequence
  primer
atgcatacagattcgaatggtggtc

SEQ ID NO: 8885 - DNA, 24 bp, Artificial sequence
  primer
ttacgcgtttttcaacatccactc

SEQ ID NO: 8886 - protein, 461 aa, Artificial sequence
  consensus sequence
  Variant (2)..(3): Xaa in position 2 to 3 is any amino acid
  Variant (5)..(6): Xaa in position 5 to 6 is any amino acid
  Variant (10)..(40): Xaa in position 10 to 40 is any amino acid
  Variant (41)..(59): Xaa in position 41 to 59 is any or no amino acid
  Variant (61)..(74): Xaa in position 61 to 74 is any amino acid
  Variant (76)..(89): Xaa in position 76 to 89 is any amino acid
  Variant (90)..(93): Xaa in position 90 to 93 is any or no amino acid
  Variant (95)..(99): Xaa in position 95 to 99 is any amino acid
  Variant (100)..(104): Xaa in position 100 to 104 is any or no amino acid
  Variant (107)..(108): Xaa in position 107 to 108 is any amino acid
  Variant (110)..(119): Xaa in position 110 to 119 is any amino acid
  Variant (121)..(125): Xaa in position 121 to 125 is any amino acid
  Variant (126)..(126): Xaa in position 126 is any or no amino acid
  Variant (128)..(128): Xaa in position 128 is any amino acid
  Variant (130)..(130): Xaa in position 130 is any amino acid
  Variant (133)..(133): Xaa in position 133 is any amino acid
  Variant (135)..(180): Xaa in position 135 to 180 is any amino acid
  Variant (181)..(195): Xaa in position 181 to 195 is any or no amino acid
  Variant (197)..(200): Xaa in position 197 to 200 is any amino acid
  Variant (202)..(202): Xaa in position 202 is any amino acid
  Variant (204)..(204): Xaa in position 204 is any amino acid
  Variant (206)..(215): Xaa in position 206 to 215 is any amino acid
  Variant (216)..(216): Xaa in position 216 is any or no amino acid
  Variant (218)..(222): Xaa in position 218 to 222 is any amino acid
  Variant (224)..(229): Xaa in position 224 to 229 is any amino acid
  Variant (231)..(232): Xaa in position 231 to 232 is any amino acid
  Variant (234)..(236): Xaa in position 234 to 236 is any amino acid
  Variant (238)..(238): Xaa in position 238 is any amino acid
  Variant (241)..(241): Xaa in position 241 is any amino acid
  Variant (244)..(248): Xaa in position 244 to 248 is any amino acid
  Variant (250)..(252): Xaa in position 250 to 252 is any amino acid
  Variant (254)..(254): Xaa in position 254 is any amino acid
  Variant (256)..(256): Xaa in position 256 is any amino acid
  Variant (258)..(263): Xaa in position 258 to 263 is any amino acid
  Variant (264)..(265): Xaa in position 264 to 265 is any or no amino acid
  Variant (267)..(281): Xaa in position 267 to 281 is any amino acid
  Variant (282)..(288): Xaa in position 282 to 288 is any or no amino acid
  Variant (290)..(302): Xaa in position 290 to 302 is any amino acid
  Variant (304)..(305): Xaa in position 304 to 305 is any amino acid
  Variant (311)..(317): Xaa in position 311 to 317 is any amino acid
  Variant (318)..(323): Xaa in position 318 to 323 is any or no amino acid
  Variant (325)..(328): Xaa in position 325 to 328 is any amino acid
  Variant (331)..(332): Xaa in position 331 to 332 is any amino acid
  Variant (335)..(338): Xaa in position 335 to 338 is any amino acid
  Variant (340)..(340): Xaa in position 340 is any amino acid
  Variant (342)..(343): Xaa in position 342 to 343 is any amino acid
  Variant (344)..(350): Xaa in position 344 to 350 is any or no amino acid
  Variant (352)..(352): Xaa in position 352 is any amino acid
  Variant (354)..(354): Xaa in position 354 is any amino acid
  Variant (356)..(359): Xaa in position 356 to 359 is any amino acid
  Variant (361)..(361): Xaa in position 361 is any amino acid
  Variant (366)..(367): Xaa in position 366 to 367 is any amino acid
  Variant (369)..(370): Xaa in position 369 to 370 is any amino acid
  Variant (372)..(376): Xaa in position 372 to 376 is any amino acid
  Variant (378)..(396): Xaa in position 378 to 396 is any amino acid
  Variant (397)..(408): Xaa in position 397 to 408 is any or no amino acid
  Variant (410)..(414): Xaa in position 410 to 414 is any amino acid
  Variant (416)..(439): Xaa in position 416 to 439 is any amino acid
  Variant (440)..(440): Xaa in position 440 is any or no amino acid
  Variant (442)..(443): Xaa in position 442 to 443 is any amino acid
  Variant (445)..(455): Xaa in position 445 to 455 is any amino acid
  Variant (457)..(460): Xaa in position 457 to 460 is any amino acid
DXXGXXRGKXXXXXXXXXXXXXXXXXXXXXXXXXXXXXXXXXXXXXXXXXXXXXXXXXXDXXXXXXXXXXXXXXWXXXXXXXXXXXXXXXXXXGXXXXXXXXXXPRXXLXXXXXXXXXXGXXXXXXAXEXEFXLXXXXXXXXXXXXXXXXXXXXXXXXXXXXXXXXXXXXXXXXXXXXXXXXXXXXXXXXXXXXXEXXXXQXEXNXXXXXXXXXXXDXXXXXKXXXXXXAXXHXXXAXFMXKPXXXXXGXXXHXHXSXXXXXXXXNXXXXXXXXXXXXXXXXXXXXXXGXXXXXXXXXXXXXPXXNSYRRXXXXXXXXXXXXXPXXXXWGXXNRXXXXRXPXXXXXXXXXRXEXRXXXXDXNPYLXXAXXLXXXXXGXXXXXXXXXXXXXXXXXXXXXXXXXXXXXXXPXXXXXAXXXXXXXXXXXXXXXXXXXXXXXXXKXXEXXXXXXXXXXXEXXXXL

SEQ ID NO: 8887 - protein, 42 aa, Artificial sequence
  protein pattern
  Variant (2)..(6): Xaa in position 2 to 6 is any amino acid
  Variant (7)..(7): Xaa in position 7 is any or no amino acid
  Variant (9)..(13): Xaa in position 9 to 13 is any amino acid
  Variant (14)..(14): Xaa in position 14 is any or no amino acid
  Variant (16)..(21): Xaa in position 16 to 21 is any amino acid
  Variant (22)..(22): Xaa in position 22 is Ala, Cys, Ser or Thr
  Variant (23)..(23): Xaa in position 23 is Cys, Ser or Thr
  Variant (24)..(24): Xaa in position 24 is any amino acid
  Variant (25)..(25): Xaa in position 25 is Leu or Met
  Variant (26)..(26): Xaa in position 26 is Ala, Gly, Pro or Ser
  Variant (28)..(28): Xaa in position 28 is Ile or Pro
  Variant (29)..(33): Xaa in position 29 to 33 is any amino acid
  Variant (35)..(35): Xaa in position 35 is Asn, Ser or Thr
  Variant (36)..(36): Xaa in position 36 is Ala or Gly
  Variant (37)..(37): Xaa in position 37 is any amino acid
  Variant (39)..(39): Xaa in position 39 is any amino acid
  Variant (41)..(41): Xaa in position 41 is any amino acid
DXXXXXXRXXXXXXAXXXXXXXXXXXKXXXXXXGXXXHXHXS

SEQ ID NO: 8888 - protein, 18 aa, Artificial sequence
  protein pattern
  Variant (2)..(2): Xaa in position 2 is Phe, Ile, Leu or Val
  Variant (4)..(4): Xaa in position 4 is any amino acid
  Variant (5)..(5): Xaa in position 5 is His or Arg
  Variant (6)..(6): Xaa in position 6 is any amino acid
  Variant (7)..(7): Xaa in position 7 is Ala, Gly, Pro or Ser
  Variant (8)..(8): Xaa in position 8 is Asp, Gly or Ser
  Variant (9)..(9): Xaa in position 9 is any amino acid
  Variant (10)..(10): Xaa in position 10 is Ala, Asp, Gly or Ser
  Variant (11)..(11): Xaa in position 11 is Ala, Cys, Thr or Val
  Variant (16)..(17): Xaa in position 16 to 17 is any amino acid
RXEXXXXXXXXNPYLXXA

SEQ ID NO: 8889 - protein, 18 aa, Artificial sequence
  protein pattern
  Variant (2)..(5): Xaa in position 2 to 5 is any amino acid
  Variant (6)..(6): Xaa in position 6 is Trp or Tyr
  Variant (7)..(7): Xaa in position 7 is Ala, Gly, Ser or Thr
  Variant (8)..(8): Xaa in position 8 is any amino acid
  Variant (9)..(9): Xaa in position 9 is Asp, Glu, Gly, Asn or Gln
  Variant (12)..(14): Xaa in position 12 to 14 is any amino acid
  Variant (15)..(15): Xaa in position 15 is Phe, Ile, Leu or Val
  Variant (17)..(17): Xaa in position 17 is Ile or Val
PXXXXXXXXNRXXXXRXP

SEQ ID NO: 8890 - protein, 14 aa, Artificial sequence
  protein pattern
  Variant (2)..(3): Xaa in position 2 to 3 is any amino acid
  Variant (4)..(4): Xaa in position 4 is Ile or Pro
  Variant (5)..(6): Xaa in position 5 to 6 is any amino acid
  Variant (7)..(7): Xaa in position 7 is Ala, Gly or Ser
  Variant (8)..(8): Xaa in position 8 is any amino acid
  Variant (10)..(10): Xaa in position 10 is any amino acid
  Variant (13)..(13): Xaa in position 13 is Phe, His or Tyr
  Variant (14)..(14): Xaa in position 14 is Ile, Leu or Val
GXXXXXXXEXEFXX

SEQ ID NO: 8891 - DNA, 336 bp, Escherichia coli
  CDS (1)..(336): transl_table=11
atgaaaaaacaaattgagggtatgacaatgaaaaaagtattagctctggttgttgccgctgctatgggtctgtcttctgccgcctttgctgcagagactacgaccacacctgctccgactgcgacgaccaccaaagcagcgccggcgaaaactacacatcataaaaaacagcataaagcagcacctgcccagaaagcgcaggcggctaaaaagcatcataaaaatacgaaagctgaacagaaagcccctgaacaaaaagcgcaggcagcgaagaaacacgccaagaaacacagccatcagcaaccggcaaaacctgctgcacaacccgcagcgtaa

SEQ ID NO: 8892 - protein, 111 aa, Escherichia coli
MKKQIEGMTMKKVLALVVAAAMGLSSAAFAAETTTTPAPTATTTKAAPAKTTHHKKQHKAAPAQKAQAAKKHHKNTKAEQKAPEQKAQAAKKHAKKHSHQQPAKPAAQPAA

SEQ ID NO: 8893 - DNA, 336 bp, Escherichia coli O157:H7 EDL933
  CDS (1)..(336): transl_table=11
atgaaaaaacaaattgagggtatgacaatgaaaaaagtattagctctggttgttgccgctgctatgggtctgtcttctgccgcctttgctgcagagactgcgaccacacctgctccgactgcgacgaccaccaaagcagcgccggcgaaaactacacatcataaaaaacagcataaagcagcacctgcccagaaagcgcaggcggctaaaaagcatcataaaaatacgaaagctgaacagaaagccccagaacaaaaagcgcaggcagcgaagaaacacgccaagaaacacagccatcagcaaccggcaaaacctgctgcacaacccgcagcgtaa

SEQ ID NO: 8894 - protein, 111 aa, Escherichia coli O157:H7 EDL933
MKKQIEGMTMKKVLALVVAAAMGLSSAAFAAETATTPAPTATTTKAAPAKTTHHKKQHKAAPAQKAQAAKKHHKNTKAEQKAPEQKAQAAKKHAKKHSHQQPAKPAAQPAA

SEQ ID NO: 8895 - DNA, 372 bp, Yersinia pestis KIM
  CDS (1)..(372): transl_table=11
ttgaaaatgaaaaaagtattagcattaatggttgccgccaccctgggtctatcttcagttgctttcgctgctgacacaacagcaacggctacacctgcggcaaccagtacgacagccacagttgctgctcaaactaaagcaactcaacatcaaaaacataaagtgacgaagaaaaccacagaacagaaagcacaggctgctaaaaaacacgagaaaaaagcatcagttcaaaaaacacccgtgcagaaagcacaagcagcgaaaaagcatgtgaaaaaagcatcagttcaaaaagcgcccgtgcaaaaagcacaggcagcgaaaaagcaccataaaacggctaaaaaaccagtagcggcacccgcagcataa

SEQ ID NO: 8896 - protein, 123 aa, Yersinia pestis KIM
MKMKKVLALMVAATLGLSSVAFAADTTATATPAATSTTATVAAQTKATQHQKHKVTKKTTEQKAQAAKKHEKKASVQKTPVQKAQAAKKHVKKASVQKAPVQKAQAAKKHHKTAKKPVAAPAA

SEQ ID NO: 8897 - DNA, 309 bp, Yersinia pestis KIM
  CDS (1)..(309): transl_table=11
atgaaaacagtattgactctgattgttgctgcaaccctgagtttattctctgttgcttttgcagccgacacagtagtaccgcaaaccacaccaacggcgacagcaccagcaccagcaccagcaccagcaccagcaccagcagtgcataacgcatcagctaaaaccatgcaccacaaaaaagcacaaaaaccaaacacaataaaaaatacgcataaaaccgcccctgaacaaaaagcccaggcagcccaaaaacaccataaagcggcacatagccacaaagcacctaccgtagcaccagcggctaaatag

SEQ ID NO: 8898 - protein, 102 aa, Yersinia pestis KIM
MKTVLTLIVAATLSLFSVAFAADTVVPQTTPTATAPAPAPAPAPAPAVHNASAKTMHHKKAQKPNTIKNTHKTAPEQKAQAAQKHHKAAHSHKAPTVAPAAK

SEQ ID NO: 8899 - DNA, 336 bp, Shigella flexneri 2a str. 301; identical to SEQ ID NO: 1370
  CDS (1)..(336): transl_table=11

SEQ ID NO: 8900 - protein, 111 aa, Shigella flexneri 2a str. 301; identical to SEQ ID NO: 1371

SEQ ID NO: 8901 - DNA, 336 bp, Escherichia coli CFT073
  CDS (1)..(336): transl_table=11
atgaaaaaacaaattgagggtatgacaatgaaaaaagtattagctctggttgttgccgctgctatgggtctgtcttctgctgcctttgctgcagagactgcgaccacacctgctccgactgcgacgaccaccaaagcagcgcctgcgaaaaccacacatcataaaaaacagcataaagcagcacctgcccagaaagcgcaggcggctaaaaagcatcataaaaatgccaaagctgaacagaaagctcctgaacaaaaagcgcaggcagcgaagaaacacgccaagaaacacagccatcagcaaccggcaaaacctgctgcacaacccgcagcgtaa

SEQ ID NO: 8902 - protein, 111 aa, Escherichia coli CFT073
MKKQIEGMTMKKVLALVVAAAMGLSSAAFAAETATTPAPTATTTKAAPAKTTHHKKQHKAAPAQKAQAAKKHHKNAKAEQKAPEQKAQAAKKHAKKHSHQQPAKPAAQPAA

SEQ ID NO: 8903 - DNA, 282 bp, Salmonella enterica subsp. enterica serovar Typhi Ty2
  CDS (1)..(282): transl_table=11
ttgaatgaaaaccaaatcgagggtatcaaaatgaaaaaagtattagctctggttgttgccgctgcaatgggtctctcttccgcagcattcgcggctgagactgcaacgcctgcaaaaaccgcagcgcctgccaaaacaacccagaccacccagcaccacaaaaaacagcataaaaaaaccgttgagcaaaaagcgcaggcggctaaaaagcaccagaaaaaagatggcaaaaaagccccagccaaatctacgtcaaaaacaacttcgcaaccagctgcgtaa

SEQ ID NO: 8904 - protein, 93 aa, Salmonella enterica subsp. enterica serovar Typhi Ty2
MNENQIEGIKMKKVLALVVAAAMGLSSAAFAAETATPAKTAAPAKTTQTTQHHKKQHKKTVEQKAQAAKKHQKKDGKKAPAKSTSKTTSQPAA

SEQ ID NO: 8905 - DNA, 297 bp, Yersinia pestis biovar Microtus str. 91001
  CDS (1)..(297): transl_table=11
atgaaaacagtattgactctgattgttgctgcaaccctgagtttattctctgttgcttttgcagccgacacagtagtaccgcaaaccacaccaacggcgacagcaccagcaccagcaccagcaccagcagtgcataacgcatcagctaaaaccatgcaccacaaaaaagcacaaaaaccaaacacaataaaaaatacgcataaaaccgcccctgaacaaaaagcccaggcagcccaaaaacaccataaagcggcacatagccacaaagcacctaccgtagcaccagcggctaaatag

SEQ ID NO: 8906 - protein, 98 aa, Yersinia pestis biovar Microtus str. 91001
MKTVLTLIVAATLSLFSVAFAADTVVPQTTPTATAPAPAPAPAVHNASAKTMHHKKAQKPNTIKNTHKTAPEQKAQAAQKHHKAAHSHKAPTVAPAAK

SEQ ID NO: 8907 - DNA, 366 bp, Erwinia carotovora subsp. atroseptica SCRI1043
  CDS (1)..(366): transl_table=11
atgatgaataaagtattagttatgatcgcaggtgctgcactgggtctgtcctctgtagcctttgccgcggataccgtaaccagcgcacctgttcagccttcggcgaccactaccacctctgctccggctaaagccgttcatcataaaaagcagatgaagaaagctaaaccagccgctgaacagaaagcgcaagcggccaagaaacatgtgaaaaaagctaaaccagcccctgcacagaaagcgcaggctgctaagaaacatgtgaaaaaagctaaaccagcccctgcacagaaagcgcaagctgctaagaaacacgtgaagaaagctaaaacggtaaaacctgctgataccacgccagcagcgtaa

SEQ ID NO: 8908 - protein, 121 aa, Erwinia carotovora subsp. atroseptica SCRI1043
MMNKVLVMIAGAALGLSSVAFAADTVTSAPVQPSATTTTSAPAKAVHHKKQMKKAKPAAEQKAQAAKKHVKKAKPAPAQKAQAAKKHVKKAKPAPAQKAQAAKKHVKKAKTVKPADTTPAA

SEQ ID NO: 8909 - DNA, 297 bp, Yersinia pseudotuberculosis IP 32953
  CDS (1)..(297): transl_table=11
atgaaaacagtattggctctgattgttgctgcaaccctgagtttatcctctgttgcttttgcagccgacacagtagtaccgcaaaccacaccaacggcgacagcaccagcaccagcaccagcaccagcagtgcataacgcatcagctaaaaccatgcaccacaaaaaagcacaaaaaccaaacacaataaaaaatacgcataaaaccgcccctgaacaaaaagcccaggcagcccaaaaacaccataaagcggcacatagccacaaagcacctaccgtagtaccagcggctaaatag

SEQ ID NO: 8910 - protein, 98 aa, Yersinia pseudotuberculosis IP 32953
MKTVLALIVAATLSLSSVAFAADTVVPQTTPTATAPAPAPAPAVHNASAKTMHHKKAQKPNTIKNTHKTAPEQKAQAAQKHHKAAHSHKAPTVVPAAK

SEQ ID NO: 8911 - DNA, 366 bp, Yersinia pseudotuberculosis IP 32953
  CDS (1)..(366): transl_table=11
atgaaaaaagtattagcattaatggttgccgccaccctgggtctatcttcagttgctttcgctgctgacacaacagcaacggctacacctgcggcaaccagtacgacagccactgttgctgctcaaactaaagcaactcaacatcaaaaacataaagtgacgaagaaaaccacagaacagaaagcacaggctgctaaaaaacacgagaaaaaagcatcagttcaaaaagcacccgtgcagaaagcacaagcagcgaaaaagcatgtgaaaaaagcatcagttcaaaaagcgcccgtgcaaaaagcacaggcagcgaaaaagcaccataaaacggctaaaaaaccagtagcggcacccgcagcataa

SEQ ID NO: 8912 - protein, 121 aa, Yersinia pseudotuberculosis IP 32953
MKKVLALMVAATLGLSSVAFAADTTATATPAATSTTATVAAQTKATQHQKHKVTKKTTEQKAQAAKKHEKKASVQKAPVQKAQAAKKHVKKASVQKAPVQKAQAAKKHHKTAKKPVAAPAA

SEQ ID NO: 8913 - DNA, 285 bp, Yersinia pestis
  CDS (1)..(285): transl_table=11
atgaaaacagtattgactctgattgttgctgcaaccctgagtttattctctgttgcttttgcagccgacacagtagtaccgcaaaccacaccaacggcgacagcaccagcaccagcagtgcataacgcatcagctaaaaccatgcaccacaaaaaagcacaaaaaccaaacacaataaaaaatacgcataaaaccgcccctgaacaaaaagcccaggcagcccaaaaacaccataaagcggcacatagccacaaagcacctaccgtagcaccagcggctaaatag

SEQ ID NO: 8914 - protein, 94 aa, Yersinia pestis
MKTVLTLIVAATLSLFSVAFAADTVVPQTTPTATAPAPAVHNASAKTMHHKKAQKPNTIKNTHKTAPEQKAQAAQKHHKAAHSHKAPTVAPAAK

SEQ ID NO: 8915 - DNA, 366 bp, Yersinia pestis
  CDS (1)..(366): transl_table=11
atgaaaaaagtattagcattaatggttgccgccaccctgggtctatcttcagttgctttcgctgctgacacaacagcaacggctacacctgcggcaaccagtacgacagccacagttgctgctcaaactaaagcaactcaacatcaaaaacataaagtgacgaagaaaaccacagaacagaaagcacaggctgctaaaaaacacgagaaaaaagcatcagttcaaaaaacacccgtgcagaaagcacaagcagcgaaaaagcatgtgaaaaaagcatcagttcaaaaagcgcccgtgcaaaaagcacaggcagcgaaaaagcaccataaaacggctaaaaaaccagtagcggcacccgcagcataa

SEQ ID NO: 8916 - protein, 121 aa, Yersinia pestis
MKKVLALMVAATLGLSSVAFAADTTATATPAATSTTATVAAQTKATQHQKHKVTKKTTEQKAQAAKKHEKKASVQKTPVQKAQAAKKHVKKASVQKAPVQKAQAAKKHHKTAKKPVAAPAA

SEQ ID NO: 8917 - DNA, 309 bp, Escherichia coli; identical to SEQ ID NO: 1368
  CDS (1)..(309): transl_table=11

SEQ ID NO: 8918 - protein, 102 aa, Escherichia coli; identical to SEQ ID NO: 1369

SEQ ID NO: 8919 - DNA, 541 bp, Enterobacter cloacae
  CDS (197)..(502): transl_table=11
tgaatatccgctacttccgcgaacacctgacgtcccgctacctgtaaccgaacgcgccggggggccgccccggcgttgtacatatggttacacgccgataccaatcactcacggaaaccccgaatttacagggatatagttatttcaacggccccgcagtggggttaaatgaaaaaccaaattcgagggtatgaaaatgaaaaaagtattagctctggttgttgccgctgctatgggtctgtcttccgctgcattcgcggctgaaactaccgccaccgcagcgcctgcggcatccaccgctgctccggccaaaacggttcaccataaaaaacatcacaaagcggctaaaccagcggcagaacagaaagcgcaggccgcgaaaaagcaccataaaaaagcggcaaaacctgcggtagagcagaaagcccaggcggctaaaaagcatcacaaaaaagcagcaaaacacgaagcggctaaacctgctgcacagccagcagcgtaagagtacaagcttaaccgtgccttcggggcacgttggtaa

SEQ ID NO: 8920 - protein, 101 aa, Enterobacter cloacae
MKKVLALVVAAAMGLSSAAFAAETTATAAPAASTAAPAKTVHHKKHHKAAKPAAEQKAQAAKKHHKKAAKPAVEQKAQAAKKHHKKAAKHEAAKPAAQPAA

SEQ ID NO: 8921 - DNA, 734 bp, Klebsiella pneumoniae
  CDS (212)..(631): transl_table=11
ttaatagccgctacttccgcgagcacctgaccactcgctacctgtaatcatacgcgccgggctacccggcgcgtcctgtcgttcctgccttgtacattcggttacacgccgataccaaacactcacggaaagctcgaaaagacaagcatatagtgatttcaccggccccgcagtggggttgaaattaagaaaacttttcgaggatatcagaatgaaaaaagtattagctctggtcgttgccgctgctatgggtctctcttccgccgctttcgctgctgacgcagtaagcaccactcaggcaccggctgccacccacagcacggctgccaagaccacccatcacaaaaaacaccacaaagccgcggcaaaaccggccgcagagcagaaagctcaggctgccaaaaaacacaaaaaagcagaagctaaaccagccgctgctcagaaagcccaggccgctaaaaaacacaaaaaagtagcagctaaaccagctgctccgcagaaagctcaggcggcgaaaaagcatcacaaagctgcggctaaaccggcagcccagaaagcgcaggcagcgaaaaaacaccacaaaaccactaaacaccaggccgctaaaccgactgcacagccggcagcataattcctcccggtgaaccaaccttcttaataatcggcgctgtttcagcgccgttttttctggagagcactatgctgcggcgctatcgttttgagctcatcctgat

SEQ ID NO: 8922 - protein, 139 aa, Klebsiella pneumoniae
MKKVLALVVAAAMGLSSAAFAADAVSTTQAPAATHSTAAKTTHHKKHHKAAAKPAAEQKAQAAKKHKKAEAKPAAAQKAQAAKKHKKVAAKPAAPQKAQAAKKHHKAAAKPAAQKAQAAKKHHKTTKHQAAKPTAQPAA

SEQ ID NO: 8923 - DNA, 252 bp, Salmonella typhi
  CDS (1)..(252): transl_table=11
atgaaaaaagtattagctctggttgttgccgctgcaatgggtctctcttccgcagcattcgcggctgagactgcaacgcctgcaaaaaccgcagcgcctgccaaaacaacccagaccacccagcaccacaaaaaacagcataaaaaaaccgttgagcaaaaagcgcaggcggctaaaaagcaccagaaaaaagatggcaaaaaagccccagccaaatctacgtcaaaaacaacttcgcaaccagctgcgtaa

SEQ ID NO: 8924 - protein, 83 aa, Salmonella typhi
MKKVLALVVAAAMGLSSAAFAAETATPAKTAAPAKTTQTTQHHKKQHKKTVEQKAQAAKKHQKKDGKKAPAKSTSKTTSQPAA

SEQ ID NO: 8925 - DNA, 285 bp, Salmonella typhimurium
  CDS (37)..(285): transl_table=11
gtggggttgaatgaaaaccaaatcgagggtatcaaaatgaaaaaagtattagctctggttgttgccgctgcaatgggtctctcttccgcagcattcgcggctgagactgcaacgcctgcgaaaaccgcagcgcctgccaaaacaacccagaccacccagcaccacaaaaaacagcataagaaaaccgttgagcaaaaagcgcaggcggctaaaaagcaccagaaaaaaggtggtaaagcgccagccaaaaccacgtcaaaaccaactactcaaccggctgcgtaa

SEQ ID NO: 8926 - protein, 82 aa, Salmonella typhimurium
MKKVLALVVAAAMGLSSAAFAAETATPAKTAAPAKTTQTTQHHKKQHKKTVEQKAQAAKKHQKKGGKAPAKTTSKPTTQPAA

SEQ ID NO: 8927 - DNA, 309 bp, Shigella flexneri
  CDS (1)..(309): transl_table=11
atgaaaaaagtattagctctggttgttgccgctgctatgggtctgtcttctgccgcctttgctgcagagactgcgaccacacctgctccgactgcgacgaccaccaaagcagcgccagcgaaaactacacatcataaaaaacagcataaagcagcacctgcccagaaagcgcaggcggctaaaaagcatcataaaaatacgaaagctgaacagaaagcccctgaacaaaaagcgcaggcagcgaagaaacacgccgggaaacacggccatcagcaaccggcaaaacctgctgcacaacccgcagcgtaa

SEQ ID NO: 8928 - protein, 102 aa, Shigella flexneri
MKKVLALVVAAAMGLSSAAFAAETATTPAPTATTTKAAPAKTTHHKKQHKAAPAQKAQAAKKHHKNTKAEQKAPEQKAQAAKKHAGKHGHQQPAKPAAQPAA

SEQ ID NO: 8929 - DNA, 26 bp, Artificial sequence
  primer
atgaaaaaacaaattgagggtatgac

SEQ ID NO: 8930 - DNA, 21 bp, Artificial sequence
  primer
ttacgctgcgggttgtgcagc

SEQ ID NO: 8931 - protein, 148 aa, Artificial sequence
  consensus sequence
  Variant (8)..(8): Xaa in position 8 is any amino acid
  Variant (12)..(13): Xaa in position 12 to 13 is any amino acid
  Variant (18)..(18): Xaa in position 18 is any amino acid
  Variant (23)..(23): Xaa in position 23 is any amino acid
  Variant (25)..(30): Xaa in position 25 to 30 is any amino acid
  Variant (31)..(33): Xaa in position 31 to 33 is any or no amino acid
  Variant (35)..(37): Xaa in position 35 to 37 is any amino acid
  Variant (38)..(45): Xaa in position 38 to 45 is any or no amino acid
  Variant (47)..(49): Xaa in position 47 to 49 is any amino acid
  Variant (51)..(55): Xaa in position 51 to 55 is any amino acid
  Variant (57)..(59): Xaa in position 57 to 59 is any amino acid
  Variant (60)..(83): Xaa in position 60 to 83 is any or no amino acid
  Variant (93)..(93): Xaa in position 93 is any amino acid
  Variant (95)..(98): Xaa in position 95 to 98 is any amino acid
  Variant (99)..(101): Xaa in position 99 to 101 is any or no amino acid
  Variant (104)..(104): Xaa in position 104 is any amino acid
  Variant (111)..(111): Xaa in position 111 is any amino acid
  Variant (114)..(115): Xaa in position 114 to 115 is any amino acid
  Variant (116)..(141): Xaa in position 116 to 141 is any or no amino acid
  Variant (143)..(145): Xaa in position 143 to 145 is any amino acid
MKKVLALXVAAXXGLSSXAFAAXTXXXXXXXXXAXXXXXXXXXXXAXXXHXXXXXKXXXXXXXXXXXXXXXXXXXXXXXXXXXQKAQAAKKHXKXXXXXXXAPXQKAQAAXKHXXXXXXXXXXXXXXXXXXXXXXXXXXXXPXXXPAA

SEQ ID NO: 8932 - protein, 27 aa, Artificial sequence
  protein pattern
  Variant (3)..(3): Xaa in position 3 is any amino acid
  Variant (8)..(8): Xaa in position 8 is any or no amino acid
  Variant (12)..(14): Xaa in position 12 to 14 is any amino acid
  Variant (18)..(18): Xaa in position 18 is any or no amino acid
  Variant (23)..(23): Xaa in position 23 is Asp or Glu
  Variant (24)..(24): Xaa in position 24 is Ala or Thr
  Variant (25)..(25): Xaa in position 25 is Ala, Thr or Val
  Variant (26)..(26): Xaa in position 26 is Ala, Ser, Thr or Val
  Variant (27)..(27): Xaa in position 27 is Pro or Thr
MKXVLALXVAAXXXLSSXAFAAXXXXX

SEQ ID NO: 8933 - protein, 17 aa, Artificial sequence
  protein pattern
  Variant (2)..(5): Xaa in position 2 to 5 is any amino acid
  Variant (6)..(6): Xaa in position 6 is Ala, Pro or Thr
  Variant (7)..(7): Xaa in position 7 is Ala, Pro, Thr or Val
  Variant (8)..(8): Xaa in position 8 is Ala or Glu
KXXXXXXXQKAQAAKKH

SEQ ID NO: 8934 - DNA, 639 bp, Escherichia coli K12
  CDS (1)..(639): transl_table=11
atgttcgctgaatacggggttctgaattactggacctatctggttggggccatttttattgtgttggtgccagggccaaataccctgtttgtactcaaaaatagcgtcagtagcggtatgaaaggcggttatcttgcggcctgcggtgtatttattggcgatgcggtattgatgtttctggcatgggctggagtggcgacattaattaagaccaccccgatattattcaacattgtacgttatcttggtgcgttttatttgctctatctggggagtaaaattctttacgcgaccctgaagggtaaaaatagcgaggccaaatccgatgagccccaatacggtgctatttttaaacgcgcgttaattttgagcctgactaatccgaaagccattttgttctatgtgtcgtttttcgtacagtttatcgatgttaatgccccacatacgggaatttcattctttattctggcggcgacgctggaactggtgagtttctgctatttgagcttcctgattatatctggtgcttttgtcacgcagtacatacgtaccaaaaagaaactggctaaagttggcaactcactgattggtttgatgttcgtgggtttcgctgcccgactggcgacgctgcaatcctga

SEQ ID NO: 8935 - protein, 212 aa, Escherichia coli K12; identical to SEQ ID NO: 2157

SEQ ID NO: 8936 - DNA, 639 bp, Salmonella typhimurium LT2; identical to SEQ ID NO: 2158
  CDS (1)..(639): transl_table=11

SEQ ID NO: 8937 - protein, 212 aa, Salmonella typhimurium LT2; identical to SEQ ID NO: 2159

SEQ ID NO: 8938 - DNA, 663 bp, Ralstonia solanacearum GMI1000; identical to SEQ ID NO: 2160
  CDS (1)..(663): transl_table=11

SEQ ID NO: 8939 - protein, 220 aa, Ralstonia solanacearum GMI1000; identical to SEQ ID NO: 2161

SEQ ID NO: 8940 - DNA, 768 bp, Pseudomonas putida KT2440; identical to SEQ ID NO: 2162
  CDS (1)..(768): transl_table=11

SEQ ID NO: 8941 - protein, 255 aa, Pseudomonas putida KT2440; identical to SEQ ID NO: 2163

SEQ ID NO: 8942 - DNA, 654 bp, Streptomyces avermitilis MA-4680; identical to SEQ ID NO: 2164
  CDS (1)..(654): transl_table=11

SEQ ID NO: 8943 - protein, 217 aa, Streptomyces avermitilis MA-4680; identical to SEQ ID NO: 2165

SEQ ID NO: 8944 - DNA, 651 bp, Chromobacterium violaceum ATCC 12472; identical to SEQ ID NO: 2166
  CDS (1)..(651): transl_table=11

SEQ ID NO: 8945 - protein, 216 aa, Chromobacterium violaceum ATCC 12472; identical to SEQ ID NO: 2167

SEQ ID NO: 8946 - DNA, 651 bp, Acinetobacter sp. ADP1; identical to SEQ ID NO: 2168
  CDS (1)..(651): transl_table=11

SEQ ID NO: 8947 - protein, 216 aa, Acinetobacter sp. ADP1; identical to SEQ ID NO: 2169

SEQ ID NO: 8948 - DNA, 663 bp, Burkholderia mallei ATCC 23344; identical to SEQ ID NO: 2170
  CDS (1)..(663): transl_table=11

SEQ ID NO: 8949 - protein, 220 aa, Burkholderia mallei ATCC 23344; identical to SEQ ID NO: 2171

SEQ ID NO: 8950 - DNA, 684 bp, Ralstonia eutropha JMP134; identical to SEQ ID NO: 2172
  CDS (1)..(684): transl_table=11

SEQ ID NO: 8951 - protein, 227 aa, Ralstonia eutropha JMP134; identical to SEQ ID NO: 2173

SEQ ID NO: 8952 - DNA, 660 bp, Burkholderia sp. 383; identical to SEQ ID NO: 2174
  CDS (1)..(660): transl_table=11

SEQ ID NO: 8953 - protein, 219 aa, Burkholderia sp. 383; identical to SEQ ID NO: 2175

SEQ ID NO: 8954 - DNA, 660 bp, Burkholderia thailandensis E264; identical to SEQ ID NO: 2176
  CDS (1)..(660): transl_table=11

SEQ ID NO: 8955 - protein, 219 aa, Burkholderia thailandensis E264; identical to SEQ ID NO: 2177

SEQ ID NO: 8956 - DNA, 672 bp, Ralstonia metallidurans CH34; identical to SEQ ID NO: 2178
  CDS (1)..(672): transl_table=11

SEQ ID NO: 8957 - protein, 223 aa, Ralstonia metallidurans CH34; identical to SEQ ID NO: 2179

SEQ ID NO: 8958 - DNA, 615 bp, Rubrivivax gelatinosus PM1; identical to SEQ ID NO: 2180
  CDS (1)..(615)

SEQ ID NO: 8959 - protein, 204 aa, Rubrivivax gelatinosus PM1; identical to SEQ ID NO: 2181

SEQ ID NO: 8960 - DNA, 714 bp, Burkholderia vietnamiensis G4; identical to SEQ ID NO: 2182
  CDS (1)..(714): transl_table=11

SEQ ID NO: 8961 - protein, 237 aa, Burkholderia vietnamiensis G4; identical to SEQ ID NO: 2183

SEQ ID NO: 8962 - DNA, 618 bp, Pseudomonas putida; identical to SEQ ID NO: 2184
  CDS (1)..(618): transl_table=11

SEQ ID NO: 8963 - protein, 205 aa, Pseudomonas putida; identical to SEQ ID NO: 2185

SEQ ID NO: 8964 - DNA, 651 bp, Pseudomonas aeruginosa; identical to SEQ ID NO: 2186
  CDS (1)..(651)

SEQ ID NO: 8965 - protein, 216 aa, Pseudomonas aeruginosa; identical to SEQ ID NO: 2187

SEQ ID NO: 8966 - DNA, 24 bp, Artificial sequence
  primer
atgttcgctgaatacggggttctg

SEQ ID NO: 8967 - DNA, 23 bp, Artificial sequence
  primer
ttaggattgcagcgtcgccagtc

SEQ ID NO: 8968 - protein, 226 aa, Artificial sequence; identical to SEQ ID NO: 2190
  consensus sequence
  Variant (2)..(3): Xaa in position 2 to 3 is any amino acid
  Variant (5)..(6): Xaa in position 5 to 6 is any amino acid
  Variant (8)..(10): Xaa in position 8 to 10 is any amino acid
  Variant (12)..(16): Xaa in position 12 to 16 is any amino acid
  Variant (18)..(18): Xaa in position 18 is any amino acid
  Variant (23)..(25): Xaa in position 23 to 25 is any amino acid
  Variant (27)..(33): Xaa in position 27 to 33 is any amino acid
  Variant (35)..(37): Xaa in position 35 to 37 is any amino acid
  Variant (39)..(41): Xaa in position 39 to 41 is any amino acid
  Variant (43)..(43): Xaa in position 43 is any amino acid
  Variant (46)..(47): Xaa in position 46 to 47 is any amino acid
  Variant (50)..(51): Xaa in position 50 to 51 is any amino acid
  Variant (54)..(54): Xaa in position 54 is any amino acid
  Variant (56)..(57): Xaa in position 56 to 57 is any amino acid
  Variant (62)..(62): Xaa in position 62 is any amino acid
  Variant (65)..(67): Xaa in position 65 to 67 is any amino acid
  Variant (69)..(70): Xaa in position 69 to 70 is any amino acid
  Variant (72)..(73): Xaa in position 72 to 73 is any amino acid
  Variant (75)..(77): Xaa in position 75 to 77 is any amino acid
  Variant (80)..(80): Xaa in position 80 is any amino acid
  Variant (83)..(85): Xaa in position 83 to 85 is any amino acid
  Variant (87)..(89): Xaa in position 87 to 89 is any amino acid
  Variant (91)..(110): Xaa in position 91 to 110 is any amino acid
  Variant (111)..(137): Xaa in position 111 to 137 is any or no amino acid
  Variant (139)..(141): Xaa in position 139 to 141 is any amino acid
  Variant (144)..(144): Xaa in position 144 is any amino acid
  Variant (152)..(154): Xaa in position 152 to 154 is any amino acid
  Variant (157)..(157): Xaa in position 157 is any amino acid
  Variant (163)..(170): Xaa in position 163 to 170 is any amino acid
  Variant (172)..(173): Xaa in position 172 to 173 is any amino acid
  Variant (175)..(181): Xaa in position 175 to 181 is any amino acid
  Variant (184)..(184): Xaa in position 184 is any amino acid
  Variant (187)..(189): Xaa in position 187 to 189 is any amino acid
  Variant (191)..(192): Xaa in position 191 to 192 is any amino acid
  Variant (194)..(195): Xaa in position 194 to 195 is any amino acid
  Variant (198)..(200): Xaa in position 198 to 200 is any amino acid
  Variant (202)..(214): Xaa in position 202 to 214 is any amino acid
  Variant (216)..(217): Xaa in position 216 to 217 is any amino acid
  Variant (219)..(219): Xaa in position 219 is any amino acid
  Variant (222)..(223): Xaa in position 222 to 223 is any amino acid

SEQ ID NO: 8969 - protein, 22 aa, Artificial sequence
  protein pattern
  Variant (2)..(2): Xaa in position 2 is any or no amino acid
  Variant (4)..(4): Xaa in position 4 is any or no amino acid
  Variant (12)..(12): Xaa in position 12 is Phe or Tyr
  Variant (13)..(13): Xaa in position 13 is Ile, Leu or Val
  Variant (14)..(14): Xaa in position 14 is Ala or Ser
  Variant (17)..(17): Xaa in position 17 is Ile or Val
  Variant (20)..(20): Xaa in position 20 is Ile or Val
  Variant (22)..(22): Xaa in position 22 is Pro or Val
SXLXNPKAILFXXXFFXQFXDX

SEQ ID NO: 8970 - protein, 59 aa, Artificial sequence; identical to SEQ ID NO: 2192
  protein pattern
  Variant (4)..(4): Xaa in position 4 is Ala, Ser or Thr
  Variant (5)..(5): Xaa in position 5 is Ile, Leu or Met
  Variant (6)..(6): Xaa in position 6 is Phe or Tyr
  Variant (8)..(8): Xaa in position 8 is Leu or Met
  Variant (9)..(10): Xaa in position 9 to 10 is any amino acid
  Variant (11)..(11): Xaa in position 11 is Ala or Ser
  Variant (12)..(12): Xaa in position 12 is Ala, Ser or Val
  Variant (13)..(14): Xaa in position 13 to 14 is any amino acid
  Variant (16)..(17): Xaa in position 16 to 17 is any amino acid
  Variant (18)..(18): Xaa in position 18 is Ala, Gly or Thr
  Variant (20)..(20): Xaa in position 20 is Phe or Tyr
  Variant (21)..(21): Xaa in position 21 is any amino acid
  Variant (22)..(22): Xaa in position 22 is Ala or Gly
  Variant (24)..(24): Xaa in position 24 is any amino acid
  Variant (27)..(28): Xaa in position 27 to 28 is any amino acid
  Variant (31)..(31): Xaa in position 31 is any amino acid
  Variant (32)..(32): Xaa in position 32 is Ile or Val
  Variant (34)..(34): Xaa in position 34 is Ile or Met
  Variant (35)..(35): Xaa in position 35 is any amino acid
  Variant (36)..(36): Xaa in position 36 is Ala or Leu
  Variant (37)..(37): Xaa in position 37 is Ala, Ser or Thr
  Variant (38)..(39): Xaa in position 38 to 39 is any amino acid
  Variant (41)..(41): Xaa in position 41 is Ala or Val
  Variant (42)..(42): Xaa in position 42 is Ala or Ser
  Variant (43)..(43): Xaa in position 43 is Gly, Ser or Thr
  Variant (45)..(45): Xaa in position 45 is Ile, Leu or Met
  Variant (46)..(46): Xaa in position 46 is any amino acid
  Variant (47)..(47): Xaa in position 47 is Ala or Thr
  Variant (48)..(48): Xaa in position 48 is any amino acid
  Variant (49)..(49): Xaa in position 49 is Ala or Pro
  Variant (50)..(50): Xaa in position 50 is any amino acid
  Variant (51)..(51): Xaa in position 51 is Ile or Leu
  Variant (53)..(54): Xaa in position 53 to 54 is any amino acid
  Variant (55)..(55): Xaa in position 55 is Leu or Val
  Variant (56)..(56): Xaa in position 56 is Lys or Arg
  Variant (57)..(57): Xaa in position 57 is any amino acid
  Variant (58)..(58): Xaa in position 58 is Ala, Gly, Ile, Leu or Val

SEQ ID NO: 8971 - protein, 57 aa, Artificial sequence; identical to SEQ ID NO: 2193
  protein pattern
  Variant (2)..(8): Xaa in position 2 to 8 is any amino acid
  Variant (9)..(13): Xaa in position 9 to 13 is any or no amino acid
  Variant (15)..(17): Xaa in position 15 to 17 is any amino acid
  Variant (19)..(19): Xaa in position 19 is Ser or Thr
  Variant (20)..(20): Xaa in position 20 is any amino acid
  Variant (21)..(21): Xaa in position 21 is Ile or Leu
  Variant (23)..(23): Xaa in position 23 is Phe, Ile or Leu
  Variant (24)..(24): Xaa in position 24 is any amino acid
  Variant (26)..(26): Xaa in position 26 is Ala, Asp, Thr or Val
  Variant (27)..(27): Xaa in position 27 is any amino acid
  Variant (28)..(28): Xaa in position 28 is Leu or Val
  Variant (29)..(29): Xaa in position 29 is Ala, Ser or Thr
  Variant (30)..(31): Xaa in position 30 to 31 is any amino acid
  Variant (32)..(32): Xaa in position 32 is Phe or Ile
  Variant (33)..(34): Xaa in position 33 to 34 is any amino acid
  Variant (35)..(35): Xaa in position 35 is Lys or Arg
  Variant (36)..(36): Xaa in position 36 is any amino acid
  Variant (37)..(37): Xaa in position 37 is Lys or Arg
  Variant (38)..(38): Xaa in position 38 is Ile or Leu
  Variant (39)..(39): Xaa in position 39 is Ala, Ser or Thr
  Variant (40)..(43): Xaa in position 40 to 43 is any amino acid
  Variant (44)..(44): Xaa in position 44 is Cys, Gly, Ser or Thr
  Variant (45)..(45): Xaa in position 45 is any amino acid
  Variant (46)..(46): Xaa in position 46 is Ala, Ile or Val
  Variant (48)..(48): Xaa in position 48 is any amino acid
  Variant (49)..(49): Xaa in position 49 is Leu, Met or Val
  Variant (51)..(51): Xaa in position 51 is Phe, Ile, Leu or Val
  Variant (54)..(54): Xaa in position 54 is Ala, Gly or Ser
  Variant (55)..(55): Xaa in position 55 is Ala, Leu or Val
  Variant (56)..(56): Xaa in position 56 is Lys or Arg

SEQ ID NO: 8972 - protein, 15 aa, Artificial sequence
  protein pattern
  Variant (2)..(2): Xaa in position 2 is Ile or Val
  Variant (3)..(3): Xaa in position 3 is any amino acid
  Variant (4)..(4): Xaa in position 4 is Asp, Glu or Asn
  Variant (5)..(6): Xaa in position 5 to 6 is any amino acid
  Variant (8)..(8): Xaa in position 8 is Phe or Tyr
  Variant (9)..(9): Xaa in position 9 is Ile, Leu or Val
  Variant (10)..(10): Xaa in position 10 is any amino acid
  Variant (12)..(12): Xaa in position 12 is any amino acid
  Variant (13)..(13): Xaa in position 13 is Ile, Leu or Val
  Variant (14)..(14): Xaa in position 14 is Phe, Ile or Leu
  Variant (15)..(15): Xaa in position 15 is Ile or Val
GXXXXXTXXXGXXXX

SEQ ID NO: 8973 - DNA, 990 bp, Escherichia coli K12
  CDS (1)..(990): transl_table=11
atgcacaaatttactaaagccctggcagccattggtctggcagccgttatgtcacaatccgctatggcggagaacctgaagctcggttttctggtgaagcaaccggaagagccgtggttccagaccgaatggaagtttgccgataaagccgggaaggatttagggtttgaggttattaagattgccgtgccggatggcgaaaaaacattgaacgcgatcgacagcctggctgccagtggcgcaaaaggtttcgttatttgtactccggaccccaaactcggctctgccatcgtcgcgaaagcgcgtggctacgatatgaaagtcattgccgtggatgaccagtttgttaacgccaaaggtaagccaatggataccgttccgctggtgatgatggcggcgactaaaattggcgaacgtcagggccaggaactgtataaagagatgcagaaacgtggctgggatgtcaaagaaagcgcggtgatggcgattaccgccaacgaactggataccgcccgccgccgtactacgggatctatggatgtgctgaaagcggccggattcccggaaaaacaaatttatcaggtacctaccaaatctaacgacatcccgggggcatttgacgctgccaactcaatgctggttcaacatccggaagttaaacattggctgatcgtcggtatgaacgacagcaccgtgctgggcggcgtacgcgcgacggaaggtcagggctttaaagcggccgatatcatcggcattggcattaacggtgtggatgcggtgagcgaactgtctaaagcacaggcaaccggcttctacggttccctgctgccaagcccggacgtacatggctataaatccagcgaaatgctttacaactgggtagcaaaagacgttgaaccgccaaaatttaccgaagttaccgacgtggtactgatcacgcgtgacaactttaaagaagaactggagaaaaaaggtttaggcggtaagtaa

SEQ ID NO: 8974 - protein, 329 aa, Escherichia coli K12
MHKFTKALAAIGLAAVMSQSAMAENLKLGFLVKQPEEPWFQTEWKFADKAGKDLGFEVIKIAVPDGEKTLNAIDSLAASGAKGFVICTPDPKLGSAIVAKARGYDMKVIAVDDQFVNAKGKPMDTVPLVMMAATKIGERQGQELYKEMQKRGWDVKESAVMAITANELDTARRRTTGSMDVLKAAGFPEKQIYQVPTKSNDIPGAFDAANSMLVQHPEVKHWLIVGMNDSTVLGGVRATEGQGFKAADIIGIGINGVDAVSELSKAQATGFYGSLLPSPDVHGYKSSEMLYNWVAKDVEPPKFTEVTDVVLITRDNFKEELEKKGLGGK

SEQ ID NO: 8975 - DNA, 984 bp, Sinorhizobium meliloti 1021; identical to SEQ ID NO: 2221
  CDS (1)..(984): transl_table=11

SEQ ID NO: 8976 - protein, 327 aa, Sinorhizobium meliloti 1021; identical to SEQ ID NO: 2222

SEQ ID NO: 8977 - DNA, 996 bp, Ralstonia solanacearum GMI1000; identical to SEQ ID NO: 2223
  CDS (1)..(996): transl_table=11

SEQ ID NO: 8978 - protein, 331 aa, Ralstonia solanacearum GMI1000; identical to SEQ ID NO: 2224

SEQ ID NO: 8979 - DNA, 984 bp, Yersinia pestis KIM; identical to SEQ ID NO: 2225
  CDS (1)..(984): transl_table=11

SEQ ID NO: 8980 - protein, 327 aa, Yersinia pestis KIM; identical to SEQ ID NO: 2226

SEQ ID NO: 8981 - DNA, 1014 bp, Pseudomonas syringae pv. tomato str. DC3000; identical to SEQ ID NO: 2227
  CDS (1)..(1014): transl_table=11

SEQ ID NO: 8982 - protein, 337 aa, Pseudomonas syringae pv. tomato str. DC3000; identical to SEQ ID NO: 2228

SEQ ID NO: 8983 - DNA, 1002 bp, Vibrio parahaemolyticus RIMD 2210633; identical to SEQ ID NO: 2229
  CDS (1)..(1002): transl_table=11

SEQ ID NO: 8984 - protein, 333 aa, Vibrio parahaemolyticus RIMD 2210633; identical to SEQ ID NO: 2230

SEQ ID NO: 8985 - DNA, 984 bp, Erwinia carotovora subsp. atroseptica SCRI1043; identical to SEQ ID NO: 2231
  CDS (1)..(984): transl_table=11

SEQ ID NO: 8986 - protein, 327 aa, Erwinia carotovora subsp. atroseptica SCRI1043; identical to SEQ ID NO: 2232

SEQ ID NO: 8987 - DNA, 984 bp, Yersinia pseudotuberculosis IP 32953; identical to SEQ ID NO: 2233
  CDS (1)..(984): transl_table=11

SEQ ID NO: 8988 - protein, 327 aa, Yersinia pseudotuberculosis IP 32953; identical to SEQ ID NO: 2234

SEQ ID NO: 8989 - DNA, 1014 bp, Mannheimia succiniciproducens MBEL55E; identical to SEQ ID NO: 2235
  CDS (1)..(1014): transl_table=11

SEQ ID NO: 8990 - protein, 337 aa, Mannheimia succiniciproducens MBEL55E; identical to SEQ ID NO: 2236

SEQ ID NO: 8991 - DNA, 996 bp, Burkholderia mallei ATCC 23344; identical to SEQ ID NO: 2237
  CDS (1)..(996): transl_table=11

SEQ ID NO: 8992 - protein, 331 aa, Burkholderia mallei ATCC 23344; identical to SEQ ID NO: 2238

SEQ ID NO: 8993 - DNA, 1002 bp, Burkholderia mallei ATCC 23344; identical to SEQ ID NO: 2239
  CDS (1)..(1002): transl_table=11

SEQ ID NO: 8994 - protein, 333 aa, Burkholderia mallei ATCC 23344; identical to SEQ ID NO: 2240

SEQ ID NO: 8995 - DNA, 996 bp, Burkholderia pseudomallei K96243; identical to SEQ ID NO: 2241
  CDS (1)..(996): transl_table=11

SEQ ID NO: 8996 - protein, 331 aa, Burkholderia pseudomallei K96243; identical to SEQ ID NO: 2242

SEQ ID NO: 8997 - DNA, 1014 bp, Pseudomonas syringae pv. syringae B728a; identical to SEQ ID NO: 2243
  CDS (1)..(1014): transl_table=11

SEQ ID NO: 8998 - protein, 337 aa, Pseudomonas syringae pv. syringae B728a; identical to SEQ ID NO: 2244

SEQ ID NO: 8999 - DNA, 1014 bp, Pseudomonas syringae pv. phaseolicola 1448A; identical to SEQ ID NO: 2245
  CDS (1)..(1014): transl_table=11

SEQ ID NO: 9000 - protein, 337 aa, Pseudomonas syringae pv. phaseolicola 1448A; identical to SEQ ID NO: 2246

SEQ ID NO: 9001 - DNA, 1005 bp, Pseudomonas fluorescens PfO-1; identical to SEQ ID NO: 2247
  CDS (1)..(1005): transl_table=11

SEQ ID NO: 9002 - protein, 334 aa, Pseudomonas fluorescens PfO-1; identical to SEQ ID NO: 2248

SEQ ID NO: 9003 - DNA, 996 bp, Burkholderia sp. 383; identical to SEQ ID NO: 2249
  CDS (1)..(996): transl_table=11

SEQ ID NO: 9004 - protein, 331 aa, Burkholderia sp. 383; identical to SEQ ID NO: 2250

SEQ ID NO: 9005 - DNA, 1014 bp, Burkholderia sp. 383; identical to SEQ ID NO: 2251
  CDS (1)..(1014): transl_table=11

SEQ ID NO: 9006 - protein, 337 aa, Burkholderia sp. 383; identical to SEQ ID NO: 2252

SEQ ID NO: 9007 - DNA, 996 bp, Burkholderia sp. 383; identical to SEQ ID NO: 2253
  CDS (1)..(996): transl_table=11

SEQ ID NO: 9008 - protein, 331 aa, Burkholderia sp. 383; identical to SEQ ID NO: 2254

SEQ ID NO: 9009 - DNA, 1002 bp, Burkholderia thailandensis E264; identical to SEQ ID NO: 2255
  CDS (1)..(1002): transl_table=11

SEQ ID NO: 9010 - protein, 333 aa, Burkholderia thailandensis E264; identical to SEQ ID NO: 2256

SEQ ID NO: 9011 - DNA, 1023 bp, Burkholderia thailandensis E264; identical to SEQ ID NO: 2257
  CDS (1)..(1023): transl_table=11

SEQ ID NO: 9012 - protein, 340 aa, Burkholderia thailandensis E264; identical to SEQ ID NO: 2258

SEQ ID NO: 9013 - DNA, 1008 bp, Burkholderia thailandensis E264; identical to SEQ ID NO: 2259
  CDS (1)..(1008): transl_table=11

SEQ ID NO: 9014 - protein, 335 aa, Burkholderia thailandensis E264; identical to SEQ ID NO: 2260

SEQ ID NO: 9015 - DNA, 999 bp, Burkholderia xenovorans LB400; identical to SEQ ID NO: 2261
  CDS (1)..(999): transl_table=11

SEQ ID NO: 9016 - protein, 332 aa, Burkholderia xenovorans LB400; identical to SEQ ID NO: 2262

SEQ ID NO: 9017 - DNA, 1005 bp, Burkholderia vietnamiensis G4; identical to SEQ ID NO: 2263
  CDS (1)..(1005): transl_table=11

SEQ ID NO: 9018 - protein, 334 aa, Burkholderia vietnamiensis G4; identical to SEQ ID NO: 2264

SEQ ID NO: 9019 - DNA, 996 bp, Burkholderia vietnamiensis G4; identical to SEQ ID NO: 2265
  CDS (1)..(996): transl_table=11

SEQ ID NO: 9020 - protein, 331 aa, Burkholderia vietnamiensis G4; identical to SEQ ID NO: 2266

SEQ ID NO: 9021 - DNA, 1005 bp, Azospirillum brasilense; identical to SEQ ID NO: 2267
  CDS (1)..(1005): transl_table=11

SEQ ID NO: 9022 - protein, 334 aa, Azospirillum brasilense; identical to SEQ ID NO: 2268

SEQ ID NO: 9023 - DNA, 22 bp, Artificial sequence
  primer
atgcacaaatttactaaagccc

SEQ ID NO: 9024 - DNA, 25 bp, Artificial sequence
  primer
ttacttaccgcctaaaccttttttc

SEQ ID NO: 9025 - protein, 332 aa, Artificial sequence; identical to SEQ ID NO: 2271
  consensus sequence
  Variant (2)..(15): Xaa in position 2 to 15 is any amino acid
  Variant (16)..(26): Xaa in position 16 to 26 is any or no amino acid
  Variant (28)..(28): Xaa in position 28 is any amino acid
  Variant (37)..(37): Xaa in position 37 is any amino acid
  Variant (42)..(42): Xaa in position 42 is any amino acid
  Variant (45)..(45): Xaa in position 45 is any amino acid
  Variant (48)..(49): Xaa in position 48 to 49 is any amino acid
  Variant (51)..(51): Xaa in position 51 is any amino acid
  Variant (53)..(55): Xaa in position 53 to 55 is any amino acid
  Variant (56)..(56): Xaa in position 56 is any or no amino acid
  Variant (58)..(60): Xaa in position 58 to 60 is any amino acid
  Variant (63)..(64): Xaa in position 63 to 64 is any amino acid
  Variant (66)..(66): Xaa in position 66 is any amino acid
  Variant (70)..(72): Xaa in position 70 to 72 is any amino acid
  Variant (76)..(76): Xaa in position 76 is any amino acid
  Variant (78)..(78): Xaa in position 78 is any amino acid
  Variant (80)..(81): Xaa in position 80 to 81 is any amino acid
  Variant (83)..(83): Xaa in position 83 is any amino acid
  Variant (86)..(86): Xaa in position 86 is any amino acid
  Variant (89)..(89): Xaa in position 89 is any amino acid
  Variant (92)..(93): Xaa in position 92 to 93 is any amino acid
  Variant (97)..(97): Xaa in position 97 is any amino acid
  Variant (99)..(99): Xaa in position 99 is any amino acid
  Variant (103)..(107): Xaa in position 103 to 107 is any amino acid
  Variant (109)..(111): Xaa in position 109 to 111 is any amino acid
  Variant (115)..(116): Xaa in position 115 to 116 is any amino acid
  Variant (118)..(120): Xaa in position 118 to 120 is any amino acid
  Variant (122)..(122): Xaa in position 122 is any amino acid
  Variant (124)..(126): Xaa in position 124 to 126 is any amino acid
  Variant (129)..(133): Xaa in position 129 to 133 is any amino acid
  Variant (135)..(136): Xaa in position 135 to 136 is any amino acid
  Variant (139)..(141): Xaa in position 139 to 141 is any amino acid
  Variant (143)..(147): Xaa in position 143 to 147 is any amino acid
  Variant (149)..(151): Xaa in position 149 to 151 is any amino acid
  Variant (155)..(164): Xaa in position 155 to 164 is any amino acid
  Variant (165)..(167): Xaa in position 165 to 167 is any or no amino acid
  Variant (169)..(171): Xaa in position 169 to 171 is any amino acid
  Variant (173)..(173): Xaa in position 173 is any amino acid
  Variant (176)..(177): Xaa in position 176 to 177 is any amino acid
  Variant (180)..(180): Xaa in position 180 is any amino acid
  Variant (182)..(184): Xaa in position 182 to 184 is any amino acid
  Variant (187)..(189): Xaa in position 187 to 189 is any amino acid
  Variant (192)..(199): Xaa in position 192 to 199 is any amino acid
  Variant (201)..(204): Xaa in position 201 to 204 is any amino acid
  Variant (206)..(211): Xaa in position 206 to 211 is any amino acid
  Variant (214)..(216): Xaa in position 214 to 216 is any amino acid
  Variant (218)..(220): Xaa in position 218 to 220 is any amino acid
  Variant (222)..(223): Xaa in position 222 to 223 is any amino acid
  Variant (224)..(224): Xaa in position 224 is any or no amino acid
  Variant (226)..(226): Xaa in position 226 is any amino acid
  Variant (228)..(230): Xaa in position 228 to 230 is any amino acid
  Variant (232)..(232): Xaa in position 232 is any amino acid
  Variant (235)..(236): Xaa in position 235 to 236 is any amino acid
  Variant (240)..(240): Xaa in position 240 is any amino acid
  Variant (244)..(244): Xaa in position 244 is any amino acid
  Variant (246)..(247): Xaa in position 246 to 247 is any amino acid
  Variant (249)..(250): Xaa in position 249 to 250 is any amino acid
  Variant (252)..(254): Xaa in position 252 to 254 is any amino acid
  Variant (257)..(257): Xaa in position 257 is any amino acid
  Variant (260)..(260): Xaa in position 260 is any amino acid
  Variant (262)..(263): Xaa in position 262 to 263 is any amino acid
  Variant (264)..(264): Xaa in position 264 is any or no amino acid
  Variant (266)..(267): Xaa in position 266 to 267 is any amino acid
  Variant (269)..(270): Xaa in position 269 to 270 is any amino acid
  Variant (272)..(273): Xaa in position 272 to 273 is any amino acid
  Variant (274)..(274): Xaa in position 274 is any or no amino acid
  Variant (278)..(278): Xaa in position 278 is any amino acid
  Variant (280)..(283): Xaa in position 280 to 283 is any amino acid
  Variant (286)..(287): Xaa in position 286 to 287 is any amino acid
  Variant (290)..(298): Xaa in position 290 to 298 is any amino acid
  Variant (300)..(305): Xaa in position 300 to 305 is any amino acid
  Variant (307)..(315): Xaa in position 307 to 315 is any amino acid
  Variant (316)..(316): Xaa in position 316 is any or no amino acid
  Variant (318)..(318): Xaa in position 318 is any amino acid
  Variant (321)..(321): Xaa in position 321 is any amino acid
  Variant (323)..(330): Xaa in position 323 to 330 is any amino acid

SEQ ID NO: 9026 - protein, 42 aa, Artificial sequence; identical to SEQ ID NO: 2272
  protein pattern
  Variant (2)..(3): Xaa in position 2 to 3 is any amino acid
  Variant (4)..(4): Xaa in position 4 is any or no amino acid
  Variant (6)..(7): Xaa in position 6 to 7 is any amino acid
  Variant (8)..(8): Xaa in position 8 is Ile, Leu or Val
  Variant (9)..(9): Xaa in position 9 is Ala, Ile or Val
  Variant (10)..(10): Xaa in position 10 is any amino acid
  Variant (11)..(11): Xaa in position 11 is Ala or Gly
  Variant (12)..(12): Xaa in position 12 is Leu or Met
  Variant (14)..(14): Xaa in position 14 is Asp or Glu
  Variant (15)..(15): Xaa in position 15 is Glu, Asn or Ser
  Variant (16)..(16): Xaa in position 16 is Ala or Thr
  Variant (20)..(20): Xaa in position 20 is Ala or Gly
  Variant (24)..(24): Xaa in position 24 is Ala or Thr
  Variant (25)..(25): Xaa in position 25 is Ala, Glu or Ser
  Variant (26)..(26): Xaa in position 26 is Ala, Gly, Gln, Ser or Thr
  Variant (27)..(28): Xaa in position 27 to 28 is any amino acid
  Variant (29)..(29): Xaa in position 29 is Phe or Ile
  Variant (30)..(30): Xaa in position 30 is any amino acid
  Variant (32)..(32): Xaa in position 32 is any amino acid
  Variant (33)..(33): Xaa in position 33 is Asp or Asn
  Variant (34)..(34): Xaa in position 34 is Ile, Met or Val
  Variant (37)..(38): Xaa in position 37 to 38 is any or no amino acid
  Variant (40)..(40): Xaa in position 40 is Gly or Asn
  Variant (42)..(42): Xaa in position 42 is Ala, Ser, Thr or Val

SEQ ID NO: 9027 - protein, 34 aa, Artificial sequence; identical to SEQ ID NO: 2273
  protein pattern
  Variant (2)..(2): Xaa in position 2 is any amino acid
  Variant (4)..(4): Xaa in position 4 is Ile, Leu or Met
  Variant (5)..(5): Xaa in position 5 is any amino acid
  Variant (6)..(6): Xaa in position 6 is Ala, Asp, Glu, Gly, Asn, Ser or Thr
  Variant (9)..(9): Xaa in position 9 is any amino acid
  Variant (10)..(10): Xaa in position 10 is Leu, Met or Val
  Variant (11)..(11): Xaa in position 11 is any amino acid
  Variant (12)..(12): Xaa in position 12 is Ile or Met
  Variant (13)..(13): Xaa in position 13 is Ala or Ser
  Variant (15)..(16): Xaa in position 15 to 16 is any amino acid
  Variant (19)..(21): Xaa in position 19 to 21 is any amino acid
  Variant (23)..(23): Xaa in position 23 is Asp, Glu, Gly, Gln or Ser
  Variant (24)..(24): Xaa in position 24 is Ala, Glu or Gly
  Variant (25)..(25): Xaa in position 25 is Ile or Leu
  Variant (26)..(27): Xaa in position 26 to 27 is any amino acid
  Variant (29)..(31): Xaa in position 29 to 31 is any amino acid

SEQ ID NO: 9028 - protein, 39 aa, Artificial sequence; identical to SEQ ID NO: 2274
  protein pattern
  Variant (2)..(2): Xaa in position 2 is Phe or Leu
  Variant (3)..(3): Xaa in position 3 is any amino acid
  Variant (5)..(6): Xaa in position 5 to 6 is any amino acid
  Variant (7)..(7): Xaa in position 7 is Ala or Pro
  Variant (11)..(11): Xaa in position 11 is any amino acid
  Variant (13)..(13): Xaa in position 13 is Ser or Thr
  Variant (14)..(14): Xaa in position 14 is Ile, Leu or Val
  Variant (15)..(15): Xaa in position 15 is Ala, Ile or Leu
  Variant (16)..(16): Xaa in position 16 is Ile, Leu, Pro or Val
  Variant (17)..(17): Xaa in position 17 is Asn or Ser
  Variant (18)..(18): Xaa in position 18 is Pro or Ser
  Variant (19)..(20): Xaa in position 19 to 20 is any amino acid
  Variant (23)..(24): Xaa in position 23 to 24 is any amino acid
  Variant (25)..(25): Xaa in position 25 is Ser or Thr
  Variant (26)..(28): Xaa in position 26 to 28 is any amino acid
  Variant (29)..(29): Xaa in position 29 is Leu or Met
  Variant (30)..(31): Xaa in position 30 to 31 is any amino acid
  Variant (33)..(33): Xaa in position 33 is Ile or Val
  Variant (34)..(35): Xaa in position 34 to 35 is any amino acid
  Variant (36)..(36): Xaa in position 36 is Asp, Gly or Asn
  Variant (37)..(38): Xaa in position 37 to 38 is any amino acid

SEQ ID NO: 9029 - protein, 56 aa, Artificial sequence; identical to SEQ ID NO: 2275
  protein pattern
  Variant (2)..(5): Xaa in position 2 to 5 is any amino acid
  Variant (6)..(10): Xaa in position 6 to 10 is any or no amino acid
  Variant (12)..(12): Xaa in position 12 is Asp or Pro
  Variant (15)..(15): Xaa in position 15 is His, Lys or Arg
  Variant (16)..(16): Xaa in position 16 is any amino acid
  Variant (18)..(18): Xaa in position 18 is Thr or Val
  Variant (19)..(19): Xaa in position 19 is Ala, Asp, Glu, Gly, Ser or Thr
  Variant (21)..(21): Xaa in position 21 is Ala or Ser
  Variant (22)..(23): Xaa in position 22 to 23 is any amino acid
  Variant (26)..(27): Xaa in position 26 to 27 is any amino acid
  Variant (28)..(28): Xaa in position 28 is Ala, Asn or Ser
  Variant (31)..(34): Xaa in position 31 to 34 is any amino acid
  Variant (35)..(35): Xaa in position 35 is Ile or Val
  Variant (36)..(37): Xaa in position 36 to 37 is any amino acid
  Variant (38)..(38): Xaa in position 38 is Ala, Ser or Val
  Variant (40)..(40): Xaa in position 40 is Glu, Gln or Thr
  Variant (41)..(42): Xaa in position 41 to 42 is any amino acid
  Variant (43)..(43): Xaa in position 43 is Ala, Asn or Thr
  Variant (45)..(45): Xaa in position 45 is any amino acid
  Variant (46)..(46): Xaa in position 46 is Glu or Pro
  Variant (47)..(47): Xaa in position 47 is Ala, Gly or Asn
  Variant (48)..(48): Xaa in position 48 is Ala or Gly
  Variant (49)..(49): Xaa in position 49 is Phe or Leu
  Variant (50)..(50): Xaa in position 50 is Asp, Asn or Ser
  Variant (53)..(53): Xaa in position 53 is Ala, Asp or Asn
  Variant (54)..(55): Xaa in position 54 to 55 is any amino acid
  Variant (56)..(56): Xaa in position 56 is Phe or Leu

SEQ ID NO: 9030 - protein, 21 aa, Artificial sequence
  protein pattern
  Variant (2)..(2): Xaa in position 2 is Ile or Leu
  Variant (5)..(5): Xaa in position 5 is Ile, Leu or Val
  Variant (9)..(9): Xaa in position 9 is Ala or Pro
  Variant (10)..(11): Xaa in position 10 to 11 is Asp or Glu
  Variant (16)..(16): Xaa in position 16 is Ala, Asp or Thr
  Variant (19)..(20): Xaa in position 19 to 20 is any amino acid
KXGFXVKQXXXPWFQXEWXXA

SEQ ID NO: 9031 - DNA, 1017 bp, Escherichia coli
  CDS (1)..(1017): transl_table=11
atgcggacttggaaatttccgtcagttagggtaatgatgagagtagaaaataataatgtttctgggcaaaaccatgacccggaacagattgatttgattgatttactagtgcagttgtggcgtggcaagatgacaatcatcatttccgtcattgtggctattgccctggctattggatatttggcagtagcgaaggagaaatggacgtcaacagcaattatcactcagcccgacgtggggcaaattgctggctataacaatgccatgaatgttatctatggtcaggctgcaccgaaagtatcggatttgcaggagacgttaattggtcgcttcagttctgccttctctgcattagcagaaacgctggataatcaggaagaacgagaaaaacttaccatcgaaccttctgttaagaaccagcaattaccattgactgtttcttatgttgggcaaactgcagagggcgcacaaatgaagttggcccaatacattcagcaagttgacgataaagtgaatcaagagctagaaaaggatctcaaagacaacattgctctgggacggaaaaacttgcaggactctttaagaacgcaggaagtagtcgcgcaggagcagaaagatctgcgtatccgtcagattcaggaagcgttgcagtatgcgaatcaggcgcaggtgacaaaaccgcagattcaacagactggcgaagatatcacacaagatacgttgttccttttggggagcgaagcgctggagtcgatgattaagcatgaggcgacccgtccgttggtgttctcgccaaactactatcagactcgtcaaaacctgctggatatcgaaagcttaaaagttgatgatcttgatattcatgcttaccgttatgtgatgaaaccgatgttacctattcgtcgtgatagcccgaaaaaggcaattaccttgattctggcggtgctgctgggtggcatggttggcgcggggattgtgctggggcgtaatgctctacgcaattacaacgcgaagtaa

SEQ ID NO: 9032 - protein, 338 aa, Escherichia coli
MRTWKFPSVRVMMRVENNNVSGQNHDPEQIDLIDLLVQLWRGKMTIIISVIVAIALAIGYLAVAKEKWTSTAIITQPDVGQIAGYNNAMNVIYGQAAPKVSDLQETLIGRFSSAFSALAETLDNQEEREKLTIEPSVKNQQLPLTVSYVGQTAEGAQMKLAQYIQQVDDKVNQELEKDLKDNIALGRKNLQDSLRTQEVVAQEQKDLRIRQIQEALQYANQAQVTKPQIQQTGEDITQDTLFLLGSEALESMIKHEATRPLVFSPNYYQTRQNLLDIESLKVDDLDIHAYRYVMKPMLPIRRDSPKKAITLILAVLLGGMVGAGIVLGRNALRNYNAK

SEQ ID NO: 9033 - DNA, 1134 bp, Escherichia coli O157:H7 EDL933
  CDS (1)..(1134): transl_table=11
atgtcatcactgaatattaaacagggaagtgacgctcattttcccgattatcctctggcgtcgcccagtaataatgaaattgatttacttaatctaatctcagttttatggcgggccaaaaaaacggtcatggcggtcgtttttgcgtttgcctgtgcaggcttgctgatctctttcatcctgccgcaaaaatggaccagcgcggcggttgtcacgcctccagaacctgttcagtggcaagagttggagaaaacattcactaagcttcgtgtgctggatctggatatcaaaattgatcgtacagaagcatttaacctgtttatcaagaagtttcagtcggttagcttgctggaagagtacctgcgttcatcaccttatgtgatggaccaattaaaagaggcgaaaatcgacgaactggatttgcatcgcgcaattgtcgcattgagcgaaaaaatgaaagcggttgatgacaatgccagtaagaaaaaagatgaaccgtcactgtatacctcctggacgctaagttttaccgcgccaaccagtgaagaggcgcagaccgttttgagcgggtatatcgattatatctctgcgttggtggtgaaagagtcgatagaaaacgtccgtaataaactggagatcaaaacccagtttgaaaaagaaaaactggctcaggaccgcattaaaatgaaaaatcaacttgatgcaaacattcagcgcctcaattattcactcgacattgccaacgcggcaggaattaaaaagcccgtttacagtaatggtcaggccgttaaagatgaccccgatttctctatttctctcggcgcagacggtattgaacgcaaactggaaattgaaaaagcggtcacggacgttgcggaactgaacggtgaattacgtaatcgtcagtatcttgttgagcagttaacaaaagcaaatatcaacgatgtgaattttacgccgtttaaatatcagttaagcccgtcattgccagtgaaaaaagacggtccgggtaaggcgattattgtgatcctttccgcgctgatcggcgggatggtggcttgtggtagcgtgttattgcgctatgcgatggcatccagaaaacaggatgccatgatggcagaccacttagtttaa

SEQ ID NO: 9034 - protein, 377 aa, Escherichia coli O157:H7 EDL933
MSSLNIKQGSDAHFPDYPLASPSNNEIDLLNLISVLWRAKKTVMAVVFAFACAGLLISFILPQKWTSAAVVTPPEPVQWQELEKTFTKLRVLDLDIKIDRTEAFNLFIKKFQSVSLLEEYLRSSPYVMDQLKEAKIDELDLHRAIVALSEKMKAVDDNASKKKDEPSLYTSWTLSFTAPTSEEAQTVLSGYIDYISALVVKESIENVRNKLEIKTQFEKEKLAQDRIKMKNQLDANIQRLNYSLDIANAAGIKKPVYSNGQAVKDDPDFSISLGADGIERKLEIEKAVTDVAELNGELRNRQYLVEQLTKANINDVNFTPFKYQLSPSLPVKKDGPGKAIIVILSALIGGMVACGSVLLRYAMASRKQDAMMADHLV

SEQ ID NO: 9035 - DNA, 1014 bp, Escherichia coli O157:H7 EDL933
  CDS (1)..(1014): transl_table=11
atgcggacttggaaatttccgtcagttagggtaatgatgagagtagaaaataataatgtttctgggcaaaaccatgacccggaacagattgatttgattgatttactagtgcagttgtggcgtggcaagatgacaatcatcatttccgtcattgtggctattgctctggctattggttatttggcagtagcgaaggagaaatggacgtcaacagcaattatcactcagcccgacgtggggcaaattgctggctataacaatgccatgaatgttatctatggtcaggctgcaccgaaagtatcggatttgcaggagacgttgattggtcgcttcagttctgccttctcagcattagcagaaacgctggataatcaggaagaaccagaaaaacttaccatcgaaccttctgttaagaaccagcaattaccattgactgtttcttatgttgggcaaactgcagagggagcacaaatgaagttggcccaatacattcagcaagttgatgataaagtgaatcaagagctagaaaaggatctcaaagacaacattgctctgggacggaaaaacttgcaggactctttaagaacgcaggaagtagttgcgcaggagcagaaagagctgcgtatccgtcagattcaggaagcgttgcagtatgcgaatcaggcgcaggtggcaaagccacaggttcagcagactgaagatgtgacgcaagatacgttgttccttttggggagcgaagcgctggagtcgatgattaagcatgaggcgacccgtccgttggtgttctcaccaaactactatcagacacgtcaaaacctgttggatattgaaaacttaaaggttgatgatcttgatattcatgcttaccgctatgtaatgaaaccgacgttacctattcgtcgcgatagtccgaaaaaggcaatcaccttgattctggcggtgctgctgggcggcatggttggcgcggggattgtgctggggcgtaacgctctgcgtaattacaacgcgaagtaa

SEQ ID NO: 9036 - protein, 337 aa, Escherichia coli O157:H7 EDL933
MRTWKFPSVRVMMRVENNNVSGQNHDPEQIDLIDLLVQLWRGKMTIIISVIVAIALAIGYLAVAKEKWTSTAIITQPDVGQIAGYNNAMNVIYGQAAPKVSDLQETLIGRFSSAFSALAETLDNQEEPEKLTIEPSVKNQQLPLTVSYVGQTAEGAQMKLAQYIQQVDDKVNQELEKDLKDNIALGRKNLQDSLRTQEVVAQEQKELRIRQIQEALQYANQAQVAKPQVQQTEDVTQDTLFLLGSEALESMIKHEATRPLVFSPNYYQTRQNLLDIENLKVDDLDIHAYRYVMKPTLPIRRDSPKKAITLILAVLLGGMVGAGIVLGRNALRNYNAK

SEQ ID NO: 9037 - DNA, 984 bp, Salmonella enterica subsp. enterica serovar Typhi str. CT18; identical to SEQ ID NO: 2472
  CDS (1)..(984): transl_table=11

SEQ ID NO: 9038 - protein, 327 aa, Salmonella enterica subsp. enterica serovar Typhi str. CT18; identical to SEQ ID NO: 2473

SEQ ID NO: 9039 - DNA, 1137 bp, Salmonella typhimurium LT2
  CDS (1)..(1137): transl_table=11
atgccatctcttaatgtaaaacaagaaaaaaatcagtcatttgcaggttattcactgccgcccgccaacagtcatgaaatcgatttgtttagccttatagaggtgttatggcaggcgaaacgtcgtattcttgctaccgttttcgcctttgcgtgcgtggggttgcttctgtcctttctgctgccgcaaaaatggaccagccaggcgattgtcacaccggcggagtcggtacagtggcaggggctggagagaacgttgaccgcgctgcgcgtgttggatatggaggtaagcgttgatcggggcagcgtatttaatctgtttattaaaaagtttagctcgccctcgctgctggaagaatatcttcgttcttctccgtatgtcatggatcaattaaaaggcgcgcaaatagacgagcaggatcttcaccgggcgattgtcctgctgagcgaaaaaatgaaagcggtggacagtaatgtcggcaagaaaaatgaaacgtcgttattcacgtcgtggacattgagttttaccgcgccgacgcgggaagaagcgcaaaaagtgctggctggctatattcagtacatctccgatatcgtcgtgaaagagacgctggaaaatattcgtaaccagctggaaatcaaaacccgctatgagcaggaaaagctggcgatggatcgggtgcgtctcaaaaatcagcttgatgccaatattcaacgtcttcattattcgctggaaatcgccaacgccgccggtattaagagaccggtttacagcaatggtcaggcggtaaaagatgatccggatttttctatttctctcggcgcggatggtatttcccgcaaactggaaattgaaaaaggggtaacggacgtggccgagatcgacggtgatttgcgtaaccgtcaataccatgttgaacaactggcggcaatgaatgtgagtgacgtgaagtttaccccgtttaaatatcaactgtcgccgtctctgccagtgaaaaaagatggcccgggtaaagccatcattattatcctggcggcgttgattggcggtatgatggcctgcggcggcgtattactgcgtcacgcgatggtctcgcgtaaaatggaaaacgcgctggcgatagatgaacggttagtctga

SEQ ID NO: 9040 - protein, 378 aa, Salmonella typhimurium LT2
MPSLNVKQEKNQSFAGYSLPPANSHEIDLFSLIEVLWQAKRRILATVFAFACVGLLLSFLLPQKWTSQAIVTPAESVQWQGLERTLTALRVLDMEVSVDRGSVFNLFIKKFSSPSLLEEYLRSSPYVMDQLKGAQIDEQDLHRAIVLLSEKMKAVDSNVGKKNETSLFTSWTLSFTAPTREEAQKVLAGYIQYISDIVVKETLENIRNQLEIKTRYEQEKLAMDRVRLKNQLDANIQRLHYSLEIANAAGIKRPVYSNGQAVKDDPDFSISLGADGISRKLEIEKGVTDVAEIDGDLRNRQYHVEQLAAMNVSDVKFTPFKYQLSPSLPVKKDGPGKAIIIILAALIGGMMACGGVLLRHAMVSRKMENALAIDERLV

SEQ ID NO: 9041 - DNA, 1014 bp, Shigella flexneri 2a str. 301
  CDS (1)..(1014): transl_table=11
atgcggacttggaaatttccgtcagttagggtaatgatgagagtagaaaataataatgtttctgggcaaaaccatgacccggaacagattgatttgattgatttactagtgcagttgtggcgtggcaagatgacaattatcatttccgtcattgtggctattgccctggctattggttatttggcagtagcgaaggagaaatggacgtcaacagcaattatcactcagcccgacgtggggcaaattgctggctataacaatgccatgaatgttatctatggtcaggctgcaccgaaagtatcggatttgcaggagacgttaattggtcgcttcagttctgccttctctgcattagcagaaacgctggataatcaggaagagccagaaaaacttaccatcgaaccttctgttaagaaccagcaattaccattgactgtttcttatgttgggcaaactgcagagggcgcacaaatgaagttggcccaatacattcagcaagttgatgataaagtgaatcaagagctagaaaaggatctcaaggacaacattgctctgggacggaaaaacttgcaggactctttaagaacccaggaagtggtcgcgcaggagcagaaagatctgcgtatccgtcagattcaggaagcgttgcagtatgcgaatcaggcgcaggtgacaaagccacaggttcagcagactgaagatgtgacgcaagatacgttgttccttctagggagcgaagcgctggagtcgatgattaagcatgaagcgactcgtccgttggtgttctcaccaaactactatcagacacgtcaaaacctgttggatattgaaaaattaaagtttgatgatcttgatattcatgcttaccgctatgtgatgaaaccgacgttacctattcgtcgcgatagtccgaaaaaggcaatcaccttgattctggcagtgcttctgggcggcatggttggcgcggggattgtgttggggcgtaacgctctgcgtaattacaacgcgaagtaa

SEQ ID NO: 9042 - protein, 337 aa, Shigella flexneri 2a str. 301
MRTWKFPSVRVMMRVENNNVSGQNHDPEQIDLIDLLVQLWRGKMTIIISVIVAIALAIGYLAVAKEKWTSTAIITQPDVGQIAGYNNAMNVIYGQAAPKVSDLQETLIGRFSSAFSALAETLDNQEEPEKLTIEPSVKNQQLPLTVSYVGQTAEGAQMKLAQYIQQVDDKVNQELEKDLKDNIALGRKNLQDSLRTQEVVAQEQKDLRIRQIQEALQYANQAQVTKPQVQQTEDVTQDTLFLLGSEALESMIKHEATRPLVFSPNYYQTRQNLLDIEKLKFDDLDIHAYRYVMKPTLPIRRDSPKKAITLILAVLLGGMVGAGIVLGRNALRNYNAK

SEQ ID NO: 9043 - DNA, 1062 bp, Yersinia pseudotuberculosis IP 32953
  CDS (1)..(1062): transl_table=11
atgtcgactgataaaacagggtctaccaataatgaaccgtctgtggataacgaattagatatccgtggtctgtgtcgtactctatggcgtggcaaggtatggattatcggtatggccattattttcgctgcgattgcactgggagtctcctatctggtgaaacagcagtggagtgcgacagccattactgacaaaccaaccgtcaacaatttgggggggtattattcgcaacagcagtttttacgtaatcttgatatccgtctcaatagcgggcttgtcagtgaacagccaggcatctccgatgaagcttacggtgagttcattactcagttagcggcttacgatacccgtcgtgatttctggctacaaagcgattactacaagcaacggcttgaaggagacgctaaggcggatgcggcattactcgatgagctagtgaataacattgttttcacggcgcgtgatgataaaaaaatcccgaatgacagcattaaattgacggcagaaacggccagtgatgcgaataagctactgcgtggttacattgattttgccagtcaacgtgcgtcaagccacctgaatgatgaaattcaaggcgcttgggcagcgcggactcaatcaatgaaagcgcaggttaaacgtcaggaagcggtagctcaagcagtctttgatcgtgaagtggcggcggttaagcaagcattgaaagtggctgggcaacaaggtattacccgtagccagacagatacgccagccgagcaattggcagattccaagatgttcatgctaggtaagccgatgcttgaagcccgtttagaaacattactggctactggcccaagttttgatattgattatgatcaaaaccgtgccatgctggcaacattgaacgttggtccgacactagatgataaattccagacttaccgctacttacgtacaccagaagacccggttacccgtgatagcccacgtcgtgtgttcctgctgattatgtggggcgctatcggggcattagtcggtgcgggtgtggtattggttcgccgctccaataaggcactgtga

SEQ ID NO: 9044 - protein, 353 aa, Yersinia pseudotuberculosis IP 32953
MSTDKTGSTNNEPSVDNELDIRGLCRTLWRGKVWIIGMAIIFAAIALGVSYLVKQQWSATAITDKPTVNNLGGYYSQQQFLRNLDIRLNSGLVSEQPGISDEAYGEFITQLAAYDTRRDFWLQSDYYKQRLEGDAKADAALLDELVNNIVFTARDDKKIPNDSIKLTAETASDANKLLRGYIDFASQRASSHLNDEIQGAWAARTQSMKAQVKRQEAVAQAVFDREVAAVKQALKVAGQQGITRSQTDTPAEQLADSKMFMLGKPMLEARLETLLATGPSFDIDYDQNRAMLATLNVGPTLDDKFQTYRYLRTPEDPVTRDSPRRVFLLIMWGAIGALVGAGVVLVRRSNKAL

SEQ ID NO: 9045 - DNA, 1191 bp, Mannheimia succiniciproducens MBEL55E
  CDS (1)..(1191): transl_table=11
ttgtttgctcaaagctacaataggcgagtttatataatttctttttttatattaaggttatcgctaatgaataatacagcttctatgtcgcctcaaaataataacgatgagattgatcttattgatttaattaaagttttatggcaaaaaaaattagttgtaattctcacttctttcttttttgctctgatcgctgcaatttatgcatttacggctaaagagcaatggacatctaaagcaactaccatagcacccaaagttgccgatatgggttattatttatcattacgcagtgaatatgccaacatcttaaacattaaagaatttacatcaaaagatgttgtggataacctctttaataacttcagagtcgcgcttttttctaataacatgaaacgtgagttttttgctcaatcaaaatggtttcagaattatgcaaatgaaaacgcaaaagatgaagacgcgaagcaaaaacttctgtcggatattttagataaatccttaattgtaactattccggatattaagaaaaatcctaatgcattggggattaacattagttttgctgccgagacgccaaaagaagcacaggaggtgttaactgaatacattaattttattaatgccacagttttaacagaagataaaattgatttcttagcggatattaaaattgcaattgataaccttgaattacaaaaagataaaattcaacgagatacagaaagtgtgcgtcaagttcagttagaaaacttaacaacagcgttagatattgcgaaatcagccggcattaaagaatattcaaaaacttcgggtaatgtaagcattcctcaattcgctttaggtgatgctcaaattccattcactgattctaaactaagtgatggtagctatttgtttatgttaggtgagaagtatttacaggctcaggtagatactttaactaacaacaaagtggtttaccctgtatctttctatacaattgaaaaacaggtttctttattgaattccttagagcaaaaagcaaatacagatagtaaagtaactagctattattatttgacttcaccggattatccaactactcgcgattggccgaaacgtgttctgttgcttttaatcggagctgtgttaggtggagttttaggttgtctttgggttttaggtaaacaaatttttagtcagaaataa

SEQ ID NO: 9046 - protein, 396 aa, Mannheimia succiniciproducens MBEL55E
MFAQSYNRRVYIISFFILRLSLMNNTASMSPQNNNDEIDLIDLIKVLWQKKLVVILTSFFFALIAAIYAFTAKEQWTSKATTIAPKVADMGYYLSLRSEYANILNIKEFTSKDVVDNLFNNFRVALFSNNMKREFFAQSKWFQNYANENAKDEDAKQKLLSDILDKSLIVTIPDIKKNPNALGINISFAAETPKEAQEVLTEYINFINATVLTEDKIDFLADIKIAIDNLELQKDKIQRDTESVRQVQLENLTTALDIAKSAGIKEYSKTSGNVSIPQFALGDAQIPFTDSKLSDGSYLFMLGEKYLQAQVDTLTNNKVVYPVSFYTIEKQVSLLNSLEQKANTDSKVTSYYYLTSPDYPTTRDWPKRVLLLLIGAVLGGVLGCLWVLGKQIFSQK

SEQ ID NO: 9047 - DNA, 1056 bp, Photobacterium sp. SKA34
  CDS (1)..(1056): transl_table=11
atgagtaatattcaagctgtaaataactcatcaaatgatgaaattgatttagctgagttagtcaaaacactttggcaaggtaaggtgacaattgctttatgttcaattgttttcactgtctgtgcaattgtttatgcactgactgctcagcagtggtggacttcagatgctactgtaaccagagggcagtacaaggatacagctaacattcgtagtcaagtgacgaacctatactctgtaattgatgtttcaaaagtcaataatatttttgaaagtggtcgtctactgaacgaattcataacagaatttaatgcattcgataacaaaaaagcatttttagagcaaaattctatcattgaacaatatgcaaaagatgatggtgttaataaggaagataaaggcaaatttattgctttttgggcgaaaaaaattgacgcctctctgaacgatgaaaaaaaacgaccaaatgtttacaagttgagctttgaagctagaagttctgaagcagcacatgatttactcaaagcatattcctcatttataacagatcaagttcgcgatgaagctttctctgttatcgcatcaaaaattgcacacaataagcaaattttgttagcttcaaaagagtctttagagttgaaagcgaaagaaaaacagaaagcgcttttattgaaaactaattatgctctagatattgctcgttctgcgaaggttaataagccgttggcagacgtaaatttaacgggtgtatttcctatacaacttggtactgaagggttaaaagaacaaagtaacatattaaaatcaatgaaagatcttagtttctttgagccaagtttaacccaaattaagattaagttagggctactatcaaaaatttacttagacaaagatacagcaatgaaaagcgtgcgttatctaaaagatattgattacccaatcagtcgtgataaaccaaagcgttcactcattgctgtactaggtttcttacttggtatgatgcttggtgttgcaattgttttattaaagagcgcgtttaataaaaacgctaaataa

SEQ ID NO: 9048 - protein, 351 aa, Photobacterium sp. SKA34
MSNIQAVNNSSNDEIDLAELVKTLWQGKVTIALCSIVFTVCAIVYALTAQQWWTSDATVTRGQYKDTANIRSQVTNLYSVIDVSKVNNIFESGRLLNEFITEFNAFDNKKAFLEQNSIIEQYAKDDGVNKEDKGKFIAFWAKKIDASLNDEKKRPNVYKLSFEARSSEAAHDLLKAYSSFITDQVRDEAFSVIASKIAHNKQILLASKESLELKAKEKQKALLLKTNYALDIARSAKVNKPLADVNLTGVFPIQLGTEGLKEQSNILKSMKDLSFFEPSLTQIKIKLGLLSKIYLDKDTAMKSVRYLKDIDYPISRDKPKRSLIAVLGFLLGMMLGVAIVLLKSAFNKNAK

SEQ ID NO: 9049 - DNA, 1134 bp, Escherichia coli B
  CDS (1)..(1134): transl_table=11
atgtcatcactgaatattaaacagggaagtgacgctcattttcccgattatcctctggcgtcgcccagtaataatgaaattgatttacttaatctaatctcagttttatggcgggccaaaaaaacggtcatggcggtcgtttttgcgtttgcctgcgcaggcttgctgatctctttcatcctgccgcaaaaatggaccagcgcggcggttgtcacgcccccagaacctgttcagtggcaagagttggagaaatcattcactaagcttcgtgtgctggatctggatatcaaaattgatcgtacagaagcatttaacctgtttatcaagaagtttcagtcggttagcttgctggaagagtacctgcgttcatcaccttatgtgatggaccaattaaaagaggcgaaaatcgacgaactggatttgcatcgcgcaattgtcgcattgagcgaaaaaatgaaagcggttgatgacaatgccagtaagaaaaaagatgaaccgtcactgtatacctcctggatgctaagttttaccgcgccaaccagtgaagaggcgcagaccgttttgagcgggtatatcgattatatctctacgttggtggtgaaagagtcgctagaaaacgtccgtaataaactggagatcaaaacccagtttgaaaaagaaaaactggctcaggatcgcattaaaacgaaaaatcaacttgatgcaaacattcagcgcctcaattattcactcgacattgccaacgcggcaggaattaaaaagcccgtttacagtaatggtcaggccgttaaagatgaccccgatttttctatttctctcggtgcagacggtattgaacgcaaactggaaatagaaaaagcggtcactgacgttgcggaactgaacggtgaattacgtaatcggcagtatcttgtcgagcaattaacaaaagcacatgtcaacgatgtgaattttacgccgtttaaatatcagttaagcccgtcattgccagtgaaaaaagacggtccgggtaaggcgattattgtgatcctttccgcgttgatcggcgggatggtggcttgtggtggcgtgctgttgcgctatgcgatggcatccagaaaacaggatgccatgatggcagaccacttagtttaa

SEQ ID NO: 9050 - protein, 377 aa, Escherichia coli B
MSSLNIKQGSDAHFPDYPLASPSNNEIDLLNLISVLWRAKKTVMAVVFAFACAGLLISFILPQKWTSAAVVTPPEPVQWQELEKSFTKLRVLDLDIKIDRTEAFNLFIKKFQSVSLLEEYLRSSPYVMDQLKEAKIDELDLHRAIVALSEKMKAVDDNASKKKDEPSLYTSWMLSFTAPTSEEAQTVLSGYIDYISTLVVKESLENVRNKLEIKTQFEKEKLAQDRIKTKNQLDANIQRLNYSLDIANAAGIKKPVYSNGQAVKDDPDFSISLGADGIERKLEIEKAVTDVAELNGELRNRQYLVEQLTKAHVNDVNFTPFKYQLSPSLPVKKDGPGKAIIVILSALIGGMVACGGVLLRYAMASRKQDAMMADHLV

SEQ ID NO: 9051 - DNA, 981 bp, Escherichia coli B
  CDS (1)..(981): transl_table=11
atgagagtagaaaataataatgtttctgggcaaaaccatgacccggaacagattgatttgattgatttactggtgcagttgtggcgcggcaagatgactatcatcatttctgtcattgtggctattgccctggctattgggtatttggcggtagcgaaggagaaatggacgtcaacagcaattatcactcagcctgacgtggggcaaattgctggctataacaatgccatgaatgttatctatggtcaggctgcacctaaagtgccggatttacaggaggcgttaattggtcgcttcagttctgccttctctgcattagcagaaacgctggataatcagaaagaaccagaaaaacttaccatcgaaccttctgtaaagaaccagcaattaccattgactgtttcttatgttgggcaaactgcagaggacgcacaaatgaaattggcccaatacattcagcaagttgatgataaagtaaatcaagagctagaaaaggatctcaaggacaaccttgctttgggacggaaaaacttgcaggactctttaagaactcaggaagtggttgcgcaggagcagaaagatctgcgtatccgtcagattcaggaagcgttgcagtatgcgaatcaggcgcaggtgacaaaaccgcagattcaacagactggcgaagatatcacacaagatacgttgttccttttggggagcgaagcgctggagtcgatgattaagcatgaggcaactcgtccgttggtgttttcgccagactactatcagactcgtcaaaacctgctggatatcgaaaacttaaaggttgacgatcttgatattcatgcttaccgttatgtgatgaaaccgacgttacctattcgtcgcgatagcccgaaaaaggcaattaccttgattctggcggtgctgctgggcggcatggttggcgcggggattgtgttggggcgtaatgctctgcgtaattacaactcgaagtaa

SEQ ID NO: 9052 - protein, 326 aa, Escherichia coli B
MRVENNNVSGQNHDPEQIDLIDLLVQLWRGKMTIIISVIVAIALAIGYLAVAKEKWTSTAIITQPDVGQIAGYNNAMNVIYGQAAPKVPDLQEALIGRFSSAFSALAETLDNQKEPEKLTIEPSVKNQQLPLTVSYVGQTAEDAQMKLAQYIQQVDDKVNQELEKDLKDNLALGRKNLQDSLRTQEVVAQEQKDLRIRQIQEALQYANQAQVTKPQIQQTGEDITQDTLFLLGSEALESMIKHEATRPLVFSPDYYQTRQNLLDIENLKVDDLDIHAYRYVMKPTLPIRRDSPKKAITLILAVLLGGMVGAGIVLGRNALRNYNSK

SEQ ID NO: 9053 - DNA, 1035 bp, Escherichia coli; identical to SEQ ID NO: 2474
  CDS (1)..(1035): transl_table=11

SEQ ID NO: 9054 - protein, 344 aa, Escherichia coli; identical to SEQ ID NO: 2475

SEQ ID NO: 9055 - DNA, 1035 bp, Escherichia coli; identical to SEQ ID NO: 2476
  CDS (1)..(1035): transl_table=11

SEQ ID NO: 9056 - protein, 344 aa, Escherichia coli; identical to SEQ ID NO: 2477

SEQ ID NO: 9057 - DNA, 1014 bp, Escherichia coli
  CDS (1)..(1014): transl_table=11
atgcggacttggaaatttccgtcagttagggtaatgatgagagtagaaaataataatgtttctgggcaaaaccatgacccggaacagattgatttgattgatttactagtgcagttgtggcgtggcaagatgacaatcatcatttccgtcattgtggctattgccctggctattggatatttggcagtagcgaaggagaaatggacgtcaacagcaattatcactcagcccgacgtggggcaaattgctggctataacaatgctatgaatgttatctatggtcaggctgcaccgaaagtatcggatttgcaggagacgttaattggtcgcttcagttatgccttctctgcattagcagaaacgctggataatcaggaagagccagagaaacttaccatcgaaccttctgttaagaaccagcaattaccattgactgtttcttatgttgggcaaacagcagagggcgcacaaatgaagttggcccaatacattcagcaagttgatgaaaaagtgaatcaagagctagaaaaggatctcaaagacaacattgctctgggacggaaaaacttgcaggactctttaagaacgcaggaagtagtcgcgcaggagcagaaagatctgcgtatccgtcagattcaggaagcgttgcagtatgcgaatcaggcgcaggtgacaaaaccacaggttcagcagactgaagatgtgacgcaagatacgttgttccttttggggagcgaagctctggagtcgatgattaagcatgaggcgactcgtccgttagtgttctcaccaaactactatcagacacgtcaaaacctgctggatatcgaaaacttaaaggttgatgatcttgatattcatgcttaccgctatgtaatgaaaccgacgttacctattcgtcgcgatagtccgaaaaaggcaattacattgattctggcagtgctgctgggcggcatggttggcgcggggattgtgttgaggcgtaacgctctgcgtaattacaacgcgaagtaa

SEQ ID NO: 9058 - protein, 337 aa, Escherichia coli
MRTWKFPSVRVMMRVENNNVSGQNHDPEQIDLIDLLVQLWRGKMTIIISVIVAIALAIGYLAVAKEKWTSTAIITQPDVGQIAGYNNAMNVIYGQAAPKVSDLQETLIGRFSYAFSALAETLDNQEEPEKLTIEPSVKNQQLPLTVSYVGQTAEGAQMKLAQYIQQVDEKVNQELEKDLKDNIALGRKNLQDSLRTQEVVAQEQKDLRIRQIQEALQYANQAQVTKPQVQQTEDVTQDTLFLLGSEALESMIKHEATRPLVFSPNYYQTRQNLLDIENLKVDDLDIHAYRYVMKPTLPIRRDSPKKAITLILAVLLGGMVGAGIVLRRNALRNYNAK

SEQ ID NO: 9059 - DNA, 1131 bp, Vibrio cholerae
  CDS (1)..(1131): transl_table=11
gtgagttcattatccaatcccccgcacgttcagcctccgcaatatccaaattataccaaccatgatgatgaaattgatttaaaagagctgttttctgccttgtggaaagggaaacggctaatcattataaccacattgcttttcagtgtggccgctataggctatgcattaaccgcccaagagtggtggagtgccaaagcaactgttagccaaccgcaattgcaaggtattgctagctaccagcaggcggtaaagcgttatcaaccgttgtttgatgtgtaccaagaagacggcagcattattgttagtgagaccttagatttattaattgatcctgaggttatttttaaacgctttattcaagagtttaatgctaacggtactaaacgccgctttatgcaagctaaccctacttttttaactctgcaaaagccgatgctggagcaaaacaatgatccggaagttatgcagaaactatacgaagagtggtttgagcgcattaaagcttcagcggtaggtaaaaacaacgacacatttaatttaagtttccagtcggtagataaagccagcagcttaaccttgcttaatgactacattcattttgttaaccaaacccttaaccgacagcttaatgctaatctaattagcaccttagctgctaaatatggtgaactgatacagcaagagaaaaacctacagcaacaagcgcacttacgtttacaagttgagttagagcgtacgcagtatgctttaaatattgctgaagcggctgatattaagcaaccagtacaaaatttaggtgaacaagagattttcgcgattaacattggtagccgagccttaaaagctaaggtagatgccttaaaatcagtcaaagatttgagtgtttttgaaccaagactggccattttacaaagtaagttaagccaatttgatttagaaacgttgagtgctgaagcgaagtggtcggtagacggtttttactatttagaccaaccggaactgccactcacccgagataagcctaagcgtgctttaattgtggcgcttggtgtattacttggtggaatgttaggtgtagtaacagtgctagtaagatttgtgtttagaagcgaagaacaaaaggcttag

SEQ ID NO: 9060 - protein, 376 aa, Vibrio cholerae
MSSLSNPPHVQPPQYPNYTNHDDEIDLKELFSALWKGKRLIIITTLLFSVAAIGYALTAQEWWSAKATVSQPQLQGIASYQQAVKRYQPLFDVYQEDGSIIVSETLDLLIDPEVIFKRFIQEFNANGTKRRFMQANPTFLTLQKPMLEQNNDPEVMQKLYEEWFERIKASAVGKNNDTFNLSFQSVDKASSLTLLNDYIHFVNQTLNRQLNANLISTLAAKYGELIQQEKNLQQQAHLRLQVELERTQYALNIAEAADIKQPVQNLGEQEIFAINIGSRALKAKVDALKSVKDLSVFEPRLAILQSKLSQFDLETLSAEAKWSVDGFYYLDQPELPLTRDKPKRALIVALGVLLGGMLGVVTVLVRFVFRSEEQKA

SEQ ID NO: 9061 - DNA, 1089 bp, Aeromonas hydrophila
  CDS (1)..(1089): transl_table=11
atgaatatgaacaaacaacaaatagacaatttggataataaattgccacaaggttggcaggcaacttcaggtaatgagattgacttgtatgaactgttttcggtgctgtggcgtcagaaaatacaaatcctgatgatcacagtcgtgtttgctattgcgggtatcggttatgccctgctggcgccacaggtttgggttagccagtctcagataaaaccaccgtcattgcaggaagttgaatcactcgagcttagagttaaccagctgattaacgctcagataccagccactattttcgactcgtttaacaaagctgctctttatggcgactttgtgagcaacttcaacagtttcaataacaaacgacagtttctgattgaaaagggttatctggatatggatgcagaggctgccgggataacggatgataaagggaagcgtgctctgctgaggaaaatggtcaatgggatcagcgcggtggctttggatgcaccgagtgacaacattaccctctcttttggggcggccactgcaactgaagctcagcagcggctggaacaatacatagctttcatccagcaacaggagattgtgtcgaagagcaaggaactggagacaatctggcaaaaccggatcaagatcctgctgtcccagtatgacagcatcaaagcagatactcttacccagctgaaggatgatgtttcgcgtacagaatacagcctgcgtatcagccgtgcggcgggtatcgagaccccggtcgagaacctcaatgttcgtgatggatttaatatcgagtggggggctaaagcgcttgctgagaagctcaaggtattaaaagaattgaaaaatcttgagcttctcaatccagccttgagcgatcttcgcttacagctgagtagtctaagggctatcaaacttgagcaacaatcgttccagtctttttcctatttggcttccccaagcgagcctttgagccgcgacaaacccaagcgtcctctggtagtagtgctggccaccttgcttggcggtatgctggggatcggcatcgtactggctcggcatgcttttcgccggccagaacaggtatga

SEQ ID NO: 9062 - protein, 362 aa, Aeromonas hydrophila
MNMNKQQIDNLDNKLPQGWQATSGNEIDLYELFSVLWRQKIQILMITVVFAIAGIGYALLAPQVWVSQSQIKPPSLQEVESLELRVNQLINAQIPATIFDSFNKAALYGDFVSNFNSFNNKRQFLIEKGYLDMDAEAAGITDDKGKRALLRKMVNGISAVALDAPSDNITLSFGAATATEAQQRLEQYIAFIQQQEIVSKSKELETIWQNRIKILLSQYDSIKADTLTQLKDDVSRTEYSLRISRAAGIETPVENLNVRDGFNIEWGAKALAEKLKVLKELKNLELLNPALSDLRLQLSSLRAIKLEQQSFQSFSYLASPSEPLSRDKPKRPLVVVLATLLGGMLGIGIVLARHAFRRPEQV

SEQ ID NO: 9063 - DNA, 1083 bp, Aeromonas hydrophila
  CDS (1)..(1083): transl_table=11
atgaacaaacaacaaatagataatttggataataaattaccacaaggttggcaggcaacttcaggtaatgagattgacttgtatgaactgttttcggtgctgtggcgtcagaaaatacaaatcctgatgatcaccgtcgtgtttgctgttgcgggtatcggttatgccctgctggcgccacaggtttgggttagccagtctcagataaaaccaccgtcattgcaggaagttgaatcactcgagcttagagttaaccagctgattaacgctcagataccagccactattttcgactcgtttaacaaagctgctctttatggcgactttgtgagcaacttcaacagtttcaataacaaacgacagtttctgattgaaaagggttatctggatatggatgcagaggctgccgggataacggatgataaagggaagcgtgctctgctgaggaaaatggtcattgggatcagcgcggtggctttggatgcaccgagtgacaacattaccctctcttttggggcggccactgcaactgaagctcagcagcggctggaacaatacatagctttcatccagcaacaggagattgtgtcgaagagcaaggaactggagacaatctggcaaaaccggatcaagatcctgctgtcccagtatgacagcatcaaagcagatactcttacccagctgaaggatgatgtttcgcgtacagaatacagcctgcgtatcagccgtgcggcaggtatcgagaccccggtcgagaacctcaatgttcgtgatggatttaatatcgagtggggggctaaagcgcttgctgagaagctcaaggtattaaaagaattgaaaaatcttgagcttctcaatccagccttgagcgatcttcgcttacagctgagtagtctaagggctatcaaacttgagcatcaatcgttccagtctttttcctatttggcttccccaaacgagcctttgagccgtgacaaacccaagcgtcctctggtagtcgtgctggccaccttgcttggcggtatgctggggatcggcatcgtactggctcggcatgcttttcgccggccagaacaggtatga

SEQ ID NO: 9064 - protein, 360 aa, Aeromonas hydrophila
MNKQQIDNLDNKLPQGWQATSGNEIDLYELFSVLWRQKIQILMITVVFAVAGIGYALLAPQVWVSQSQIKPPSLQEVESLELRVNQLINAQIPATIFDSFNKAALYGDFVSNFNSFNNKRQFLIEKGYLDMDAEAAGITDDKGKRALLRKMVIGISAVALDAPSDNITLSFGAATATEAQQRLEQYIAFIQQQEIVSKSKELETIWQNRIKILLSQYDSIKADTLTQLKDDVSRTEYSLRISRAAGIETPVENLNVRDGFNIEWGAKALAEKLKVLKELKNLELLNPALSDLRLQLSSLRAIKLEHQSFQSFSYLASPNEPLSRDKPKRPLVVVLATLLGGMLGIGIVLARHAFRRPEQV

SEQ ID NO: 9065 - DNA, 1038 bp, Escherichia coli
  CDS (1)..(1038): transl_table=11
atggcgattatcgctaaactatggcgacttaaaattatttcgtccgttagggtaatgatgagagtagaaaataataatgtttctgggcaaaaccatgactcggaacagattgatttgattgatttactagtgcagttgtggcgtggcaagatgacaatcatcatttccgtcattgtggctattgccctggctattggatatttggcagtagcgaaggagaaatggacgtcaacagcaattatcactcagcccgacgtgggacaaattgctggctataacaatgccgtgaatgttatctatggtcaggctgcaccgaaagtatcggatttacaggagacgttaattggtcgcttcagttctgccttctctgcattagcagaaacgctggataatcaggaagaaccagaaaaacttaccatcgaaccttctgttaagaaccagcaattaccattgactgtttcttatgttgggcaaactgcagagggagcacaaatgaagttggcccaatacattcagcaagttgatgataaagtgaatcaagagctagaaaaggatctcaaagacatcattgctctgggacggaaaaacttgcaggactctttaagaacgcaggaagtggttgcgcaggagcagaaagatctgcgtatccgtcagattcaggaagcgttgcagtatgcgaatcaggcgcaggtgacaaaaccgcaaattcaacagactggcgaagatatcacgcaagatacgttgttccttttggggagcgaagcgctggagtcgatgattaagcatgaggcgacccgtccgttggtgttctcaccaaactactatcagactcgtcaaaacctgctggatatcgaaagcttaaaagttgatgatcttgatattcatgcttaccgttatgtaatgaaaccgacgttacctattcgtcgcgatagcccgaaaaaggcaatcaccttgattctggcggtgctgctgggcggcatggttggcgcggggattgtgttggggcgtaatgctctgcgtaattacaacgcgaagtaa

SEQ ID NO: 9066 - protein, 345 aa, Escherichia coli
MAIIAKLWRLKIISSVRVMMRVENNNVSGQNHDSEQIDLIDLLVQLWRGKMTIIISVIVAIALAIGYLAVAKEKWTSTAIITQPDVGQIAGYNNAVNVIYGQAAPKVSDLQETLIGRFSSAFSALAETLDNQEEPEKLTIEPSVKNQQLPLTVSYVGQTAEGAQMKLAQYIQQVDDKVNQELEKDLKDIIALGRKNLQDSLRTQEVVAQEQKDLRIRQIQEALQYANQAQVTKPQIQQTGEDITQDTLFLLGSEALESMIKHEATRPLVFSPNYYQTRQNLLDIESLKVDDLDIHAYRYVMKPTLPIRRDSPKKAITLILAVLLGGMVGAGIVLGRNALRNYNAK

SEQ ID NO: 9067 - DNA, 1107 bp, Shigella sonnei
  CDS (1)..(1107): transl_table=11
atgtcaaaagcatctgaaccacaacagaccccttatctgatcccgcaaggggtctatccaacttatatgccaaaagcagaggatgaaatcgatcttttcgagcttttaggcaccttgtggaagaaaaaatgggttattttatgtgtcacgttgctgactacggggttagcagcagtgtatgcctttaccgcaaaagagcagtggacggctaaaacctatattcaagcaccacgtattgctgaattaggcagctatcttaaatttcaccaagcgtatgcccgaatattaaatcaaccgttagatacgaatgcgttggctaatggattgttttccgatttgattttgattgctgaatcgccagacaccaaagttaaatttctagagagtactgagtattataaaaaggaaacaaataatttatctactgaacaagataagaaaatttggttagctgagcaagcgaataaaggtcttgtgattacgccaccaaaggaaaagggaaatacaagttactacataatacaagcatcggcagactcagcgcaagaggcatataaactactgcagggatatctaaagaatgttaataatcaagctgtaacattaagtcttgatgagtttggtcaaaatgttaatactcttttggttaatctaaataaagaaattattgacatagatttccagagaaaatcagaaaagcttgatcaaatagctcatattcagcgagatttaacaactgcggaacaagccggaatcattgattatcgctctagcaaaggcggcttcgataatgcgcaaagtagctataagttcttgctcggcgaaaaactgttatcagcagagctaaaagcaactaaagatgcgccaattatttacccatttagatattacgaagtgaaacgtcaaattgatgagttagaaggaatgttacgcgataacattcaggcgcaagcatatcgatatcaaatgaagccatctgagccagttataaaagacaaacccaacaaagcattaattttgattcttggtgcattaccaggggcaatgtttgctatagttggtacattagtttatgcgacattaaaagataaaaccaagttagattaa

SEQ ID NO: 9068 - protein, 368 aa, Shigella sonnei
MSKASEPQQTPYLIPQGVYPTYMPKAEDEIDLFELLGTLWKKKWVILCVTLLTTGLAAVYAFTAKEQWTAKTYIQAPRIAELGSYLKFHQAYARILNQPLDTNALANGLFSDLILIAESPDTKVKFLESTEYYKKETNNLSTEQDKKIWLAEQANKGLVITPPKEKGNTSYYIIQASADSAQEAYKLLQGYLKNVNNQAVTLSLDEFGQNVNTLLVNLNKEIIDIDFQRKSEKLDQIAHIQRDLTTAEQAGIIDYRSSKGGFDNAQSSYKFLLGEKLLSAELKATKDAPIIYPFRYYEVKRQIDELEGMLRDNIQAQAYRYQMKPSEPVIKDKPNKALILILGALPGAMFAIVGTLVYATLKDKTKLD

SEQ ID NO: 9069 - DNA, 1110 bp, Actinobacillus actinomycetemcomitans
  CDS (1)..(1110): transl_table=11
atgacagaaaaagtattagaaaatgatgaaattgatttagttgaactaataaaagtattatggaataagagattatggattattctgttttccctattttttaccacgattgctggaatttatgtttttacagcaaaagaacaatggacctctaaagcggagattatcgcgccgagaataacagagcttggggattattttctcgttaaaaaagaatatgctcgaattctcggtagcgagtttgacgccagtatgacagcaaataacttatttggacaatttaatctactctcagagtcattagatgaaagaaaaaaattctttgagaaatctgatttttataaaaaagaaagtgaagggaagtctgagagagaaaagttgcaaattctttttgatttaatgacaaaaaatattgcgattaagaaaccggatactaaaaaatatcctgacttaattggtaatcaaattagtttttatgcagaaactcctatcgaagcacaaaatgtgttatctaagtttatttccacagtaaatatatcggcatatcaaattgaattggataaatttttgactgattttaatgagataatagctgatttaaattatgaaaaaattaagttcgaacgtgatttaagaattcataaatctgttcaattgaaaaatttagaaagtgccttaaatatcgccaaagaggctggtattaaagaatattcaaaatcatttagcatcgcggatcctcagctagtcttacaggctattgcagtttctgaagctaaagttcctctttctgattccaagctcagcgatagtacatatctttttatgctaggggaaacatatttaaaagcacaaattgatgtattaaaaaataataatataatttatccaccaagatactatcaggtgtcttctcagctttctgaattagagcctttactgattaaagcaaaacaagttaaggcaaatgcatttagttatcaggcctcaccggattatccggtggttagggataaaccgaagaagttattgattcttagcattgggtttatattaggtttgattctaggtagtatatatattttatttagaaaattagtgtctaataaataa

SEQ ID NO: 9070 - protein, 369 aa, Actinobacillus actinomycetemcomitans
MTEKVLENDEIDLVELIKVLWNKRLWIILFSLFFTTIAGIYVFTAKEQWTSKAEIIAPRITELGDYFLVKKEYARILGSEFDASMTANNLFGQFNLLSESLDERKKFFEKSDFYKKESEGKSEREKLQILFDLMTKNIAIKKPDTKKYPDLIGNQISFYAETPIEAQNVLSKFISTVNISAYQIELDKFLTDFNEIIADLNYEKIKFERDLRIHKSVQLKNLESALNIAKEAGIKEYSKSFSIADPQLVLQAIAVSEAKVPLSDSKLSDSTYLFMLGETYLKAQIDVLKNNNIIYPPRYYQVSSQLSELEPLLIKAKQVKANAFSYQASPDYPVVRDKPKKLLILSIGFILGLILGSIYILFRKLVSNK

SEQ ID NO: 9071 - DNA, 1098 bp, Vibrio anguillarum
  CDS (1)..(1098): transl_table=11
gtgccttcttactatcagcaaagcaataatgatgaaattgacctgcgtgagttgtttagtgtgctatggcaagggaaattgaccatagtgctgtgcactgttttgtttgctgtgatggcggtggtatatgcattgacggcgcagcagtggtggagcgctaaagcaaccgttacccagcctgaattaagccaagttgtaaccttcctgcaacaggtgaagcagtatcagccattgtttgatctctaccaagaagatggcaccattattgtgagtaaagagcttgatggcttaattaacccagccactattttccagcgttttgtgcgtgcatttaatactaatgacaataaaaagcgctttatgcaaagtaaccctacttttttagccattgagcagcaacagcttaaagtgaatgaaaataacgaaactgatgatgtggcgcgcttttatcaaagttggtatggcaaaattacggctcaagaagtgggtaagacacaagcgggtgatttttatctcagctttcagtcaattgataaagccagcagtttagtgttgcttaacgcctatatcgactttattaaccaacaactgaaccagcagctaaccaatgaccttaccagtaaattgacggtaaaacataaccaacttagccagcaatacagtagtttgcagcagcaaacccaattgcgcctgcaggtggaattggcgcgagtgcagaatgcattggcaattgcaaaagcggccaatattaatgagcctgtacaaaatctgaatgaagagaagctgtttgccattagtattggtagtaaagcattgcaagccaaagtcgatgcattaaaaagtataacgaatttaagtgtgtttgaaccacgcttagcgctgctgcaagcccaagttcagcaggttgagctattaggtaaagtaaaaccagcgcaagtgcaaggttacgcttacttagagcaaccagaagcgccgattagccgtgatgagcccaaacgagcattgatagcggtgcttggaaccttactgggcggcatgcttggcgttgcgattgtgctggtgaggtttgcgtttagaaaagaagaagaaaaagcttag

SEQ ID NO: 9072 - protein, 365 aa, Vibrio anguillarum
MPSYYQQSNNDEIDLRELFSVLWQGKLTIVLCTVLFAVMAVVYALTAQQWWSAKATVTQPELSQVVTFLQQVKQYQPLFDLYQEDGTIIVSKELDGLINPATIFQRFVRAFNTNDNKKRFMQSNPTFLAIEQQQLKVNENNETDDVARFYQSWYGKITAQEVGKTQAGDFYLSFQSIDKASSLVLLNAYIDFINQQLNQQLTNDLTSKLTVKHNQLSQQYSSLQQQTQLRLQVELARVQNALAIAKAANINEPVQNLNEEKLFAISIGSKALQAKVDALKSITNLSVFEPRLALLQAQVQQVELLGKVKPAQVQGYAYLEQPEAPISRDEPKRALIAVLGTLLGGMLGVAIVLVRFAFRKEEEKA

SEQ ID NO: 9073 - DNA, 1134 bp, Escherichia coli
  CDS (1)..(1134): transl_table=11
atgtcatcactgaatattaaacagggaagtgacgctcattttcccgattatcctctggcgtcgcccagtaataatgaaattgatttacttaatctaatctcagttttatggcgggccaaaaaaacggtcatggcggtcgtttttgcgtttgcctgcgcaggcttgctgatctctttcatcctgccgcaaaaatggaccagcgcggcggttgtcacgcctccagaacctgttcagtggcaagagttggagaaatcattcactaagcttcgtgtgctggatctggatatcaaaattgatcgtacagaagcatttaacctgtttatcaagaagtttcagtcggttagcttgctggaagagtacctgcgttcatcaccttatgtgatggaccaattaaaagaggcgaaaatcgacgaactggatttgcatcgcgcaattgtcgcattgagcgaaaaaatgaaagcggttgatgacaatgccagtaagaaaaaagatgaaccgtcactgtatacctcctggacgctaagttttaccgcgccaaccagtgaagaggcgcagaccgttttgagcgggtatatcgattatatctctacgttggtggtgaaagagtcgctagaaaacgtccgtaataaactggagatcaaaacccagtttgaaaaagaaaaactggctcaggatcgcattaaaacgaaaaatcaacttgatgcaaacattcagcgcctcaattattcactcgacattgccaacgcggcaggaattaaaaagcccgtttacagtaatggtcaggccgttaaagatgaccccgatttttctatttctctcggtgcagacggtattgaacgcaaactggaaatagaaaaagcggtcactgacgttgcggaactgaacggtgaattacgtaatcggcagtatcttgtcgagcaattaacaaaagcacatgtcaacgatgtgaattttacgccgtttaaatatcagttaagcccgtcattgccagtgaaaaaagacggtccgggtaaggcgattattgtgatcctttccgcgttgatcggcgggatggtggcttgtggtggcgtgctgttgcgctatgcgatggcatccagaaaacaggatgccatgatggcagaccacttagtttaa

SEQ ID NO: 9074 - protein, 377 aa, Escherichia coli
MSSLNIKQGSDAHFPDYPLASPSNNEIDLLNLISVLWRAKKTVMAVVFAFACAGLLISFILPQKWTSAAVVTPPEPVQWQELEKSFTKLRVLDLDIKIDRTEAFNLFIKKFQSVSLLEEYLRSSPYVMDQLKEAKIDELDLHRAIVALSEKMKAVDDNASKKKDEPSLYTSWTLSFTAPTSEEAQTVLSGYIDYISTLVVKESLENVRNKLEIKTQFEKEKLAQDRIKTKNQLDANIQRLNYSLDIANAAGIKKPVYSNGQAVKDDPDFSISLGADGIERKLEIEKAVTDVAELNGELRNRQYLVEQLTKAHVNDVNFTPFKYQLSPSLPVKKDGPGKAIIVILSALIGGMVACGGVLLRYAMASRKQDAMMADHLV

SEQ ID NO: 9075 - DNA, 1330 bp, Escherichia coli
  CDS (137)..(1114): transl_table=11
atcagggctatttacgccctgattgtcttttgttacctccgcaataattcattatttttatcacttatcctatagcattcacggggattatcgctaaactatgcggacttggaaatttccgtcagttagggtaatgatgagagtagaaaataataatgtttctgggcaaaaccatgacccggaacagattgatttgattgatttactagtgcagttgtggcgtggcaagatgacaattatcatttccgtcattgtggctattgccctggctattggttatttggcagtagcgaaggagaaatggacgtcaacagcaattatcactcagcccgacgtggggcaaattgctggctataacaatgccatgaatgttatctatggtcaggctgcaccgaaagtatcggatttgcaggagacgttaattggtcgcttcagttctgccttctctgcattagcagaaacgctggataatcaggaagagccagaaaaacttaccatcgaaccttctgttaagaaccagcaattaccattgactgtttcttatgttgggcaaactgcagagggcgcacaaatgaagttggcccaatacattcagcaagttgatgataaagtgaatcaagagctagaaaaggatctcaaggacaacattgctctgggacggaaaaacttgcaggactctttaagaacccaggaagtggtcgcgcaggagcagaaagatctgcgtatccgtcagattcaggaagcgttgcagtatgcgaatcaggcgcaggtgacaaagccgcagattcaacagacacaggacgtaacccaggatactatgtttcttttggggagcgaagcgctggagtcgatgattaagcacgaagcgacccgtccgttggtgttctcatcaaactactatcagactcgtcaaaacctgctggatattgacaatcttgacgttgataaacttgatattcatgcttaccgctatgtaatgaaaccgacgttacctattcgtcgcgatagcccgaagaaagcaattaccttgattctggctgtgctgctgggcggcatggttggcgcggggattgtgcttgggcgtaacgcgctgcgtaattacaacgcgaaataatattattgtgcatttaagagaaacgggcagggtggtgacaccatgcccgttttttttgccggatgcgatgctggcgcatcttatccggcctacgtgtgttgagataatgtgtaggcacgataagcttgcgcatcgggcaatggctccgggtgtgacaacaacatcacacctgctcagcacgcaactcactgatgccgtttacgcaggttctcaatt

SEQ ID NO: 9076 - protein, 325 aa, Escherichia coli
MRVENNNVSGQNHDPEQIDLIDLLVQLWRGKMTIIISVIVAIALAIGYLAVAKEKWTSTAIITQPDVGQIAGYNNAMNVIYGQAAPKVSDLQETLIGRFSSAFSALAETLDNQEEPEKLTIEPSVKNQQLPLTVSYVGQTAEGAQMKLAQYIQQVDDKVNQELEKDLKDNIALGRKNLQDSLRTQEVVAQEQKDLRIRQIQEALQYANQAQVTKPQIQQTQDVTQDTMFLLGSEALESMIKHEATRPLVFSSNYYQTRQNLLDIDNLDVDKLDIHAYRYVMKPTLPIRRDSPKKAITLILAVLLGGMVGAGIVLGRNALRNYNAK

SEQ ID NO: 9077 - DNA, 984 bp, Escherichia coli O111; identical to SEQ ID NO: 2478
  CDS (1)..(984): transl_table=11

SEQ ID NO: 9078 - protein, 327 aa, Escherichia coli O111; identical to SEQ ID NO: 2479

SEQ ID NO: 9079 - DNA, 981 bp, Escherichia coli
  CDS (1)..(981): transl_table=11
atgagagtagaaaataataatgtttctgggcaaaaccatgacccggaacagattgatttgattgatttactagtgcagttgtggcgtggcaagatgacaatcatcatttccgtcattgtggctattgccctggctattggatatttggcagtagcgaaggagaaatggacgtcaacagcaattatcactcagcccgacgtggggcaaattgctggctataacaatgccatgaatgttatctatggtcaggctgcaccgaaagtatcggatttgcaggagacgttaattggtcgcttcagttctgccttctctgcattagcagaaacgctggataatcaggaagaacgagaaaaacttaccatcgaaccttctgttaagaaccagcaattaccgttgactgtttcttatgttgggcaaactgcagagggcgcacaaatgaagttggcccaatacattcagcaagttgacgataaagtgaatcaagagctagaaaaggatctcaaagacaacattgctctgggacggaaaaacttgcaggactctttaagaacgcaggaagtagtcgcgcaggagcagaaagatctgcgtatccgtcagattcaggaagcgttgcagtatgcgaatcaggcgcaggtgacaaaaccgcagattcaacagactggcgaagatatcacacaagatacgttgttccttttggggagcgaagcgctggagtcgatgattaagcatgaggcgacccgtccgttggtgttctcgccaaactactatcagactcgtcaaaacctgctggatatcgaaagcttaaaagttgatgatcttgatattcatgcttaccgttatgtgatgaaaccgatgttacctattcgtcgtgatagcccgaaaaaggcaattaccttgattctggcggtgctgctgggtggcatggttggcgcggggattgtgctggggcgtaatgctctacgcaattacaacgcgaagtaa

SEQ ID NO: 9080 - protein, 326 aa, Escherichia coli; identical to SEQ ID NO: 2471

SEQ ID NO: 9081 - DNA, 984 bp, Salmonella typhimurium; identical to SEQ ID NO: 2480
  CDS (1)..(984): transl_table=11

SEQ ID NO: 9082 - protein, 327 aa, Salmonella typhimurium; identical to SEQ ID NO: 2481

SEQ ID NO: 9083 - DNA, 978 bp, Shigella dysenteriae
  CDS (1)..(978): transl_table=11
atgagagtagaaaataataatgtttctgggcaaaaccatgacccggaacagattgatttgattgatttactggtgcagttgtggcgcggcaagatgactatcatcatttctgtcattgtggctattgccctggctatagggtatctggccgttgccaaagaaaagtggacttccactgctatcgttactcaacctgacgtggggcaaattgctggctataacaatgccatgaatgttatctatggtcaggctacgccgaaagtatcggatttacaggagacgttgattggtcgcttcagttctgccttctctgcattagcagaaacgctggataatcaggaagagccagaaaaacttactatcgaaccttctgttaagaaccagcaattaccattgactgtttcttatgttgggcaaacagcagagggcgcacaaatgaagttggcccaatacattcagcaagttgatgataaagtgaatcaagagctagaaaaggatctcaaagacaacattgctctgggacggaaaaacttgcaggactctttaagaacgcaggaagtagtcgcgcaggagcagaaagatctgcgtatccgtcagattcaggaagcgttgcagtatgcgaatcaggcgcaagtgacaaaaccacaggttcagcagactgaagatgtgacgcaagatacgttgttccttttgggtagcgaagcgctggagtcgatgattaagcatgaggcgacccgtccgttggtgttctcaccaagctactatcagactcgtcaaaacctgttggatattgaaaacttaaaggttgatgatcttgatattcatgcttaccgttatgtgatgaaaccgacgttacctattcgtcgcgatagtccgaaaaaggcaattaccttgattctggcggtgctgctgggcggcatggttggcgcggggattgtgctggggcgtaacgctctgcgtaattataacgcgaagtaa

SEQ ID NO: 9084 - protein, 325 aa, Shigella dysenteriae
MRVENNNVSGQNHDPEQIDLIDLLVQLWRGKMTIIISVIVAIALAIGYLAVAKEKWTSTAIVTQPDVGQIAGYNNAMNVIYGQATPKVSDLQETLIGRFSSAFSALAETLDNQEEPEKLTIEPSVKNQQLPLTVSYVGQTAEGAQMKLAQYIQQVDDKVNQELEKDLKDNIALGRKNLQDSLRTQEVVAQEQKDLRIRQIQEALQYANQAQVTKPQVQQTEDVTQDTLFLLGSEALESMIKHEATRPLVFSPSYYQTRQNLLDIENLKVDDLDIHAYRYVMKPTLPIRRDSPKKAITLILAVLLGGMVGAGIVLGRNALRNYNAK

SEQ ID NO: 9085 - DNA, 978 bp, Shigella flexneri
  CDS (1)..(978): transl_table=11
atgagagtagaaaataataatgtttctgggcaaaaccatgacccggaacagattgatttgattgatttactagtgcagttgtggcgtggcaagatgacaattatcatttccgtcattgtggctattgccctggctattggttatttggcagtagcgaaggagaaatggacgtcaacagcaattatcactcagcccgacgtggggcaaattgctggctataacaatgccatgaatgttatctatggtcaggctgcaccgaaagtatcggatttgcaggagacgttaattggtcgcttcagttctgccttctctgcattagcagaaacgctggataatcaggaagagccagaaaaacttaccatcgaaccttctgttaagaaccagcaattaccattgactgtttcttatgttgggcaaactgcagagggcgcacaaatgaagttggcccaatacattcagcaagttgatgataaagtgaatcaagagctagaaaaggatctcaaggacaacattgctctgggacggaaaaacttgcaggactctttaagaacccaggaagtggtcgcgcaggagcagaaagatctgcgtatccgtcagattcaggaagcgttgcagtatgcgaatcaggcgcaggtgacaaagccacaggttcagcagactgaagatgtgacgcaagatacgttgttccttctagggagcgaagcgctggagtcgatgattaagcatgaagcgactcgtccgttggtgttctcaccaaactactatcagacacgtcaaaacctgttggatattgaaaaattaaagtttgatgatcttgatattcatgcttaccgctatgtgatgaaaccgacgttacctattcgtcgcgatagtccgaaaaaggcaatcaccttgattctggcagtgcttctgggcggcatggttggcgcggggattgtgttggggcgtaacgctctgcgtaattacaacgcgaagtaa

SEQ ID NO: 9086 - protein, 325 aa, Shigella flexneri
MRVENNNVSGQNHDPEQIDLIDLLVQLWRGKMTIIISVIVAIALAIGYLAVAKEKWTSTAIITQPDVGQIAGYNNAMNVIYGQAAPKVSDLQETLIGRFSSAFSALAETLDNQEEPEKLTIEPSVKNQQLPLTVSYVGQTAEGAQMKLAQYIQQVDDKVNQELEKDLKDNIALGRKNLQDSLRTQEVVAQEQKDLRIRQIQEALQYANQAQVTKPQVQQTEDVTQDTLFLLGSEALESMIKHEATRPLVFSPNYYQTRQNLLDIEKLKFDDLDIHAYRYVMKPTLPIRRDSPKKAITLILAVLLGGMVGAGIVLGRNALRNYNAK

SEQ ID NO: 9087 - DNA, 23 bp, Artificial sequence
  primer
atgcggacttggaaatttccgtc

SEQ ID NO: 9088 - DNA, 24 bp, Artificial sequence
  primer
ttacttcgcgttgtaattgcgtag

SEQ ID NO: 9089 - protein, 374 aa, Artificial sequence
  consensus sequence
  Variant (4)..(5): Xaa in position 4 to 5 is any amino acid
  Variant (7)..(9): Xaa in position 7 to 9 is any amino acid
  Variant (12)..(13): Xaa in position 12 to 13 is any amino acid
  Variant (15)..(16): Xaa in position 15 to 16 is any amino acid
  Variant (18)..(30): Xaa in position 18 to 30 is any amino acid
  Variant (32)..(34): Xaa in position 32 to 34 is any amino acid
  Variant (36)..(38): Xaa in position 36 to 38 is any amino acid
  Variant (42)..(42): Xaa in position 42 is any amino acid
  Variant (44)..(47): Xaa in position 44 to 47 is any amino acid
  Variant (49)..(80): Xaa in position 49 to 80 is any amino acid
  Variant (81)..(94): Xaa in position 81 to 94 is any or no amino acid
  Variant (96)..(98): Xaa in position 96 to 98 is any amino acid
  Variant (100)..(130): Xaa in position 100 to 130 is any amino acid
  Variant (131)..(162): Xaa in position 131 to 162 is any or no amino acid
  Variant (164)..(167): Xaa in position 164 to 167 is any amino acid
  Variant (169)..(171): Xaa in position 169 to 171 is any amino acid
  Variant (174)..(175): Xaa in position 174 to 175 is any amino acid
  Variant (177)..(178): Xaa in position 177 to 178 is any amino acid
  Variant (181)..(205): Xaa in position 181 to 205 is any amino acid
  Variant (207)..(231): Xaa in position 207 to 231 is any amino acid
  Variant (233)..(234): Xaa in position 233 to 234 is any amino acid
  Variant (236)..(237): Xaa in position 236 to 237 is any amino acid
  Variant (239)..(242): Xaa in position 239 to 242 is any amino acid
  Variant (244)..(256): Xaa in position 244 to 256 is any amino acid
  Variant (257)..(281): Xaa in position 257 to 281 is any or no amino acid
  Variant (284)..(286): Xaa in position 284 to 286 is any amino acid
  Variant (288)..(329): Xaa in position 288 to 329 is any amino acid
  Variant (330)..(334): Xaa in position 330 to 334 is any or no amino acid
  Variant (336)..(338): Xaa in position 336 to 338 is any amino acid
  Variant (340)..(341): Xaa in position 340 to 341 is any amino acid
  Variant (343)..(344): Xaa in position 343 to 344 is any amino acid
  Variant (347)..(347): Xaa in position 347 is any amino acid
  Variant (349)..(355): Xaa in position 349 to 355 is any amino acid
  Variant (357)..(358): Xaa in position 357 to 358 is any amino acid
  Variant (360)..(360): Xaa in position 360 is any amino acid
  Variant (364)..(364): Xaa in position 364 is any amino acid
  Variant (366)..(368): Xaa in position 366 to 368 is any amino acid
  Variant (371)..(371): Xaa in position 371 is any amino acid
  Variant (373)..(373): Xaa in position 373 is any amino acid
IDLXXLXXXLWXXKXXIXXXXXXXXXXXXXYXXXAXXXWTSXAXXXXPXXXXXXXXXXXXXXXXXXXXXXXXXXXXXXXXXXXXXXXXXXXXXXFXXXFXXXXXXXXXXXXXXXXXXXXXXXXXXXXXXXXXXXXXXXXXXXXXXXXXXXXXXXXXXXXXXXSXXXXTXXXAQXXLXXYIXXXXXXXXXXXXXXXXXXXXXXXXXLXXXXXXXXXXXXXXXXXXXXXXXXXLXXAXXAXXXXPXXXXXXXXXXXXXXXXXXXXXXXXXXXXXXXXXXXXXXLGXXXLXXXXXXXXXXXXXXXXXXXXXXXXXXXXXXXXXXXXXXXXXXXXXXXYXXXPXXPXXRDXPXXXXXXXLXXLXGGMXGXXXVLXRXA

SEQ ID NO: 9090 - protein, 40 aa, Artificial sequence
  protein pattern
  Variant (2)..(6): Xaa in position 2 to 6 is any or no amino acid
  Variant (8)..(8): Xaa in position 8 is Ile, Leu or Val
  Variant (9)..(9): Xaa in position 9 is any amino acid
  Variant (10)..(10): Xaa in position 10 is Lys or Arg
  Variant (12)..(12): Xaa in position 12 is any amino acid
  Variant (14)..(15): Xaa in position 14 to 15 is any amino acid
  Variant (16)..(16): Xaa in position 16 is Ala or Pro
  Variant (17)..(17): Xaa in position 17 is Ile or Leu
  Variant (18)..(18): Xaa in position 18 is any amino acid
  Variant (19)..(19): Xaa in position 19 is Ala, Ile, Leu or Val
  Variant (20)..(20): Xaa in position 20 is Ala, Ile or Val
  Variant (22)..(22): Xaa in position 22 is Ala, Gly or Ser
  Variant (23)..(23): Xaa in position 23 is Ala, Thr or Val
  Variant (25)..(25): Xaa in position 25 is Ile or Leu
  Variant (29)..(29): Xaa in position 29 is Ile, Leu, Met or Val
  Variant (30)..(30): Xaa in position 30 is Ala or Gly
  Variant (31)..(31): Xaa in position 31 is any amino acid
  Variant (32)..(32): Xaa in position 32 is Ala, Gly or Val
  Variant (33)..(33): Xaa in position 33 is any amino acid
  Variant (36)..(36): Xaa in position 36 is any amino acid
  Variant (38)..(38): Xaa in position 38 is any amino acid
  Variant (39)..(39): Xaa in position 39 is Ala or Val
  Variant (40)..(40): Xaa in position 40 is Phe, Leu or Met
LXXXXXPXXXDXPXXXXXXXLXXLXGGMXXXXXVLXRXXX

SEQ ID NO: 9091 - protein, 19 aa, Artificial sequence
  protein pattern
  Variant (2)..(2): Xaa in position 2 is any or no amino acid
  Variant (6)..(6): Xaa in position 6 is any amino acid
  Variant (7)..(7): Xaa in position 7 is Asp or Glu
  Variant (9)..(11): Xaa in position 9 to 11 is any or no amino acid
  Variant (14)..(15): Xaa in position 14 to 15 is any amino acid
  Variant (16)..(16): Xaa in position 16 is Lys or Arg
  Variant (17)..(18): Xaa in position 17 to 18 is any amino acid
  Variant (19)..(19): Xaa in position 19 is Ile or Val
EXIDLXXLXXXLWXXXXXX

SEQ ID NO: 9092 - protein, 22 aa, Artificial sequence
  protein pattern
  Variant (2)..(2): Xaa in position 2 is Phe or Tyr
  Variant (3)..(3): Xaa in position 3 is any amino acid
  Variant (4)..(4): Xaa in position 4 is Ala, Gly or Ser
  Variant (5)..(5): Xaa in position 5 is any amino acid
  Variant (7)..(9): Xaa in position 7 to 9 is any or no amino acid
  Variant (12)..(13): Xaa in position 12 to 13 is any amino acid
  Variant (15)..(15): Xaa in position 15 is Ala, Glu, Ser or Thr
  Variant (16)..(16): Xaa in position 16 is any amino acid
  Variant (17)..(17): Xaa in position 17 is Phe or Tyr
  Variant (19)..(19): Xaa in position 19 is Ala, Asp, Asn, Gln or Ser
  Variant (20)..(20): Xaa in position 20 is any amino acid
  Variant (21)..(21): Xaa in position 21 is Ile or Val
  Variant (22)..(22): Xaa in position 22 is Asp, Asn, Gln or Ser
SXXXXTXXXAQXXLXXXIXXXX

SEQ ID NO: 9093 - DNA, 1650 bp, Escherichia coli K12
  CDS (1)..(1650): transl_table=11
atgaactggcgcagaatcgtctggctattggcgttggttactctgccaacacttgcggaggagacgccgttacaactggtgctgcgcggtgcgcagcacgatcaactgtatcagctgtcgtcatcaggcgtgaccaaagtctcagcattacctgactcgctcaccacgccgttagggagtttgtggaaactgtatgtttacgcctggctggaggatacccatcaaccggagcagccctaccagtgtcgcggaaactccccggaagaggtttattgttgtcaggctggggagagcataacgcgcgataccgcgctggtacgttcctgtgggctctattttgcgccgcagcggttgcatattggcgcagatgtgtgggggcaatactggcaacagcgtcaggcacctgcgtggttagcgtctctgactacgctgaagccagaaacctcggtaacggttaaatcgctgcttgattcattagcgacgttacccgcgcaaaacaaagctcaggaagtcttactggatgtggtgctggacgaggcgaaaatcggtgtcgcatccatgctcggtagtcgggtacgggtgaaaacctggagctggtttgccgatgataaacaggaaatccgtcagggtggttttgctggctggttaaccgatggtacaccgctgtgggttactggcagtggcaccagcaaaacggtactaacccgttatgcgacggtgcttaatcgggttttgccagtgccgacgcaggttgccagtgggcaatgtgtagaggtggagctgtttgcccgctatccgctgaagaaaatcacagcggaaaagagtacgacggcagtaaatcccggcgtacttaatgggcgctatcgtgtgacgtttactaatggtaaccacattacgtttgtcagccacggtgagacgaccttactgagcgaaaagggcaaactgaaattgcagtcgcatctcgatcgtgaagagtacgttgccagagttctggatcgcgaggcgaaaagtacgccccctgaggcagcgaaagccatgaccgtggcgattcgcacttttttacagcaaaacgccaatcgggaaggcgattgcctgaccatccccgacagcagcgccacgcagcgtgtttctgcttcgccagcgaccacgggggcgcgaacgatgaccgcctggacgcaggatctcatctatgcaggcgatccggttcattatcatggcagtcgcgctaccgaagggacactttcctggcggcaagccacggcccaggcggggcagggagagcgttacgatcagatactcgcgtttgcttatcccgacaacagtcttagccgctggggagcgccacgctcaacctgccagttattacccaaagcgaaagcctggctggcgaaaaaaatgccgcagtggcggcgtatattacaagctgagacggggtacaacgaaccagacgtgtttgcggtttgccgtttagtctcaggtttcccctataccgatcggcagcagaaacggctgtttattcgtaacttctttacgcttcaggatcggctggatttaacccatgagtatctgcacctggcctttgatggttatcccaccgggcttgatgagaactatatcgaaacgctgacccgacaattattaatggactaa

SEQ ID NO: 9094 - protein, 549 aa, Escherichia coli K12; identical to SEQ ID NO: 2966

SEQ ID NO: 9095 - DNA, 1650 bp, Pseudomonas aeruginosa PAO1; identical to SEQ ID NO: 2967
  CDS (1)..(1650): transl_table=11

SEQ ID NO: 9096 - protein, 549 aa, Pseudomonas aeruginosa PAO1; identical to SEQ ID NO: 2968

SEQ ID NO: 9097 - DNA, 1644 bp, Pseudomonas fluorescens Pf-5; identical to SEQ ID NO: 2969
  CDS (1)..(1644): transl_table=11

SEQ ID NO: 9098 - protein, 547 aa, Pseudomonas fluorescens Pf-5; identical to SEQ ID NO: 2970

SEQ ID NO: 9099 - DNA, 1620 bp, Pseudomonas fluorescens PfO-1; identical to SEQ ID NO: 2971
  CDS (1)..(1620): transl_table=11

SEQ ID NO: 9100 - protein, 539 aa, Pseudomonas fluorescens PfO-1; identical to SEQ ID NO: 2972

SEQ ID NO: 9101 - DNA, 1641 bp, Pseudomonas aeruginosa UCBPP-PA14; identical to SEQ ID NO: 2973
  CDS (1)..(1641)

SEQ ID NO: 9102 - protein, 546 aa, Pseudomonas aeruginosa UCBPP-PA14; identical to SEQ ID NO: 2974

SEQ ID NO: 9103 - DNA, 23 bp, Artificial sequence
  primer
atgaactggcgcagaatcgtctg

SEQ ID NO: 9104 - DNA, 25 bp, Artificial sequence
  primer
ttagtccattaataattgtcgggtc

SEQ ID NO: 9105 - protein, 544 aa, Artificial sequence; identical to SEQ ID NO: 2977
  consensus sequence
  Variant (3)..(3): Xaa in position 3 is any amino acid
  Variant (4)..(4): Xaa in position 4 is any or no amino acid
  Variant (7)..(8): Xaa in position 7 to 8 is any amino acid
  Variant (10)..(11): Xaa in position 10 to 11 is any amino acid
  Variant (12)..(13): Xaa in position 12 to 13 is any or no amino acid
  Variant (15)..(17): Xaa in position 15 to 17 is any amino acid
  Variant (19)..(20): Xaa in position 19 to 20 is any amino acid
  Variant (23)..(25): Xaa in position 23 to 25 is any amino acid
  Variant (26)..(29): Xaa in position 26 to 29 is any or no amino acid
  Variant (32)..(32): Xaa in position 32 is any amino acid
  Variant (35)..(38): Xaa in position 35 to 38 is any amino acid
  Variant (40)..(41): Xaa in position 40 to 41 is any amino acid
  Variant (43)..(43): Xaa in position 43 is any amino acid
  Variant (47)..(48): Xaa in position 47 to 48 is any amino acid
  Variant (50)..(51): Xaa in position 50 to 51 is any amino acid
  Variant (62)..(62): Xaa in position 62 is any amino acid
  Variant (66)..(66): Xaa in position 66 is any amino acid
  Variant (70)..(71): Xaa in position 70 to 71 is any amino acid
  Variant (73)..(74): Xaa in position 73 to 74 is any amino acid
  Variant (76)..(76): Xaa in position 76 is any amino acid
  Variant (78)..(78): Xaa in position 78 is any amino acid
  Variant (80)..(80): Xaa in position 80 is any amino acid
  Variant (82)..(82): Xaa in position 82 is any amino acid
  Variant (89)..(90): Xaa in position 89 to 90 is any amino acid
  Variant (92)..(93): Xaa in position 92 to 93 is any amino acid
  Variant (95)..(95): Xaa in position 95 is any amino acid
  Variant (98)..(98): Xaa in position 98 is any amino acid
  Variant (114)..(119): Xaa in position 114 to 119 is any amino acid
  Variant (122)..(122): Xaa in position 122 is any amino acid
  Variant (128)..(128): Xaa in position 128 is any amino acid
  Variant (131)..(131): Xaa in position 131 is any amino acid
  Variant (134)..(134): Xaa in position 134 is any amino acid
  Variant (137)..(138): Xaa in position 137 to 138 is any amino acid
  Variant (142)..(142): Xaa in position 142 is any amino acid
  Variant (146)..(146): Xaa in position 146 is any amino acid
  Variant (148)..(149): Xaa in position 148 to 149 is any amino acid
  Variant (152)..(153): Xaa in position 152 to 153 is any amino acid
  Variant (155)..(156): Xaa in position 155 to 156 is any amino acid
  Variant (161)..(162): Xaa in position 161 to 162 is any amino acid
  Variant (171)..(171): Xaa in position 171 is any amino acid
  Variant (173)..(173): Xaa in position 173 is any amino acid
  Variant (175)..(175): Xaa in position 175 is any amino acid
  Variant (178)..(179): Xaa in position 178 to 179 is any amino acid
  Variant (181)..(182): Xaa in position 181 to 182 is any amino acid
  Variant (196)..(196): Xaa in position 196 is any amino acid
  Variant (198)..(198): Xaa in position 198 is any amino acid
  Variant (202)..(202): Xaa in position 202 is any amino acid
  Variant (212)..(212): Xaa in position 212 is any amino acid
  Variant (219)..(219): Xaa in position 219 is any amino acid
  Variant (222)..(222): Xaa in position 222 is any amino acid
  Variant (226)..(228): Xaa in position 226 to 228 is any amino acid
  Variant (230)..(230): Xaa in position 230 is any amino acid
  Variant (234)..(235): Xaa in position 234 to 235 is any amino acid
  Variant (237)..(239): Xaa in position 237 to 239 is any amino acid
  Variant (242)..(244): Xaa in position 242 to 244 is any amino acid
  Variant (246)..(248): Xaa in position 246 to 248 is any amino acid
  Variant (255)..(255): Xaa in position 255 is any amino acid
  Variant (263)..(264): Xaa in position 263 to 264 is any amino acid
  Variant (266)..(271): Xaa in position 266 to 271 is any amino acid
  Variant (272)..(272): Xaa in position 272 is any or no amino acid
  Variant (274)..(275): Xaa in position 274 to 275 is any amino acid
  Variant (276)..(276): Xaa in position 276 is any or no amino acid
  Variant (278)..(278): Xaa in position 278 is any amino acid
  Variant (280)..(280): Xaa in position 280 is any amino acid
  Variant (282)..(284): Xaa in position 282 to 284 is any amino acid
  Variant (286)..(286): Xaa in position 286 is any amino acid
  Variant (292)..(292): Xaa in position 292 is any amino acid
  Variant (296)..(296): Xaa in position 296 is any amino acid
  Variant (298)..(298): Xaa in position 298 is any amino acid
  Variant (300)..(300): Xaa in position 300 is any amino acid
  Variant (304)..(307): Xaa in position 304 to 307 is any amino acid
  Variant (308)..(311): Xaa in position 308 to 311 is any or no amino acid
  Variant (316)..(317): Xaa in position 316 to 317 is any amino acid
  Variant (327)..(327): Xaa in position 327 is any amino acid
  Variant (331)..(333): Xaa in position 331 to 333 is any amino acid
  Variant (335)..(335): Xaa in position 335 is any amino acid
  Variant (339)..(339): Xaa in position 339 is any amino acid
  Variant (344)..(344): Xaa in position 344 is any amino acid
  Variant (354)..(356): Xaa in position 354 to 356 is any amino acid
  Variant (361)..(361): Xaa in position 361 is any amino acid
  Variant (367)..(367): Xaa in position 367 is any amino acid
  Variant (377)..(380): Xaa in position 377 to 380 is any amino acid
  Variant (382)..(382): Xaa in position 382 is any amino acid
  Variant (387)..(388): Xaa in position 387 to 388 is any amino acid
  Variant (395)..(396): Xaa in position 395 to 396 is any amino acid
  Variant (398)..(398): Xaa in position 398 is any amino acid
  Variant (403)..(405): Xaa in position 403 to 405 is any amino acid
  Variant (407)..(408): Xaa in position 407 to 408 is any amino acid
  Variant (412)..(413): Xaa in position 412 to 413 is any amino acid
  Variant (419)..(420): Xaa in position 419 to 420 is any amino acid
  Variant (422)..(423): Xaa in position 422 to 423 is any amino acid
  Variant (426)..(426): Xaa in position 426 is any amino acid
  Variant (429)..(430): Xaa in position 429 to 430 is any amino acid
  Variant (432)..(432): Xaa in position 432 is any amino acid
  Variant (435)..(435): Xaa in position 435 is any amino acid
  Variant (446)..(446): Xaa in position 446 is any amino acid
  Variant (448)..(449): Xaa in position 448 to 449 is any amino acid
  Variant (454)..(455): Xaa in position 454 to 455 is any amino acid
  Variant (458)..(458): Xaa in position 458 is any amino acid
  Variant (463)..(463): Xaa in position 463 is any amino acid
  Variant (466)..(467): Xaa in position 466 to 467 is any amino acid
  Variant (469)..(470): Xaa in position 469 to 470 is any amino acid
  Variant (472)..(472): Xaa in position 472 is any amino acid
  Variant (475)..(475): Xaa in position 475 is any amino acid
  Variant (477)..(479): Xaa in position 477 to 479 is any amino acid
  Variant (481)..(481): Xaa in position 481 is any amino acid
  Variant (486)..(487): Xaa in position 486 to 487 is any amino acid
  Variant (497)..(497): Xaa in position 497 is any amino acid
  Variant (500)..(500): Xaa in position 500 is any amino acid
  Variant (504)..(505): Xaa in position 504 to 505 is any amino acid
  Variant (509)..(509): Xaa in position 509 is any amino acid
  Variant (523)..(523): Xaa in position 523 is any amino acid
  Variant (527)..(527): Xaa in position 527 is any amino acid
  Variant (532)..(532): Xaa in position 532 is any amino acid
  Variant (536)..(536): Xaa in position 536 is any amino acid
  Variant (540)..(540): Xaa in position 540 is any amino acid

SEQ ID NO: 9106 - protein, 61 aa, Artificial sequence; identical to SEQ ID NO: 2978
  protein pattern
  Variant (8)..(8): Xaa in position 8 is Leu or Val
  Variant (9)..(9): Xaa in position 9 is Phe or Tyr
  Variant (11)..(11): Xaa in position 11 is Phe or Tyr
  Variant (15)..(15): Xaa in position 15 is any amino acid
  Variant (18)..(18): Xaa in position 18 is any amino acid
  Variant (19)..(19): Xaa in position 19 is Ala or Gln
  Variant (20)..(20): Xaa in position 20 is any amino acid
  Variant (22)..(22): Xaa in position 22 is any or no amino acid
  Variant (24)..(24): Xaa in position 24 is any or no amino acid
  Variant (26)..(26): Xaa in position 26 is Ala, Glu, Gln or Thr
  Variant (28)..(28): Xaa in position 28 is Gln or Arg
  Variant (30)..(30): Xaa in position 30 is Asn, Gln or Arg
  Variant (32)..(32): Xaa in position 32 is any amino acid
  Variant (39)..(39): Xaa in position 39 is Glu, Gln or Thr
  Variant (40)..(40): Xaa in position 40 is Ala or Asn
  Variant (42)..(42): Xaa in position 42 is Glu, Gly or Gln
  Variant (43)..(43): Xaa in position 43 is any amino acid
  Variant (45)..(45): Xaa in position 45 is Glu, Gly or Thr
  Variant (48)..(48): Xaa in position 48 is any amino acid
  Variant (52)..(52): Xaa in position 52 is Lys or Arg
  Variant (59)..(59): Xaa in position 59 is Ala or Glu
  Variant (61)..(61): Xaa in position 61 is Ala or Gln

SEQ ID NO: 9107 - protein, 39 aa, Artificial sequence; identical to SEQ ID NO: 2979
  protein pattern
  Variant (2)..(2): Xaa in position 2 is any amino acid
  Variant (3)..(3): Xaa in position 3 is Asp or Arg
  Variant (6)..(6): Xaa in position 6 is Glu, Gln or Thr
  Variant (7)..(7): Xaa in position 7 is Ala or Val
  Variant (9)..(9): Xaa in position 9 is Gly or Asn
  Variant (10)..(10): Xaa in position 10 is Gln or Arg
  Variant (11)..(11): Xaa in position 11 is any amino acid
  Variant (14)..(14): Xaa in position 14 is any amino acid
  Variant (15)..(15): Xaa in position 15 is any or no amino acid
  Variant (17)..(20): Xaa in position 17 to 20 is any amino acid
  Variant (21)..(21): Xaa in position 21 is any or no amino acid
  Variant (23)..(23): Xaa in position 23 is Gln or Arg
  Variant (28)..(28): Xaa in position 28 is Glu, Asn or Ser
  Variant (31)..(31): Xaa in position 31 is Ala or Ser
  Variant (36)..(36): Xaa in position 36 is Lys or Arg
  Variant (37)..(37): Xaa in position 37 is any amino acid
  Variant (38)..(38): Xaa in position 38 is Ile or Val
  Variant (39)..(39): Xaa in position 39 is Ser or Thr

SEQ ID NO: 9108 - protein, 27 aa, Artificial sequence
  protein pattern
  Variant (2)..(3): Xaa in position 2 to 3 is any amino acid
  Variant (4)..(6): Xaa in position 4 to 6 is any or no amino acid
  Variant (8)..(8): Xaa in position 8 is any amino acid
  Variant (9)..(9): Xaa in position 9 is any or no amino acid
  Variant (11)..(11): Xaa in position 11 is Asp, Asn or Ser
  Variant (12)..(12): Xaa in position 12 is any amino acid
  Variant (13)..(13): Xaa in position 13 is Gln or Ser
  Variant (14)..(14): Xaa in position 14 is any amino acid
  Variant (15)..(15): Xaa in position 15 is Leu or Val
  Variant (16)..(18): Xaa in position 16 to 18 is any amino acid
  Variant (19)..(19): Xaa in position 19 is Glu, Arg or Ser
  Variant (20)..(20): Xaa in position 20 is Ala or Pro
  Variant (21)..(21): Xaa in position 21 is Leu or Met
  Variant (23)..(23): Xaa in position 23 is Ala, Asp or Ser
  Variant (24)..(24): Xaa in position 24 is Asp or Ser
  Variant (26)..(26): Xaa in position 26 is Glu, Gln or Thr
  Variant (27)..(27): Xaa in position 27 is Ala or Thr
GXXXXXLXXLXXXXXXXXXXXPXXLXX

SEQ ID NO: 9109 - DNA, 1701 bp, Escherichia coli K12
  CDS (1)..(1701): transl_table=11
atgattgttaaacgacccgtctcggccagtctggcccgggcctttttttacattgtgctgctgtcgattctttccacgggtatcgctctgctaactctggcgagcagtttgcgcgacgctgaggctatcaatattgccggatcgctgcgtatgcagagttaccgcctgggctacgacttgcaaagtggcagtccacaactcaatgcacatcgccagttatttcagcaggcactgcattcaccggtattaaccaacctcaacgtctggtatgtgccagaagcagtaaaaactcgctatgcgcatctgaatgccaactggctggagatgaataatcggctcagcaagggcgatttgccgtggtatcaggccaatattaataattatgttaatcagatagacctgttcgtactggctttacagcactacgctgaacgcaaaatgctgctggtggtggcgatttccctggctggcggcatcggtattttcacgctggtcttttttactttgcgccgcatacgccatcaggtggttgccccgctgaatcagctggttaccgccagtcagcgtattgaacacgggcagttcgactcgccgccgctggataccaacctgccgaatgagcttggtctgcttgcaaaaacctttaaccagatgtcgagcgagctgcataaattgtaccgttcgctggaagcgtcagtagaagaaaagacccgcgatctccacgaggccaagcgtcgtctggaggtgttgtatcagtgttcgcaggcgctgaacactagccagattgatgtgcattgtttccgccatattttgcagattgttcgcgacaatgaagcggctgaatatctggagttaaatgtcggtgaaaactggcggattagcgaagggcaaccaaacccggaattgccgatgcagattttaccggtgacaatgcaagagacggtttacggcgaactgcactggcaaaatagtcacgtttcatcatcagaaccgctgcttaacagcgtttcgtcgatgctgggacgcggtttgtactttaatcaggcgcagaagcattttcagcaattattgttgatggaagaacgtgcgaccatcgcccgcgaattgcacgactcgctggctcaggtactttcttacttacgtatccagttgacgttactgaagcgttcgataccggaagataacgccaccgcacaaagtatcatggccgatttttcccaggcgttgaatgatgcttatcggcagttacgcgagctgttgactactttccgcctgacgctgcagcaggcggatctcccctccgcattgagggaaatgctggatacgttacaaaatcaaaccagcgccaaactgaccctcgactgccgtctgccaaccctggcactggatgcgcaaatgcaggtgcatttgttgcaaattattcgcgaagcggtgctgaatgcgatgaagcacgccaacgccagcgaaatcgccgtcagttgcgtcaccgcgccggacggcaatcacacggtttatatccgtgataacgggattggtatcggtgaaccgaaagaacccgaaggtcattatggtctgaatatcatgcgcgaacgcgcggaacggctaggtgggacgctgactttttcacaaccttccggcggcggcacgttagtgagtattagctttcgctctgcggagggtgaggaaagtcagttaatgtaa

SEQ ID NO: 9110 - protein, 566 aa, Escherichia coli K12; identical to SEQ ID NO: 3131

SEQ ID NO: 9111 - DNA, 1752 bp, Vibrio cholerae O1 biovar eltor str. N16961; identical to SEQ ID NO: 3132
  CDS (1)..(1752): transl_table=11

SEQ ID NO: 9112 - protein, 583 aa, Vibrio cholerae O1 biovar eltor str. N16961; identical to SEQ ID NO: 3133

SEQ ID NO: 9113 - DNA, 1707 bp, Pasteurella multocida subsp. multocida str. Pm70; identical to SEQ ID NO: 3134
  CDS (1)..(1707): transl_table=11

SEQ ID NO: 9114 - protein, 568 aa, Pasteurella multocida subsp. multocida str. Pm70; identical to SEQ ID NO: 3135

SEQ ID NO: 9115 - DNA, 1869 bp, Pseudomonas aeruginosa PAO1; identical to SEQ ID NO: 3136
  CDS (1)..(1869): transl_table=11

SEQ ID NO: 9116 - protein, 622 aa, Pseudomonas aeruginosa PAO1; identical to SEQ ID NO: 3137

SEQ ID NO: 9117 - DNA, 1782 bp, Yersinia pestis CO92; identical to SEQ ID NO: 3138
  CDS (1)..(1782): transl_table=11

SEQ ID NO: 9118 - protein, 593 aa, Yersinia pestis CO92; identical to SEQ ID NO: 3139

SEQ ID NO: 9119 - DNA, 1797 bp, Salmonella enterica subsp. enterica serovar Typhi str. CT18; identical to SEQ ID NO: 3140
  CDS (1)..(1797): transl_table=11

SEQ ID NO: 9120 - protein, 598 aa, Salmonella enterica subsp. enterica serovar Typhi str. CT18; identical to SEQ ID NO: 3141

SEQ ID NO: 9121 - DNA, 1701 bp, Salmonella enterica subsp. enterica serovar Typhi str. CT18; identical to SEQ ID NO: 3142
  CDS (1)..(1701): transl_table=11

SEQ ID NO: 9122 - protein, 566 aa, Salmonella enterica subsp. enterica serovar Typhi str. CT18; identical to SEQ ID NO: 3143

SEQ ID NO: 9123 - DNA, 1797 bp, Salmonella typhimurium LT2; identical to SEQ ID NO: 3144
  CDS (1)..(1797): transl_table=11

SEQ ID NO: 9124 - protein, 598 aa, Salmonella typhimurium LT2; identical to SEQ ID NO: 3145

SEQ ID NO: 9125 - DNA, 1806 bp, Yersinia pestis KIM; identical to SEQ ID NO: 3148
  CDS (1)..(1806): transl_table=11

SEQ ID NO: 9126 - protein, 601 aa, Yersinia pestis KIM; identical to SEQ ID NO: 3149

SEQ ID NO: 9127 - DNA, 1758 bp, Shewanella oneidensis MR-1; identical to SEQ ID NO: 3150
  CDS (1)..(1758): transl_table=11

SEQ ID NO: 9128 - protein, 585 aa, Shewanella oneidensis MR-1; identical to SEQ ID NO: 3151

SEQ ID NO: 9129 - DNA, 1797 bp, Escherichia coli CFT073; identical to SEQ ID NO: 3152
  CDS (1)..(1797): transl_table=11

SEQ ID NO: 9130 - protein, 598 aa, Escherichia coli CFT073; identical to SEQ ID NO: 3153

SEQ ID NO: 9131 - DNA, 1668 bp, Vibrio vulnificus CMCP6; identical to SEQ ID NO: 3154
  CDS (1)..(1668): transl_table=11

SEQ ID NO: 9132 - protein, 555 aa, Vibrio vulnificus CMCP6; identical to SEQ ID NO: 3155

SEQ ID NO: 9133 - DNA, 1737 bp, Vibrio parahaemolyticus RIMD 2210633; identical to SEQ ID NO: 3156
  CDS (1)..(1737): transl_table=11

SEQ ID NO: 9134 - protein, 578 aa, Vibrio parahaemolyticus RIMD 2210633; identical to SEQ ID NO: 3157

SEQ ID NO: 9135 - DNA, 1797 bp, Salmonella enterica subsp. enterica serovar Typhi Ty2; identical to SEQ ID NO: 3158
  CDS (1)..(1797): transl_table=11

SEQ ID NO: 9136 - protein, 598 aa, Salmonella enterica subsp. enterica serovar Typhi Ty2; identical to SEQ ID NO: 3159

SEQ ID NO: 9137 - DNA, 1716 bp, Vibrio vulnificus YJ016; identical to SEQ ID NO: 3160
  CDS (1)..(1716): transl_table=11

SEQ ID NO: 9138 - protein, 571 aa, Vibrio vulnificus YJ016; identical to SEQ ID NO: 3161

SEQ ID NO: 9139 - DNA, 1722 bp, Erwinia carotovora subsp. atroseptica SCRI1043; identical to SEQ ID NO: 3162
  CDS (1)..(1722): transl_table=11

SEQ ID NO: 9140 - protein, 573 aa, Erwinia carotovora subsp. atroseptica SCRI1043; identical to SEQ ID NO: 3163

SEQ ID NO: 9141 - DNA, 1809 bp, Erwinia carotovora subsp. atroseptica SCRI1043; identical to SEQ ID NO: 3164
  CDS (1)..(1809): transl_table=11

SEQ ID NO: 9142 - protein, 602 aa, Erwinia carotovora subsp. atroseptica SCRI1043; identical to SEQ ID NO: 3165

SEQ ID NO: 9143 - DNA, 1782 bp, Yersinia pseudotuberculosis IP 32953; identical to SEQ ID NO: 3166
  CDS (1)..(1782): transl_table=11

SEQ ID NO: 9144 - protein, 593 aa, Yersinia pseudotuberculosis IP 32953; identical to SEQ ID NO: 3167

SEQ ID NO: 9145 - DNA, 1758 bp, Mannheimia succiniciproducens MBEL55E; identical to SEQ ID NO: 3168
  CDS (1)..(1758): transl_table=11

SEQ ID NO: 9146 - protein, 585 aa, Mannheimia succiniciproducens MBEL55E; identical to SEQ ID NO: 3169

SEQ ID NO: 9147 - DNA, 1947 bp, Azoarcus sp. EbN1; identical to SEQ ID NO: 3170
  CDS (1)..(1947): transl_table=11

SEQ ID NO: 9148 - protein, 648 aa, Azoarcus sp. EbN1; identical to SEQ ID NO: 3171

SEQ ID NO: 9149 - DNA, 1956 bp, Azoarcus sp. EbN1; identical to SEQ ID NO: 3172
  CDS (1)..(1956): transl_table=11

SEQ ID NO: 9150 - protein, 651 aa, Azoarcus sp. EbN1; identical to SEQ ID NO: 3173

SEQ ID NO: 9151 - DNA, 1704 bp, Haemophilus influenzae 86-028NP; identical to SEQ ID NO: 3174
  CDS (1)..(1704): transl_table=11

SEQ ID NO: 9152 - protein, 567 aa, Haemophilus influenzae 86-028NP; identical to SEQ ID NO: 3175

SEQ ID NO: 9153 - DNA, 2124 bp, Psychrobacter arcticus 273-4; identical to SEQ ID NO: 3176
  CDS (1)..(2124): transl_table=11

SEQ ID NO: 9154 - protein, 707 aa, Psychrobacter arcticus 273-4; identical to SEQ ID NO: 3177

SEQ ID NO: 9155 - DNA, 1935 bp, Thiobacillus denitrificans ATCC 25259; identical to SEQ ID NO: 3178
  CDS (1)..(1935): transl_table=11

SEQ ID NO: 9156 - protein, 644 aa, Thiobacillus denitrificans ATCC 25259; identical to SEQ ID NO: 3179

SEQ ID NO: 9157 - DNA, 1716 bp, Actinobacillus pleuropneumoniae serovar 1 str. 4074; identical to SEQ ID NO: 3180
  CDS (1)..(1716)

SEQ ID NO: 9158 - protein, 571 aa, Actinobacillus pleuropneumoniae serovar 1 str. 4074; identical to SEQ ID NO: 3181

SEQ ID NO: 9159 - DNA, 1869 bp, Pseudomonas aeruginosa UCBPP-PA14; identical to SEQ ID NO: 3182
  CDS (1)..(1869)

SEQ ID NO: 9160 - protein, 622 aa, Pseudomonas aeruginosa UCBPP-PA14; identical to SEQ ID NO: 3183

SEQ ID NO: 9161 - DNA, 1620 bp, Haemophilus somnus 2336; identical to SEQ ID NO: 3184
  CDS (1)..(1620)

SEQ ID NO: 9162 - protein, 539 aa, Haemophilus somnus 2336; identical to SEQ ID NO: 3185

SEQ ID NO: 9163 - DNA, 1755 bp, Vibrio sp. Ex25; identical to SEQ ID NO: 3186
  CDS (1)..(1755)

SEQ ID NO: 9164 - protein, 584 aa, Vibrio sp. Ex25; identical to SEQ ID NO: 3187

SEQ ID NO: 9165 - DNA, 1722 bp, Shewanella sp. MR-7; identical to SEQ ID NO: 3188
  CDS (1)..(1722): transl_table=11

SEQ ID NO: 9166 - protein, 573 aa, Shewanella sp. MR-7; identical to SEQ ID NO: 3189

SEQ ID NO: 9167 - DNA, 1935 bp, Alkalilimnicola ehrlichei MLHE-1; identical to SEQ ID NO: 3190
  CDS (1)..(1935): transl_table=11

SEQ ID NO: 9168 - protein, 644 aa, Alkalilimnicola ehrlichei MLHE-1; identical to SEQ ID NO: 3191

SEQ ID NO: 9169 - DNA, 1692 bp, Photobacterium sp. SKA34; identical to SEQ ID NO: 3192
  CDS (1)..(1692): transl_table=11

SEQ ID NO: 9170 - protein, 563 aa, Photobacterium sp. SKA34; identical to SEQ ID NO: 3193

SEQ ID NO: 9171 - DNA, 1884 bp, Pseudomonas sp; identical to SEQ ID NO: 3194
  CDS (1)..(1884): transl_table=11

SEQ ID NO: 9172 - protein, 627 aa, Pseudomonas sp; identical to SEQ ID NO: 3195

SEQ ID NO: 9173 - DNA, 1935 bp, Paracoccus halodenitrificans; identical to SEQ ID NO: 3196
  CDS (1)..(1935): transl_table=11

SEQ ID NO: 9174 - protein, 644 aa, Paracoccus halodenitrificans; identical to SEQ ID NO: 3197

SEQ ID NO: 9175 - DNA, 1800 bp, Pseudomonas fluorescens; identical to SEQ ID NO: 3198
  CDS (1)..(1800): transl_table=11

SEQ ID NO: 9176 - protein, 599 aa, Pseudomonas fluorescens; identical to SEQ ID NO: 3199

SEQ ID NO: 9177 - DNA, 1947 bp, Pseudomonas stutzeri; identical to SEQ ID NO: 3200
  CDS (1)..(1947): transl_table=11

SEQ ID NO: 9178 - protein, 648 aa, Pseudomonas stutzeri; identical to SEQ ID NO: 3201

SEQ ID NO: 9179 - DNA, 1704 bp, Haemophilus influenzae; identical to SEQ ID NO: 3202
  CDS (1)..(1704): transl_table=11

SEQ ID NO: 9180 - protein, 567 aa, Haemophilus influenzae; identical to SEQ ID NO: 3203

SEQ ID NO: 9181 - DNA, 1797 bp, Escherichia coli O157; identical to SEQ ID NO: 3204
  CDS (1)..(1797): transl_table=11

SEQ ID NO: 9182 - protein, 598 aa, Escherichia coli O157; identical to SEQ ID NO: 3205

SEQ ID NO: 9183 - DNA, 24 bp, Artificial sequence
  primer
atgattgttaaacgacccgtctcg

SEQ ID NO: 9184 - DNA, 25 bp, Artificial sequence
  primer
ttacattaactgactttcctcaccc

SEQ ID NO: 9185 - protein, 657 aa, Artificial sequence; identical to SEQ ID NO: 3208
  consensus sequence
  Variant (2)..(2): Xaa in position 2 is any amino acid
  Variant (6)..(7): Xaa in position 6 to 7 is any amino acid
  Variant (10)..(10): Xaa in position 10 is any amino acid
  Variant (14)..(14): Xaa in position 14 is any amino acid
  Variant (17)..(38): Xaa in position 17 to 38 is any amino acid
  Variant (39)..(87): Xaa in position 39 to 87 is any or no amino acid
  Variant (89)..(110): Xaa in position 89 to 110 is any amino acid
  Variant (111)..(116): Xaa in position 111 to 116 is any or no amino acid
  Variant (118)..(135): Xaa in position 118 to 135 is any amino acid
  Variant (136)..(151): Xaa in position 136 to 151 is any or no amino acid
  Variant (153)..(155): Xaa in position 153 to 155 is any amino acid
  Variant (157)..(158): Xaa in position 157 to 158 is any amino acid
  Variant (160)..(166): Xaa in position 160 to 166 is any amino acid
  Variant (168)..(201): Xaa in position 168 to 201 is any amino acid
  Variant (203)..(205): Xaa in position 203 to 205 is any amino acid
  Variant (207)..(217): Xaa in position 207 to 217 is any amino acid
  Variant (219)..(228): Xaa in position 219 to 228 is any amino acid
  Variant (229)..(229): Xaa in position 229 is any or no amino acid
  Variant (231)..(233): Xaa in position 231 to 233 is any amino acid
  Variant (235)..(240): Xaa in position 235 to 240 is any amino acid
  Variant (242)..(244): Xaa in position 242 to 244 is any amino acid
  Variant (246)..(248): Xaa in position 246 to 248 is any amino acid
  Variant (250)..(251): Xaa in position 250 to 251 is any amino acid
  Variant (254)..(255): Xaa in position 254 to 255 is any amino acid
  Variant (257)..(258): Xaa in position 257 to 258 is any amino acid
  Variant (261)..(262): Xaa in position 261 to 262 is any amino acid
  Variant (264)..(266): Xaa in position 264 to 266 is any amino acid
  Variant (268)..(269): Xaa in position 268 to 269 is any amino acid
  Variant (271)..(272): Xaa in position 271 to 272 is any amino acid
  Variant (274)..(279): Xaa in position 274 to 279 is any amino acid
  Variant (281)..(293): Xaa in position 281 to 293 is any amino acid
  Variant (294)..(294): Xaa in position 294 is any or no amino acid
  Variant (296)..(340): Xaa in position 296 to 340 is any amino acid
  Variant (341)..(391): Xaa in position 341 to 391 is any or no amino acid
  Variant (393)..(393): Xaa in position 393 is any amino acid
  Variant (395)..(405): Xaa in position 395 to 405 is any amino acid
  Variant (406)..(430): Xaa in position 406 to 430 is any or no amino acid
  Variant (432)..(454): Xaa in position 432 to 454 is any amino acid
  Variant (456)..(456): Xaa in position 456 is any amino acid
  Variant (462)..(463): Xaa in position 462 to 463 is any amino acid
  Variant (472)..(472): Xaa in position 472 is any amino acid
  Variant (475)..(475): Xaa in position 475 is any amino acid
  Variant (478)..(481): Xaa in position 478 to 481 is any amino acid
  Variant (483)..(485): Xaa in position 483 to 485 is any amino acid
  Variant (487)..(507): Xaa in position 487 to 507 is any amino acid
  Variant (508)..(512): Xaa in position 508 to 512 is any or no amino acid
  Variant (514)..(516): Xaa in position 514 to 516 is any amino acid
  Variant (518)..(518): Xaa in position 518 is any amino acid
  Variant (525)..(525): Xaa in position 525 is any amino acid
  Variant (530)..(537): Xaa in position 530 to 537 is any amino acid
  Variant (538)..(538): Xaa in position 538 is any or no amino acid
  Variant (541)..(560): Xaa in position 541 to 560 is any amino acid
  Variant (562)..(572): Xaa in position 562 to 572 is any amino acid
  Variant (574)..(574): Xaa in position 574 is any amino acid
  Variant (578)..(578): Xaa in position 578 is any amino acid
  Variant (582)..(583): Xaa in position 582 to 583 is any amino acid
  Variant (585)..(586): Xaa in position 585 to 586 is any amino acid
  Variant (589)..(590): Xaa in position 589 to 590 is any amino acid
  Variant (592)..(610): Xaa in position 592 to 610 is any amino acid
  Variant (611)..(612): Xaa in position 611 to 612 is any or no amino acid
  Variant (614)..(614): Xaa in position 614 is any amino acid
  Variant (616)..(616): Xaa in position 616 is any amino acid
  Variant (618)..(625): Xaa in position 618 to 625 is any amino acid
  Variant (626)..(630): Xaa in position 626 to 630 is any or no amino acid
  Variant (634)..(635): Xaa in position 634 to 635 is any amino acid
  Variant (638)..(639): Xaa in position 638 to 639 is any amino acid
  Variant (642)..(643): Xaa in position 642 to 643 is any amino acid
  Variant (645)..(656): Xaa in position 645 to 656 is any amino acid

SEQ ID NO: 9186 - protein, 32 aa, Artificial sequence; identical to SEQ ID NO: 3209
  protein pattern
  Variant (2)..(3): Xaa in position 2 to 3 is any or no amino acid
  Variant (5)..(5): Xaa in position 5 is Glu or Asn
  Variant (8)..(8): Xaa in position 8 is Ala, Gly, Ser or Thr
  Variant (9)..(9): Xaa in position 9 is any amino acid
  Variant (18)..(18): Xaa in position 18 is Ile or Leu
  Variant (19)..(19): Xaa in position 19 is Ala or Gly
  Variant (21)..(21): Xaa in position 21 is Ala, Ser or Val
  Variant (23)..(23): Xaa in position 23 is Ala, Ser or Thr
  Variant (24)..(26): Xaa in position 24 to 26 is any amino acid
  Variant (27)..(27): Xaa in position 27 is Ile, Leu or Met
  Variant (29)..(29): Xaa in position 29 is Ile, Leu, Met or Val
  Variant (30)..(30): Xaa in position 30 is Ala, Ser or Thr
  Variant (31)..(31): Xaa in position 31 is any amino acid

SEQ ID NO: 9187 - protein, 51 aa, Artificial sequence; identical to SEQ ID NO: 3210
  protein pattern
  Variant (2)..(2): Xaa in position 2 is Phe, Ile, Leu or Met
  Variant (3)..(3): Xaa in position 3 is Ala, Gly, Ser or Thr
  Variant (4)..(4): Xaa in position 4 is any amino acid
  Variant (5)..(5): Xaa in position 5 is Leu or Val
  Variant (6)..(6): Xaa in position 6 is Ala, Gly, Ser or Thr
  Variant (7)..(8): Xaa in position 7 to 8 is any amino acid
  Variant (9)..(9): Xaa in position 9 is Phe or Leu
  Variant (10)..(10): Xaa in position 10 is Asn, Gln, Ser or Thr
  Variant (11)..(12): Xaa in position 11 to 12 is any amino acid
  Variant (13)..(13): Xaa in position 13 is Ala, Ser or Thr
  Variant (14)..(14): Xaa in position 14 is any amino acid
  Variant (15)..(15): Xaa in position 15 is Asp, Glu or His
  Variant (17)..(19): Xaa in position 17 to 19 is any amino acid
  Variant (21)..(22): Xaa in position 21 to 22 is any amino acid
  Variant (25)..(26): Xaa in position 25 to 26 is any amino acid
  Variant (28)..(28): Xaa in position 28 is any amino acid
  Variant (29)..(29): Xaa in position 29 is Ala, Asp, Glu, Asn or Gln
  Variant (32)..(33): Xaa in position 32 to 33 is any amino acid
  Variant (35)..(38): Xaa in position 35 to 38 is any amino acid
  Variant (39)..(39): Xaa in position 39 is Asp, Glu, Asn, Gln or Arg
  Variant (40)..(40): Xaa in position 40 is any amino acid
  Variant (42)..(43): Xaa in position 42 to 43 is any amino acid
  Variant (45)..(45): Xaa in position 45 is Phe, Trp or Tyr
  Variant (46)..(50): Xaa in position 46 to 50 is any amino acid
  Variant (51)..(51): Xaa in position 51 is Leu, Met or Val

SEQ ID NO: 9188 - protein, 28 aa, Artificial sequence
  protein pattern
  Variant (2)..(6): Xaa in position 2 to 6 is any or no amino acid
  Variant (13)..(13): Xaa in position 13 is Ala, Gly, Ser or Thr
  Variant (18)..(18): Xaa in position 18 is any amino acid
  Variant (19)..(19): Xaa in position 19 is Ile, Leu, Met or Val
  Variant (20)..(20): Xaa in position 20 is any amino acid
  Variant (21)..(21): Xaa in position 21 is Asp, Glu, Gly, Gln or Ser
  Variant (22)..(22): Xaa in position 22 is any amino acid
  Variant (23)..(23): Xaa in position 23 is Asp, Gly, Asn, Ser or Thr
  Variant (24)..(24): Xaa in position 24 is Phe or Leu
  Variant (25)..(26): Xaa in position 25 to 26 is any amino acid
  Variant (27)..(27): Xaa in position 27 is Ala, Glu or Ser
  Variant (28)..(28): Xaa in position 28 is Leu or Met
LXXXXXQLRELLXTFRLXXXXXXXXXXX

SEQ ID NO: 9189 - protein, 32 aa, Artificial sequence; identical to SEQ ID NO: 3212
  protein pattern
  Variant (4)..(6): Xaa in position 4 to 6 is any or no amino acid
  Variant (8)..(9): Xaa in position 8 to 9 is any amino acid
  Variant (11)..(11): Xaa in position 11 is Ala, Cys, Asp, Gly or Ser
  Variant (12)..(13): Xaa in position 12 to 13 is any amino acid
  Variant (15)..(15): Xaa in position 15 is any amino acid
  Variant (16)..(16): Xaa in position 16 is Ala, Gly or Ser
  Variant (17)..(19): Xaa in position 17 to 19 is any amino acid
  Variant (20)..(20): Xaa in position 20 is Phe, Ile, Leu or Val
  Variant (21)..(26): Xaa in position 21 to 26 is any amino acid
  Variant (28)..(29): Xaa in position 28 to 29 is any amino acid
  Variant (30)..(30): Xaa in position 30 is Ile, Leu or Val
  Variant (31)..(31): Xaa in position 31 is any amino acid
  Variant (32)..(32): Xaa in position 32 is Phe, Ile, Leu or Val

SEQ ID NO: 9190 - protein, 33 aa, Artificial sequence; identical to SEQ ID NO: 3213
  protein pattern
  Variant (2)..(12): Xaa in position 2 to 12 is any amino acid
  Variant (14)..(16): Xaa in position 14 to 16 is any amino acid
  Variant (17)..(17): Xaa in position 17 is any or no amino acid
  Variant (19)..(19): Xaa in position 19 is any or no amino acid
  Variant (22)..(22): Xaa in position 22 is Ala or Ser
  Variant (23)..(24): Xaa in position 23 to 24 is any amino acid
  Variant (26)..(26): Xaa in position 26 is Ala, Ile or Val
  Variant (27)..(27): Xaa in position 27 is any amino acid
  Variant (28)..(28): Xaa in position 28 is Lys or Arg
  Variant (30)..(30): Xaa in position 30 is Ala or Ser
  Variant (31)..(31): Xaa in position 31 is any amino acid
  Variant (32)..(32): Xaa in position 32 is Ala or Gly
  Variant (33)..(33): Xaa in position 33 is Ala, Asp, Glu, Asn, Gln, Ser or Thr

SEQ ID NO: 9191 - protein, 17 aa, Artificial sequence
  protein pattern
  Variant (2)..(2): Xaa in position 2 is any amino acid
  Variant (3)..(3): Xaa in position 3 is Ala, Leu or Val
  Variant (4)..(4): Xaa in position 4 is Ile or Val
  Variant (6)..(6): Xaa in position 6 is any amino acid
  Variant (7)..(7): Xaa in position 7 is Ala or Ser
  Variant (10)..(10): Xaa in position 10 is Leu or Met
  Variant (13)..(13): Xaa in position 13 is any amino acid
  Variant (14)..(14): Xaa in position 14 is Ala, Ser or Thr
  Variant (17)..(17): Xaa in position 17 is Phe, Ile, Leu, Met or Val
AXXXNXXGSXRMXXYRX

SEQ ID NO: 9192 - protein, 18 aa, Artificial sequence
  protein pattern
  Variant (2)..(4): Xaa in position 2 to 4 is any or no amino acid
  Variant (6)..(6): Xaa in position 6 is any amino acid
  Variant (7)..(7): Xaa in position 7 is Phe or Leu
  Variant (9)..(11): Xaa in position 9 to 11 is any amino acid
  Variant (12)..(12): Xaa in position 12 is Asp, Glu or Gln
  Variant (13)..(14): Xaa in position 13 to 14 is any amino acid
  Variant (15)..(15): Xaa in position 15 is Ala, Asn, Ser or Thr
  Variant (17)..(17): Xaa in position 17 is any amino acid
  Variant (18)..(18): Xaa in position 18 is Lys or Arg
VXXXDXXVXXXXXXXEXX

SEQ ID NO: 9193 - DNA, 681 bp, ESCHERICHIA COLI
  CDS (1)..(681): transl_table=11
atgatcaggagtcacaccatgaccattacgtctctggatggctatcgctggctgaagaacgatattattcgcggtaattttcaaccggatgaaaaattacgaatgagtttgctgacatcgcgttatgcacttggcgttgggccgttacgggaagctctttcgcaactggtggcggaacggctggtcacggtggtgaatcaaaaagggtatcgggtggcgtctatgtcagagcaggagctgctcgatattttcgacgcccgcgccaatatggaagcgatgttagtgagtctggcgattgcccgcggtggcgatgagtgggaggcagacgttctcgcaaaagcgcatctgctgagtaagcttgaggcctgtgacgccagcgagaaaatgcttgatgagtgggatctgcgtcatcaggcgtttcatacggcaattgtggcgggctgtggttctcactatttgctgcaaatgcgtgaacggttgtttgatctggcggcgcgttatcgatttatctggctgcggcgaacggtgctttcggtggaaatgctggaggataaacacgatcagcaccagaccctgactgcggcggtactggcgcgagataccgcgcgcgccagtgagttaatgcgccagcatttactgacgccaattcccattatccagcaggcgatggctggcaattaa

SEQ ID NO: 9194 - protein, 226 aa, ESCHERICHIA COLI
MIRSHTMTITSLDGYRWLKNDIIRGNFQPDEKLRMSLLTSRYALGVGPLREALSQLVAERLVTVVNQKGYRVASMSEQELLDIFDARANMEAMLVSLAIARGGDEWEADVLAKAHLLSKLEACDASEKMLDEWDLRHQAFHTAIVAGCGSHYLLQMRERLFDLAARYRFIWLRRTVLSVEMLEDKHDQHQTLTAAVLARDTARASELMRQHLLTPIPIIQQAMAGN

SEQ ID NO: 9195 - DNA, 678 bp, Salmonella enterica subsp. enterica serovar Typhi; identical to SEQ ID NO: 7977
  CDS (1)..(678): transl_table=11

SEQ ID NO: 9196 - protein, 225 aa, Salmonella enterica subsp. enterica serovar Typhi; identical to SEQ ID NO: 7978

SEQ ID NO: 9197 - DNA, 780 bp, Mesorhizobium loti MAFF303099; identical to SEQ ID NO: 7975
  CDS (1)..(780): transl_table=11

SEQ ID NO: 9198 - protein, 259 aa, Mesorhizobium loti MAFF303099; identical to SEQ ID NO: 7976

SEQ ID NO: 9199 - DNA, 663 bp, Shigella flexneri 2a str. 301
  CDS (1)..(663): transl_table=11
atgaccattacgtctctggatggctatcgctggctgaagaacgatattattcgcggtaattttcaaccggatgaaaaattacggatgagtttactgacatcgcgttatgcacttggcgttgggccgttgcaggaagcactttctcaactggtggcggaacggctggtcacggtggtgaatcaaaaagggtatcgggtggcgtctatgtcagagcaggagctgctcgatattttcgacgcccgcgccaatatggaagcgatgctggtcagtctggcgattgcccgcggtggcgatgaatgggaggcagacgttctcgcaaaagcgcatctgctcagtaagctggaagcctgtgacgccagcgagaaaatgcttgatgagtgggatctgcgtcatcaggcgtttcatacagcaattgtggcgggctgtggttctcactatttgctgcaaatgcgtgaacggttgtttgatctggcggcgcgttatcgatttatctggctgcggcgaacggtgctttcggtggaaatgctggaggataaacacgatcagcaccagaccctgactgcggcggtactgccgcgagatacagcgcgcgccagtgagttaatgcgccagcatttactgacgccaattcccattatccagcaggcgatggctggcaattaa

SEQ ID NO: 9200 - protein, 220 aa, Shigella flexneri 2a str. 301
MTITSLDGYRWLKNDIIRGNFQPDEKLRMSLLTSRYALGVGPLQEALSQLVAERLVTVVNQKGYRVASMSEQELLDIFDARANMEAMLVSLAIARGGDEWEADVLAKAHLLSKLEACDASEKMLDEWDLRHQAFHTAIVAGCGSHYLLQMRERLFDLAARYRFIWLRRTVLSVEMLEDKHDQHQTLTAAVLPRDTARASELMRQHLLTPIPIIQQAMAGN

SEQ ID NO: 9201 - DNA, 696 bp, Pseudomonas putida KT2440; identical to SEQ ID NO: 7979
  CDS (1)..(696): transl_table=11

SEQ ID NO: 9202 - protein, 231 aa, Pseudomonas putida KT2440; identical to SEQ ID NO: 7980

SEQ ID NO: 9203 - DNA, 663 bp, Escherichia coli CFT073
  CDS (1)..(663): transl_table=11
atgaccattacctctctggatggctatcgctggctgaagaacgatattattcgcggcaattttcagccggatgaaaaattacggatgagtttgctgacatcgcgttatgcacttggcgtcggaccgttgcgggaagcgctttcgcaactggtggcagaacgactggtcacggtggtgaatcaaaaagggtatcgggtggcgtctatgtcagagcaggagctgctcgatattttcgacgcccgcgccaatatggaagcgatgctggtgagtctggcgattgcccgcggtggcgatgaatgggaggcagacgttctcgcaaaagcgcatctgctcagtaagcttgaggcctgtgacgccagtgagaaaatgcttgatgagtgggatctgcgtcatcaggcgtttcatactgcaattgtggcgggctgtggttcttactatttgctgcaaatgcgtgaacggttgtttgatctggcagcgcgttatcgatttatctggctgcggcgaacagtgctttcggtggaaatgctggaagataaacacgatcagcaccagaccctgactgcggcggtactggcgcgagataccgcgcgcgccagtgagttaatgcgccagcatttactgacgccaattcccattatccagcaggcgatggctggcaattaa

SEQ ID NO: 9204 - protein, 220 aa, Escherichia coli CFT073
MTITSLDGYRWLKNDIIRGNFQPDEKLRMSLLTSRYALGVGPLREALSQLVAERLVTVVNQKGYRVASMSEQELLDIFDARANMEAMLVSLAIARGGDEWEADVLAKAHLLSKLEACDASEKMLDEWDLRHQAFHTAIVAGCGSYYLLQMRERLFDLAARYRFIWLRRTVLSVEMLEDKHDQHQTLTAAVLARDTARASELMRQHLLTPIPIIQQAMAGN

SEQ ID NO: 9205 - DNA, 774 bp, Bradyrhizobium japonicum USDA 110; identical to SEQ ID NO: 7981
  CDS (1)..(774): transl_table=11

SEQ ID NO: 9206 - protein, 257 aa, Bradyrhizobium japonicum USDA 110; identical to SEQ ID NO: 7982

SEQ ID NO: 9207 - DNA, 711 bp, Rhodopseudomonas palustris CGA009; identical to SEQ ID NO: 7983
  CDS (1)..(711): transl_table=11

SEQ ID NO: 9208 - protein, 236 aa, Rhodopseudomonas palustris CGA009; identical to SEQ ID NO: 7984

SEQ ID NO: 9209 - DNA, 699 bp, Bradyrhizobium sp. ORS278
  CDS (1)..(699): transl_table=11
atgacggcctcgacaccaatcctgcagaccgagacggcgagcggcgatacgctcagcgagcgggccgccgcgctgatcgagcgcgacatcgtcgcgggcgttctcacgcccggctcgcggctcggcatcgtcgagctcgccagacgctacgagatcgggccgacaccggtgcgcgaggggctgtcccggctggtgtcgcgcggtctgatcgtcggcatcggccagcgcgggtttcgcgtcgccgaggtgagccgtgaggatctcgtggacatcacgcggatgcgcacggtggtggagaatgaggcgctgcggctggcgatgcagaacggcggcgactcctgggaggccggcatcattgcagcgctgcaccagatgcgacgctacatccagcgcatgcaaagcgaattccgcgagggcgcgcctgagttcgatcgcctgcacaaggcgtttcatactgccctgctcgacgcctgcggatcgcgccgcctgctcgccgcccattccgatctctacgaccaggcctaccgttaccgccgtgtgatgatgcgcagcttcgacgacggcagcggcttcatccgggagcacgaggcactcgccgaactcgtgctcgcgcgcgatgccgccgccgcgcaggcgcggctcgcagcgcatctgcgctcgacgatagagatcgtgtatccccagcccaagggagcctga

SEQ ID NO: 9210 - protein, 232 aa, Bradyrhizobium sp. ORS278
MTASTPILQTETASGDTLSERAAALIERDIVAGVLTPGSRLGIVELARRYEIGPTPVREGLSRLVSRGLIVGIGQRGFRVAEVSREDLVDITRMRTVVENEALRLAMQNGGDSWEAGIIAALHQMRRYIQRMQSEFREGAPEFDRLHKAFHTALLDACGSRRLLAAHSDLYDQAYRYRRVMMRSFDDGSGFIREHEALAELVLARDAAAAQARLAAHLRSTIEIVYPQPKGA

SEQ ID NO: 9211 - DNA, 705 bp, Bradyrhizobium sp. ORS278
  CDS (1)..(705): transl_table=11
atggtgcttcaaatctcggccgagttcgccatgtccggaagcgctacccagaccgtctatgagaaactgcgcgccagcctgctcgccggcctctaccagccggaggagaagctgaagatcagcgagctcggggccgcgttcgcggtcagccccggagcgatccgcgaggcgctggcgcggctgacggcggaaggactggtgacggcgctgccgcagcgcggcttccgtgtcgcgccggtgtcggtcgccgatctgcgtgatctcaccgacatgcgtatcgagatcgagaccaagtgcctgcgccgcgccatcgccaatggcgatctgggttgggaaaccgcggtcatcgccgcgcatcatcgcatggcggcaacaccgatcgccgccgacgacggcagcttctcgccggcctggaccatcgcgcatggtgagtttcacgccgcgcttgcgcaggcctgcggcagcttctggatgttgcgggtgcgcgatctcctgttcgtccacaacgagcgctatctcgacctcgcccgcaaggccgatcgcggccggcgcgacgccgcgcgcgagcaccgcgaactgatggaggcggcactggcgcgcgacgcggagcgcgcggccgcggttatggccgcgcatctcggcaagacccgggacacgatcgaagcggtgctgctcgcctctgctgcgctcagcgcgcagaggtaa

SEQ ID NO: 9212 - protein, 234 aa, Bradyrhizobium sp. ORS278
MVLQISAEFAMSGSATQTVYEKLRASLLAGLYQPEEKLKISELGAAFAVSPGAIREALARLTAEGLVTALPQRGFRVAPVSVADLRDLTDMRIEIETKCLRRAIANGDLGWETAVIAAHHRMAATPIAADDGSFSPAWTIAHGEFHAALAQACGSFWMLRVRDLLFVHNERYLDLARKADRGRRDAAREHRELMEAALARDAERAAAVMAAHLGKTRDTIEAVLLASAALSAQR

SEQ ID NO: 9213 - DNA, 693 bp, Klebsiella pneumoniae subsp. pneumoniae MGH 78578
  CDS (1)..(693): transl_table=11
atgaccgccattccccaggcgacggccattgacggataccgttggttaaaaaacgacatcatccgcggggtttaccaccccgatgagaagctgcggatgagcctgctgacgtcgcgctatggcctgggggtcggtccgctgcgcgaggcgctttcgcaactggtggccgagcggctggtgacggtggtcaatcagaaaggctatcgggtggcgcccatgtcggaacaggagcttctcgatatcttcgacgcgcgcgccaacatggaggccatgctggtgcgtctcgccattgaacgcggcggcgacgagtgggaagccgagctgctggcccgcgcccatctgctcaacaagctggagtcgtgcgaagcgagtgagcacctactcgatgaatgggaccagcgccatcaggcgtttcacaccgccatcgtcgccggctgcggttcgcagtatctgctgcagatgcgcgaacggctgttcgatctggcggcgcgctaccgcttcatctggctgcgcaccaccgtgctgtcggtggagatgctggaagataagcatgtccagcatcagaccctggtggacgctattctggcgcgcgacgccgaacaggccagcgcgctgatgcgcgagcacttactgactccgatcccgattattcaacaggcgatggctggcaagctgtcgccgcaggcagggtga

SEQ ID NO: 9214 - protein, 230 aa, Klebsiella pneumoniae subsp. pneumoniae MGH 78578
MTAIPQATAIDGYRWLKNDIIRGVYHPDEKLRMSLLTSRYGLGVGPLREALSQLVAERLVTVVNQKGYRVAPMSEQELLDIFDARANMEAMLVRLAIERGGDEWEAELLARAHLLNKLESCEASEHLLDEWDQRHQAFHTAIVAGCGSQYLLQMRERLFDLAARYRFIWLRTTVLSVEMLEDKHVQHQTLVDAILARDAEQASALMREHLLTPIPIIQQAMAGKLSPQAG

SEQ ID NO: 9215 - DNA, 732 bp, Salmonella enterica subsp. arizonae serovar 62:z4,z23:--
  CDS (1)..(732): transl_table=11
atgcccggcgccagccgggatgcttctcaggagaaaaagatgaccgcgctttcccaaccgacggccatagatggatatcgctggcttaaaaatgacattattcgcgggacttatcagccggatgaaaaactgcggatgagtttattaacctcccgctatgcgctcggcgtaggaccgctacgcgaggcgctgtcacaactggtggcggaacggctggtcaccgtggtgaatcaaaaaggctatcgtgtggcgtccatgtcagagatggaacttctcgatatttttgacgcgcgcgccaatatggaagcaatgctggtgcgtctggcgattgaacgcggcgatgatgcgtgggaggcggagatcctggcccgagcgcatatgctcagtaaactggaagccagcgatgccagtgaacatatgctcgatgaatgggatcagcgccaccaggcgtttcattccgcaattgtcgccggttgcggctcccactacctgctacagatgcgcgaacggttattcgatctggcggcgcgctaccgctttatttggttacgtgaaaccgtcctgtctgtcgagatgctggaagataaacatatccagcatcacacgctgacagaagcgattctggcgcgcgaggcggcacgcgccagcgagttaatgcgtcagcatttgctgacgccgattcccattattcgtcaggcgatgacgggaaaaatgaagccaggagcggcctga

SEQ ID NO: 9216 - protein, 243 aa, Salmonella enterica subsp. arizonae serovar 62:z4,z23:--
MPGASRDASQEKKMTALSQPTAIDGYRWLKNDIIRGTYQPDEKLRMSLLTSRYALGVGPLREALSQLVAERLVTVVNQKGYRVASMSEMELLDIFDARANMEAMLVRLAIERGDDAWEAEILARAHMLSKLEASDASEHMLDEWDQRHQAFHSAIVAGCGSHYLLQMRERLFDLAARYRFIWLRETVLSVEMLEDKHIQHHTLTEAILAREAARASELMRQHLLTPIPIIRQAMTGKMKPGAA

SEQ ID NO: 9217 - DNA, 696 bp, Pseudomonas putida GB-1
  CDS (1)..(696): transl_table=11
ttggaagcgctcgccccccgacaaaactcagcattcagcgggtatgagaggctcaagaaggacatcatccgcggcgtgttcaaacccggtgaaaaactgttgatgagcgccctcaaggaacgctacgacctgggcgtgggcccgctgcgcgaagcactgtcacaactggtggcagagcacctggtcaacgcgataagccagaaaggctaccgggtggcgcccatgtcgctggacgagatgaacgacatctatgatgcccgcgccaacctggaagcgatgatcatcgccctggccatcgaacgcggcgacgacgcctgggaggcctcggtgctggcccactcgcacaccctggccaaagtggtggaggtgaaaacccgtgaacagcgcctggacgtgtgggacgaacggcacaaggcgttccataccgccatcgcctcgggctgcggctccaagcacctgctgcaagcgcgcacctacctgttcgaccaggccgaacgctaccgccatctgtggctgacgcagacggtgttttccgagcaggcgctggagctcaagcgccaggagcatgcagcgctggtcgaggtgattctcgcccgtgatgccaagcgcgccagcgccatgatgcgctcgcacctgatgaccccggtgccgatcattgcgcagatcatgcatgctgaaggtatcggcgcacgctag

SEQ ID NO: 9218 - protein, 231 aa, Pseudomonas putida GB-1
MEALAPRQNSAFSGYERLKKDIIRGVFKPGEKLLMSALKERYDLGVGPLREALSQLVAEHLVNAISQKGYRVAPMSLDEMNDIYDARANLEAMIIALAIERGDDAWEASVLAHSHTLAKVVEVKTREQRLDVWDERHKAFHTAIASGCGSKHLLQARTYLFDQAERYRHLWLTQTVFSEQALELKRQEHAALVEVILARDAKRASAMMRSHLMTPVPIIAQIMHAEGIGAR

SEQ ID NO: 9219 - DNA, 708 bp, Dechloromonas aromatica RCB; identical to SEQ ID NO: 7985
  CDS (1)..(708): transl_table=11

SEQ ID NO: 9220 - protein, 235 aa, Dechloromonas aromatica RCB; identical to SEQ ID NO: 7986

SEQ ID NO: 9221 - DNA, 783 bp, Ralstonia eutropha JMP134; identical to SEQ ID NO: 7987
  CDS (1)..(783): transl_table=11

SEQ ID NO: 9222 - protein, 260 aa, Ralstonia eutropha JMP134; identical to SEQ ID NO: 7988

SEQ ID NO: 9223 - DNA, 708 bp, Burkholderia sp. 383; identical to SEQ ID NO: 7991
  CDS (1)..(708): transl_table=11

SEQ ID NO: 9224 - protein, 235 aa, Burkholderia sp. 383; identical to SEQ ID NO: 7992

SEQ ID NO: 9225 - DNA, 666 bp, Silicibacter sp. TM1040; identical to SEQ ID NO: 7993
  CDS (1)..(666): transl_table=11

SEQ ID NO: 9226 - protein, 221 aa, Silicibacter sp. TM1040; identical to SEQ ID NO: 7994

SEQ ID NO: 9227 - DNA, 738 bp, Mesorhizobium sp. BNC1; identical to SEQ ID NO: 7995
  CDS (1)..(738): transl_table=11

SEQ ID NO: 9228 - protein, 245 aa, Mesorhizobium sp. BNC1; identical to SEQ ID NO: 7996

SEQ ID NO: 9229 - DNA, 675 bp, Rhizobium leguminosarum bv. viciae 3841
  CDS (1)..(675): transl_table=11
atgctcaagcaagtccacgacccggcggaaacagtaagcgatgtcgtcttccggcagattcgcgaggacatcatatcgggcacattgccgccgggggccaagatcaagctggagcaggcaaaggagcgctactccatcggcatttcatcgctgcgcgaaatcctgagccgcctgaccacggaaaacctcgtcgtcgccgaggggcagcgcggttttgaagtcagccctgcttctcgccgcgaactcctcgagctcgccgacctcaggatcgttctggaaacgcacgcgatcggccttgccttcgctgcgggaaatctcgaatgggaggggcgcatcgtcgccgcccatcaccggctggccgccgcggaacgcaagctccttgccggcgacgtctcgaggaccgtcgactgggtccgatacgattgggagttccatcaggcgatcgtctcggcctgcaattcggcgacgctgatggcgacattgtcatccgtcttcgaccgctttctccgctaccatatgctggccgagagttttcgcggcaagcccgtcgtcgatgaccacaggcttttgtttgaactttccattcggcgcgacgtcgccggcgcgaccgacgtcgtcaggcggcacgttcaaagcggcgtggaacatgtgctgaagagcggccggattacttag

SEQ ID NO: 9230 - protein, 224 aa, Rhizobium leguminosarum bv. viciae 3841
MLKQVHDPAETVSDVVFRQIREDIISGTLPPGAKIKLEQAKERYSIGISSLREILSRLTTENLVVAEGQRGFEVSPASRRELLELADLRIVLETHAIGLAFAAGNLEWEGRIVAAHHRLAAAERKLLAGDVSRTVDWVRYDWEFHQAIVSACNSATLMATLSSVFDRFLRYHMLAESFRGKPVVDDHRLLFELSIRRDVAGATDVVRRHVQSGVEHVLKSGRIT

SEQ ID NO: 9231 - DNA, 738 bp, Azoarcus sp. BH72
  CDS (1)..(738): transl_table=11
atgccgctcgaatccctgctttccgccgtttcatccgcctccgccgagccgccctccacgctgatcgaggcggcgtaccgccagatccggcgcgacatcgtgctgggcgttcatccgcccggcgaacggctgcgcatcgagcagctcaagacgcgctacgcggccagttccggcacgctgcgcgaggcgctcgccctgctggtgtccgacgacctggtggtggcgcagggacagcgcgggttctcggtggcgccgatgtcgctggaggacctgaccgatctctcctacgtgcgctcgctggtggaggcggaggccgcgcggcaaagcctgctgcgcggcgacgacgactgggaggcgcgcctcgtcagcgcctttcacaagctcacgcgcaccgaggagcgcctggctgcccgcaccgccgatgtctatgaggagtgggagctgcgcaacttcgaattccacgaggcgctggtgtccgcctgcggctctccccggctgctcagcctgcgcgccatgctccacctgcaggccgagcgctaccggcgggtgtcggccttgtccgggccgcggccgggctcggtgcatgcggagcacgagcagatcttcacgctggcgctcgcgcgcaagggcgacgccctggccgaggtgatcggccagcacgtccgccgctcgctcgacgtgatccgcaacagcggcttgctgagcgcgcgtgcgcaggacggcggcgaggcggcctga

SEQ ID NO: 9232 - protein, 245 aa, Azoarcus sp. BH72
MPLESLLSAVSSASAEPPSTLIEAAYRQIRRDIVLGVHPPGERLRIEQLKTRYAASSGTLREALALLVSDDLVVAQGQRGFSVAPMSLEDLTDLSYVRSLVEAEAARQSLLRGDDDWEARLVSAFHKLTRTEERLAARTADVYEEWELRNFEFHEALVSACGSPRLLSLRAMLHLQAERYRRVSALSGPRPGSVHAEHEQIFTLALARKGDALAEVIGQHVRRSLDVIRNSGLLSARAQDGGEAA

SEQ ID NO: 9233 - DNA, 720 bp, Azoarcus sp. BH72
  CDS (1)..(720): transl_table=11
atgctcaacgacgtcgccccagccgaacttcccaccgcggagcccaagaccctggtcgaggccgcctacaaccagctgcgccgcgacatcatcgaaggcgttcatccgccgggcgaaaaactgcgcgtcgagcatctaaaggaccagtacgaggtcggcgccggaaccctgcgcgaggccttgctgctgctggtcaccgatgcgctggtggtggcccagggccagcgcggcttccgcgtggcccccatctccgtggccgacttcgaggacatcacccgcacccgcgtgctgctggaaaccgaggcactgcgccagtcgatcgcgctcggcgacgacgcctgggaggccgatctggtcgccgccttccaccgtctgtcgcgcgccgaacagaagctggctgaccacgacgccaacaccaccgaggaatgggagaagcgcaaccgcgccttccacgaggcgctgatcgccgcctgcccctcgcgctggatccgccattttcagcacatcctctatcagcagtccgagcgctaccgccgcatcagcctgttccgccagcccatcgcgcgcgacatccacgccgaacaccaggccatcttcgacgccacgctcgcgcgcgacgccacccgcgccacctccatcctcaccgagcacatcctgcgcacgctggatgcggtgaagcggatgccggaggatttcttcagcaagcctgggcagcggtga

SEQ ID NO: 9234 - protein, 239 aa, Azoarcus sp. BH72
MLNDVAPAELPTAEPKTLVEAAYNQLRRDIIEGVHPPGEKLRVEHLKDQYEVGAGTLREALLLLVTDALVVAQGQRGFRVAPISVADFEDITRTRVLLETEALRQSIALGDDAWEADLVAAFHRLSRAEQKLADHDANTTEEWEKRNRAFHEALIAACPSRWIRHFQHILYQQSERYRRISLFRQPIARDIHAEHQAIFDATLARDATRATSILTEHILRTLDAVKRMPEDFFSKPGQR

SEQ ID NO: 9235 - DNA, 771 bp, Sulfitobacter sp. EE-36; identical to SEQ ID NO: 7999
  CDS (1)..(771): transl_table=11

SEQ ID NO: 9236 - protein, 256 aa, Sulfitobacter sp. EE-36; identical to SEQ ID NO: 8000

SEQ ID NO: 9237 - DNA, 672 bp, Oceanicola batsensis HTCC2597; identical to SEQ ID NO: 8001
  CDS (1)..(672): transl_table=11

SEQ ID NO: 9238 - protein, 223 aa, Oceanicola batsensis HTCC2597; identical to SEQ ID NO: 8002

SEQ ID NO: 9239 - DNA, 624 bp, Photobacterium sp. SKA34; identical to SEQ ID NO: 8003
  CDS (1)..(624): transl_table=11

SEQ ID NO: 9240 - protein, 207 aa, Photobacterium sp. SKA34; identical to SEQ ID NO: 8004

SEQ ID NO: 9241 - DNA, 702 bp, Neptuniibacter caesariensis; identical to SEQ ID NO: 8005
  CDS (1)..(702): transl_table=11

SEQ ID NO: 9242 - protein, 233 aa, Neptuniibacter caesariensis; identical to SEQ ID NO: 8006

SEQ ID NO: 9243 - DNA, 711 bp, Marinobacter sp. ELB17
  CDS (1)..(711): transl_table=11
atgaatcctaaaacacaccaagaagagctggcggatatcagagagaacctcggtgtccgcgcttacaagctgctaaagaatgacattattaggggtcagttccgccccgacgagaagctacgcatgagcatcttgaaagagcgctacgacctcggcatcgggccgctacgtgaagccttgtcgcaattggtagccgagcaattagtcgtggccatcagtcagagaggctatcgcgtttctcctatgtcgcttgcagaattgcatgatatttacgatgcgcgtgcagagctggaagccatgatgcttggcctggcgattgaacggggtgatgacaactgggaagcggagatattggcccgaaactatcagctcgccaaagtgagtgaagcccatacacccgactcactgctggaaatatgggatgcccgccatagccagttccatatcgctctggtttgcggttgccgttctcctcagctaatgaaagtgcgcgatggactctttgataaagttcagcgatatcgtcatgtctggctgaaagaaaccgttttttccagcgaagccctagatcaaaagcgcaaagagcacgctgcgctggtggaagttactcttgcccgccgcaaagacgaggccgagaagatgatgcgcgaacacctgatgacgcctgtgccgattattactgccgtcatgcaacagcaaggaactgcctga

SEQ ID NO: 9244 - protein, 236 aa, Marinobacter sp. ELB17
MNPKTHQEELADIRENLGVRAYKLLKNDIIRGQFRPDEKLRMSILKERYDLGIGPLREALSQLVAEQLVVAISQRGYRVSPMSLAELHDIYDARAELEAMMLGLAIERGDDNWEAEILARNYQLAKVSEAHTPDSLLEIWDARHSQFHIALVCGCRSPQLMKVRDGLFDKVQRYRHVWLKETVFSSEALDQKRKEHAALVEVTLARRKDEAEKMMREHLMTPVPIITAVMQQQGTA

SEQ ID NO: 9245 - DNA, 714 bp, Thauera sp. MZ1T
  CDS (1)..(714): transl_table=11
atgctccacacctcgcctccctacgccgtccgccaagaaaccgaggtcgccgaaccgaagacgctggtcgaggcggcctatcgcagcctgcgccgcaacatcatcgagggccgcctgtcgccgggcgagaagctgcgcatcgagcacatcaagaacgactacggcgtggggggcgcgacgctgcgcgaggccctctcgctgctcacctcggatgcgctcgtggtgtcgcagggccagcgcggcttccgcgtcgccccggtctcgctcgaggacctcgccgatatcaccgagacgcgggtgatgctcgagtgcagcgcgttgcgccagtcgatcacgctcggcgacgaggcctgggaggccgagctcaccgccgccttccaccgcctcacgcgcgcggaggagaagctcgccgaaggcaacaatcgcgagcagtgggaagagcgcaaccgcatcttccacgaggtgctgatcgccgcctgcccctcgcgctggaccaagcacttcctgtccatcctctatcaccaggccgagcgctaccgccacctctcgctgcgtcgcagcgacggtacgcgccggctgcacgacgagcacgccgccctgttcgaggccgcgatggggcgtgacgccgagactgccacccgcctgctcggcgaacacatccgcctgacgctgcagtcggtcagcctcgacaaggccgccaccgccagccactga

SEQ ID NO: 9246 - protein, 237 aa, Thauera sp. MZ1T
MLHTSPPYAVRQETEVAEPKTLVEAAYRSLRRNIIEGRLSPGEKLRIEHIKNDYGVGGATLREALSLLTSDALVVSQGQRGFRVAPVSLEDLADITETRVMLECSALRQSITLGDEAWEAELTAAFHRLTRAEEKLAEGNNREQWEERNRIFHEVLIAACPSRWTKHFLSILYHQAERYRHLSLRRSDGTRRLHDEHAALFEAAMGRDAETATRLLGEHIRLTLQSVSLDKAATASH

SEQ ID NO: 9247 - DNA, 720 bp, Thauera sp. MZ1T
  CDS (1)..(720): transl_table=11
atgaacgaagccgttccgcaaagaacaccggaggccgtcgagcccaagaccctcgtcgagggggcctaccagcgcctgcgccgggacatcatcgagggcgttcacccgcccggcgagaaacttcgcgtcgaacatctcaaggaccgctacgaggtcggcgccggcaccctgcgcgaggccctcctcctgctcgtcaccgacgccctggtggtcgcccagggacaacgcggcttccgcgtctcgccgatttccatcgaggacttcgaggacatcacccgcacccgcctgctgctcgagaccgaagccctgcgccagtcgctgcagctcggcggcgaggactgggaggcctccgtggtcgcggctttccaccgcctctctcgcgccgagcaaaagctcggcgaccacgactcgctggccgccgaggagtgggagcggcgcaaccgcgccttccacgaggcactgatcgccgcgtcgccctcgcgctggatccgtcatttccagcacatcctctaccagcagtccgagcgctaccggcgcctgagcctgttcagccatccgatcccgcgcgacatccacgccgagcaccaggccttgttcaacgccagcctggcacgcgacaccacgcgcgcgacctccatcctcaccgagcacgtgctgcgcacgctcgacgcggtgaagctgcttccggcggagttcttcgccggcaagcacaagtcctga

SEQ ID NO: 9248 - protein, 239 aa, Thauera sp. MZ1T
MNEAVPQRTPEAVEPKTLVEGAYQRLRRDIIEGVHPPGEKLRVEHLKDRYEVGAGTLREALLLLVTDALVVAQGQRGFRVSPISIEDFEDITRTRLLLETEALRQSLQLGGEDWEASVVAAFHRLSRAEQKLGDHDSLAAEEWERRNRAFHEALIAASPSRWIRHFQHILYQQSERYRRLSLFSHPIPRDIHAEHQALFNASLARDTTRATSILTEHVLRTLDAVKLLPAEFFAGKHKS

SEQ ID NO: 9249 - DNA, 801 bp, Pseudomonas putida
  CDS (1)..(801): transl_table=11
atgtctacatttttatcattcagcgacattagacttttttgtccattgtttttcgtcggcagagggtttcggtatgatcggcaaaacgttttgaggaacaggatcttggaagcgctcgccccccgacaaaactcagcattcagcgggtatgagaggctcaagaaggacatcatccgcggcgtgttcaaacccggtgaaaaactgttgatgagcgccctcaaggaacgctacgacctgggcgtgggcccgctgcgcgaagcactgtcacaactggtggcagagcacctggtcaacgcgataagccagaaaggctaccgggtggcgcccatgtcgctggacgagatgaacgacatctatgatgcccgcgccaacctggaagcgatgatcatcgccctggccatcgaacgcggcgacgacgcctgggaggcctcggtgctggcccactcgcacaccctggccaaagtggtggaggtgaaaacccgtgaacagcgcctggacgtgtgggacgaacggcacaaggcgttccataccgccatcgcctcgggctgcggctccaagcacctgctgcaagcgcgcacctacctgttcgaccaggccgaacgctaccgccatctgtggctgacgcagacggtgttttccgagcaggcgctggagctcaagcgccaggagcatgcagcgctggtcgaggtgattctcgcccgtgatgccaagcgcgccagcgccatgatgcgctcgcacctgatgaccccggtgccgatcattgcgcagatcatgcatgctgaaggtatcggcgcacgctag

SEQ ID NO: 9250 - protein, 266 aa, Pseudomonas putida
MSTFLSFSDIRLFCPLFFVGRGFRYDRQNVLRNRILEALAPRQNSAFSGYERLKKDIIRGVFKPGEKLLMSALKERYDLGVGPLREALSQLVAEHLVNAISQKGYRVAPMSLDEMNDIYDARANLEAMIIALAIERGDDAWEASVLAHSHTLAKVVEVKTREQRLDVWDERHKAFHTAIASGCGSKHLLQARTYLFDQAERYRHLWLTQTVFSEQALELKRQEHAALVEVILARDAKRASAMMRSHLMTPVPIIAQIMHAEGIGAR

SEQ ID NO: 9251 - DNA, 720 bp, Rhizobium sp; identical to SEQ ID NO: 8007
  CDS (1)..(720): transl_table=11

SEQ ID NO: 9252 - protein, 239 aa, Rhizobium sp; identical to SEQ ID NO: 8008

SEQ ID NO: 9253 - DNA, 681 bp, Escherichia coli O6
  CDS (1)..(681): transl_table=11
atgctcaggagtcacaccatgaccattacctctctggatggctatcgctggctgaagaacgatattattcgcggcaattttcagccggatgaaaaattacggatgagtttgctgacatcgcgttatgcacttggcgtcggaccgttgcgggaagcgctttcgcaactggtggcagaacgactggtcacggtggtgaatcaaaaagggtatcgggtggcgtctatgtcagagcaggagctgctcgatattttcgacgcccgcgccaatatggaagcgatgctggtgagtctggcgattgcccgcggtggcgatgaatgggaggcagacgttctcgcaaaagcgcatctgctcagtaagcttgaggcctgtgacgccagtgagaaaatgcttgatgagtgggatctgcgtcatcaggcgtttcatactgcaattgtggcgggctgtggttcttactatttgctgcaaatgcgtgaacggttgtttgatctggcagcgcgttatcgatttatctggctgcggcgaacagtgctttcggtggaaatgctggaagataaacacgatcagcaccagaccctgactgcggcggtactggcgcgagataccgcgcgcgccagtgagttaatgcgccagcatttactgacgccaattcccattatccagcaggcgatggctggcaattaa

SEQ ID NO: 9254 - protein, 226 aa, Escherichia coli O6
MLRSHTMTITSLDGYRWLKNDIIRGNFQPDEKLRMSLLTSRYALGVGPLREALSQLVAERLVTVVNQKGYRVASMSEQELLDIFDARANMEAMLVSLAIARGGDEWEADVLAKAHLLSKLEACDASEKMLDEWDLRHQAFHTAIVAGCGSYYLLQMRERLFDLAARYRFIWLRRTVLSVEMLEDKHDQHQTLTAAVLARDTARASELMRQHLLTPIPIIQQAMAGN

SEQ ID NO: 9255 - DNA, 765 bp, Pseudomonas sp; identical to SEQ ID NO: 8009
  CDS (1)..(765): transl_table=11

SEQ ID NO: 9256 - protein, 254 aa, Pseudomonas sp; identical to SEQ ID NO: 8010

SEQ ID NO: 9257 - DNA, 732 bp, Ralstonia eutropha; identical to SEQ ID NO: 8011
  CDS (1)..(732): transl_table=11

SEQ ID NO: 9258 - protein, 243 aa, Ralstonia eutropha; identical to SEQ ID NO: 8012

SEQ ID NO: 9259 - DNA, 666 bp, Photobacterium leiognathi; identical to SEQ ID NO: 8013
  CDS (1)..(666): transl_table=11

SEQ ID NO: 9260 - protein, 221 aa, Photobacterium leiognathi; identical to SEQ ID NO: 8014

SEQ ID NO: 9261 - DNA, 663 bp, Escherichia coli; identical to SEQ ID NO: 7971
  CDS (1)..(663): transl_table=11

SEQ ID NO: 9262 - protein, 220 aa, Escherichia coli; identical to SEQ ID NO: 7972

SEQ ID NO: 9263 - DNA, 22 bp, Artificial sequence
  primer
atgatcaggagtcacaccatga

SEQ ID NO: 9264 - DNA, 21 bp, Artificial sequence
  primer
ttaattgccagccatcgcctg

SEQ ID NO: 9265 - protein, 208 aa, Artificial sequence
  consensus sequence
  Variant (3)..(4): Xaa in position 3 to 4 is any amino acid
  Variant (6)..(8): Xaa in position 6 to 8 is any amino acid
  Variant (10)..(12): Xaa in position 10 to 12 is any amino acid
  Variant (14)..(17): Xaa in position 14 to 17 is any amino acid
  Variant (19)..(21): Xaa in position 19 to 21 is any amino acid
  Variant (23)..(29): Xaa in position 23 to 29 is any amino acid
  Variant (34)..(35): Xaa in position 34 to 35 is any amino acid
  Variant (37)..(40): Xaa in position 37 to 40 is any amino acid
  Variant (43)..(46): Xaa in position 43 to 46 is any amino acid
  Variant (48)..(48): Xaa in position 48 is any amino acid
  Variant (50)..(51): Xaa in position 50 to 51 is any amino acid
  Variant (53)..(55): Xaa in position 53 to 55 is any amino acid
  Variant (57)..(61): Xaa in position 57 to 61 is any amino acid
  Variant (63)..(66): Xaa in position 63 to 66 is any amino acid
  Variant (68)..(70): Xaa in position 68 to 70 is any amino acid
  Variant (72)..(78): Xaa in position 72 to 78 is any amino acid
  Variant (80)..(81): Xaa in position 80 to 81 is any amino acid
  Variant (83)..(85): Xaa in position 83 to 85 is any amino acid
  Variant (88)..(94): Xaa in position 88 to 94 is any amino acid
  Variant (96)..(96): Xaa in position 96 is any amino acid
  Variant (98)..(111): Xaa in position 98 to 111 is any amino acid
  Variant (112)..(115): Xaa in position 112 to 115 is any or no amino acid
  Variant (117)..(122): Xaa in position 117 to 122 is any amino acid
  Variant (125)..(125): Xaa in position 125 is any amino acid
  Variant (127)..(132): Xaa in position 127 to 132 is any amino acid
  Variant (134)..(142): Xaa in position 134 to 142 is any amino acid
  Variant (144)..(148): Xaa in position 144 to 148 is any amino acid
  Variant (152)..(165): Xaa in position 152 to 165 is any amino acid
  Variant (166)..(185): Xaa in position 166 to 185 is any or no amino acid
  Variant (187)..(195): Xaa in position 187 to 195 is any amino acid
  Variant (198)..(200): Xaa in position 198 to 200 is any amino acid
  Variant (202)..(207): Xaa in position 202 to 207 is any amino acid
DIXXGXXXPXXXLXXXXLXXXYXXXXXXXREALXXLXXXXLVXXXXQXGXXVXXXSXXXXXDXXXXRXXXEXXXXXXXIXXGXXXWEXXXXXXXHXLXXXXXXXXXXXXXXXXXXWXXXXXXFHXAXXXXXXSXXXXXXXXXLXXXXXRYRXXXXXXXXXXXXXXXXXXXXXXXXXXXXXXXXXXHXXXXXXXXXRDXXXAXXXXXXH

SEQ ID NO: 9266 - protein, 61 aa, Artificial sequence
  protein pattern
  Variant (2)..(7): Xaa in position 2 to 7 is any amino acid
  Variant (8)..(8): Xaa in position 8 is any or no amino acid
  Variant (10)..(12): Xaa in position 10 to 12 is any amino acid
  Variant (13)..(13): Xaa in position 13 is any or no amino acid
  Variant (15)..(18): Xaa in position 15 to 18 is any amino acid
  Variant (20)..(22): Xaa in position 20 to 22 is any amino acid
  Variant (24)..(24): Xaa in position 24 is Ala, Asp, Glu, Gly, Asn or Gln
  Variant (25)..(25): Xaa in position 25 is Ala, Gly, Ile, Leu or Val
  Variant (26)..(26): Xaa in position 26 is Gly or Ser
  Variant (27)..(28): Xaa in position 27 to 28 is any amino acid
  Variant (29)..(29): Xaa in position 29 is Pro, Ser or Thr
  Variant (30)..(30): Xaa in position 30 is Ile, Leu, Met or Val
  Variant (31)..(31): Xaa in position 31 is Gln or Arg
  Variant (33)..(33): Xaa in position 33 is Ala, Cys, Gly or Thr
  Variant (35)..(36): Xaa in position 35 to 36 is any amino acid
  Variant (38)..(42): Xaa in position 38 to 42 is any amino acid
  Variant (43)..(43): Xaa in position 43 is Ile or Val
  Variant (44)..(47): Xaa in position 44 to 47 is any amino acid
  Variant (48)..(48): Xaa in position 48 is Asn or Gln
  Variant (49)..(49): Xaa in position 49 is Lys or Arg
  Variant (51)..(52): Xaa in position 51 to 52 is any amino acid
  Variant (54)..(54): Xaa in position 54 is any amino acid
  Variant (55)..(55): Xaa in position 55 is Glu, Pro or Ser
  Variant (56)..(56): Xaa in position 56 is any amino acid
  Variant (57)..(57): Xaa in position 57 is Ser or Thr
  Variant (58)..(59): Xaa in position 58 to 59 is any amino acid
  Variant (60)..(60): Xaa in position 60 is Asp or Glu
  Variant (61)..(61): Xaa in position 61 is Phe, Leu or Met
DXXXXXXXPXXXXLXXXXLXXXYXXXXXXXXEXLXXLXXXXXXXXXXXXGXXVXXXXXXXX

SEQ ID NO: 9267 - protein, 28 aa, Artificial sequence
  protein pattern
  Variant (3)..(3): Xaa in position 3 is any amino acid
  Variant (4)..(4): Xaa in position 4 is Ala, Ser or Val
  Variant (5)..(5): Xaa in position 5 is Ile or Leu
  Variant (6)..(7): Xaa in position 6 to 7 is any amino acid
  Variant (8)..(8): Xaa in position 8 is Ala or Gly
  Variant (9)..(9): Xaa in position 9 is Ala, Cys or Ser
  Variant (10)..(10): Xaa in position 10 is any amino acid
  Variant (12)..(20): Xaa in position 12 to 20 is any amino acid
  Variant (22)..(26): Xaa in position 22 to 26 is any amino acid
FHXXXXXXXXSXXXXXXXXXLXXXXXRY

SEQ ID NO: 9268 - DNA, 1458 bp, ESCHERICHIA COLI
  CDS (1)..(1458): transl_table=11
atggccaaaaattatgcggcgctggcacgctcggtgatagcggcactgggcggcgttgataacatctcggcggtcacgcactgtatgacgcggttgcgctttgttatcaaagatgatgcacttatcgacagcccgacgttaaaaaccatccccggcgtgctcggcgtggtacgtagtgacaaccagtgtcaggtgattatcggcaataccgtttcacaagcctttcaggaagtcgtcagcctgctgccgggagatatgcagcccgcacagcccgtgggtaaacccaaactcacgctacgtcgcattggtgcggggatcctcgatgcgctgatcggcaccatgtcaccgctgatcccggcgattatcggcggatcgatggtcaaactgctggcaatgatcctcgagatgagcggcgtgctgacaaaaggatcgccgaccttaaccattctgaatgtgattggtgacggtgctttcttcttcctgccgctgatggtcgcgcatctgccgcgcatcaaatttaaaaccaatatgtcgctggcgattgccatcgcgggtgtgctggtacatccgagttttattgaactgatggcgaaagcggcccagggtgaacatgtcgaatttgccctgattccggtcaccgcggtgaaatacacctacacggtgatcccggcgctggtgatgacctggtgcctgtcatatatcgaacgctgggtggacagcattacaccggcggtgaccaaaaacttcctcaaaccaatgctgattgtgttgattgccgcaccgctggcaatcctgctgattggcccgattggtatctggatcggtagcgccatttcggcgctggtttacaccattcatggttatctgggctggctttcagtcgccattatgggcgcgctgtggcctctgctggtaatgaccgggatgcaccgcgtctttacgccaaccatcattcagaccattgccgaaaccggcaaagaagggatggtcatgccgtcagagatcggcgctaacctgtcgctgggcggttcatcactggcagtggcgtggaaaacgaaaaacccggaactgcgtcagacggcgctggctgcggcggcatcagccattatggcggggatttccgaaccggcgttatatggcgtggcgatccgcctgaaacgtccgcttatcgccagtcttatcagcggttttatttgcggcgcggttgccggtatggcggggcttgccagccactcaatggcagcgccggggctatttaccagcgtgcagttcttcgatccggcgaatccaatgagcatcgtctgggtgttcgcggtcatggcgctggcggtggtgctgtcgtttatcctcacactgttgctcggctttgaggatattcctgttgaggaagcggctgcccaggcgcgaaagtatcagagcgtacaaccgaccgtcgccaaagaagtaagtcttaattaa

SEQ ID NO: 9269 - protein, 485 aa, ESCHERICHIA COLI
MAKNYAALARSVIAALGGVDNISAVTHCMTRLRFVIKDDALIDSPTLKTIPGVLGVVRSDNQCQVIIGNTVSQAFQEVVSLLPGDMQPAQPVGKPKLTLRRIGAGILDALIGTMSPLIPAIIGGSMVKLLAMILEMSGVLTKGSPTLTILNVIGDGAFFFLPLMVAHLPRIKFKTNMSLAIAIAGVLVHPSFIELMAKAAQGEHVEFALIPVTAVKYTYTVIPALVMTWCLSYIERWVDSITPAVTKNFLKPMLIVLIAAPLAILLIGPIGIWIGSAISALVYTIHGYLGWLSVAIMGALWPLLVMTGMHRVFTPTIIQTIAETGKEGMVMPSEIGANLSLGGSSLAVAWKTKNPELRQTALAAAASAIMAGISEPALYGVAIRLKRPLIASLISGFICGAVAGMAGLASHSMAAPGLFTSVQFFDPANPMSIVWVFAVMALAVVLSFILTLLLGFEDIPVEEAAAQARKYQSVQPTVAKEVSLN

SEQ ID NO: 9270 - DNA, 1458 bp, Escherichia coli O157:H7
  CDS (1)..(1458): transl_table=11
atggccaaaaattatgcggcgctggcacgctcggtgatagcggcactgggcggcgttgataacatctcggcggtcacgcactgtatgacgcgtttgcgctttgttatcaaagatgatgcgcttatcgacagcccgacgttaaaaaccatccccggcgtgctcggcgtggtacgtagtgacaaccagtgtcaggtgattattggcaataccgtttcacaagcctttcaggaagtcgtcagcctgctgccgggagatatgcagcccgccctgcccgtgggtaaacccaaactcacgctgcgtcgcattggtgcggggatcctcgatgcgctgatcggcaccatgtcaccgctgatcccggcgattatcggcggatcgatggtcaaactgctggcgatgatcctcgagatgagcggcgtgctgacaaaaggatcgccgaccttaaccattctgaatgtgattggtgacggtgctttcttcttcctgccgctgatggtcgcggcttcggccgccatcaaatttaaaaccaatatgtcgctggcgattgccatcgcgggtgtgctggtacatccgagttttattgaactgatggcgaaagcggcccagggtgaacatgtcgaatttgccctgattccagtcaccgcggtgaaatacacctacacagtgatcccggcgctggtgatgacctggtgcctgtcatatatcgaacgctgggtggatcgcattacaccggcggtgaccaaaaacttcctcaagccaatgctgattgtgttgattgccgcaccgctggcaatcctgctgattggcccgattggtatctggatcggtagcgccatttcggcgctggtttacaccattcatggttatctgggctggctttcagtcgccattatgggcgcgctgtggcctctgctggtaatgaccgggatgcaccgcgtctttacgctaaccatcattcagaccattgccgaaaccggcaaagaagggatggtcatgccgtcagagatcggcgctaacctgtcgctgggcggttcatcactggcggtggcgtggaaaacgaaaaacccggaactgcgccagactgcgctggctgcggcggcatcagccattatggcggggatttccgaaccggcgttatacggcgtggcgatccgcctgaaacgtccgcttatcgccagtcttatcagcggttttatttgcggcgcggttgccggtatggcggggcttgccagccactcaatggcagcgccggggctatttaccagcgtgcagttcttcgatccggcgaatccaatgagcatcgtctgggtgttcgcggtcatggcgctggcggtggtgctgtcgtttatcctcacactgttgctcggctttgaggatattcctgttgaggaagcggctgccgaggcgcgaaagcatcagagcgcacaaccgaccgtcgccaaagaagtaagtcttaattga

SEQ ID NO: 9271 - protein, 485 aa, Escherichia coli O157:H7
MAKNYAALARSVIAALGGVDNISAVTHCMTRLRFVIKDDALIDSPTLKTIPGVLGVVRSDNQCQVIIGNTVSQAFQEVVSLLPGDMQPALPVGKPKLTLRRIGAGILDALIGTMSPLIPAIIGGSMVKLLAMILEMSGVLTKGSPTLTILNVIGDGAFFFLPLMVAASAAIKFKTNMSLAIAIAGVLVHPSFIELMAKAAQGEHVEFALIPVTAVKYTYTVIPALVMTWCLSYIERWVDRITPAVTKNFLKPMLIVLIAAPLAILLIGPIGIWIGSAISALVYTIHGYLGWLSVAIMGALWPLLVMTGMHRVFTLTIIQTIAETGKEGMVMPSEIGANLSLGGSSLAVAWKTKNPELRQTALAAAASAIMAGISEPALYGVAIRLKRPLIASLISGFICGAVAGMAGLASHSMAAPGLFTSVQFFDPANPMSIVWVFAVMALAVVLSFILTLLLGFEDIPVEEAAAEARKHQSAQPTVAKEVSLN

SEQ ID NO: 9272 - DNA, 1863 bp, Streptococcus pyogenes M1 GAS; identical to SEQ ID NO: 4026
  CDS (1)..(1863): transl_table=11

SEQ ID NO: 9273 - protein, 620 aa, Streptococcus pyogenes M1 GAS; identical to SEQ ID NO: 4027

SEQ ID NO: 9274 - DNA, 1839 bp, Streptococcus pneumoniae TIGR4; identical to SEQ ID NO: 4028
  CDS (1)..(1839): transl_table=11

SEQ ID NO: 9275 - protein, 612 aa, Streptococcus pneumoniae TIGR4; identical to SEQ ID NO: 4029

SEQ ID NO: 9276 - DNA, 1830 bp, Bacillus subtilis subsp. subtilis str. 168
  CDS (1)..(1830): transl_table=11
atggattatgataaattatcgaaggacatattacaactcgtaggcggtgaagaaaacgttcagcgcgtgatccactgcatgacgaggctgcgttttaatcttcatgacaacgcgaaggcggatcgcagtcagctggagcagctgcctggagtgatgggcaccaatatcagcggcgagcagtttcaaatcattatcggaaacgatgtgccgaaggtgtatcaggcgattgtgcggcacagcaatctcagtgatgaaaagagcgctggttcatcctctcagaaaaagaatgtgctgagtgcggtctttgatgtgatttctggggtgtttacccctattctgcctgcgattgcgggagcggggatgatcaaaggacttgtggcgctggcagtcacgtttggctggatggcggagaagagccaggttcatgtcattttgacggctgtcggtgacggtgcgttctacttcctgccgctcctgctagcgatgagtgcggcgagaaaattcggaagcaatccgtacgtagcggctgccattgcggcggcgatcctgcatccggatttgacagccctgctcggtgcggggaaaccgatttcctttatcgggcttcctgtaaccgctgccacttattcgtcaacggtcatcccgattttgctgtcgatttggattgcttcatacgtggaaaaatggattgaccgttttacacacgcatctctcaaattgattgtggttccgacattcacgctattgattgtcgtgccgctgacattgattacagtcggtccgcttggcgctattttaggagaatacttgtcttctggggtcaattatttgtttgatcatgcagggcttgtggcaatgattttcctggcgggtacattctctttaatcattatgacgggcatgcactatgcctttgtgccgatcatgatcaacaacatcgctcaaaacggccacgattatttactgccggctatgtttttggcgaatatggggcaggcgggagcatcatttgccgtcttccttcgctctagaaacaaaaaatttaaatcactcgcgcttaccacaagcatcacggcgctgatggggatcacagaacctgcgatgtacggcgtgaatatgcgattgaaaaagccgtttgcggccgctttgattggcggtgcagccggtggcgcgttttacggcatgacgggtgttgcttcctatatcgtcggggggaatgcaggtctgccgagcatccctgtctttatcggcccaacgtttatttacgcgatgatcggccttgtgattgcgtttgcggcgggaacatcagctgcgtatttgcttggattcgaggatgtgccttctcaccgcagccagcagccggcagtgcatgaaggcagcagagagatcattcacagcccgattaagggagaagtgaaagccttaagtgaagtcaaagacggagtgttttctgctggggtcatgggaaaaggatttgccattgagcctgaagaaggagaagttgtttcgcctgttcgtggaagcgttaccaccatttttaaaacaaaacacgcaattggcattacgagtgatcagggagctgaaatactcatacacattggattggacacggtaaagctggagggacaatggttcacggctcacatgaaagaaagcgacaaggtcgcaccgggagatccgctcgtgtcctttgatctggagcaaatcaaagccgcgggatatgacgtcattaccccggtgattgtgaccaacacagaccaatattcgttttcgccggtgaaagagatcggtaaagtgcagccaaaagaagcgctgcttgctttatcttga

SEQ ID NO: 9277 - protein, 609 aa, Bacillus subtilis subsp. subtilis str. 168
MDYDKLSKDILQLVGGEENVQRVIHCMTRLRFNLHDNAKADRSQLEQLPGVMGTNISGEQFQIIIGNDVPKVYQAIVRHSNLSDEKSAGSSSQKKNVLSAVFDVISGVFTPILPAIAGAGMIKGLVALAVTFGWMAEKSQVHVILTAVGDGAFYFLPLLLAMSAARKFGSNPYVAAAIAAAILHPDLTALLGAGKPISFIGLPVTAATYSSTVIPILLSIWIASYVEKWIDRFTHASLKLIVVPTFTLLIVVPLTLITVGPLGAILGEYLSSGVNYLFDHAGLVAMIFLAGTFSLIIMTGMHYAFVPIMINNIAQNGHDYLLPAMFLANMGQAGASFAVFLRSRNKKFKSLALTTSITALMGITEPAMYGVNMRLKKPFAAALIGGAAGGAFYGMTGVASYIVGGNAGLPSIPVFIGPTFIYAMIGLVIAFAAGTSAAYLLGFEDVPSHRSQQPAVHEGSREIIHSPIKGEVKALSEVKDGVFSAGVMGKGFAIEPEEGEVVSPVRGSVTTIFKTKHAIGITSDQGAEILIHIGLDTVKLEGQWFTAHMKESDKVAPGDPLVSFDLEQIKAAGYDVITPVIVTNTDQYSFSPVKEIGKVQPKEALLALS

SEQ ID NO: 9278 - DNA, 1863 bp, Streptococcus pyogenes MGAS8232; identical to SEQ ID NO: 4032
  CDS (1)..(1863): transl_table=11

SEQ ID NO: 9279 - protein, 620 aa, Streptococcus pyogenes MGAS8232; identical to SEQ ID NO: 4033

SEQ ID NO: 9280 - DNA, 1869 bp, Streptococcus agalactiae NEM316; identical to SEQ ID NO: 4034
  CDS (1)..(1869): transl_table=11

SEQ ID NO: 9281 - protein, 622 aa, Streptococcus agalactiae NEM316; identical to SEQ ID NO: 4035

SEQ ID NO: 9282 - DNA, 1863 bp, Lactobacillus plantarum WCFS1; identical to SEQ ID NO: 4036
  CDS (1)..(1863): transl_table=11

SEQ ID NO: 9283 - protein, 620 aa, Lactobacillus plantarum WCFS1; identical to SEQ ID NO: 4037

SEQ ID NO: 9284 - DNA, 1863 bp, Streptococcus pyogenes SSI-1; identical to SEQ ID NO: 4038
  CDS (1)..(1863): transl_table=11

SEQ ID NO: 9285 - protein, 620 aa, Streptococcus pyogenes SSI-1; identical to SEQ ID NO: 4039

SEQ ID NO: 9286 - DNA, 1401 bp, Clostridium difficile 630
  CDS (1)..(1401): transl_table=11
atgaagaataaatatgaagatgtagctcaattgataattgatggacttggaggaaaagataatataattgacttaactcattgtatgacacgattaaggttcatcttaaaagatgaaaagaaagtcaatgcagataaattaaaatctatagataaggtagttggagtaaactcaacttcaactcaatatcaggtcataataggtaatgaggtaggtgttgtatttaatgcaataataaataaggggataaataccacaggagatattaaaagcgatataaaaaacaaaaataaaaaaaatagtattttaaataatataatagatacaataactggttgtatgacacctatgataccagcccttacagcatctgggatgataaaagttatattatctctttgcaccacttttaattggctatcatcaaattcaagtacatatagagtattagatataataggagatgtagcattttactttatgcctataatacttgcaataaatgcagctaaaaaatttaatgttaatacgtcaatagcagttatagtagtaggtgtgtttttacatccaaatttctctgcatgggtatcaagtggggaccctatatcatttataggagtaccaattcaaggtgttatatatgcagcatctgttatccctgcacttttaacagtatggatgatgtcatatatagaaaaattcattgataaattaacacctagcatgttaaaaacaattttaaatccaactttagtattattaataagtgcgccaatagcattaatagtaattggaccaataggaaatttcttaggagagggattagctagtataataaatttactacaaggaaggttaggatttataatggtttgtttattagcagctgcaatgccatttatcgttatgacagggatgcatcatgcattgactcctatattcatatcagcatttgcaactacaggacaagaatcgctaatattaatatctcaagtttgtgctaatttagcgcaaggtggcgcgacattagctgtagcattaagaagcaaagatagtaagatgaaacagttagcatcagctgcatggatatcagctatcatgggtataactgaaccagctctttatggagttacattgaaacttaaaaaacctgctatgttagcatctataggagcaggaatcgcagggttatttgcaggaattactcatgtgactttatatgttccacaaaatagtataatggcagtacttggattatcaggggaaaaggggatttcgaatatagtaaatggacttatagttatatttatagcattggttgctccatttattatgacatatgtttttggagttgaaaaaaatgttaaggaaggtatagataatgtagtagaggaagtataa

SEQ ID NO: 9287 - protein, 466 aa, Clostridium difficile 630
MKNKYEDVAQLIIDGLGGKDNIIDLTHCMTRLRFILKDEKKVNADKLKSIDKVVGVNSTSTQYQVIIGNEVGVVFNAIINKGINTTGDIKSDIKNKNKKNSILNNIIDTITGCMTPMIPALTASGMIKVILSLCTTFNWLSSNSSTYRVLDIIGDVAFYFMPIILAINAAKKFNVNTSIAVIVVGVFLHPNFSAWVSSGDPISFIGVPIQGVIYAASVIPALLTVWMMSYIEKFIDKLTPSMLKTILNPTLVLLISAPIALIVIGPIGNFLGEGLASIINLLQGRLGFIMVCLLAAAMPFIVMTGMHHALTPIFISAFATTGQESLILISQVCANLAQGGATLAVALRSKDSKMKQLASAAWISAIMGITEPALYGVTLKLKKPAMLASIGAGIAGLFAGITHVTLYVPQNSIMAVLGLSGEKGISNIVNGLIVIFIALVAPFIMTYVFGVEKNVKEGIDNVVEEV

SEQ ID NO: 9288 - DNA, 1863 bp, Streptococcus pyogenes str. Manfredo
  CDS (1)..(1863): transl_table=11
atgacgtatcaagaaactgccaaggctattttagcggcggttggtggcaaaacaaatattcaacgtgtgacacactgtgtaacacgtctacgcttagtactgaaaaatgatgagaaagttaaagatcagcaagtcaaagccatttcaaatgtgattggcgtgatgcgcaaaaacggccagtaccaaattatcttgggcaatgatgtcaataattattaccaagcctttttaagcctagggcattttgacaatcaagatgaagatcattcttcaaaagcgaaaggaagtatccttgagcgcttgattgaaaccattgctggcgtgattacaccgctgattccagcccttcttggtggtggaatgctcaaagtggtggggatcttgcttcctatgcttggcttagcgagtgcggactctcaaaccgttgcctttattaacttctttggcgatgcggcttattattttatgcctgtcatgattgcctattcagcagcggcgcgctttaaggtgacacctgttttagcagcgacgatcgcagggattttattgcatcctgcctttgttgcaatggtagcagaaggtaaaccattgactttatttggagcaccagtcactcctgctagctatggctcatctgttattcccattttgatgatggtttacttgatgcaatacattgaaaaatgggtcaatcgcttggtgccaagcgtgatgaaaagcttcttacagccaaccttaatcattttgatttctggctttttggctttagtggttgtaggtcctcttggtgtgattattggtcaagggttatctaataccatgctcgctatttatcatgtggctccgtggctagcacttgccattttgggagcgattatgccgcttgttgtcatgacggggatgcactgggcttttgcaccaatctttttggccgcttcggtcgcaacaccagatgtcttgattttaccagcaatgttggcttctaatttggctcaaggagccgcatctttggctgttgcctttaaaacaaagcagaaacaaacacgtcaagttgcccttgccgcggggatttcagctttgctggcaggtatcacggaaccggcactttatggggtcacactgaaatttaaaaagccactctatgcagccatgatttcaggtggtctggtcggagcctttattggttttgtcaatattgcttcttatacctttgtcgtaccttctattattggtttaccacagtacatcaacccatcaagcggagctaattttacaaatgctttgattgccggagctgcgacgattgtgttagccttcagtttgacttggttcatgggaattgatgaagaatccccagagcaagtgagtgttgcagcagatatgtcacaagttaagagcggcttgtcaaccaaacaaacgttgtatgctccaatgacaggtgagatgctttttctatcagaagttcctgatgaaaccttttcttccaagttattaggagaaggatttgccatattaccaagcgaaggtgtggtctatgccccctttgatggtgaagtcatcactttctttccaaccaagcatgctgttgccttaaaaaacacacgtggtgtggaagtcttgattcatgtcggtattgatacggttgagttaaaagggcaaggtttcgagcagttagtgtctgttggcgatgtcgtgaaacgaggccaggcacttctaaaaatggatattgatttcattacttcaaaaggctattcactcatcagtcctgtggtcgtgaccaattcggctgagcagttggagattattattcaagatgacaaaaaaatggtgactaaagaggacgctttgttagtcattttataa

SEQ ID NO: 9289 - protein, 620 aa, Streptococcus pyogenes str. Manfredo
MTYQETAKAILAAVGGKTNIQRVTHCVTRLRLVLKNDEKVKDQQVKAISNVIGVMRKNGQYQIILGNDVNNYYQAFLSLGHFDNQDEDHSSKAKGSILERLIETIAGVITPLIPALLGGGMLKVVGILLPMLGLASADSQTVAFINFFGDAAYYFMPVMIAYSAAARFKVTPVLAATIAGILLHPAFVAMVAEGKPLTLFGAPVTPASYGSSVIPILMMVYLMQYIEKWVNRLVPSVMKSFLQPTLIILISGFLALVVVGPLGVIIGQGLSNTMLAIYHVAPWLALAILGAIMPLVVMTGMHWAFAPIFLAASVATPDVLILPAMLASNLAQGAASLAVAFKTKQKQTRQVALAAGISALLAGITEPALYGVTLKFKKPLYAAMISGGLVGAFIGFVNIASYTFVVPSIIGLPQYINPSSGANFTNALIAGAATIVLAFSLTWFMGIDEESPEQVSVAADMSQVKSGLSTKQTLYAPMTGEMLFLSEVPDETFSSKLLGEGFAILPSEGVVYAPFDGEVITFFPTKHAVALKNTRGVEVLIHVGIDTVELKGQGFEQLVSVGDVVKRGQALLKMDIDFITSKGYSLISPVVVTNSAEQLEIIIQDDKKMVTKEDALLVIL

SEQ ID NO: 9290 - DNA, 1443 bp, Klebsiella pneumoniae subsp. pneumoniae MGH 78578
  CDS (1)..(1443): transl_table=11
atgtcgaaaaattatgcagccctggcgcaacagatagtcgcggcaatcggcggggtcgacaacgtcgccgccgttacccactgcatgacccgtctgcgcttcgtggttaaagacgacgaacaggtcgatagctctaccctgaaaggcctggccggggtgctcggcgtcgtgcgcagcgataaccagtgccaggtgatcatcggcaacactgtctcccaggcctaccgcgaggtggtgaatctgctgcctggcgacctgcgcccggctgagccgcagggcaaagcgccgctaaccctgaaacgcatcggcgccgggatccttgacgcgctgatcggcaccatgtcgccgctgatcccggcgattatcggcggatcgatggtcaagctgctggcgatgatcctcgagatgagcggcgcgttgccgaaaggctcgccgacgctgaccctgctggcgcttatcggcgacggcgcatttttcttcctgccgctgatggtggccgcctccgcggcggtgaaattcaaaactaatatgtcgctggctatcgccatcgccggggtgctggtgcatcctgggtttatcgaattgatggccaaagccgcccagggagaacacgttgaattcgcctttattccggttaccgcggtgaaatacacctacacggtgatcccggcgctggtgatgacctggtgcctgtcgtatatcgagcgctgggtggatcgcattaccccggcggtgacgaaaaactttctgaagccgatgctgatcgtgttgatcgccgccccgctggcgatcctgctgattggcccgctgggcatctggatcggcagcgccatttccgcgctggtgtatacgatccacagctatctcggctggctgtcggtggcgatcatgggcgggctgtggccgctgttggtgatgaccggtatgcaccgcgtctttacgccgaccatcattcagaccatcgccgaaaccggcaaagagggtatggtgatgccatcggagatcggcgccaacctgtcgctcggcggctcttcgctggcggtagcgtggaaaaccaaaaacccggagctgcgccagacggcgctggccgccgcggcatcggcgattctggccgggatttccgaaccggcgctgtacggcgtggcggtgcgcctgaagcgcccgctgatcgccagcttaatcagcggctttatctgcggcgcggtggcaggcattgccggactggccagccattcgatggcggcgccggggctgtttaccagcgtgcagtttttcgatccggccaatccaatgaccatcgtctgggtgtttggcgtgatggcgctgtcggtggtgctgtcgtttgccctgacgctgatccttggctttgaggacattcccgttgagcaggccgctgccgacgccagagcgcgccaggccagggcccaggcatcccacgcctga

SEQ ID NO: 9291 - protein, 480 aa, Klebsiella pneumoniae subsp. pneumoniae MGH 78578
MSKNYAALAQQIVAAIGGVDNVAAVTHCMTRLRFVVKDDEQVDSSTLKGLAGVLGVVRSDNQCQVIIGNTVSQAYREVVNLLPGDLRPAEPQGKAPLTLKRIGAGILDALIGTMSPLIPAIIGGSMVKLLAMILEMSGALPKGSPTLTLLALIGDGAFFFLPLMVAASAAVKFKTNMSLAIAIAGVLVHPGFIELMAKAAQGEHVEFAFIPVTAVKYTYTVIPALVMTWCLSYIERWVDRITPAVTKNFLKPMLIVLIAAPLAILLIGPLGIWIGSAISALVYTIHSYLGWLSVAIMGGLWPLLVMTGMHRVFTPTIIQTIAETGKEGMVMPSEIGANLSLGGSSLAVAWKTKNPELRQTALAAAASAILAGISEPALYGVAVRLKRPLIASLISGFICGAVAGIAGLASHSMAAPGLFTSVQFFDPANPMTIVWVFGVMALSVVLSFALTLILGFEDIPVEQAAADARARQARAQASHA

SEQ ID NO: 9292 - DNA, 1935 bp, Pectobacterium atrosepticum SCRI1043; identical to SEQ ID NO: 4040
  CDS (1)..(1935): transl_table=11

SEQ ID NO: 9293 - protein, 644 aa, Pectobacterium atrosepticum SCRI1043; identical to SEQ ID NO: 4041

SEQ ID NO: 9294 - DNA, 1461 bp, Pectobacterium atrosepticum SCRI1043; identical to SEQ ID NO: 4042
  CDS (1)..(1461): transl_table=11

SEQ ID NO: 9295 - protein, 486 aa, Pectobacterium atrosepticum SCRI1043; identical to SEQ ID NO: 4043

SEQ ID NO: 9296 - DNA, 1863 bp, Streptococcus pyogenes MGAS10394; identical to SEQ ID NO: 4044
  CDS (1)..(1863): transl_table=11

SEQ ID NO: 9297 - protein, 620 aa, Streptococcus pyogenes MGAS10394; identical to SEQ ID NO: 4045

SEQ ID NO: 9298 - DNA, 1842 bp, Streptococcus suis 89/1591
  CDS (1)..(1842): transl_table=11
atgaagtacaagaatactgcattggcaatcctagaggcagtcggaggagaaaagaatgttcttcgtgcaacccattgcgttactagattgcgactggaattgaaagatgagaatatcgtgtccgatgaacgtgttaaatccatttctggagtactcggtattatgaagaaaaatggacagtatcaaattatcttaggtaatgatgtagctaattactataaagaatttactgcattaggaaaatttgattctgattcagttcaacaggttaaaaaagcaaatgtcttagaacaagtcatcgagtatatcgctggctctatgacaccacttattccagctatgcttggtggaggtatgataaaagttctagtcattgtcttaccgatgctggggcttttaaaagcggattcccaatctatttcatttttagccttttttggagatgcaccatatcactttatgccgatttttttggcctactcagcttcacaaaaacttaaagttacacctgctttagccatgtcggttgctggtattttgctacatcctaattttgttcaaatggtatcttcaggtgatccacttcattttttaggtgcccctgttacacctgctagctatggttcatcagttattccaattcttattatggtttggctaatgaagtatattgaagctgttttcaataaggtcactccagcaataacaaaaagtttcttacagccaaccttggtcctgcttgtttcaggtttcatagctttagttcttgttggacctctcggcgttattgttggtgaaggattatcgcaattggttgaacaaatgcatggtgtagctggttggttaactttagcagttcttggagcaatcatgccatttatcgttatgaccggtatgcactgggcttttgcaccgattttcttggcagcttcaatcgcgacacctgatgtactgattctaccagcgatgttaggttctaacttggcacaaggtgccgcttctatggcagttgcatttaagagtaaaaatagtaacacgaaacaaatagcctttgcagctggattttcagctttatttgctggtgtcactgagcctgctttatatggtgttactctaaagtataaaaaaccattgtatgcagcaatgattggtggtggtctagcaggattatttgttggtttgacaggtgtaaaagcatacctttttgcagtaccttctctcattgctttgccacaatttatttactctgaagcagcttcaaacattactaacgctatgattgctgcggcaatttcaattattgtcacatttattttggcctatttcctaggtatcgatgaagaaacgtcaacagttaatttagaaaaagtagcacctggcatttcaagtagaaaaaatgtcttctctcctctttcaggtcaaattctccctttagaaaaagtaaatgatgcaacgttttcaaaaaaaatgcttggagaaggagttgcaattatccctaaggatggaaaagtctatgctccatttgacggggctattaccagtctttttccaacaaaacatgcaatcggtttaacaagtgatgaaggggtagagttgcttatccactttggattagaaactgtcgagctaaaaggaagaggttttgtaagccatgtttcagatggggaaaaagttgaaaagggtcaactgatgctggaagtggatgtagaaatgcttgtcgcagaagggtacgatatagtgactcctgtagttgttacaaatacacaggaatatctggatgttctcttgctttcgacaaaagaggaagtcaactatgctgatgatttattagcagtcttataa

SEQ ID NO: 9299 - protein, 613 aa, Streptococcus suis 89/1591
MKYKNTALAILEAVGGEKNVLRATHCVTRLRLELKDENIVSDERVKSISGVLGIMKKNGQYQIILGNDVANYYKEFTALGKFDSDSVQQVKKANVLEQVIEYIAGSMTPLIPAMLGGGMIKVLVIVLPMLGLLKADSQSISFLAFFGDAPYHFMPIFLAYSASQKLKVTPALAMSVAGILLHPNFVQMVSSGDPLHFLGAPVTPASYGSSVIPILIMVWLMKYIEAVFNKVTPAITKSFLQPTLVLLVSGFIALVLVGPLGVIVGEGLSQLVEQMHGVAGWLTLAVLGAIMPFIVMTGMHWAFAPIFLAASIATPDVLILPAMLGSNLAQGAASMAVAFKSKNSNTKQIAFAAGFSALFAGVTEPALYGVTLKYKKPLYAAMIGGGLAGLFVGLTGVKAYLFAVPSLIALPQFIYSEAASNITNAMIAAAISIIVTFILAYFLGIDEETSTVNLEKVAPGISSRKNVFSPLSGQILPLEKVNDATFSKKMLGEGVAIIPKDGKVYAPFDGAITSLFPTKHAIGLTSDEGVELLIHFGLETVELKGRGFVSHVSDGEKVEKGQLMLEVDVEMLVAEGYDIVTPVVVTNTQEYLDVLLLSTKEEVNYADDLLAVL

SEQ ID NO: 9300 - DNA, 1908 bp, Pectobacterium carotovorum subsp; identical to SEQ ID NO: 4046
  CDS (1)..(1908): transl_table=11

SEQ ID NO: 9301 - protein, 635 aa, Pectobacterium carotovorum subsp; identical to SEQ ID NO: 4047

SEQ ID NO: 9302 - DNA, 1461 bp, Pectobacterium carotovorum subsp; identical to SEQ ID NO: 4048
  CDS (1)..(1461): transl_table=11

SEQ ID NO: 9303 - protein, 486 aa, Pectobacterium carotovorum subsp; identical to SEQ ID NO: 4049

SEQ ID NO: 9304 - DNA, 1458 bp, Escherichia coli; identical to SEQ ID NO: 4022
  CDS (1)..(1458): transl_table=11

SEQ ID NO: 9305 - protein, 485 aa, Escherichia coli; identical to SEQ ID NO: 4023

SEQ ID NO: 9306 - DNA, 23 bp, Artificial sequence
  primer
atggccaaaaattatgcggcgct

SEQ ID NO: 9307 - DNA, 27 bp, Artificial sequence
  primer
ttaattaagacttacttctttggcgac

SEQ ID NO: 9308 - protein, 453 aa, Artificial sequence
  consensus sequence
  Variant (2)..(7): Xaa in position 2 to 7 is any amino acid
  Variant (9)..(12): Xaa in position 9 to 12 is any amino acid
  Variant (15)..(16): Xaa in position 15 to 16 is any amino acid
  Variant (18)..(21): Xaa in position 18 to 21 is any amino acid
  Variant (25)..(25): Xaa in position 25 is any amino acid
  Variant (30)..(48): Xaa in position 30 to 48 is any amino acid
  Variant (50)..(50): Xaa in position 50 is any amino acid
  Variant (53)..(57): Xaa in position 53 to 57 is any amino acid
  Variant (59)..(59): Xaa in position 59 is any amino acid
  Variant (61)..(61): Xaa in position 61 is any amino acid
  Variant (63)..(63): Xaa in position 63 is any amino acid
  Variant (66)..(66): Xaa in position 66 is any amino acid
  Variant (68)..(92): Xaa in position 68 to 92 is any amino acid
  Variant (93)..(98): Xaa in position 93 to 98 is any or no amino acid
  Variant (100)..(108): Xaa in position 100 to 108 is any amino acid
  Variant (110)..(112): Xaa in position 110 to 112 is any amino acid
  Variant (114)..(114): Xaa in position 114 is any amino acid
  Variant (118)..(119): Xaa in position 118 to 119 is any amino acid
  Variant (121)..(122): Xaa in position 121 to 122 is any amino acid
  Variant (124)..(124): Xaa in position 124 is any amino acid
  Variant (126)..(130): Xaa in position 126 to 130 is any amino acid
  Variant (132)..(134): Xaa in position 132 to 134 is any amino acid
  Variant (136)..(140): Xaa in position 136 to 140 is any amino acid
  Variant (141)..(141): Xaa in position 141 is any or no amino acid
  Variant (143)..(143): Xaa in position 143 is any amino acid
  Variant (145)..(151): Xaa in position 145 to 151 is any amino acid
  Variant (154)..(154): Xaa in position 154 is any amino acid
  Variant (156)..(157): Xaa in position 156 to 157 is any amino acid
  Variant (159)..(159): Xaa in position 159 is any amino acid
  Variant (161)..(163): Xaa in position 161 to 163 is any amino acid
  Variant (165)..(166): Xaa in position 165 to 166 is any amino acid
  Variant (168)..(170): Xaa in position 168 to 170 is any amino acid
  Variant (172)..(176): Xaa in position 172 to 176 is any amino acid
  Variant (179)..(181): Xaa in position 179 to 181 is any amino acid
  Variant (184)..(184): Xaa in position 184 is any amino acid
  Variant (186)..(186): Xaa in position 186 is any amino acid
  Variant (189)..(196): Xaa in position 189 to 196 is any amino acid
  Variant (197)..(199): Xaa in position 197 to 199 is any or no amino acid
  Variant (201)..(208): Xaa in position 201 to 208 is any amino acid
  Variant (211)..(214): Xaa in position 211 to 214 is any amino acid
  Variant (216)..(218): Xaa in position 216 to 218 is any amino acid
  Variant (222)..(222): Xaa in position 222 is any amino acid
  Variant (224)..(230): Xaa in position 224 to 230 is any amino acid
  Variant (234)..(240): Xaa in position 234 to 240 is any amino acid
  Variant (242)..(244): Xaa in position 242 to 244 is any amino acid
  Variant (246)..(246): Xaa in position 246 is any amino acid
  Variant (248)..(249): Xaa in position 248 to 249 is any amino acid
  Variant (251)..(251): Xaa in position 251 is any amino acid
  Variant (253)..(254): Xaa in position 253 to 254 is any amino acid
  Variant (256)..(260): Xaa in position 256 to 260 is any amino acid
  Variant (262)..(265): Xaa in position 262 to 265 is any amino acid
  Variant (268)..(268): Xaa in position 268 is any amino acid
  Variant (270)..(272): Xaa in position 270 to 272 is any amino acid
  Variant (274)..(288): Xaa in position 274 to 288 is any amino acid
  Variant (291)..(295): Xaa in position 291 to 295 is any amino acid
  Variant (297)..(299): Xaa in position 297 to 299 is any amino acid
  Variant (301)..(302): Xaa in position 301 to 302 is any amino acid
  Variant (309)..(312): Xaa in position 309 to 312 is any amino acid
  Variant (314)..(328): Xaa in position 314 to 328 is any amino acid
  Variant (329)..(329): Xaa in position 329 is any or no amino acid
  Variant (331)..(335): Xaa in position 331 to 335 is any amino acid
  Variant (337)..(339): Xaa in position 337 to 339 is any amino acid
  Variant (341)..(342): Xaa in position 341 to 342 is any amino acid
  Variant (348)..(350): Xaa in position 348 to 350 is any amino acid
  Variant (352)..(356): Xaa in position 352 to 356 is any amino acid
  Variant (358)..(358): Xaa in position 358 is any amino acid
  Variant (360)..(361): Xaa in position 360 to 361 is any amino acid
  Variant (363)..(365): Xaa in position 363 to 365 is any amino acid
  Variant (367)..(369): Xaa in position 367 to 369 is any amino acid
  Variant (370)..(370): Xaa in position 370 is any or no amino acid
  Variant (372)..(372): Xaa in position 372 is any amino acid
  Variant (380)..(383): Xaa in position 380 to 383 is any amino acid
  Variant (385)..(385): Xaa in position 385 is any amino acid
  Variant (388)..(388): Xaa in position 388 is any amino acid
  Variant (390)..(391): Xaa in position 390 to 391 is any amino acid
  Variant (393)..(393): Xaa in position 393 is any amino acid
  Variant (395)..(397): Xaa in position 395 to 397 is any amino acid
  Variant (399)..(401): Xaa in position 399 to 401 is any amino acid
  Variant (403)..(439): Xaa in position 403 to 439 is any amino acid
  Variant (440)..(442): Xaa in position 440 to 442 is any or no amino acid
  Variant (444)..(445): Xaa in position 444 to 445 is any amino acid
  Variant (447)..(448): Xaa in position 447 to 448 is any amino acid
  Variant (450)..(452): Xaa in position 450 to 452 is any amino acid
YXXXXXXIXXXXGGXXNXXXXTHCXTRLRXXXXXXXXXXXXXXXXXXXVXGVXXXXXQXQXIXGNXVXXXXXXXXXXXXXXXXXXXXXXXXXXXXXXXIXXXXXXXXXGXXXPXIPAXXGXXMXKXXXXXLXXXGXXXXXXSXTXXXXXXXGDXAXXFXPXXXAXXAXXXFXXXXXLAXXXAGXLXHPXXXXXXXXXXXGXXXXXXXXPVXXXXYXXXVIPXLXXXXXXXYIEXXXXXXXPXXXKXFXXPXLXXLXXXXXAXXXXGPXGXXXGXXXXXXXXXXXXXXXWLXXXXXGXXXPXXVMTGMHXXXXPXXXXXXXXXXXXXXXXPXXXXXNXXXGXXSLAVAXXXKXXXXXQXAXXAXXXAXXXXIXEPALYGVXXXXKXPLXAXXIXGXXXGXXXGXXXXXXXXXXXXXXXXXXXXXXXXXXXXXXXXXXXXXXXXVXXFXXTXXXG

SEQ ID NO: 9309 - protein, 54 aa, Artificial sequence
  protein pattern
  Variant (2)..(4): Xaa in position 2 to 4 is any or no amino acid
  Variant (8)..(8): Xaa in position 8 is any amino acid
  Variant (13)..(13): Xaa in position 13 is Phe or Leu
  Variant (14)..(14): Xaa in position 14 is any amino acid
  Variant (15)..(15): Xaa in position 15 is Phe, Ile, Leu or Val
  Variant (16)..(16): Xaa in position 16 is any amino acid
  Variant (17)..(17): Xaa in position 17 is Asp or Asn
  Variant (18)..(18): Xaa in position 18 is Asp, Glu, Asn or Ser
  Variant (19)..(20): Xaa in position 19 to 20 is any amino acid
  Variant (21)..(21): Xaa in position 21 is Ala, Ile or Val
  Variant (22)..(22): Xaa in position 22 is any amino acid
  Variant (23)..(23): Xaa in position 23 is Ala, Asp, Ser or Val
  Variant (24)..(25): Xaa in position 24 to 25 is any amino acid
  Variant (26)..(26): Xaa in position 26 is Ile, Leu or Val
  Variant (27)..(28): Xaa in position 27 to 28 is any amino acid
  Variant (29)..(29): Xaa in position 29 is Ile or Leu
  Variant (30)..(30): Xaa in position 30 is Ala, Gly, Pro or Ser
  Variant (31)..(31): Xaa in position 31 is Gly or Asn
  Variant (33)..(33): Xaa in position 33 is Ile or Leu
  Variant (34)..(34): Xaa in position 34 is Gly or Ser
  Variant (35)..(35): Xaa in position 35 is Ile or Val
  Variant (36)..(36): Xaa in position 36 is Met or Val
  Variant (37)..(37): Xaa in position 37 is Asp, Lys or Arg
  Variant (38)..(38): Xaa in position 38 is any amino acid
  Variant (39)..(40): Xaa in position 39 to 40 is Asp, Gly or Asn
  Variant (42)..(42): Xaa in position 42 is any amino acid
  Variant (44)..(45): Xaa in position 44 to 45 is Ile or Val
  Variant (46)..(46): Xaa in position 46 is Ile or Leu
  Variant (49)..(49): Xaa in position 49 is Asp or Thr
  Variant (51)..(51): Xaa in position 51 is Ala, Asn, Gln or Ser
  Variant (52)..(53): Xaa in position 52 to 53 is any amino acid
  Variant (54)..(54): Xaa in position 54 is Phe or Tyr
VXXXTHCXTRLRXXXXXXXXXXXXXXXXXXXVXXXXXXXXQXQXXXGNXVXXXX

SEQ ID NO: 9310 - protein, 60 aa, Artificial sequence
  protein pattern
  Variant (2)..(2): Xaa in position 2 is any amino acid
  Variant (3)..(3): Xaa in position 3 is any or no amino acid
  Variant (5)..(5): Xaa in position 5 is any amino acid
  Variant (6)..(6): Xaa in position 6 is any or no amino acid
  Variant (8)..(8): Xaa in position 8 is Ala, Gly or Thr
  Variant (9)..(9): Xaa in position 9 is any amino acid
  Variant (10)..(10): Xaa in position 10 is Ser or Thr
  Variant (12)..(12): Xaa in position 12 is Ile, Leu or Val
  Variant (14)..(14): Xaa in position 14 is Ala or Ile
  Variant (15)..(15): Xaa in position 15 is Ile or Leu
  Variant (16)..(17): Xaa in position 16 to 17 is any amino acid
  Variant (18)..(18): Xaa in position 18 is Thr or Val
  Variant (19)..(19): Xaa in position 19 is Phe, Trp or Tyr
  Variant (20)..(20): Xaa in position 20 is any amino acid
  Variant (21)..(21): Xaa in position 21 is Leu or Met
  Variant (22)..(22): Xaa in position 22 is any amino acid
  Variant (26)..(28): Xaa in position 26 to 28 is any amino acid
  Variant (29)..(29): Xaa in position 29 is Ala, Asp, Glu or Asn
  Variant (30)..(30): Xaa in position 30 is any amino acid
  Variant (31)..(31): Xaa in position 31 is Ile, Leu or Val
  Variant (32)..(32): Xaa in position 32 is Ser, Thr or Val
  Variant (33)..(33): Xaa in position 33 is Leu or Pro
  Variant (34)..(34): Xaa in position 34 is Ala or Ser
  Variant (35)..(35): Xaa in position 35 is Ile, Met or Val
  Variant (36)..(38): Xaa in position 36 to 38 is any amino acid
  Variant (40)..(41): Xaa in position 40 to 41 is any amino acid
  Variant (43)..(43): Xaa in position 43 is any amino acid
  Variant (44)..(44): Xaa in position 44 is Ile or Leu
  Variant (45)..(45): Xaa in position 45 is Ile or Val
  Variant (46)..(46): Xaa in position 46 is Ile, Leu or Val
  Variant (48)..(48): Xaa in position 48 is Phe, Ile or Val
  Variant (49)..(49): Xaa in position 49 is Ala, Ser or Thr
  Variant (50)..(50): Xaa in position 50 is Ala, Gly or Ser
  Variant (51)..(51): Xaa in position 51 is any amino acid
  Variant (52)..(52): Xaa in position 52 is Ile or Leu
  Variant (53)..(53): Xaa in position 53 is Ala or Val
  Variant (54)..(54): Xaa in position 54 is Ile or Leu
  Variant (55)..(55): Xaa in position 55 is Leu, Met or Val
  Variant (56)..(56): Xaa in position 56 is Leu or Val
  Variant (57)..(57): Xaa in position 57 is Ile or Val
  Variant (60)..(60): Xaa in position 60 is Phe, Ile or Leu
VXXAXXYXXXVXPXXXXXXXXXYIEXXXXXXXXXXXXXFXXPXXXXLXXXXXXXXXXGPX

SEQ ID NO: 9311 - protein, 42 aa, Artificial sequence
  protein pattern
  Variant (2)..(2): Xaa in position 2 is Ile or Val
  Variant (3)..(3): Xaa in position 3 is Ser or Thr
  Variant (6)..(6): Xaa in position 6 is Ala or Ser
  Variant (11)..(11): Xaa in position 11 is any amino acid
  Variant (12)..(13): Xaa in position 12 to 13 is any or no amino acid
  Variant (16)..(16): Xaa in position 16 is any amino acid
  Variant (17)..(18): Xaa in position 17 to 18 is any or no amino acid
  Variant (21)..(21): Xaa in position 21 is any amino acid
  Variant (23)..(23): Xaa in position 23 is Ala, Cys or Ser
  Variant (24)..(24): Xaa in position 24 is Leu or Met
  Variant (26)..(26): Xaa in position 26 is Gly, Ser or Thr
  Variant (28)..(29): Xaa in position 28 to 29 is any amino acid
  Variant (30)..(30): Xaa in position 30 is Ala, Cys or Val
  Variant (32)..(32): Xaa in position 32 is Ala, Ile or Leu
  Variant (33)..(33): Xaa in position 33 is any amino acid
  Variant (34)..(34): Xaa in position 34 is Ala, Ile or Val
  Variant (36)..(36): Xaa in position 36 is Phe, Ile, Leu or Met
  Variant (37)..(37): Xaa in position 37 is Ala, Gly, Thr or Val
  Variant (38)..(38): Xaa in position 38 is Gly, Asn or Ser
  Variant (39)..(39): Xaa in position 39 is Ile, Leu or Val
  Variant (40)..(41): Xaa in position 40 to 41 is any amino acid
  Variant (42)..(42): Xaa in position 42 is His or Tyr
GXXEPXLYGVXXXLKXXXPLXAXXIXGXXXGXXXGXXXXXXX

SEQ ID NO: 9312 - protein, 37 aa, Artificial sequence
  protein pattern
  Variant (2)..(3): Xaa in position 2 to 3 is any amino acid
  Variant (4)..(9): Xaa in position 4 to 9 is any or no amino acid
  Variant (11)..(11): Xaa in position 11 is Ala or Gly
  Variant (12)..(12): Xaa in position 12 is Ile or Leu
  Variant (13)..(13): Xaa in position 13 is any amino acid
  Variant (15)..(15): Xaa in position 15 is Phe or Leu
  Variant (16)..(16): Xaa in position 16 is Ile, Leu or Val
  Variant (18)..(18): Xaa in position 18 is Ile or Met
  Variant (21)..(23): Xaa in position 21 to 23 is any amino acid
  Variant (24)..(24): Xaa in position 24 is Ala or Val
  Variant (25)..(25): Xaa in position 25 is Phe or Met
  Variant (26)..(26): Xaa in position 26 is Ala or Thr
  Variant (27)..(27): Xaa in position 27 is Leu or Pro
  Variant (28)..(30): Xaa in position 28 to 30 is any amino acid
  Variant (31)..(31): Xaa in position 31 is Ala, Gln or Ser
  Variant (32)..(32): Xaa in position 32 is Ala, Gln or Thr
  Variant (33)..(35): Xaa in position 33 to 35 is any amino acid
  Variant (36)..(36): Xaa in position 36 is Asn or Thr
  Variant (37)..(37): Xaa in position 37 is Gly or Pro
AXXXXXXXXGXXXPXXVXTGXXXXXXXXXXXXXXXXX

SEQ ID NO: 9313 - protein, 41 aa, Artificial sequence
  protein pattern
  Variant (2)..(3): Xaa in position 2 to 3 is any amino acid
  Variant (4)..(4): Xaa in position 4 is any or no amino acid
  Variant (6)..(9): Xaa in position 6 to 9 is any or no amino acid
  Variant (11)..(11): Xaa in position 11 is Ile or Leu
  Variant (12)..(12): Xaa in position 12 is Ala or Ser
  Variant (13)..(13): Xaa in position 13 is any amino acid
  Variant (15)..(15): Xaa in position 15 is Ala or Gly
  Variant (16)..(16): Xaa in position 16 is Ala or Ser
  Variant (17)..(17): Xaa in position 17 is Ser or Thr
  Variant (18)..(18): Xaa in position 18 is Leu or Met
  Variant (19)..(19): Xaa in position 19 is Ala or Cys
  Variant (22)..(22): Xaa in position 22 is any amino acid
  Variant (23)..(23): Xaa in position 23 is Lys or Arg
  Variant (24)..(24): Xaa in position 24 is Ala, Ser or Thr
  Variant (26)..(26): Xaa in position 26 is Asn or Gln
  Variant (27)..(27): Xaa in position 27 is any amino acid
  Variant (28)..(28): Xaa in position 28 is Glu, Asn or Gln
  Variant (29)..(29): Xaa in position 29 is any amino acid
  Variant (30)..(30): Xaa in position 30 is Lys or Arg
  Variant (32)..(32): Xaa in position 32 is any amino acid
  Variant (34)..(34): Xaa in position 34 is any amino acid
  Variant (35)..(35): Xaa in position 35 is Ala or Ser
  Variant (37)..(37): Xaa in position 37 is Ala or Gly
  Variant (38)..(38): Xaa in position 38 is any amino acid
  Variant (39)..(39): Xaa in position 39 is Ser or Thr
  Variant (41)..(41): Xaa in position 41 is Ile or Leu
MXXXSXXXXNXXXGXXXXXVAXXXKXXXXXQXAXXAXXXAX

SEQ ID NO: 9314 - protein, 25 aa, Artificial sequence
  protein pattern
  Variant (2)..(7): Xaa in position 2 to 7 is any amino acid
  Variant (8)..(8): Xaa in position 8 is any or no amino acid
  Variant (10)..(11): Xaa in position 10 to 11 is any or no amino acid
  Variant (13)..(13): Xaa in position 13 is Ile, Leu or Val
  Variant (17)..(17): Xaa in position 17 is Ile, Leu or Met
  Variant (18)..(18): Xaa in position 18 is any amino acid
  Variant (20)..(20): Xaa in position 20 is Ala or Gly
  Variant (21)..(21): Xaa in position 21 is Gly or Ser
  Variant (23)..(23): Xaa in position 23 is Ile, Leu or Val
  Variant (25)..(25): Xaa in position 25 is Ala, Leu or Val
IXXXXXXXTXXPXIPAXXGXXMXKX

SEQ ID NO: 9315 - DNA, 2196 bp, Escherichia coli; identical to SEQ ID NO: 4266
  CDS (1)..(2196): transl_table=11

SEQ ID NO: 9316 - protein, 731 aa, Escherichia coli; identical to SEQ ID NO: 4267

SEQ ID NO: 9317 - DNA, 2199 bp, Escherichia coli; identical to SEQ ID NO: 4262
  CDS (1)..(2199): transl_table=11

SEQ ID NO: 9318 - protein, 732 aa, Escherichia coli; identical to SEQ ID NO: 4263

SEQ ID NO: 9319 - DNA, 2163 bp, Vibrio cholerae; identical to SEQ ID NO: 4268
  CDS (1)..(2163): transl_table=11

SEQ ID NO: 9320 - protein, 720 aa, Vibrio cholerae; identical to SEQ ID NO: 4269

SEQ ID NO: 9321 - DNA, 2136 bp, Shigella flexneri
  CDS (1)..(2136): transl_table=11
atgaaatcaatgaatattgccgccagtagtgaactggtatcccgactttcttctcatcgccgcgtggtggcgttgggagatactgattttacggacgtcgcggcagtcgtcattaccgctgcggatagtcgcagtggcattcttgcgttgcttaagcgcaccggttttcatctaccggtgtttttgtattccgaacatgctgttgaattacctgcgggcgttacggcggtaatcaacggcaacgagcagcagtggctggagctggaatccgcagcctgtcagtatgaagagaatttgctgccaccgttttatgacacgctgacgcagtacgttgagatgggcaacagcacctttgcttgccctggacatcaacatggtgcgttctttaaaaagcatcctgccggacgccatttttacgatttctttggtgagaacgtctttcgcgccgatatgtgtaacgctgacgtaaaattgggcgatctgcttattcatgaaggatcggcgaaagatgcgcagaaattcgcagccaaagtctttcatgccgataaaacctattttgtgctgaacggcacatcggcagcgaataaagtggtgacgaatgcgctgttaacgcgtggcgatctggtgctcttcgaccgtaacaaccataagtcgaatcatcacggcgcgctgattcaggcggggacgacgccggtctatctggaagcttcacgtaacccgtttggtttcattggcggtattgatgcgcactgttttaatgaagagtatctgcgccagcaaattcgcgacgttgcgccagaaaaagccgacctgccgcgcccgtttcgcctgacgattattcagctgggaacctatgacggcactgtctataacgcccgtcaggtgatcgataccattgggcatctgtgtgattacattctgtttgattccgcgtgggtcggttacgaacagtttatctcgatgatggcggatagctcgccgctgctgttagaacttaacgaaaacgatccggggatttttgtgacccagttggtgcacaaacagcaggctggattctcacagacgtcgcagatccataaaaaagataaccatatccgcggacaggcgcgtttttgcccgcataagcggttgaataacgcctttatgctccatgcttctaccagccctttctatccgctgtttgctgcactggatgttaacgccaaaattcatgaaggggagagtgggcgtcggctgtgggctgagtgcgttgagttgggtattgagtcgcgcaaggctattcttgcgcgctgtaagctgttccgcccgtttatcccgcccgttgttgatggcaaattgtggcaggattatccgacatcagtgttagccagcgaccgccgttttttcagttttgagccgggggcgaagtggcacggctttgaaggatatgccgcggatcagtattttgttgatccgtgcaagctgttactcactacaccaggtatcaatgccgaaaccggcgaatatagcgactttggcgttccggcgacgattctggcgcactatctgcgtgagaacggcattgtgccggagaagtgcgatctcaactccattctgttcttattaactccggcggaaagccacgagaagctggcacaactggtggcgatgctggcgcaatttgaacagcatattgaggatgactcgtcgctggctgaggtgttgccgagcgtttataacaaatatccggtgcgctatcgcgactacaccctgcgccagttgtgtcaggagatgcacgatctgtatgtcagtttcgacgtcaaagacctacaaaaagcgatgttccgccagcagagtttcccgtcagtggtgatgaacccccaggatgcgcatagcgcttatattcgcggtgaagtggagttggtgcggattcgtgatgccgaagggcgaattgcggcagaaggggcgttgccttatccacctggcgtgctttgcgtggtacccggggaagtctggggtggggcggttcaacgttatttccttgcgctggaagaaggcgtgaatttgttgccgggattttcgccggagttgcaaggtgtctatagcgaaaccgatgcggatggcatgaaacgattgtacggttatgtgttgaagtaa

SEQ ID NO: 9322 - protein, 711 aa, Shigella flexneri
MKSMNIAASSELVSRLSSHRRVVALGDTDFTDVAAVVITAADSRSGILALLKRTGFHLPVFLYSEHAVELPAGVTAVINGNEQQWLELESAACQYEENLLPPFYDTLTQYVEMGNSTFACPGHQHGAFFKKHPAGRHFYDFFGENVFRADMCNADVKLGDLLIHEGSAKDAQKFAAKVFHADKTYFVLNGTSAANKVVTNALLTRGDLVLFDRNNHKSNHHGALIQAGTTPVYLEASRNPFGFIGGIDAHCFNEEYLRQQIRDVAPEKADLPRPFRLTIIQLGTYDGTVYNARQVIDTIGHLCDYILFDSAWVGYEQFISMMADSSPLLLELNENDPGIFVTQLVHKQQAGFSQTSQIHKKDNHIRGQARFCPHKRLNNAFMLHASTSPFYPLFAALDVNAKIHEGESGRRLWAECVELGIESRKAILARCKLFRPFIPPVVDGKLWQDYPTSVLASDRRFFSFEPGAKWHGFEGYAADQYFVDPCKLLLTTPGINAETGEYSDFGVPATILAHYLRENGIVPEKCDLNSILFLLTPAESHEKLAQLVAMLAQFEQHIEDDSSLAEVLPSVYNKYPVRYRDYTLRQLCQEMHDLYVSFDVKDLQKAMFRQQSFPSVVMNPQDAHSAYIRGEVELVRIRDAEGRIAAEGALPYPPGVLCVVPGEVWGGAVQRYFLALEEGVNLLPGFSPELQGVYSETDADGMKRLYGYVLK

SEQ ID NO: 9323 - DNA, 2358 bp, Bradyrhizobium sp. ORS278
  CDS (1)..(2358): transl_table=11
atggattacttccgccgcttcaccttcctgttcgccgcgcccgtcttcgaaaccgacgacctggccggcgtccgcttcaaccagatcatcgaggagatccagcgctcgggcttcgaggtcgtccgcgcccgcaagctggaggatgccgagatcgcggtgcagacggatgcggcgatcggctgcatggtggtggactggggcaagaaggggctggagggcaagacggcgtcgctgatcaacctgatgcgccgccgcggcctggacttcccgatcatcctcctgatccggcgcaagcggttcgaggatctgccggtcgaggtgctcgacttcatcgacggctatgtcttcctctccgaggagacgccggcgttcatcgccaagaatttgatcagccggctcaagcaatatgccgagacgctcaagacgccgttcttcggcacgctggtcgactatgccgaggaaggcaaccagctctggacctgtcccgggcacaatggcggcgtattctacagccgcagcccgatcgggcggatcttcgtcgagcatttgggcgaggcggtgttccgcgacgacctcgacaattccgtgctcgacctcggcgatctcctcacccatgaagggccggcgctgcgcgcgcagaaggaggcggctcagatcttcggcgccgagaagacctatttcgtgctcaacggcacctcgacctccaacaaggtcgtgctgggggcgctggtcaccgacggcgaccttgtgcttttcgaccgcaacaaccacaaggccgcccatcacggagccctgctgatctccggcggaatcccggtctatgtgcccaccgtccgcaacgcctggggcctgatcgggccaatgcgctgggacctcctcgacgaggagcacctgcggcagcagatccgcaacaatccgctcgtcaaggaccccgatgcctggcgcaaggagcggccgttccgcgtcgccgtcgtcgaggagtgtacttacgacggcaccatccacagcgccgagatgatcctcaagcgcatcggccacctctgcgactacatcatgttcgacgaggcctgggccggcttcatgaagtttcacccgctctatgccggccgcttcgcgatgggcctctccgagctcgggccggacgcccccggaattatcgcgacgcagtcgacccacaagcagctcgcgagcttctcgcaggcctcgcagatccacatcaaggaccgccacatcaagggccagcgccgccgggtcgagcatcgccgcttcaacgagagcttcatgcagcacgcctcgacctcgcccttctatccgctgttcgcctcgctcgatgtcggcgcgcagatgatgaagggccgctcgggcgaggtgctgtgggacgacacgatccggctcgggatcgaattgcgcaagaagatccgggcgatgcgccgcgagttcgacgagaaggagaaggatccggcgcggcgctggttcttcgagccgttcgtgccggaccgggtgtcgatccccgatgccgcgagtcccggcggccgccacgacgtcgcttgggaggcgatctcgaccgaccagctcgcgaccgacgccacgctctggcagctcgcgccaggcgaggcctggcacggcttcccggacctcgcgcccggcttcgccatgaccgatccgaacaagctgaccctgctcacccccggtttcgaccgttccaccggcggctatgccgagcacggcataccggcgccggtcgtggcgcaatatctgcgcgagaatcgcatcgtcgccgagaagaacgacctcaactcgctgctcttcctgctcactcccggcgtcgaggccagcaaggccggcactttgattagcgggctcgtcgccttcaagcggctgcatgacgacaacgtgctgctcgacgacgccatccccgagttcacccgcaagcgcttcgcgcgctacggcaagacccggctgcgcgacctctgcggcgagatgcaccgcttctaccgcgaggccgaggtcagcgcgctgcaggcgaagcagtttcagccgcagcatctgcccgagatcgcgctgtcgccgcgcgaggcggcccgcgcgctgatgcgcaacgaggtcgactacctgccgatcgaccagatcgccggccgcatcgcgaccacccccttcgtggtttatccgccgggcatcgccacgatcgtccctggagagcggttgtccgatcgcgccaagccgatgatcgattacctcaagatgttcgagcgggcgttcaacacattccccggcttcgacgtcgagattcagggattgtataaggagatcgacgagtctggccggatccggctctatacctatgtctgcgcagagtaa

SEQ ID NO: 9324 - protein, 785 aa, Bradyrhizobium sp. ORS278
MDYFRRFTFLFAAPVFETDDLAGVRFNQIIEEIQRSGFEVVRARKLEDAEIAVQTDAAIGCMVVDWGKKGLEGKTASLINLMRRRGLDFPIILLIRRKRFEDLPVEVLDFIDGYVFLSEETPAFIAKNLISRLKQYAETLKTPFFGTLVDYAEEGNQLWTCPGHNGGVFYSRSPIGRIFVEHLGEAVFRDDLDNSVLDLGDLLTHEGPALRAQKEAAQIFGAEKTYFVLNGTSTSNKVVLGALVTDGDLVLFDRNNHKAAHHGALLISGGIPVYVPTVRNAWGLIGPMRWDLLDEEHLRQQIRNNPLVKDPDAWRKERPFRVAVVEECTYDGTIHSAEMILKRIGHLCDYIMFDEAWAGFMKFHPLYAGRFAMGLSELGPDAPGIIATQSTHKQLASFSQASQIHIKDRHIKGQRRRVEHRRFNESFMQHASTSPFYPLFASLDVGAQMMKGRSGEVLWDDTIRLGIELRKKIRAMRREFDEKEKDPARRWFFEPFVPDRVSIPDAASPGGRHDVAWEAISTDQLATDATLWQLAPGEAWHGFPDLAPGFAMTDPNKLTLLTPGFDRSTGGYAEHGIPAPVVAQYLRENRIVAEKNDLNSLLFLLTPGVEASKAGTLISGLVAFKRLHDDNVLLDDAIPEFTRKRFARYGKTRLRDLCGEMHRFYREAEVSALQAKQFQPQHLPEIALSPREAARALMRNEVDYLPIDQIAGRIATTPFVVYPPGIATIVPGERLSDRAKPMIDYLKMFERAFNTFPGFDVEIQGLYKEIDESGRIRLYTYVCAE

SEQ ID NO: 9325 - DNA, 2178 bp, Dichelobacter nodosus VCS1703A
  CDS (1)..(2178): transl_table=11
atgaaacatttgaaaattgctttttctgagaaagctatggtgttttctgatggagtcaaaagtcgtcagattatcaacgttgttgacacagatttttctgatgtagcagcgcttgttattactgatgaggatcaggagtttttagccaatggcaaattaaagtcatttaaaattcctgtgtttttgattaaaaccggcgacgtagcggttaaaaaagaatttattggtcgtatcgatcgcgtcattgatacatggcaatacactaatattgaattatatgctcgccaaattgaagctgcagctgataaatatgaagctaaaatgctcccgccatttttccgtgctttaagcaattatgtagaagccggtcactcacaattcgactgccccggacatcaaggtggacaattttatacacgtcacccagctggacgcgcgttttatgaattttacggtgaaaacttatttagaagtgacttgtgtaatgctgacgtcagattgggcgatttgttaattcacgaaggtcctgcatgtgatgcacaacaacacgccgcacaagtttataacgctgataaaacttatttcgtacttaacggtacatcatcagccaataaaatggtgctcaatgcattactcgctccgggtgatatggttctttatgatcgcaataaccataaatctgtttgccacggtgcgctcgttcaagcaggagcaacacccgtttatttagaaaccgcacgcaatccgtttggttcaattggcggtattttggaacattgttttgatgaaacttatatccgcaaattagtcgctgaaaaaaatgccgaaaaagccaaagcaaaacgtccgattcgtttggcagtcattcaattaggaacttacgacggtactatttataacgcacgctatgtaattgataaaattggtcatttatgtgactacattttatttgactctgcttgggtgggttatgaacaattcattccgatgatgaaggattgcagcccgttattattagaacttggacccgatgatcctggtgttttggtaacacaatctgtgcacaaacaacaagctggtttttctcaagcctctcaagtacacaaaaaagacgcccacatcaaaggacaagatcgttatgttaatcataaacgtttgaataacgcatttatgatgcatgcttcaacttctcctttctatccgatttttgcttctctcgacgtaaacgcaaaaatgcatgaaggcggcgccggacttgaaatttggaaagattgcgtagaagtgaccattgaagctcggaaagcaattttaaagaattgtaaatacattcgaccaatggttccgcccgttgttaacggtaaaaaatgggaagatggcgataccgcgaaaatggcgcaagatatttcttactttgcctttgagccgggcgccaattggcactctttcgaagggtacggaaaaggtcaatacttcatcgatccctgcaaattcttgttaacaacaccgggtattaacgttgaaactggaaaatatgaagatttcggtatccacgcaaatattttagccaactatttacgtgaaaacggcattgttccagaaaaatgcgacttaaataccattttattcctgatgacgccggcagaaaccaaaaccaagatggacgatttagttgctcaattaatccgctttgaacaattaattgaagcaaatgtgccaatgcaagacgtattgccaagcatttattatgccaatattgaaaaatataaaggctaccgtattcgtcaactttgccaagaaatgcatgatttctacaaagaaagaaaagtcagcgaattgcaaaaacgtttgttcttgaaagactatttaccagaatacgtcatgactcctcaggaagcgaactttgcttttgtacgcggtgaaggcgaattggtcgcattaagtgatgcggtaggacgtatggctctagaaggttctttaccttatccaccgggtgttatttgtgtacaacctggcgaaagatggtctgaaaccgcgcaaaaatacttcttagcacttgaagaaggtattaataaattgcctggttttgcgccagaaattcaaggcgtctatcttgttactcaagaagatggaacgaaaaaagcatacggctatgttttaaaatctgaattagataaataa

SEQ ID NO: 9326 - protein, 725 aa, Dichelobacter nodosus VCS1703A
MKHLKIAFSEKAMVFSDGVKSRQIINVVDTDFSDVAALVITDEDQEFLANGKLKSFKIPVFLIKTGDVAVKKEFIGRIDRVIDTWQYTNIELYARQIEAAADKYEAKMLPPFFRALSNYVEAGHSQFDCPGHQGGQFYTRHPAGRAFYEFYGENLFRSDLCNADVRLGDLLIHEGPACDAQQHAAQVYNADKTYFVLNGTSSANKMVLNALLAPGDMVLYDRNNHKSVCHGALVQAGATPVYLETARNPFGSIGGILEHCFDETYIRKLVAEKNAEKAKAKRPIRLAVIQLGTYDGTIYNARYVIDKIGHLCDYILFDSAWVGYEQFIPMMKDCSPLLLELGPDDPGVLVTQSVHKQQAGFSQASQVHKKDAHIKGQDRYVNHKRLNNAFMMHASTSPFYPIFASLDVNAKMHEGGAGLEIWKDCVEVTIEARKAILKNCKYIRPMVPPVVNGKKWEDGDTAKMAQDISYFAFEPGANWHSFEGYGKGQYFIDPCKFLLTTPGINVETGKYEDFGIHANILANYLRENGIVPEKCDLNTILFLMTPAETKTKMDDLVAQLIRFEQLIEANVPMQDVLPSIYYANIEKYKGYRIRQLCQEMHDFYKERKVSELQKRLFLKDYLPEYVMTPQEANFAFVRGEGELVALSDAVGRMALEGSLPYPPGVICVQPGERWSETAQKYFLALEEGINKLPGFAPEIQGVYLVTQEDGTKKAYGYVLKSELDK

SEQ ID NO: 9327 - DNA, 2163 bp, Pasteurella multocida subsp. multocida str. Pm70; identical to SEQ ID NO: 4270
  CDS (1)..(2163): transl_table=11

SEQ ID NO: 9328 - protein, 720 aa, Pasteurella multocida subsp. multocida str. Pm70; identical to SEQ ID NO: 4271

SEQ ID NO: 9329 - DNA, 2256 bp, Pseudomonas aeruginosa PAO1
  CDS (1)..(2256): transl_table=11
atgtataaagacctcaaatttcccgtcctcatcgtccatcgcgacatcaaggccgacaccgttgccggcgaacgcgtgcggggcatcgcccacgaactggagcaggacggcttcagcattctctccaccgccagctccgccgaggggcgcatcgtcgcttccacccaccacggcctggcctgcattctggtcgccgccgaaggtgccggggaaaaccagcgcctgctgcaggatgtggtcgaactgatccgcgtggcccgcgtgcgggcgccgcaattgccgatcttcgccctcggcgagcaggtgaccatcgagaacgcgccggccgagtccatggccgacctgcaccagttgcgcggcatcctctacctgttcgaagacaccgtgccgttcctcgcccgccaggtcgcccgggcggcgcgcaactacctggccgggctgctgccgccattcttccgtgcgctggtcgagcacaccgcgcagtccaactattcctggcatacgccgggccacggcggcggtgtcgcctatcgcaagagtccggtgggacaggcgttccaccagttcttcggggagaacacgctgcgttccgacctgtcggtctcggtccccgagctgggatcgctgctcgaccataccggccccctggccgaggccgaggaccgtgccgcgcgcaatttcggcgccgaccataccttcttcgtgatcaatggcacttccaccgcgaacaagatcgtctggcactccatggtcggtcgcgaagacctggtgctggtggaccgcaactgccacaagtcgatcctccactcgatcatcatgaccggggcgataccgctctacctgactccggaacgcaacgaactggggatcatcgggccgatcccgctgagcgaattcagcaagcagtcgatcgccgcgaagatcgccgccagcccgctggcgcgcggccgcgagccgaaggtgaagctggcggtggtgactaactccacctacgacggcctgtgctacaacgccgagctgatcaagcagaccctcggcgacagcgtcgaggtgttgcacttcgacgaggcttggtacgcctatgccgcgttccacgagttctacgacggacgctatggcatgggcacctcgcgcagcgaggagggacccctggtgttcgccacccactccacgcacaagatgctcgccgccttcagccaggcctcgatgatccacgtgcaggatggcgggacccggaagctggacgtggcgcgcttcaacgaagccttcatgatgcacatctcgacctcgccgcagtacggcatcatcgcttcgctggacgtggcttcggcgatgatggaagggcccgccgggcgttcgctgatccaggagaccttcgacgaggccctcagcttccgccgggccctggccaacgtacggcagaacctggaccggaacgactggtggttcggcgtctggcagccggagcaggtggagggcaccgaccaggtcggcacccatgactgggtgctggagccgagcgccgactggcacggcttcggcgatatcgccgaagactacgtgctgctcgacccgatcaaggtcaccctgaccaccccgggcctgagcgctggcggcaagctcagcgagcaggggattccggccgccatcgtcagccgcttcctctgggagcgcgggctggtggtggagaaaaccggtctctactccttcctggtgctgttctcgatgggcatcaccaagggcaagtggagcaccctggtcaccgaactgctcgaattcaagcgctgttacgacgccaacctgccgctgcttgacgtcttgccctccgtggcccaggccggcggcaagcgctacaacggagtgggcctgcgcgacctcagcgacgccatgcacgccagctaccgcgacaacgccacggcgaaggccatgaagcgcatgtacacggtgctgccggaggtcgcgatgcggccgtccgaggcctacgacaagctggtgcgcggcgaggtcgaggcggtaccgatcgctcggttggaagggcgcatcgcggccgtcatgctggtaccctatccgccgggtatcccgctgatcatgccgggtgagcgcttcaccgaggcgacccgctcgatcctcgactatctcgagttcgcgcggaccttcgagcgcgccttccctggtttcgactccgatgtgcatggcctgcagcatcaggacggaccgtccgggcgctgctataccgttgaatgcataaaggaatga

SEQ ID NO: 9330 - protein, 751 aa, Pseudomonas aeruginosa PAO1
MYKDLKFPVLIVHRDIKADTVAGERVRGIAHELEQDGFSILSTASSAEGRIVASTHHGLACILVAAEGAGENQRLLQDVVELIRVARVRAPQLPIFALGEQVTIENAPAESMADLHQLRGILYLFEDTVPFLARQVARAARNYLAGLLPPFFRALVEHTAQSNYSWHTPGHGGGVAYRKSPVGQAFHQFFGENTLRSDLSVSVPELGSLLDHTGPLAEAEDRAARNFGADHTFFVINGTSTANKIVWHSMVGREDLVLVDRNCHKSILHSIIMTGAIPLYLTPERNELGIIGPIPLSEFSKQSIAAKIAASPLARGREPKVKLAVVTNSTYDGLCYNAELIKQTLGDSVEVLHFDEAWYAYAAFHEFYDGRYGMGTSRSEEGPLVFATHSTHKMLAAFSQASMIHVQDGGTRKLDVARFNEAFMMHISTSPQYGIIASLDVASAMMEGPAGRSLIQETFDEALSFRRALANVRQNLDRNDWWFGVWQPEQVEGTDQVGTHDWVLEPSADWHGFGDIAEDYVLLDPIKVTLTTPGLSAGGKLSEQGIPAAIVSRFLWERGLVVEKTGLYSFLVLFSMGITKGKWSTLVTELLEFKRCYDANLPLLDVLPSVAQAGGKRYNGVGLRDLSDAMHASYRDNATAKAMKRMYTVLPEVAMRPSEAYDKLVRGEVEAVPIARLEGRIAAVMLVPYPPGIPLIMPGERFTEATRSILDYLEFARTFERAFPGFDSDVHGLQHQDGPSGRCYTVECIKE

SEQ ID NO: 9331 - DNA, 2199 bp, Escherichia coli O157:H7 EDL933; identical to SEQ ID NO: 4272
  CDS (1)..(2199): transl_table=11
  misc_feature (837)..(837): r is g or a
  misc_feature (1194)..(1194): s is g or c

SEQ ID NO: 9332 - protein, 732 aa, Escherichia coli O157:H7 EDL933; identical to SEQ ID NO: 4273
  misc_feature (398)..(398): The Xaa at location 398 stands for Leu, or Phe.

SEQ ID NO: 9333 - DNA, 2196 bp, Escherichia coli O157:H7 EDL933
  CDS (1)..(2196): transl_table=11
atggggcagggttttacaccttgtccagtattcttacttccccgaaacgggtttgcgcttatgaaatcaatgaatattgccgccagtagtgaactggtatcccgactttctactcatcgccgcgtggtggcgttgggagatactgattttacggacgtcgcggcagtcgtcattaccgctgcggatagtcgcagtggcattcttacgttgcttaagcgcaccggttttcatctaccggtgtttttgtattccgaacatgctgttgaattacctgcgggcgttacggcggtaatcaacggcaacgagcagcagtggctggagctggaatccgcagcctgtcagtatgaagagaatttgctgccaccgttttatgacacgctgacgcagtacgttgagatgggcaacagcacctttgcttgccctggacatcaacatggtgcgttctttaaaaagcatcctgccggacgccatttttacgatttctttggtgagaacatctttcgcgccgatatgtgtaacgctgacgtaaaattgggcgatctgcttattcatgaaggatcggcgaaagatgcgcagaaattcgcagccaaagtctttcatgccgataaaacctattttgtgctgaacggcacatcggcagcgaataaagtggtgacgaatgcgctgttaacgcgtggcgatctggtgctctttgaccgtaacaaccataagtcgaatcatcacggcgcgttgattcaggcgggggcgacgccggtctatctggaagcttcacgtaacccgtttggtttcattggcggtattgatgcgcactgttttaatgaagagtatctgcgccagcaaattcgcgacgttgcgccagaaaaagccgacctgccgcgcccgtttcgcctggcgattattcagctgggaacctatgacggcactgtctataacgcccgtcaggtgatcgataccgttgggcatctgtgtgattacattctgtttgattccgcgtgggtcggttatgaacaatttatcccgatgatggcggatagctcgccgctgctgttagaacttaacgaaaacgatccggggatctttgtgactcagtcggtgcacaaacagcaggcgggattctcacagacgtcgcagatccataaaaaagataaccatatccgcggacaggcgcgtttttgcccgcataagcggttgaataacgcctttatgctccatgcttctaccagccctttctatccgctgtttgctgcactggatgttaacgccaaaattcatgaaggggagagtgggcgtcggctgtgggctgagtgcgttgagttgggtattgagtcgcgcaaggctattcttgcgcgctgtaagctgttccgcccgtttatcccgcccgttgttgatggcaaattgtggcaggattatccgacatcagtgttagccagcgaccgtcgttttttcagttttgagccgggggcgaagtggcacggctttgaaggatatgccgcggatcagtattttgttgatccgtgcaagctgttactcactacaccaggtatcgatgccgaaaccggcgaatatagcgactttggcgttccggcgacgattctggcgcactatctgcgtgagaacggcattgtgccggagaagtgcgatctcaattccattctgttcttattaactccggcggaaagccacgagaagctggcacaactggtggcgatgctggctcaatttgaacagcatattgaggatgactcgccgctggctgaggtgttgccgagcgtttataacaaatatccggtgcgctatcgcgactacaccctgcgccagttgtgtcaggagatgcacgatctgtatgtcagtttcgacgtcaaagacctacaaaaagcgatgttccgccagcagagtttcccgtcagtggtgatgaacccccaggatgcgcatagcgcttatattcgcggtgacgtggagttggtgcggattcgtgatgccgaagggcgaattgcggcagaaggggcgttgccttatccacctggcgtgctttgcgtggtacccggggaagtctggggtggggcggttcaacgttatttccttgcactggaagaaggggtgaatttgttgccgggattttcgccggagctgcaaggtgtttatagcgaaaccgatgcggatggcatgaaacggttgtacggttatgtgttgaagtaa

SEQ ID NO: 9334 - protein, 731 aa, Escherichia coli O157:H7 EDL933
MGQGFTPCPVFLLPRNGFALMKSMNIAASSELVSRLSTHRRVVALGDTDFTDVAAVVITAADSRSGILTLLKRTGFHLPVFLYSEHAVELPAGVTAVINGNEQQWLELESAACQYEENLLPPFYDTLTQYVEMGNSTFACPGHQHGAFFKKHPAGRHFYDFFGENIFRADMCNADVKLGDLLIHEGSAKDAQKFAAKVFHADKTYFVLNGTSAANKVVTNALLTRGDLVLFDRNNHKSNHHGALIQAGATPVYLEASRNPFGFIGGIDAHCFNEEYLRQQIRDVAPEKADLPRPFRLAIIQLGTYDGTVYNARQVIDTVGHLCDYILFDSAWVGYEQFIPMMADSSPLLLELNENDPGIFVTQSVHKQQAGFSQTSQIHKKDNHIRGQARFCPHKRLNNAFMLHASTSPFYPLFAALDVNAKIHEGESGRRLWAECVELGIESRKAILARCKLFRPFIPPVVDGKLWQDYPTSVLASDRRFFSFEPGAKWHGFEGYAADQYFVDPCKLLLTTPGIDAETGEYSDFGVPATILAHYLRENGIVPEKCDLNSILFLLTPAESHEKLAQLVAMLAQFEQHIEDDSPLAEVLPSVYNKYPVRYRDYTLRQLCQEMHDLYVSFDVKDLQKAMFRQQSFPSVVMNPQDAHSAYIRGDVELVRIRDAEGRIAAEGALPYPPGVLCVVPGEVWGGAVQRYFLALEEGVNLLPGFSPELQGVYSETDADGMKRLYGYVLK

SEQ ID NO: 9335 - DNA, 2349 bp, Sinorhizobium meliloti 1021; identical to SEQ ID NO: 4274
  CDS (1)..(2349): transl_table=11

SEQ ID NO: 9336 - protein, 782 aa, Sinorhizobium meliloti 1021; identical to SEQ ID NO: 4275

SEQ ID NO: 9337 - DNA, 2196 bp, Sinorhizobium meliloti 1021
  CDS (1)..(2196): transl_table=11
atgcgcagcctcgcagaggcgattgaaaaggaaggttatcgggtcgttgcagggctcacctatgaggatgcacgccgcctcgtgaacgtcttcaacaccgagtcctgctggctgatttcagtcgacgggacggaatcaagtacgacgcgctgggagattttagccgagctgctcgccgcgaaacgctcccggaacaacctgctgccaatctttctgtttggcgacgatacaacggcggaaatggtgccggcgcccgtgctgcgccacgccaatgcctttatgcgtcttttcgaggattctccggaattcatggcgcgcgcgatcgtgcgcgcggcgcagaattatcttgagaggcttccgcctccaatgttcaaggcgttgatggaatacacgcttcacggcgcctattcctggcacacgccagggcacggaggcggggtggcgtttcgcaagagcccggttggccagctcttttatacgttttttggagagaacacattgaggtcggacatttctgtgtccgtcggcagcgttggttcgctcctcgatcatgttgggccgattggcgagggtgagcgcaatgccgctcgcatatttggtgcggatgagacgctgttcgttgtcggcggcacctcgaccgccaataagatcgtgtggcagggtatggtcactcggaacgacctcgtcctctgcgaccgaaactgccataagtctatcctgcactcgctgattatgacgggtgcaacgccgatttacctgacgccctcacgcaacggcctcggcatcatcggaccgattgcgaaggagcagtttaccccagaggcaatcgcgcacaagatcgtcgccagtccgtttgccagtgagacgaacggtaaagtgcgcctgatggtagtgacaaactccacctatgatgggctctgctacaatgtagatggaatcaaatcggcgctcggcgatgcggtggaggtactgcatttcgacgaggcctggtttgcttacgccaattttcacgaattctacgatggttatcacgcgatctcttcaacgaagcccgcgcgctcgcaagaagccatcacattcgcaacccagtccacgcacaagctgctggccgccttctctcaagcttcaatgcttcatgtgcagcatgccgtggcgaagcaactcgacatcacacgcttcaacgaagcgttcatgatgcacacatcgacatcgccgcaatatgggatcatcgcctcgtgcgacgtggctgctgccatgatggagcagcccgccgggcgggcgctggtacaggagaccattgacgaagccatgagtttccgccgagccgtcaacgccgtgcggacacagatgcaggattcctggtggttcgaagtctgggagccccccatcgcggatcgggccccgagcgacgccacgtcggattggcttctaaagcccggtgacgcttggcatggtttcgaagacctggctgagaatcacgttatggttgacccgatcaaggtcacgatcctttcgcccggactcaatgcgggcggagcgatgctggagcatggtattccggctgcagtcgtcacgaagttcctttcttctcgccggatcgaaatcgagaaaaccggcctctactctttcctggtgctcttctccatggggatcacacggggcaagtggagcaccctgatcaccgagctcttgaacttcaaagacctctatgatgccaatgcgcctctttcacgcgcccttcccgccctcgcggcagcccatccggacgtctaccgtgcaatgggccttagagatctttgcgagaaaattcacgacgtgtaccgcagcgatggcgtgccgaatgcccagcgcgagatgtacaccgtgctacccgaaatggcactgcgcccggcagacgcctacaaccgcctggtcaaggggtgcgtcgaaagcgtcgatatcgacgaattgatcggccggacactcgcagtcatgattgtaccctatcctccgggcatcccgctcatcatgcctggcgagcggatcactgcagccacaagatcgatccaggactatctcgtctacgcccggagtttcgacaggaaattcccgggatttgagacggacatccacggactccgtttcgtcgctaacccgagtggacggagatatctcgtggattgcatcgtcgaggagggacaagatgataccgcgtga

SEQ ID NO: 9338 - protein, 731 aa, Sinorhizobium meliloti 1021
MRSLAEAIEKEGYRVVAGLTYEDARRLVNVFNTESCWLISVDGTESSTTRWEILAELLAAKRSRNNLLPIFLFGDDTTAEMVPAPVLRHANAFMRLFEDSPEFMARAIVRAAQNYLERLPPPMFKALMEYTLHGAYSWHTPGHGGGVAFRKSPVGQLFYTFFGENTLRSDISVSVGSVGSLLDHVGPIGEGERNAARIFGADETLFVVGGTSTANKIVWQGMVTRNDLVLCDRNCHKSILHSLIMTGATPIYLTPSRNGLGIIGPIAKEQFTPEAIAHKIVASPFASETNGKVRLMVVTNSTYDGLCYNVDGIKSALGDAVEVLHFDEAWFAYANFHEFYDGYHAISSTKPARSQEAITFATQSTHKLLAAFSQASMLHVQHAVAKQLDITRFNEAFMMHTSTSPQYGIIASCDVAAAMMEQPAGRALVQETIDEAMSFRRAVNAVRTQMQDSWWFEVWEPPIADRAPSDATSDWLLKPGDAWHGFEDLAENHVMVDPIKVTILSPGLNAGGAMLEHGIPAAVVTKFLSSRRIEIEKTGLYSFLVLFSMGITRGKWSTLITELLNFKDLYDANAPLSRALPALAAAHPDVYRAMGLRDLCEKIHDVYRSDGVPNAQREMYTVLPEMALRPADAYNRLVKGCVESVDIDELIGRTLAVMIVPYPPGIPLIMPGERITAATRSIQDYLVYARSFDRKFPGFETDIHGLRFVANPSGRRYLVDCIVEEGQDDTA

SEQ ID NO: 9339 - DNA, 2199 bp, Salmonella typhimurium LT2; identical to SEQ ID NO: 4276
  CDS (1)..(2199): transl_table=11

SEQ ID NO: 9340 - protein, 732 aa, Salmonella typhimurium LT2; identical to SEQ ID NO: 4277

SEQ ID NO: 9341 - DNA, 2136 bp, Salmonella typhimurium LT2; identical to SEQ ID NO: 4278
  CDS (1)..(2136): transl_table=11

SEQ ID NO: 9342 - protein, 711 aa, Salmonella typhimurium LT2; identical to SEQ ID NO: 4279

SEQ ID NO: 9343 - DNA, 2163 bp, Yersinia pestis KIM; identical to SEQ ID NO: 4280
  CDS (1)..(2163): transl_table=11

SEQ ID NO: 9344 - protein, 720 aa, Yersinia pestis KIM; identical to SEQ ID NO: 4281

SEQ ID NO: 9345 - DNA, 2196 bp, Shigella flexneri 2a str. 301
  CDS (1)..(2196): transl_table=11
atggggcagggttttccaccttgtccggtattcttacttccccgaaacgggtttgcgcttatgaaatcaatgaatattgccgccagtagtgaactggtatcccgactttcttctcatcgccgcgtggtggcgttgggagatactgattttacggacgtcgcggcagtcgtcattaccgctgcggatagtcgcagtggcattcttgcgttgcttaagcgcaccggttttcatctaccggtgtttttgtattccgaacatgctgttgaattacctgcgggcgttacggcggtaatcaacggcaacgagcagcagtggctggagctggaatccgcagcctgtcagtatgaagagaatttgctgccaccgttttatgacacgctgacgcagtacgttgagatgggcaacagcacctttgcttgccctggacatcaacatggtgcgttctttaaaaagcatcctgccggacgccatttttacgatttctttggtgagaacgtctttcgcgccgatatgtgtaacgctgacgtaaaattgggcgatctgcttattcatgaaggatcggcgaaagatgcgcagaaattcgcagccaaagtctttcatgccgataaaacctattttgtgctgaacggcacatcggcagcgaataaagtggtgacgaatgcgctgttaacgcgtggcgatctggtgctcttcgaccgtaacaaccataagtcgaatcatcacggcgcgctgattcaggcggggacgacgccggtctatctggaagcttcacgtaacccgtttggtttcattggcggtattgatgcgcactgttttaatgaagagtatctgcgccagcaaattcgcgacgttgcgccagaaaaagccgacctgccgcgcccgtttcgcctgacgattattcagctgggaacctatgacggcactgtctataacgcccgtcaggtgatcgataccattgggcatctgtgtgattacattctgtttgattccgcgtgggtcggttacgaacagtttatctcgatgatggcggatagctcgccgctgctgttagaacttaacgaaaacgatccggggatttttgtgacccagttggtgcacaaacagcaggctggattctcacagacgtcgcagatccataaaaaagataaccatatccgcggacaggcgcgtttttgcccgcataagcggttgaataacgcctttatgctccatgcttctaccagccctttctatccgctgtttgctgcactggatgttaacgccaaaattcatgaaggggagagtgggcgtcggctgtgggctgagtgcgttgagttgggtattgagtcgcgcaaggctattcttgcgcgctgtaagctgttccgcccgtttatcccgcccgttgttgatggcaaattgtggcaggattatccgacatcagtgttagccagcgaccgccgttttttcagttttgagccgggggcgaagtggcacggctttgaaggatatgccgcggatcagtattttgttgatccgtgcaagctgttactcactacaccaggtatcaatgccgaaaccggcgaatatagcgactttggcgttccggcgacgattctggcgcactatctgcgtgagaacggcattgtgccggagaagtgcgatctcaactccattctgttcttattaactccggcggaaagccacgagaagctggcacaactggtggcgatgctggcgcaatttgaacagcatattgaggatgactcgtcgctggctgaggtgttgccgagcgtttataacaaatatccggtgcgctatcgcgactacaccctgcgccagttgtgtcaggagatgcacgatctgtatgtcagtttcgacgtcaaagacctacaaaaagcgatgttccgccagcagagtttcccgtcagtggtgatgaacccccaggatgcgcatagcgcttatattcgcggtgaagtggagttggtgcggattcgtgatgccgaagggcgaattgcggcagaaggggcgttgccttatccacctggcgtgctttgcgtggtacccggggaagtctggggtggggcggttcaacgttatttccttgcgctggaagaaggcgtgaatttgttgccgggattttcgccggagttgcaaggtgtctatagcgaaaccgatgcggatggcatgaaacgattgtacggttatgtgttgaagtaa

SEQ ID NO: 9346 - protein, 731 aa, Shigella flexneri 2a str. 301
MGQGFPPCPVFLLPRNGFALMKSMNIAASSELVSRLSSHRRVVALGDTDFTDVAAVVITAADSRSGILALLKRTGFHLPVFLYSEHAVELPAGVTAVINGNEQQWLELESAACQYEENLLPPFYDTLTQYVEMGNSTFACPGHQHGAFFKKHPAGRHFYDFFGENVFRADMCNADVKLGDLLIHEGSAKDAQKFAAKVFHADKTYFVLNGTSAANKVVTNALLTRGDLVLFDRNNHKSNHHGALIQAGTTPVYLEASRNPFGFIGGIDAHCFNEEYLRQQIRDVAPEKADLPRPFRLTIIQLGTYDGTVYNARQVIDTIGHLCDYILFDSAWVGYEQFISMMADSSPLLLELNENDPGIFVTQLVHKQQAGFSQTSQIHKKDNHIRGQARFCPHKRLNNAFMLHASTSPFYPLFAALDVNAKIHEGESGRRLWAECVELGIESRKAILARCKLFRPFIPPVVDGKLWQDYPTSVLASDRRFFSFEPGAKWHGFEGYAADQYFVDPCKLLLTTPGINAETGEYSDFGVPATILAHYLRENGIVPEKCDLNSILFLLTPAESHEKLAQLVAMLAQFEQHIEDDSSLAEVLPSVYNKYPVRYRDYTLRQLCQEMHDLYVSFDVKDLQKAMFRQQSFPSVVMNPQDAHSAYIRGEVELVRIRDAEGRIAAEGALPYPPGVLCVVPGEVWGGAVQRYFLALEEGVNLLPGFSPELQGVYSETDADGMKRLYGYVLK

SEQ ID NO: 9347 - DNA, 2163 bp, Shewanella oneidensis MR-1; identical to SEQ ID NO: 4282
  CDS (1)..(2163): transl_table=11

SEQ ID NO: 9348 - protein, 720 aa, Shewanella oneidensis MR-1; identical to SEQ ID NO: 4283

SEQ ID NO: 9349 - DNA, 2208 bp, Escherichia coli CFT073; identical to SEQ ID NO: 4284
  CDS (1)..(2208): transl_table=11

SEQ ID NO: 9350 - protein, 735 aa, Escherichia coli CFT073; identical to SEQ ID NO: 4285

SEQ ID NO: 9351 - DNA, 2136 bp, Escherichia coli CFT073
  CDS (1)..(2136): transl_table=11
atgaaatcaatgaatattgccgccagtagtgaactggtatcccgactttctactcatcgccgcgtggtggcgttgggagatactgattttacggacgtcgcggcagtcgtcattaccgctgcggatagtcgcagtggcattcttgcattgcttaagcgcaccggttttcatctaccggtgtttttgtattccgaacatgctgttgaattacctgcgggcgttacggcggtaatcaacggcaacgagcagcagtggctggagctggaatccgcagcctgtcagtatgaagagaatttgctgccaccgttttatgacacgctgacgcagtacgttgagatgggtaatagcacctttgcttgccctggacatcaacatggtgcgttctttaaaaagcatcctgccggacgccatttttacgatttctttggcgagaacatctttcgcgccgatatgtgtaacgctgacgtaaaattgggcgatctgcttattcatgaaggatcggcgaaagatgcgcagaaatttgcagccaaagtctttcatgccgataaaacctattttgtgctgaacggcacatcggcagcgaataaagtggtgacgaatgcgctgttaacgcgtggcgatctggtgctcttcgaccgtaacaaccataagtcgaatcatcatggcgcgttgattcaggcgggggcgacaccggtctatctggaagcttcacgtaacccgtttggtttcattggcggtattgatgcgcactgttttaatgaagagtatctgcgccagcaaattcgcgacgttgcgccagaaaaagccgacctgccgcgcccgtttcgcctggcgattattcagctgggaacctatgacggcactgtctataacgcccgtcaggtgatcgataccgttgggcatctgtgtgattacattctgtttgattccgcgtgggtcggttacgaacagtttatcccgatgatggcggatagctcgccgctgctgttagaacttaacgaaaacgatccggggatctttgtgactcagtcggtgcacaaacagcaggcgggattctcacagacgtcgcagatccataaaaaagataaccatatccgtggacaggcgcgtttttgcccgcataagcggttgaataatgcctttatgctccatgcttctaccagcccgttctatccgctgttcgccgccctggacgttaacgccaaaattcatgaaggggagagtgggcgtcggctgtgggctgagtgcgttgagttgggtattgagtcgcgcaaggctattcttgcgcgctgtaagctgttccgcccgtttatcccgcccgttgttgatggcaaattgtggcaggattatccgacgtcagtgttagccagcgaccgccgttttttcagttttgagccgggggcgaattggcacggctttgaaggatatgccgcggatcagtattttgttgatccgtgcaagctgttactcaccacgccgggtatcgatgccgaaaccggcgaatatagcgactttggcgttccggcgacgattctggcgcactacctgcgtgagaacggcattgtgccggagaagtgcgatctcaactccattctgttcttattaactccggcggaaagccacgagaagctggcacaactggtggcgatgctggcgcagtttgaacagcatattgaggatgattcgccgctggctgaggtgttgccgagcgtttataacaaatatccggtgcgctatcgcgactacaccctgcgccagttgtgtcaggagatgcacgatttgtatgtcagtttcgacgtcaaagacctacaaaaagcgatgttccgccagcagagtttcccgtcagtggtgatgaatccccaggatgcgcatagcgcttatattcgcggtgaagtggagttggtgcggattcgtgatgccgaagggcgaattgcggcagaaggggcgttgccttatccacctggcgtgctttgcgtggtacccggggaagtctggggtggggcggttcaacgttatttccttgcgctggaagaaggcgtgaatttgttgccgggattttcgccggagttgcaaggtgtctatagcgaaaccgatgcggatggcatgaaacggttgtacggttatgtgttgaagtaa

SEQ ID NO: 9352 - protein, 711 aa, Escherichia coli CFT073
MKSMNIAASSELVSRLSTHRRVVALGDTDFTDVAAVVITAADSRSGILALLKRTGFHLPVFLYSEHAVELPAGVTAVINGNEQQWLELESAACQYEENLLPPFYDTLTQYVEMGNSTFACPGHQHGAFFKKHPAGRHFYDFFGENIFRADMCNADVKLGDLLIHEGSAKDAQKFAAKVFHADKTYFVLNGTSAANKVVTNALLTRGDLVLFDRNNHKSNHHGALIQAGATPVYLEASRNPFGFIGGIDAHCFNEEYLRQQIRDVAPEKADLPRPFRLAIIQLGTYDGTVYNARQVIDTVGHLCDYILFDSAWVGYEQFIPMMADSSPLLLELNENDPGIFVTQSVHKQQAGFSQTSQIHKKDNHIRGQARFCPHKRLNNAFMLHASTSPFYPLFAALDVNAKIHEGESGRRLWAECVELGIESRKAILARCKLFRPFIPPVVDGKLWQDYPTSVLASDRRFFSFEPGANWHGFEGYAADQYFVDPCKLLLTTPGIDAETGEYSDFGVPATILAHYLRENGIVPEKCDLNSILFLLTPAESHEKLAQLVAMLAQFEQHIEDDSPLAEVLPSVYNKYPVRYRDYTLRQLCQEMHDLYVSFDVKDLQKAMFRQQSFPSVVMNPQDAHSAYIRGEVELVRIRDAEGRIAAEGALPYPPGVLCVVPGEVWGGAVQRYFLALEEGVNLLPGFSPELQGVYSETDADGMKRLYGYVLK

SEQ ID NO: 9353 - DNA, 2181 bp, Vibrio vulnificus CMCP6; identical to SEQ ID NO: 4286
  CDS (1)..(2181): transl_table=11

SEQ ID NO: 9354 - protein, 726 aa, Vibrio vulnificus CMCP6; identical to SEQ ID NO: 4287

SEQ ID NO: 9355 - DNA, 2517 bp, Bradyrhizobium japonicum USDA 110; identical to SEQ ID NO: 4288
  CDS (1)..(2517): transl_table=11

SEQ ID NO: 9356 - protein, 838 aa, Bradyrhizobium japonicum USDA 110; identical to SEQ ID NO: 4289

SEQ ID NO: 9357 - DNA, 2181 bp, Vibrio parahaemolyticus RIMD 2210633; identical to SEQ ID NO: 4290
  CDS (1)..(2181): transl_table=11

SEQ ID NO: 9358 - protein, 726 aa, Vibrio parahaemolyticus RIMD 2210633; identical to SEQ ID NO: 4291

SEQ ID NO: 9359 - DNA, 2271 bp, Bordetella parapertussis 12822
  CDS (1)..(2271): transl_table=11
atgaaattccgcttccccattttcatcatcgacgaagactatcgctccgagaacgcctcggggttgggcattcgcgcgctggcttcggcgatcgaggccgagggcgtggaggtcatcggggtgaccagctacggcgacctgagctcgtttgcccagcagcaaagccgcgccagcgccttcatcctgtcgatcgacgatgaggagttcgacgtcgattctccggaagacgtggcgggcgcgatcaagaacctgcgcacgttcatcggcgagctgcgtttccgcaacgccgacatccccatctacctgtacggcgagacgcgcacgtcggaacacatcccgaacgacatcctgcgcgagctgcacggcttcatccacatgttcgaggacacgccggagttcgtggcgcgccacatcatccgcgaagcgcgcagctacgtggacggcctgctgccgccgttcttccgcgagttggtcaaatatgcccaggacggttcgtattcctggcactgcccggggcactcgggcggcgtggcgttcctcaagagcccggtgggccagatgttccaccagttcttcggcgagaacatgctgcgcgccgacgtctgcaacgcggtcgacgaactgggccagctgctggaccacaccggcccggtggccgagtccgagctgaatgccgcgcgcattttccatgccgaccactgcttcttcgtcaccaacggcacctcgacgtcgaacaaggtcgtctggcatgccaacgtggccgccggcgacgtggtggtggtggaccgcaactgccacaagtcgatcctgcacgccatcacgatgaccggcgcgatcccggtgttcctgcgccccacgcgcaaccacctgggcatcatcggtccgatcccgctcgacgaattcgacccggagaacatccgccgcaagatcgaggccaacccgttcgcgcgcgaggcgctgaacaagaagccgcgcatcctcacgctgacgcagagcacctatgacggcgtcatctacaacgtcgagatgatcaaggaaaagctgggcacctacgtcgacacgctgcatttcgacgaggcctggctgccgcacgcggccttccacgagtactaccgcgacatgcacgcgatcggcccggaccgcccgcgcagccaggacgccatggtgttcgccacgcactccacgcacaagctgctggccggcatctcgcaggcctcgcagatcatcgtgcaggagtccgagagccgcaagctggaccgcaacctcttcaacgaggcctacctgatgcatacgtcgacctcgccgcagtacgcgatcatcgcgtcgtgcgacgtggccgccgccatgatggagccgccgggcggcaccgccctggtcgaggaaagcatccgcgaggccatggactttcgccgcgccatgcgcaaggtggcctccgagttcggcaaggacgactggtggtttaaggtgtggggccccaaccgcctcgcgcccgagggcatcggccatcgcgacgactgggtgctggagtcgggcgaccactggcacggctttggcgacctggcgccgggcttcaacatgctcgacccgatcaaggccaccatcatcaccccgggcctggacatgtcgggcagcttcggcgaaagcggcataccggccgcgctggtgtcgaagtacctggccgagcacggcgtcgtggtggagaagaccggcctgtattcgttcttcatcctgttcaccatcggtatcaccaagggccgctggaacaccctgctgaccgcgctgcagcagttcaaggacgactacgaccgcaaccagcccctgtggcgtatcctgcccgagttctgccgcggtcaccgccgctacgagcgcatgggcctgcgcgacctgtgccagcagatccacgaggcctatcgcgaacgcgacgtggcgcgcctgaccaccgagatgtacctgagcgacatggtgccggcgctcaagccctcggacgccttcgcccgcatggcgcaccgcgaagtcgagcgcgtcgagatcgaccagctcgaaggccgcgtgaccggcgtgctgctcacgccgtacccgccgggcattccgctgctgatcccgggcgagcgcttcaaccggaccatcgtgcaatacctgcagttcgcgcgcgagttcaacgagcgcttccccggcttcgagacctacatccacggcctggccgacgaagagggccccgatggcgccaagcgctattacgtcgactgcctgaaggacgccggcgagcagtaa

SEQ ID NO: 9360 - protein, 756 aa, Bordetella parapertussis 12822
MKFRFPIFIIDEDYRSENASGLGIRALASAIEAEGVEVIGVTSYGDLSSFAQQQSRASAFILSIDDEEFDVDSPEDVAGAIKNLRTFIGELRFRNADIPIYLYGETRTSEHIPNDILRELHGFIHMFEDTPEFVARHIIREARSYVDGLLPPFFRELVKYAQDGSYSWHCPGHSGGVAFLKSPVGQMFHQFFGENMLRADVCNAVDELGQLLDHTGPVAESELNAARIFHADHCFFVTNGTSTSNKVVWHANVAAGDVVVVDRNCHKSILHAITMTGAIPVFLRPTRNHLGIIGPIPLDEFDPENIRRKIEANPFAREALNKKPRILTLTQSTYDGVIYNVEMIKEKLGTYVDTLHFDEAWLPHAAFHEYYRDMHAIGPDRPRSQDAMVFATHSTHKLLAGISQASQIIVQESESRKLDRNLFNEAYLMHTSTSPQYAIIASCDVAAAMMEPPGGTALVEESIREAMDFRRAMRKVASEFGKDDWWFKVWGPNRLAPEGIGHRDDWVLESGDHWHGFGDLAPGFNMLDPIKATIITPGLDMSGSFGESGIPAALVSKYLAEHGVVVEKTGLYSFFILFTIGITKGRWNTLLTALQQFKDDYDRNQPLWRILPEFCRGHRRYERMGLRDLCQQIHEAYRERDVARLTTEMYLSDMVPALKPSDAFARMAHREVERVEIDQLEGRVTGVLLTPYPPGIPLLIPGERFNRTIVQYLQFAREFNERFPGFETYIHGLADEEGPDGAKRYYVDCLKDAGEQ

SEQ ID NO: 9361 - DNA, 2271 bp, Bordetella bronchiseptica RB50
  CDS (1)..(2271): transl_table=11
atgaaattccgcttccccattttcatcatcgacgaagactatcgctccgagaacgcctcggggttgggcattcgcgcgctggcttcggcgatcgaggccgagggcgtggaggtcatcggggtgaccagctacggcgacctgagctcgtttgcccagcagcaaagccgcgccagcgccttcatcctgtcgatcgacgatgaggagttcgacgtcgattctccggaagacgtggcgggcgcgatcaagaacctgcgcacgttcatcggcgagctgcgtttccgcaacgccgacatccccatctacctgtacggcgagacgcgcacgtcggaacacatcccgaacgacatcctgcgcgagctgcacggcttcatccacatgttcgaggacacgccggagttcgtggcgcgccacatcatccgcgaagcgcgcagctacgtggacggcctgccgccgccgttcttccgcgagctggtcaaatatgcccaggacggttcgtattcctggcactgcccggggcactcgggcggcgtggcgttcctcaagagcccggtgggccagatgttccaccagttcttcggcgagaacatgctgcgcgccgacgtctgcaacgcggtcgacgagctgggccagctgctggaccacaccggcccggtggccgagtccgagctgaatgccgcgcgcattttccatgccgaccactgcttcttcgtcaccaacggcacctcgacgtcgaacaaggtcgtctggcatgccaacgtggccgccggcgacgtggtggtggtggaccgcaactgccacaagtcgatcctgcacgccatcaccatgaccggcgcgatcccggtgttcctgcgccccacgcgcaaccacctgggcatcatcggaccgatcccgctcgacgaattcgacccggaaaacatccgccgcaagatcgaggccaacccgttcgcgcgcgaggcgctgaacaagaagccgcgcatcctcacgctgacgcagagcacctatgacggcgtcatctacaacgtcgagatgatcaaggaaaagctgggcacctacgtcgacacgctgcatttcgacgaggcctggctgccgcacgcggccttccacgagtactaccgcgacatgcacgcgatcggcccggaccgcccgcgcagccaggacgccatggtgttcgccacgcactccacgcacaagctgctggccggcatctcgcaggcctcgcagatcatcgtgcaggagtccgagagccgcaagctggaccgcaacctcttcaacgaggcctacctgatgcatacgtcgacctcgccgcagtacgcgatcatcgcgtcgtgcgacgtggccgccgccatgatggagccgccgggcggcaccgccctggtcgaggaaagcatccgcgaggccatggactttcgccgcgccatgcgcaaggtggcctccgagttcggcaaggacgactggtggttcaaggtgtggggccccaaccgcctcgcgcccgagggcatcggccatcgcgacgactgggtgctggagtcgggcgaccactggcacggctttggcgacctggcgccgggcttcaacatgctcgacccgatcaaggccaccatcatcaccccgggcctggacatgtcgggcagcttcggcgaaagcggcataccggccgcgctggtgtcgaagtacctggccgagcacggcgtcgtggtggagaagaccggcctgtattcgttcttcatcctgttcaccatcggtatcaccaagggccgctggaacaccctgctgaccgcgctgcagcagttcaaggacgactacgaccgcaaccagcccctgtggcgcatcctgcccgagttctgccgcggtcaccgccgctacgagcgcatgggcctgcgcgacctgtgccagcagatccacgaggcctatcgcgaacgcgacgtggcgcgcctgaccaccgagatgtacctgagcgacatggtgccggcgctcaagccctcggacgccttcgcccgcatggcgcaccgcgaagtcgagcgcgtcgagatcgaccagctcgaaggccgcgtgaccggcgtgctgctcacgccgtacccgccgggcattccgctgctgatcccgggcgagcgcttcaaccggaccatcgtgcaatacctgcagttcgcgcgcgagttcaacgagcgcttccccggcttcgagacctacatccacggcctggccgacgaagagggccccgatggcgccaagcgctattacgtcgactgcctgaaggacgccggcgagcagtaa

SEQ ID NO: 9362 - protein, 756 aa, Bordetella bronchiseptica RB50
MKFRFPIFIIDEDYRSENASGLGIRALASAIEAEGVEVIGVTSYGDLSSFAQQQSRASAFILSIDDEEFDVDSPEDVAGAIKNLRTFIGELRFRNADIPIYLYGETRTSEHIPNDILRELHGFIHMFEDTPEFVARHIIREARSYVDGLPPPFFRELVKYAQDGSYSWHCPGHSGGVAFLKSPVGQMFHQFFGENMLRADVCNAVDELGQLLDHTGPVAESELNAARIFHADHCFFVTNGTSTSNKVVWHANVAAGDVVVVDRNCHKSILHAITMTGAIPVFLRPTRNHLGIIGPIPLDEFDPENIRRKIEANPFAREALNKKPRILTLTQSTYDGVIYNVEMIKEKLGTYVDTLHFDEAWLPHAAFHEYYRDMHAIGPDRPRSQDAMVFATHSTHKLLAGISQASQIIVQESESRKLDRNLFNEAYLMHTSTSPQYAIIASCDVAAAMMEPPGGTALVEESIREAMDFRRAMRKVASEFGKDDWWFKVWGPNRLAPEGIGHRDDWVLESGDHWHGFGDLAPGFNMLDPIKATIITPGLDMSGSFGESGIPAALVSKYLAEHGVVVEKTGLYSFFILFTIGITKGRWNTLLTALQQFKDDYDRNQPLWRILPEFCRGHRRYERMGLRDLCQQIHEAYRERDVARLTTEMYLSDMVPALKPSDAFARMAHREVERVEIDQLEGRVTGVLLTPYPPGIPLLIPGERFNRTIVQYLQFAREFNERFPGFETYIHGLADEEGPDGAKRYYVDCLKDAGEQ

SEQ ID NO: 9363 - DNA, 2181 bp, Vibrio vulnificus YJ016; identical to SEQ ID NO: 4292
  CDS (1)..(2181): transl_table=11

SEQ ID NO: 9364 - protein, 726 aa, Vibrio vulnificus YJ016; identical to SEQ ID NO: 4293

SEQ ID NO: 9365 - DNA, 2358 bp, Rhodopseudomonas palustris CGA009; identical to SEQ ID NO: 4294
  CDS (1)..(2358): transl_table=11

SEQ ID NO: 9366 - protein, 785 aa, Rhodopseudomonas palustris CGA009; identical to SEQ ID NO: 4295

SEQ ID NO: 9367 - DNA, 2100 bp, Lactobacillus johnsonii NCC 533; identical to SEQ ID NO: 4296
  CDS (1)..(2100): transl_table=11

SEQ ID NO: 9368 - protein, 699 aa, Lactobacillus johnsonii NCC 533; identical to SEQ ID NO: 4297

SEQ ID NO: 9369 - DNA, 2253 bp, Herminiimonas arsenicoxydans
  CDS (1)..(2253): transl_table=11
atgaaattccgttttcccatcgtcatcatcgatgaagatttccgttccgaaaacacgtccggactgggcatacgcgccttggccgaggcaatcgaaaaggaaggcatggaagtgctcggcgttaccagctacggcgacctgtcgcagttcgcgcaacagcaatcgcgcgcatccgctttcatcctgtccatcgacgatgaagaatttggcgccggttcgtttgaagaaaccgattacgcattgaaatcgctgcgcgccttcgtcgcagaaattcgtcacaagaacgctgacatcccgatttatctgtatggcgaaacgcgtacctcgcgtcatatcccgaatgacatcctgcgcgaactgcacggtttcattcacatgtttgaagacacgcccgagttcgtcgcgcgccacatcatccgcgaggcgaagtcctacatggacggcctgtcgccgccattcttccgcgcactcgtgcattacgcgcaggacggttcctactcatggcactgccctggccactccggcggcgtcgctttcctgaagtcgcctatcggccagatgttccatcaattctttggtgaaaacctgttgcgcgccgacgtctgcaatgcggtggaagaactcggccaattgctggatcataccggcccggtcgctgcatccgaacgtaatgccgcgcgcatcttcaatgccgatcactgctacttcgtcaccaacggcacctcgacctcgaacaagatggtctggcactcgactgtcgctccgggcgacatcgtggtggtcgatcgcaattgtcacaaatcgatactgcactcgatcatcatgtgcggcgcgattccggtgttcctgatgccgacgcgcaatcaccttggcatcatcggaccgattccgctatccgaattcacgatggaaaacatacgcgccaagatcgaagccaatccgtttgcccgtgaagccgtcaacaagaagccgcgcatcctgaccatcacgcaatcgacctacgatggcgtgatctacaacgtcgaaacgctgaaaaacatgctggacggcgaaatcgatacgctgcatttcgatgaagcctggctgccgcacgcgaccttccacgacttctacaaaaacatgcacgcgatcggcaaggaccgtccgcgcgcaaaagagtcgatgatcttctccacgcaatcgacgcacaaactgctggccggcctgtcgcaggcatcgcaaatcctggtgcgcgaatcggaaaaagtgaagctggatcaggatgctttcaatgaagcctacctgatgcatacctcgacctcaccgcagtattcgatcatcgcttcatgcgacgtcgcggccgccatgatggaagcaccaggcggtaccgcgctggtggaagaaagcatactggaagcactggatttccgccgtgcgatgaaaaaaatcgatcaggaatggggcagagactggtggttccaggtctggggcccggacagcttcagcgaagaaggcatcggtacccaggatgactggatgatccgtgccgaagacgactggcacggcttcggcaatctggctcccggcttcaacatgctcgatccgatcaaggccaccattgtcaatccgggtctgtcactggacggcaagttcggcgactccggcattcccgcgtccatcgtcaccaaatatctggccgagcatggcgtcatcattgaaaaatgcggcctgtactcgttcttcatcatgttcaccatcggcatcaccaaaggccgctggaacactctgctgaccgcgttgcagcagttcaaggacgattacgacaagaaccagccgatgtggcgcatcctgccggaatttgccgccgccaatccgcgctatgaaggcatcggcctgcgcgatctgtgccagcagattcacgacttctacaaactctatgatgtcgcacgtttgacgaccgaaatgtatctgtccgacatgcagccggcaatgaaaccatccgacgcattctcgaaaatggcgcatcgcgaaatcgaccgcgtgcctatcgacgaactggagggtcgcgtgacatcgatcttgctgacaccgtatccaccgggtatccctctgctgattccaggtgagcgtttcaataaaaccatcgtggattacctgaaatttgcacgcgatttcaacgagaaatttcctggctttgaaaccgatgtgcacggcctggtcaaacgcgaagtcgatggcaagcgcggctacttcgtggattgcgtgcggcaataa

SEQ ID NO: 9370 - protein, 750 aa, Herminiimonas arsenicoxydans
MKFRFPIVIIDEDFRSENTSGLGIRALAEAIEKEGMEVLGVTSYGDLSQFAQQQSRASAFILSIDDEEFGAGSFEETDYALKSLRAFVAEIRHKNADIPIYLYGETRTSRHIPNDILRELHGFIHMFEDTPEFVARHIIREAKSYMDGLSPPFFRALVHYAQDGSYSWHCPGHSGGVAFLKSPIGQMFHQFFGENLLRADVCNAVEELGQLLDHTGPVAASERNAARIFNADHCYFVTNGTSTSNKMVWHSTVAPGDIVVVDRNCHKSILHSIIMCGAIPVFLMPTRNHLGIIGPIPLSEFTMENIRAKIEANPFAREAVNKKPRILTITQSTYDGVIYNVETLKNMLDGEIDTLHFDEAWLPHATFHDFYKNMHAIGKDRPRAKESMIFSTQSTHKLLAGLSQASQILVRESEKVKLDQDAFNEAYLMHTSTSPQYSIIASCDVAAAMMEAPGGTALVEESILEALDFRRAMKKIDQEWGRDWWFQVWGPDSFSEEGIGTQDDWMIRAEDDWHGFGNLAPGFNMLDPIKATIVNPGLSLDGKFGDSGIPASIVTKYLAEHGVIIEKCGLYSFFIMFTIGITKGRWNTLLTALQQFKDDYDKNQPMWRILPEFAAANPRYEGIGLRDLCQQIHDFYKLYDVARLTTEMYLSDMQPAMKPSDAFSKMAHREIDRVPIDELEGRVTSILLTPYPPGIPLLIPGERFNKTIVDYLKFARDFNEKFPGFETDVHGLVKREVDGKRGYFVDCVRQ

SEQ ID NO: 9371 - DNA, 2154 bp, Erwinia carotovora subsp. atroseptica SCRI1043; identical to SEQ ID NO: 4298
  CDS (1)..(2154): transl_table=11

SEQ ID NO: 9372 - protein, 717 aa, Erwinia carotovora subsp. atroseptica SCRI1043; identical to SEQ ID NO: 4299

SEQ ID NO: 9373 - DNA, 2163 bp, Yersinia pseudotuberculosis IP 32953; identical to SEQ ID NO: 4300
  CDS (1)..(2163): transl_table=11

SEQ ID NO: 9374 - protein, 720 aa, Yersinia pseudotuberculosis IP 32953; identical to SEQ ID NO: 4301

SEQ ID NO: 9375 - DNA, 2253 bp, Azoarcus sp. EbN1
  CDS (1)..(2253): transl_table=11
atgcgctttcactttccgatcatcataatcgacgaggatttccgctcggaaaacacgagcggcctcggcattcgcgcactggccaaggcgatcgaggaagagagcatggaagtgctcggggtcacgagttacggtgacctgacctcgttcgcgcagcagcaaagtcgtggttcagccttcatcctgtcgatcgacgacgaggagttttcgtcgcctgaggcgtccgacaaggccatcgccgacctgcgtgcgttcgtcgaggagatccggttgcgcaacgccgacatcccgatcttcatccacggcgaaacccgtaccagccggcacatcccgaatgacgtgctgcgcgagctgcacggtttcatccacatgttcgaggatacgcccgagttcgtcgcccgctatatcgtgcgcgaagcaaagaactacctcgagagcctggcgccgccgtttttccgcgcgctggtgcattacgctgccgacagctcgtattcgtggcactgcccgggccattcgggcggtgtggcgttcctgaaaagtccggtcgggcagatgttccaccagttcttcggcgaaaacatgctgcgcgcagatgtgtgcaacgcggtcgaggaactcggtcagctgctcgaccatacgggtcccgtggccgcttccgaacgcaacgctgcacgcatcttcaactgcgaccatctctatttcgtcaccaacggcacctcgacgtcgaacaagatggtgtggcacacgacggtcgcgcccggcgacatcgtggtcgtggatcgcaactgccacaaatcgattctccactcgatcatcatgactggagcggtgccggtgttcctgacgccgacacgtaaccactacggcatcatcggtccgatcccgctggaagaattcagcatggagacgatccggcgcaagatcgaggcgaacccgttcgcacgcccgagcgccggcaagaagccccgcattctgacgatcacgcagtcgacgtacgacggggttgtgtacaacgtcgagacgatcaaggagatgctcgacggcgagatcgatacgctgcactttgacgaagcctggctgccgcacgccgcgttccatgatttttacggcgattaccatgcgatcggggccgaccgcccgcgctgcgagaaatcgatggtgttctcgacgcagtcgacgcacaagctgctggccggtctgtcccaggcttcgcagatcctcgtgcaggactcgcagactcgcaagctcgaccgcgacatcttcaacgaagcctacctgatgcacacttcgacgtcgccgcagtacgcgatcatcgcttcgtgcgacgtcgcggcggcgatgatggagcctcccggggggccggcgctggtggacgagtcgctagcggaagccgtcgaattccgccgggcgatgcgcaaggtggaagccgagttcggtcctgctgactggtggttcaaggtctgggggcccgaatatctgcccgaggaagggatcggcgagcgggaggactggatgctcaaggccggcgaacgctggcacggctttggcaatctcgcgccgggcttcaacatgctcgacccgatcaaggcgacggtgatcacgccggggctggacgtcgacggcgactttgccgattccggcatccctgccgggatcctcacccgttatctcgctgagcacggcatcatcgtcgaaaagaccgggctgtactcgttcttcatcatgttcacgatcggtatcacgaagggccggtggaacacgatggtgaccgaattgcagcagttcaaggacgactacgaccgcaaccagccgttgtggcgcgtaatgccggaattcattgcgaagcatccgcgctacgagaaagtcggcctgaaggacttatgcgcgcagatccacagtttctacaagtcgtacgatattgcgcggctcacgaccgaaatgtatttgtcggatatggttccggcgatgaagccggccgatgcgttcgcgaagatggcgcatcgcgagatcgagcgggtgccgatcgatgaactcgaggggcgtgtgaccgcgatgctcgtcacgccctatccgccagggatcccgttactgattccaggcgagcgtttcaacgcgacgatcgtgcgttacctgaagtttgcgcgtgatttcaacgcgggctttcctgggttcgagaccgatatccacggcctcgtcagggaacgcgcagagggacggttcgactattacgtcgactgtgtgaggcaggactga

SEQ ID NO: 9376 - protein, 750 aa, Azoarcus sp. EbN1
MRFHFPIIIIDEDFRSENTSGLGIRALAKAIEEESMEVLGVTSYGDLTSFAQQQSRGSAFILSIDDEEFSSPEASDKAIADLRAFVEEIRLRNADIPIFIHGETRTSRHIPNDVLRELHGFIHMFEDTPEFVARYIVREAKNYLESLAPPFFRALVHYAADSSYSWHCPGHSGGVAFLKSPVGQMFHQFFGENMLRADVCNAVEELGQLLDHTGPVAASERNAARIFNCDHLYFVTNGTSTSNKMVWHTTVAPGDIVVVDRNCHKSILHSIIMTGAVPVFLTPTRNHYGIIGPIPLEEFSMETIRRKIEANPFARPSAGKKPRILTITQSTYDGVVYNVETIKEMLDGEIDTLHFDEAWLPHAAFHDFYGDYHAIGADRPRCEKSMVFSTQSTHKLLAGLSQASQILVQDSQTRKLDRDIFNEAYLMHTSTSPQYAIIASCDVAAAMMEPPGGPALVDESLAEAVEFRRAMRKVEAEFGPADWWFKVWGPEYLPEEGIGEREDWMLKAGERWHGFGNLAPGFNMLDPIKATVITPGLDVDGDFADSGIPAGILTRYLAEHGIIVEKTGLYSFFIMFTIGITKGRWNTMVTELQQFKDDYDRNQPLWRVMPEFIAKHPRYEKVGLKDLCAQIHSFYKSYDIARLTTEMYLSDMVPAMKPADAFAKMAHREIERVPIDELEGRVTAMLVTPYPPGIPLLIPGERFNATIVRYLKFARDFNAGFPGFETDIHGLVRERAEGRFDYYVDCVRQD

SEQ ID NO: 9377 - DNA, 2256 bp, Pseudomonas fluorescens Pf-5
  CDS (1)..(2256): transl_table=11
atgtataaagacctgcagtttccgatcctgatcgtgcatcgcgacatcaaggccgatacggtcgcgggggaccgggtcagggggatcgcccgggaactggaaaaggacgggttcagcatcttttccgcggtggactatgccgaagggcggctggtggcttcgacccatcacggcctggcctgcatgttgatcgccgccgaaggggccggggaaaacaagcacctgttgcagaacatggtggaactgatccgcctggcgcgggtacgtgcgccgctgctgccgatctttgccctgggcgagcaggtgaccctggaaaacgcccccgccgacgccatgagcgaactcaaccagctgcggggcattctctacctgttcgaggacacggtgccgttcctggcccggcaagtggcccgggccgcgcggggctacctggatggcttgctgccaccgttcttcaaggccctggtacagcacaccgccgactccaactattcctggcacaccccggggcacggcggtggcgtggcctatcgcaagagcccggtggggcaggcgtttcaccagttctttggcgagaacaccttgcgttcggacctgtcggtgtcagtccctgagctggggtcgctgctggatcacaccggcccgctggcggaagccgaggcccgtgccgcgcgcaactttggcgccgatcacacctttttcgtgatcaatggcacctccaccgccaacaagatcgtctggcattccatggtcggtcgcgatgacctggtgctggtggaccgcaactgccacaagtcggtgctgcactcgatcatcatgaccggggccattcccctgtacctgtgcccggagcgcaacgaactggggatcatcgggccgattcccctgagcgagttcagcgccgagtcgatccaggccaagatcgatgccagcccgctgacccgcggccggccgcccagggtcaagctggcggtggtcaccaactccacttatgacggcctgtgctacaacgccgagctgatcaagcagagcctgggcaacagtgtcgaggtgctgcacttcgacgaagcctggtacgcctatgcggcctttcatgagttcttcgccgggcgctacggcatgggcacgtcccgcagcgacgacagcccgctggtgttctccacccattccacccacaagctgctggcggccttcagccaggcctcgatgattcacgtgcaggatggcggcgcccggcaactggaccgcgaccgcttcaacgaagccttcatgatgcatatctccacctcgccgcagtacagcatcatcgcctcgctggacgtggcttcggcgatgatggaagggccggccgggcgctcgctgctgcaggaaatgttcgacgaggccctgagctttcgccgggccctggccaacctgcggcagaacatcgccgccgatgactggtggttctcggtgtggcaaccggagcgggtcgagggcatcgaccaggtgcgcaccgaggactggctgctggaacctgagggcgagtggcacggttttgccggggtcaccgatgactatgtgctgctggacccgatcaaggtgaccctggtcatgcccggcctgaccgcgggcggcgccctgagcgagcacgggatcccggcggcggtggtcagcaagtttctctgggagcgcgggctggtggtggaaaagaccgggctctattcgttcctggtgctgttctccatgggcatcaccaagggcaagtggagcacgctgctcaccgaactgctggagtttaagcgcaactacgacgccaatgtcagcctggccagctgcctgcccagcgtggccgggcaggacccgcagcgctaccagggcatgggcctgcaggacctgtgcgaccagttgcacgcctgctaccgcagcaacgccacggccaagcacctcaagcgcatgtacacggtgctgccggaggtggccatgaagcctgccgatgcctatgaccatctggtgcggggcgaggtcgaggcggtttccatcgatcagttgcaggggcgtatcgctgcggtgatgctggtgccctatccgccgggcattccgctgatcatgccgggcgagcgtttcaccgattccacccgttcgatcatcgattacctggccttcgcccgggcctttgacagcagcttcccggggtttgtcgccgatgtgcacgggctgcagcatgacgatctgggcgacgggcgccagtacaccgtcgattgcatcaaggcatga

SEQ ID NO: 9378 - protein, 751 aa, Pseudomonas fluorescens Pf-5
MYKDLQFPILIVHRDIKADTVAGDRVRGIARELEKDGFSIFSAVDYAEGRLVASTHHGLACMLIAAEGAGENKHLLQNMVELIRLARVRAPLLPIFALGEQVTLENAPADAMSELNQLRGILYLFEDTVPFLARQVARAARGYLDGLLPPFFKALVQHTADSNYSWHTPGHGGGVAYRKSPVGQAFHQFFGENTLRSDLSVSVPELGSLLDHTGPLAEAEARAARNFGADHTFFVINGTSTANKIVWHSMVGRDDLVLVDRNCHKSVLHSIIMTGAIPLYLCPERNELGIIGPIPLSEFSAESIQAKIDASPLTRGRPPRVKLAVVTNSTYDGLCYNAELIKQSLGNSVEVLHFDEAWYAYAAFHEFFAGRYGMGTSRSDDSPLVFSTHSTHKLLAAFSQASMIHVQDGGARQLDRDRFNEAFMMHISTSPQYSIIASLDVASAMMEGPAGRSLLQEMFDEALSFRRALANLRQNIAADDWWFSVWQPERVEGIDQVRTEDWLLEPEGEWHGFAGVTDDYVLLDPIKVTLVMPGLTAGGALSEHGIPAAVVSKFLWERGLVVEKTGLYSFLVLFSMGITKGKWSTLLTELLEFKRNYDANVSLASCLPSVAGQDPQRYQGMGLQDLCDQLHACYRSNATAKHLKRMYTVLPEVAMKPADAYDHLVRGEVEAVSIDQLQGRIAAVMLVPYPPGIPLIMPGERFTDSTRSIIDYLAFARAFDSSFPGFVADVHGLQHDDLGDGRQYTVDCIKA

SEQ ID NO: 9379 - DNA, 2229 bp, Dechloromonas aromatica RCB
  CDS (1)..(2229): transl_table=11
atgcgcttccacttccccatcatcatcatcgacgaggacttccgctcggaaaatacctcgggcttcggtatccgcgccctggccgaggcgatcgagaaggaaggcatggaagtggtcggggtgaccagttacggcgacctgacctcgtttgcccagcagcagagccgcgcctcggctttcatcctgtcgatcgacgacgaggaactggcgctggagcccgaagaaacgctggccgagctgcgcgccttcgtcaaggaaatccgcaatcgtaatgccgagattccgatcttcctgcacggcgaaacgcgcacttcgcgccacatcccgaacgacgtgctgcgcgaactgcacggcttcatccacatgttcgaggacacgccggagttcatcgcccgcaacgtcaagcgtgaggcgcaggcctacctcgattcgctgccgccgccgttcttccgggcgctgacccactacgcggccgacggttcgtattcgtggcattgccctggccactcgggcggcgttgccttccttaagtcgccggtcggccagatgttccaccagttcttcggcgagaacatgctgcgcgccgacgtctgcaatgctgtcgaggaactcggccagttgctcgaccataccggcccggtggccgcttccgagcgcaacgcagcccgtatcttcaatgccgaccatctgtatttcgtgaccaacggcacctcgacgtcgaacaagattgtctggcactcgaccgtcgcaccgggcgatgtcgtggttgttgaccgcaactgccacaagtccatcctgcacgccatcatgatgaccggggcgatccccgttttcctgatgccgacgcgtaacaatttcggcatcatcgggccgatcccgaagagcgaattcgcctgggagagcatccagaagaagatcgccgccaatcccttcatcaccgacaagaccgccaagccgcgcgtgctgacgatcacccagtcgacctacgacggcatcctctacaacgtcgaggacatcaaggacatgctcgacggcaggatcgacaccctgcatttcgacgaagcctggctgccgcacgccgccttccacgatttctacggcgattaccacgccatcggcgccgatcgtccgcgctgcaaggagtcgatgattttctcgacgcaatcgacccacaagctgctggccggcctcagccaagcctcgcagatcctggtgcaggatgccgacaactacaagctcgaccgcgacatcttcaacgaagcctatctgatgcacacctcgacctcgccgcagtattcgatcatcgcttcctgcgatgtggcggcggcgatgatggaagagccggctggtacggcgctggtcgaggagtcgattgccgaagccctcgatttccgccgcgccatgcgcaaggtggacgaagagtggggcgccgactggtggttcaaggtctgggggccggacgacctgtccgaagagggtatcgaagaacgtgaggcgtggatgctcaagccgggcgagcgctggcacggcttcaacaatctggccgacggcttcaacatgctcgacccgatcaaggcaacgatcatcaccccgggcctcgacgtcgatggcgatttcgccgacgaattcggcatcccggcggccattgtgaccaagtacctggccgagcacggcgttatcgtcgagaagtgcggcctgtacagcttcttcatcatgtttacgatcggcatcaccaagggccgctggaacacgctggtcaccgcgctgcagcagttcaaggacgattacgacaagaaccagccgctgtggaaggtattgcccgagttcgtgcagaagaatccgcgttacgagcgggttggtttgcgcgatctatgcacgcagattcacagcgtctacaaacacaatgacgtcgcccgtctgaccaccgagatgtacctgtcggacatggtcccggccatgcgtccggccgatgctttcgccaagatggcgcatcgcgatatcgagcgcgtgccagtcgatgcccttgaaggccgggttaccgcggtgctgttgacgccatatccgccgggcattccgctgctgattccgggcgaacgcttcaacaagacgatctgcagctacctgaagtttgcccgcgagttcaacgcccgcttccccggcttcgagaccgacgtgcacggtctggtcaagggcggggacggcagctactacgtcgattgcgtgcgctga

SEQ ID NO: 9380 - protein, 742 aa, Dechloromonas aromatica RCB
MRFHFPIIIIDEDFRSENTSGFGIRALAEAIEKEGMEVVGVTSYGDLTSFAQQQSRASAFILSIDDEELALEPEETLAELRAFVKEIRNRNAEIPIFLHGETRTSRHIPNDVLRELHGFIHMFEDTPEFIARNVKREAQAYLDSLPPPFFRALTHYAADGSYSWHCPGHSGGVAFLKSPVGQMFHQFFGENMLRADVCNAVEELGQLLDHTGPVAASERNAARIFNADHLYFVTNGTSTSNKIVWHSTVAPGDVVVVDRNCHKSILHAIMMTGAIPVFLMPTRNNFGIIGPIPKSEFAWESIQKKIAANPFITDKTAKPRVLTITQSTYDGILYNVEDIKDMLDGRIDTLHFDEAWLPHAAFHDFYGDYHAIGADRPRCKESMIFSTQSTHKLLAGLSQASQILVQDADNYKLDRDIFNEAYLMHTSTSPQYSIIASCDVAAAMMEEPAGTALVEESIAEALDFRRAMRKVDEEWGADWWFKVWGPDDLSEEGIEEREAWMLKPGERWHGFNNLADGFNMLDPIKATIITPGLDVDGDFADEFGIPAAIVTKYLAEHGVIVEKCGLYSFFIMFTIGITKGRWNTLVTALQQFKDDYDKNQPLWKVLPEFVQKNPRYERVGLRDLCTQIHSVYKHNDVARLTTEMYLSDMVPAMRPADAFAKMAHRDIERVPVDALEGRVTAVLLTPYPPGIPLLIPGERFNKTICSYLKFAREFNARFPGFETDVHGLVKGGDGSYYVDCVR

SEQ ID NO: 9381 - DNA, 2271 bp, Ralstonia eutropha JMP134
  CDS (1)..(2271): transl_table=11
atgaaattccgcttccccgtcatcatcattgacgaagacttccgctccgagaacatctccggctcgggtatccgcgcgctggccgaggcgatcgagaaagaggggatggaggtcatgggcctgaccagctacggcgacctgacctcgttcgcgcagcagtccagccgcgcttcgacctttatcgtgtcgatcgacgacgacgagttcgtgaccgccgatgaccagcccgaagcggccgccatcgaaaagctgcgcgcattcgtcaatgaagtgcgccgccgcaacaccgacctgccgatcttcctgtacggcgagacccgcacctcgcgccatatcccgaacgatatcctgcgcgagctgcacggcttcatccacatgttcgaggacacgcccgagttcgtggcgcgccacatcatccgcgaagccaaggtctacctcgacacgctcgcgccgccgttcttcaaggcgctgatcgactacgcgcaggattcgtcgtactcgtggcactgcccgggacactcgggcggcgtggcgttcctgaagagcccggtgggccaggtgttccaccagttcttcggcgaaaacatgctgcgtgccgatgtctgcaacgcggtggatgaactcggccagctgctggaccacaccggcccggtggccgcgtccgagcgcaacgccgcgcgtatcttcaactcggaccacatgttcttcgtgaccaacggcacgtcgacgtcgaacaagatggtgtggcacgccaacgtggcgcccggcgacatcgtcgtggtggaccgcaactgccacaagtcgatcctgcacgcgatcatgatgaccggcgcgatccccgtgttcctgatgccgacgcgcaaccactacggcatcatcggcccgatccccaagagcgagttcgacccggagaccatccgcaggaagatcgccaaccacccgttcgcaagcaaggccaagaaccagaagccgcgcatcctgacgatcacgcagggtacctacgacggcgtgctgtacaacgccgagcagatcaaggagatgctcgcgtcggaaatcgacacgctgcatttcgatgaagcgtggctgccgcacgcggcgttccacgagttctatcacaacatgcacgcgatcggccgtgaccgcccgcgcagcaaggacgcgctggtgtttgccacgcagtccacgcacaagctgctggcgggcctgtcgcaggcgtcgcagatcctcgtgcaggattccgaaacgcgcaagctggaccgctatcgcttcaacgaggcgtacctgatgcacacctcgaccagtccgcagtacgcgatcatcgcctcgtgcgatgtcgccgcggccatgatggaagcgccgggcggccccgcgctggtggaagaaagcatccaggaagcactggacttccgccgcgccatgcgcaaggtcgaaggcgacttcgaagccggcaacaatggcgactggtggttcaaggtctggggcccggatacgctgaacgacgaaggcatgcccgaacgcgagcagtggatgctcaaggccaacgagcgctggcacggcttcggcgacctggccgacggcttcaacctgctcgacccgatcaaggcgacgatcatcaccccgggcctggacgtggacggcgagttcagcgatcgcggcattccggcggccatcgtcaccaagtacctggccgagcacggcatcatcatcgagaagacgggcctgtactcgttcttcatcatgttcaccatcggcattaccaagggccgctggaattcgctggtgaccgagttgcagcagttcaaggacgactacgaccagaaccagccgctgtggcgcgtgctgcccgagttcgttggcaagcatccacagtacgaacgcatgggcctgcgtgacctgtgcgatgccgtgcacagcgtctacaaggccaacgacgtggcgcgcgtgacgacagagatgtacctgtcggacatggaaccggcgatgaagccgtcagacgcgtggtcgatgatggcgcaccgcgagatcgagcgcgtgccggtggacgacctggagggccgagtcaccgccatcctgctgacgccgtacccgccgggcatcccgctgctgatcccgggcgagcgcttcaaccgcaccatcgtccagtacctgaagttcgcgcgcgagttcaacaagctgttcccgggcttcgagaccgatgtgcacgggctggtcgaggaagaggtcgatggccgcaaggcgtacttcgtggattgcgtaaagcagggcagctaa

SEQ ID NO: 9382 - protein, 756 aa, Ralstonia eutropha JMP134
MKFRFPVIIIDEDFRSENISGSGIRALAEAIEKEGMEVMGLTSYGDLTSFAQQSSRASTFIVSIDDDEFVTADDQPEAAAIEKLRAFVNEVRRRNTDLPIFLYGETRTSRHIPNDILRELHGFIHMFEDTPEFVARHIIREAKVYLDTLAPPFFKALIDYAQDSSYSWHCPGHSGGVAFLKSPVGQVFHQFFGENMLRADVCNAVDELGQLLDHTGPVAASERNAARIFNSDHMFFVTNGTSTSNKMVWHANVAPGDIVVVDRNCHKSILHAIMMTGAIPVFLMPTRNHYGIIGPIPKSEFDPETIRRKIANHPFASKAKNQKPRILTITQGTYDGVLYNAEQIKEMLASEIDTLHFDEAWLPHAAFHEFYHNMHAIGRDRPRSKDALVFATQSTHKLLAGLSQASQILVQDSETRKLDRYRFNEAYLMHTSTSPQYAIIASCDVAAAMMEAPGGPALVEESIQEALDFRRAMRKVEGDFEAGNNGDWWFKVWGPDTLNDEGMPEREQWMLKANERWHGFGDLADGFNLLDPIKATIITPGLDVDGEFSDRGIPAAIVTKYLAEHGIIIEKTGLYSFFIMFTIGITKGRWNSLVTELQQFKDDYDQNQPLWRVLPEFVGKHPQYERMGLRDLCDAVHSVYKANDVARVTTEMYLSDMEPAMKPSDAWSMMAHREIERVPVDDLEGRVTAILLTPYPPGIPLLIPGERFNRTIVQYLKFAREFNKLFPGFETDVHGLVEEEVDGRKAYFVDCVKQGS

SEQ ID NO: 9383 - DNA, 2256 bp, Pseudomonas fluorescens PfO-1
  CDS (1)..(2256): transl_table=11
atgtacaaagatttgaagttcccggtgttgatcgtccaccgcgacatcaaggccgacacggttgccggtgaccgcatccgcggcattgcccgagagctggagctggaaggtttcagtatcgtttcggccaccgactacaccgaaggccggctcgtggcgtcgacccaccatggtctggcgtgcatgctgatcgccgcggaagacgccagcaccaactcccatctgttgcagaacatggccgaactgatcggtctggcccgggtgcgggcgccggatctgccgatctttgcactcggcgagcaagtaaccctggaaaacgccccggccgatgcgatggccgaactcaaccagttacgcggcattctctacctgttcgaagacaccgtgccgtttctcgcccgacaagtggcgcgggcagcgcgcaaatacctggacggcctgttgccgccattcttcaaggcgctggtccagcacaccgccgattccaactattcctggcacacccccggtcacggcggcggggtggcctatcacaagagtccggtggggcaggcgtttcatcagttcttcggggaaaacaccctgcgctccgatttatcggtctcggtgccggagctgggttccttgctcgatcacaccgggccgctggccgaggcggaagcgcgggccgcgcgcaatttcggcgccgatcacacctttttcgtgatcaatggcacctcgaccgccaacaagatcgtctggcactcgatggtcgggcgcgatgatctggtgctggtggatcgcaactgccacaagtcggtgctgcacgcgatcatcatgaccggcgcgattccgctgtacctgtgcccggagcgcaacgagctggggatcatcgggccgatcccgctcagtgaattcagtcgtgaatcgatccaggccaagatcgacgccagcccgttgaccaagggccgcgaaccgaaagtcaaactggcggtgatcaccaactccacttacgacggcctctgctacaacgccgagctgatcaagcagagcctgggcaacagtgtcgaagtgttgcatttcgacgaggcctggtacgcctacgccgcgtttcacgaattctttgccggccgttacggcatggccacctcgcgcagcgaggacagtccgctggtgtttaccacccactccacccacaaactgttggcggcgttcagtcaggcctcgatgattcatgttcaggacggtggggcgcggcagctggatcgcgaccggttcaacgaagcgttcatgatgcacatctcgacgtcgccgcagtacagcatcattgcttcgctggacgtcgcctcggcgatgatggaaggcccggccggacgctcgctgctgcaggaaaccttcgacgaagccctgagctttcgccgggccttggccaatctgcgtcagcacatcgccgctgacgattggtggttctcgatctggcagccgccgggtgtcgagggcatcgaccgggtgcagaccgaggactggctgctgcaacccgatgcggactggcacggtttcggcgaggtcagcgacgactacgtactgctcgacccgatcaaggtcaccctggtcatgccgggcctgaccgccggcggcgctttgagcgacaagggcatcccggcggccgtggtcagccgtttcctctgggagcgcgggctggtggtggagaaaaccggtctgtattcatttctggtgctgttctccatgggcatcaccaagggcaagtggagcacgctcctgaccgaactgctggagttcaagcgcagctacgacgccaacatcagtctcgacacctgcctgaagtgtgtcgagcaggaagatcctgtgcgctatcgcggcatgggcctgcgcgatttgtgcgatcagcttcacgcctgctatcgcagcaacgcgaccgccagacacctcaagcgcatgtacacggtgctgccggaaatcgcgatgaaaccggcccacgcttacgatcaattggtgcgcggcgaagtcgaggcggtgccgatcgatgagctggaaggccgggtggcggcggtgatgctggtgccgtacccgccgggcattccgctgatcatgcccggcgaacggtttaccgaatccacgcgctcgatcatcgaatacctcaggtttgcccgcacgttcgacacaacgtttccggggttcgtggtcgatgtgcacggtctgcaacacgaagatgagggcaatgggcggcactacaccgtcgattgcgtcaaggaatga

SEQ ID NO: 9384 - protein, 751 aa, Pseudomonas fluorescens PfO-1
MYKDLKFPVLIVHRDIKADTVAGDRIRGIARELELEGFSIVSATDYTEGRLVASTHHGLACMLIAAEDASTNSHLLQNMAELIGLARVRAPDLPIFALGEQVTLENAPADAMAELNQLRGILYLFEDTVPFLARQVARAARKYLDGLLPPFFKALVQHTADSNYSWHTPGHGGGVAYHKSPVGQAFHQFFGENTLRSDLSVSVPELGSLLDHTGPLAEAEARAARNFGADHTFFVINGTSTANKIVWHSMVGRDDLVLVDRNCHKSVLHAIIMTGAIPLYLCPERNELGIIGPIPLSEFSRESIQAKIDASPLTKGREPKVKLAVITNSTYDGLCYNAELIKQSLGNSVEVLHFDEAWYAYAAFHEFFAGRYGMATSRSEDSPLVFTTHSTHKLLAAFSQASMIHVQDGGARQLDRDRFNEAFMMHISTSPQYSIIASLDVASAMMEGPAGRSLLQETFDEALSFRRALANLRQHIAADDWWFSIWQPPGVEGIDRVQTEDWLLQPDADWHGFGEVSDDYVLLDPIKVTLVMPGLTAGGALSDKGIPAAVVSRFLWERGLVVEKTGLYSFLVLFSMGITKGKWSTLLTELLEFKRSYDANISLDTCLKCVEQEDPVRYRGMGLRDLCDQLHACYRSNATARHLKRMYTVLPEIAMKPAHAYDQLVRGEVEAVPIDELEGRVAAVMLVPYPPGIPLIMPGERFTESTRSIIEYLRFARTFDTTFPGFVVDVHGLQHEDEGNGRHYTVDCVKE

SEQ ID NO: 9385 - DNA, 2181 bp, Burkholderia sp. 383; identical to SEQ ID NO: 4302
  CDS (1)..(2181): transl_table=11

SEQ ID NO: 9386 - protein, 726 aa, Burkholderia sp. 383; identical to SEQ ID NO: 4303

SEQ ID NO: 9387 - DNA, 2280 bp, Burkholderia thailandensis E264
  CDS (1)..(2280): transl_table=11
atgaagtttcgttttcccgtcgtcatcatcgacgaagattttcgctccgagaacatttcgggctccggcatccgggcgctggccgaggcgatcgagaaggaaggcgtcgaggtgctcggtctgacgagttacggcgatctgacctcgttcgcgcagcagtcgagccgcgcgtcgtgcttcatcctgtcgatcgacgacgacgagctgatgctcggcgagctcggcgcggacggcgagctgcccgagctcgcgaccgcgatcatcgagctgcgcgcgttcgtgaccgaagtgcgccgccgcaacgcggacatcccgatcttcctgtacggtgagacgcgcacgtcgcgccacctgccgaacgacatcctgcgcgaactgcacggcttcatccacatgttcgaggacacgccggagttcgtcgcgcgccacatcatccgggaggcgaaggtctatctcgattcgctcgcgccgccgttcttcaaggagctcgtcaagtacgcggacgagggctcgtactcgtggcactgcccgggccactcgggcggcgtcgcgttcctgaagaatccgctcggccagatgttccaccagttcttcggcgagaacatgctgcgcgcggacgtgtgcaacgcggtcgacgagctcggccaactgctcgaccacacgggccccgtggccgcgtccgagcgcaacgccgcgcggatcttcagcgccgatcacctgttcttcgtgaccaacggcacgtcgacgtcgaacaagatcgtctggcacgcgacggtcgcgccaggcgacatcgtgctcgtcgatcgcaactgtcacaagtcgatcctgcacgcgatcacgatgacgcacgcgattcccgtgttcctcacgccgacgcgcaaccacttcggcatcatcgggccgattccgcgcgacgagttcaagccggagaacatccgcaagaagatcgaggcgaatccgttcgcgcgcgaggcgctcgcgaaaaacccgaacgcgaagccgcggattctcacgatcacgcagagcacgtacgacggcgtcgtctacaacgtcgagcagatcaaggacctgctcggcgatctcgtcgacacgctgcacttcgacgaagcgtggctgccgcacgcggaattccacccgttctaccaggacatgcacgcgatcggcgcgggccgcccgcgcaccggcgcgctcgtgttcgcgacgcactcgacgcacaagctgctcgcgggcatctcgcaggcgtcgcagatcgtcgtgcaggattcggagaaccgcacgttcgacaagcaccgcttcaacgaggcgtacctgatgcatacgtcgaccagcccgcagtacgcgatcatcgcgtcgtgcgacgtcgcggccgcgatgatggagccgccgggcggcaccgcgctcgtcgaggaatcgatcgccgaggcgatcgacttccgccgcgcgatgcgcaaggtcgacgccgagtacggcgacgactggttcttcagcgtgtggggcccggacaatctgtcggaagaggggatcggctcgcgcgccgactggctgctcaagccgaacgaccgctggcacggcttcggcccgctcgcgcaaggcttcaacatgctcgacccgatcaaggcgacgatcatcacgccggggctcgacgtggacggcgaattcggcgagaccggcattccggccgcgatcgtcacgaagtatctggccgagcacgggatcatcgtcgagaagacgggcctgtactcgttcttcatcatgttcacgatcggcatcacgaagggccgctggaactcgatggtcaccgagctgcagcagttcaaggacgactacgacaacaaccagccgctctggcgcgtgctgcccgagttcgtcgcgcagtatccgctctacgagcgcgtcggcctgcgcgatctctgcacgcagatccacgacgtgtaccgcgcgaacgacatcgcgcggctcacgaccgagatgtacctgtcgaacatggagccggcgatgaagccgtccgatgcgttcgcgaagctggcgcaccgcgaggtcgaccgcgtgccgctcgacgagctcgaaggccgcgtgaccagcatcctgctcacgccgtatccgccgggcattccgcttttgatcccgggcgagcgcttcaacaagacgatcgtcaactacctgcggttcgcgcgcgacttcaacgagcgcttcccgggcttccacaccgacatccacggtctcgtcgcggaagagatgaacgggcgcatcgagtattacgtcgactgcgtgcgcgactga

SEQ ID NO: 9388 - protein, 759 aa, Burkholderia thailandensis E264
MKFRFPVVIIDEDFRSENISGSGIRALAEAIEKEGVEVLGLTSYGDLTSFAQQSSRASCFILSIDDDELMLGELGADGELPELATAIIELRAFVTEVRRRNADIPIFLYGETRTSRHLPNDILRELHGFIHMFEDTPEFVARHIIREAKVYLDSLAPPFFKELVKYADEGSYSWHCPGHSGGVAFLKNPLGQMFHQFFGENMLRADVCNAVDELGQLLDHTGPVAASERNAARIFSADHLFFVTNGTSTSNKIVWHATVAPGDIVLVDRNCHKSILHAITMTHAIPVFLTPTRNHFGIIGPIPRDEFKPENIRKKIEANPFAREALAKNPNAKPRILTITQSTYDGVVYNVEQIKDLLGDLVDTLHFDEAWLPHAEFHPFYQDMHAIGAGRPRTGALVFATHSTHKLLAGISQASQIVVQDSENRTFDKHRFNEAYLMHTSTSPQYAIIASCDVAAAMMEPPGGTALVEESIAEAIDFRRAMRKVDAEYGDDWFFSVWGPDNLSEEGIGSRADWLLKPNDRWHGFGPLAQGFNMLDPIKATIITPGLDVDGEFGETGIPAAIVTKYLAEHGIIVEKTGLYSFFIMFTIGITKGRWNSMVTELQQFKDDYDNNQPLWRVLPEFVAQYPLYERVGLRDLCTQIHDVYRANDIARLTTEMYLSNMEPAMKPSDAFAKLAHREVDRVPLDELEGRVTSILLTPYPPGIPLLIPGERFNKTIVNYLRFARDFNERFPGFHTDIHGLVAEEMNGRIEYYVDCVRD

SEQ ID NO: 9389 - DNA, 2274 bp, Saccharophagus degradans 2-40
  CDS (1)..(2274): transl_table=11
atgataggaacaaaagatatgaaatttcgttttcccattgtcgtcatcgatgaagattttagggccgaaaatatctctggctcgagtattcgcgatctagccgaagcaattggtaacgaagggatggaagttgtaggctttaccagctatgtagacctcacctcctttgctcagcaagcaagccgtgcatcgtgttttattgtttctatcgacgacgatgagttcggctcgggttcacccgaagaagtggccgtacctattgaggcgttgcgaagctttatattagcggttagaaagcgcaataccgatattcctatcttcctatacggtgaaacccgcactgcgcagcatatccccaatgatgtattgcgcgagctacacggctttattcacatgtttgaagacacgcccgagtttgtggcgcgccatattatccgtgaggcgaaaaagtatttgtcgtcactcgcgccaccattttttaatgcccttatggagtacgcaagcgatagctcatactcgtggcattgccctgggcactctggtggcgtagcgtttttaaaaagccccattggccaaatgttccaccagttttttggcgagaacatgctgcgcgcagacgtgtgcaactcggtagatgagctaggtcagctgctggatcacaccggcccagttgccgcgagcgagcaaaatgccgcccgtatatttaacagtgaccatttgttttttgtgactaacggtacttctacatccaacaaaatcgtgtggcactccaccgtagcgcctggcgacattgtggtagtagatagaaactgccacaaatcgattttgcactccattattatgaccggcgccatccctgtgtttttaatgcctacgcgcaaccactacggcattattggtcctattccaaagtctgaatttactatggaatctatccgcgaaaagatagaagccaacccgtttgcgcgtaaagccaaaaacaaaaagccccgtatcctcactattacgcaaagtacctacgacggtattttgtataacgtggagcaaatcaaagagattcttggctccaatatcgacacattgcatttcgacgaagcttggttgccccatgctacgttccacgacttttataaaaacatgcacgccataggcacagaccggccgcgttcggacgacaccttagtattcgccacacaatctacccataaactgcttgctggcttatcgcaggcgtcgcaaatattggtgcaaaacggcaacaaccgtaaattggacactcaccgttttaacgaatcctacttaatgcattcttccaccagcccgcaatattccattattgcctcgtgcgatgtggctgcagccatgatggaggcccccggcggtaccgcgctagtagaagaatcgctgctagaagcgctcgatttccgccgtgccatgcgcaaagtagatgcagagtttggtgatgatgactggtggttccaagtttgggggcctaaggatattgccgaagagggcattggcgagcgcgaagattgggttatacgcgaagatgatgactggcacgatttcggcaatattgaatctggctttaatatgctcgaccccatcaaagccactatcatcacccccgggctaaacttgaagggcgacttcgatgagtttggtattccggctgcaattgtaagtaaatacttggctgagcacggcattatcatcgaaaaaaccggcctgtattccttcttcattatgttcactatcggcattaccaaaggccgatggaattccatggtgacggaattgcagcaatttaaagacgattacgaccaaaacctgcctttatggcgtgttttaccggagttcgtgagtaaacacaaacagtatgagcgcattggtttgcgcgatttgtgtacccaaattcacgatatgtataaaaagtacgacgtggctaaaattaccactgatatgtacctatctaaaatagagcctgctatgaccccagcagatgcttgggcaaaaatggctcaccgcgaaatagagcgcgtatctattgatgaaatagaaggccgtattactgcgatgttagtaaccccttacccaccgggtatacctttgatggtgccgggcgagcgattcaacagcactattattagctacttgaagttcgcgcgcgatttcaactctgcgttaccgggctttgagacagacgtacacggtctagtgaaagacaccgtaaacggggtagaaggctactatatcgatgtagttaaagagtaa

SEQ ID NO: 9390 - protein, 757 aa, Saccharophagus degradans 2-40
MIGTKDMKFRFPIVVIDEDFRAENISGSSIRDLAEAIGNEGMEVVGFTSYVDLTSFAQQASRASCFIVSIDDDEFGSGSPEEVAVPIEALRSFILAVRKRNTDIPIFLYGETRTAQHIPNDVLRELHGFIHMFEDTPEFVARHIIREAKKYLSSLAPPFFNALMEYASDSSYSWHCPGHSGGVAFLKSPIGQMFHQFFGENMLRADVCNSVDELGQLLDHTGPVAASEQNAARIFNSDHLFFVTNGTSTSNKIVWHSTVAPGDIVVVDRNCHKSILHSIIMTGAIPVFLMPTRNHYGIIGPIPKSEFTMESIREKIEANPFARKAKNKKPRILTITQSTYDGILYNVEQIKEILGSNIDTLHFDEAWLPHATFHDFYKNMHAIGTDRPRSDDTLVFATQSTHKLLAGLSQASQILVQNGNNRKLDTHRFNESYLMHSSTSPQYSIIASCDVAAAMMEAPGGTALVEESLLEALDFRRAMRKVDAEFGDDDWWFQVWGPKDIAEEGIGEREDWVIREDDDWHDFGNIESGFNMLDPIKATIITPGLNLKGDFDEFGIPAAIVSKYLAEHGIIIEKTGLYSFFIMFTIGITKGRWNSMVTELQQFKDDYDQNLPLWRVLPEFVSKHKQYERIGLRDLCTQIHDMYKKYDVAKITTDMYLSKIEPAMTPADAWAKMAHREIERVSIDEIEGRITAMLVTPYPPGIPLMVPGERFNSTIISYLKFARDFNSALPGFETDVHGLVKDTVNGVEGYYIDVVKE

SEQ ID NO: 9391 - DNA, 2337 bp, Burkholderia xenovorans LB400; identical to SEQ ID NO: 4304
  CDS (1)..(2337): transl_table=11

SEQ ID NO: 9392 - protein, 778 aa, Burkholderia xenovorans LB400; identical to SEQ ID NO: 4305

SEQ ID NO: 9393 - DNA, 2286 bp, Burkholderia xenovorans LB400
  CDS (1)..(2286): transl_table=11
atgaagtttcgttttcccgtcgtcatcatcgacgaagatttccgctccgagaacatctcgggttccggcatccgggctctggccgaagccatcgagaaagaaggcgcggaagtgctcgggttgacgagctacggcgatctgacttcgttcgcgcagcagtcgagccgcgcctcgtgcttcatcctttcgatcgacgatgacgagctgctgccgtacgtcgataacgtggtggtggaaggcgagacgccggaactggccgccgcgatcgtcgcgctgcgcgcgttcgtgaccgaagtgcgccgccgcaacgccgacattccgatcttcctgtacggcgaaacgcgcacctcgcgccacctgccgaacgacatcctgcgcgaactgcacggcttcatccacatgttcgaggacacgccggagttcgtcgcgcgccatatcatccgcgagaccaaggtgtatctggattcgctcgcaccgccgttcttcaaggaactggtgcagtacgcggaagaaggctcgtactcgtggcactgtccgggccactcgggcggcgtcgcgttcctgaagagcccgctcggccagatgttccaccagttcttcggcgagaacatgctgcgcgcggacgtgtgcaatgccgtcgacgaacttggccagttgctggaccacacgggccctgtcgcggcttccgaacgcaatgcggcgcgcatcttcagcgcggaccacgtgttcttcgtgaccaacggcacgtccacgtcgaacaagatcgtctggcacggcacggtagcgccgggcgacatcgtgctggtggaccgcaactgccacaagtcgatcctgcacgcgatcaccatgaccggcgcgattccggtgttcctcacgccgacgcgcaacaacttcggcatcatcgggccgattccgcgcagcgagttcgagccggaaaacatcaagaagaagatcctcgcgaacccgttcgcgcgcgaagcgctcgctaagaatccggacctcaagccgcgcatcctgaccatcacgcaaagcacgtacgacggcgtaatctacaacgtcgagatgatcaaggaaatgctcggcgactggctcgacacgctgcacttcgacgaagcctggctgccgcacgctgaattccacgagttctatcaggacatgcacgcaatcggcgcgggccgtccgcgtattggtgcgatggtgttcgccacgcactccacgcacaagctgctggccggcatttcgcaggcttcgcagatcgtcgtgcaggattcgaagaacagccgcttcgacaagcatcgtttcaatgaagcgtatctgatgcacacgtcgaccagcccgcagtacgcgatcatcgcctcgtgcgacgtggccgcggccatgatggaagcgccgggcggcaccgcgctcgtcgaagagtcgatcgcggaggcgttggacttccgccgcgcaatgagcaaggtcgacgccgaatacggcgacgactggttcttcaaggtgtggggcccagaccagttcgccgaagaaggcatcggctcgcgcgaagactggatgctgcgtccgaacgatccgtggcacggtttcggaccgctcgccgacggcttcaacatgctcgacccgatcaaggcgaccatcgttacgccgggtctggatatggacggcggcttcggcgagtcgggcattccggccgcgatcgtcacgaagtatctggccgagcacggcatcatcgtcgagaagaccgggctgtattcgttcttcatcatgttcacgatcggcatcaccaagggccgctggaattcgatggtcaccgaactgcagcagttcaaggacgactacgacaacaaccagccgctgtggcgcgtgctgcccgagttcgtctcgcatcatcccatgtacgaacgtgtgggtttgcgcgatctgtgcgagcagattcacagcgtctaccgcgcgaacgacattgcgcgcctgacgaccgagatgtacctgtcgagcatggaaccggccatgaagccgtccgatgcgttcgccaagctcgcgcaccgcgagatcgaccgcgtgcctatcgacgaactggaaggccgcgtcacgtcgatcctgctgacgccgtatccgccgggcattccgctgctgatcccgggcgagcgcttcaacaggaccatcgtcaactatctgcgtttcgcgcgcgagttcaacgagcgcttcccgggtttccacacggacatccacgggctggtcggcgaaacgatcaacggacgcatcgaatacttcgtcgattgcgttcgcgcctga

SEQ ID NO: 9394 - protein, 761 aa, Burkholderia xenovorans LB400
MKFRFPVVIIDEDFRSENISGSGIRALAEAIEKEGAEVLGLTSYGDLTSFAQQSSRASCFILSIDDDELLPYVDNVVVEGETPELAAAIVALRAFVTEVRRRNADIPIFLYGETRTSRHLPNDILRELHGFIHMFEDTPEFVARHIIRETKVYLDSLAPPFFKELVQYAEEGSYSWHCPGHSGGVAFLKSPLGQMFHQFFGENMLRADVCNAVDELGQLLDHTGPVAASERNAARIFSADHVFFVTNGTSTSNKIVWHGTVAPGDIVLVDRNCHKSILHAITMTGAIPVFLTPTRNNFGIIGPIPRSEFEPENIKKKILANPFAREALAKNPDLKPRILTITQSTYDGVIYNVEMIKEMLGDWLDTLHFDEAWLPHAEFHEFYQDMHAIGAGRPRIGAMVFATHSTHKLLAGISQASQIVVQDSKNSRFDKHRFNEAYLMHTSTSPQYAIIASCDVAAAMMEAPGGTALVEESIAEALDFRRAMSKVDAEYGDDWFFKVWGPDQFAEEGIGSREDWMLRPNDPWHGFGPLADGFNMLDPIKATIVTPGLDMDGGFGESGIPAAIVTKYLAEHGIIVEKTGLYSFFIMFTIGITKGRWNSMVTELQQFKDDYDNNQPLWRVLPEFVSHHPMYERVGLRDLCEQIHSVYRANDIARLTTEMYLSSMEPAMKPSDAFAKLAHREIDRVPIDELEGRVTSILLTPYPPGIPLLIPGERFNRTIVNYLRFAREFNERFPGFHTDIHGLVGETINGRIEYFVDCVRA

SEQ ID NO: 9395 - DNA, 2265 bp, Ralstonia metallidurans CH34
  CDS (1)..(2265): transl_table=11
atgaaattccgcttccccgtcatcatcatcgatgaagacttccgctccgagaacatctccggctcgggcattcgcgcgttggccgaggccatcgagaatgaaggcatggaagtgatgggtctgaccagctatggcgacttgacgtcgttcgcccagcagtccagccgggcatccacgttcatcgtgtcgatcgacgacgacgagttcgtgcgcgccgacgatcagcccgaagcggccgccatcgagaagctgcgcgcgttcgtgaccgaagtgcgtcgccgcaacacggatctgccgatcttcctgtatggcgagacgcgcacgtcgcgccatattccgaacgacatcctgcgcgagctgcacggcttcatccacatgttcgaggacacccccgaattcgtggcgcgccacatcatccgcgaagccaaggtctacctggattcgctggccccgccgttcttcaaggcgctgatcgactacgcgcaggacagctcgtactcgtggcactgcccggggcactcgggcggcgtggcgttcctgaagagcccggtgggccaggtgttccaccagttcttcggcgagaacatgctgcgcgccgacgtctgcaacgcggtcgaggaacttggccagctgctggaccacaccggcccggtggcggcgtcggagcgcaacgccgcgcgcatcttcaattccgaccacatgttcttcgtgaccaacggcacgtcgacgtcgaacaagatggtctggcacgccaacgtggcgccgggcgacatcgtggtggtggaccgtaactgccacaagtcgatcctgcacgcgatcatgatgacgggcgcaattccggtgttcctgatgccgacgcgcaaccactacggcatcatcggcccgattccgaagagcgagttcgacccggagacgatccgcaggaagatcgagaaccatccgttcgcgagcaaggcgaagaaccagaagccgcgcatcctgacgatcacgcagggtacgtacgacggcgtgctgtacaacgccgagcagatcaaggaaatgctgacgtcggaaatcgacacgctgcatttcgacgaggcatggctgccgcacgcggcgttccacgatttctatcgcgacatgcacgcgatcggccgtgaccgtccgcgcagcaaggacgcgctggtgttcgccacgcagtccacgcacaagctgctggccggcctgtcgcaggcctcgcagatcctcgtgcaggattcggaaacgcgcaagctggatcgctaccgcttcaacgaggcgtatctgatgcacacctcgacgagcccgcagtactcgatcattgcctcgtgcgacgtggccgcggcgatgatggaagcgccgggcggcaccgcgctggtcgaggaaagcatccaggaagcgctggacttccgccgtgccgtgcgcaaggtggaagccgactacgacgtcgccaacaatggcgactggtggttcaaggtgtggggcccggacgcgctggccgaagacggcattcctgaccgcgaagagtggatgctcaaggccaacgagcgctggcatggcttcggcgatctggccgatggtttcaacctgctggatccgatcaaggccacgatcatcaccccgggcctcgacgtggacggcgagttcagcgagcgcggcatcccggcggcaatcgtcacgaagtacctggccgagcacggcatcatcatcgagaagacgggtctgtactcgttcttcatcatgttcacgatcggcatcaccaagggccgctggaactcgctggtgaccgagctgcagcagttcaaggacgactacgaccagaaccagccgctgtggcgcgtgctgcccgagttcgtgggcaagcacccgcagtacgagcggctgggcctgcgtgatctgtgcgacgcgatccacagcgtctacaaggccaacgatgtggcgcgcgtgaccaccgagatgtacctgtcggacatggagccggcgatgaagccgtcggatgcctgggcgatgatggcgcatcgcgaaatcgagcgcgtgcccgtcgacgaactggaaggccgcgtgaccgcgatcctgctgacgccgtacccgccgggcattccgctgctgatcccgggcgagcgcttcaaccgcacgatcgtgaagtacctgaagttcgcgcgcgagttcaacaagctcttcccgggcttcgagaccgacatccacggcctggtcgaggacgaggtcgatggccagaaggcgtacttcgtggattgcgtgaagcagtaa

SEQ ID NO: 9396 - protein, 754 aa, Ralstonia metallidurans CH34
MKFRFPVIIIDEDFRSENISGSGIRALAEAIENEGMEVMGLTSYGDLTSFAQQSSRASTFIVSIDDDEFVRADDQPEAAAIEKLRAFVTEVRRRNTDLPIFLYGETRTSRHIPNDILRELHGFIHMFEDTPEFVARHIIREAKVYLDSLAPPFFKALIDYAQDSSYSWHCPGHSGGVAFLKSPVGQVFHQFFGENMLRADVCNAVEELGQLLDHTGPVAASERNAARIFNSDHMFFVTNGTSTSNKMVWHANVAPGDIVVVDRNCHKSILHAIMMTGAIPVFLMPTRNHYGIIGPIPKSEFDPETIRRKIENHPFASKAKNQKPRILTITQGTYDGVLYNAEQIKEMLTSEIDTLHFDEAWLPHAAFHDFYRDMHAIGRDRPRSKDALVFATQSTHKLLAGLSQASQILVQDSETRKLDRYRFNEAYLMHTSTSPQYSIIASCDVAAAMMEAPGGTALVEESIQEALDFRRAVRKVEADYDVANNGDWWFKVWGPDALAEDGIPDREEWMLKANERWHGFGDLADGFNLLDPIKATIITPGLDVDGEFSERGIPAAIVTKYLAEHGIIIEKTGLYSFFIMFTIGITKGRWNSLVTELQQFKDDYDQNQPLWRVLPEFVGKHPQYERLGLRDLCDAIHSVYKANDVARVTTEMYLSDMEPAMKPSDAWAMMAHREIERVPVDELEGRVTAILLTPYPPGIPLLIPGERFNRTIVKYLKFAREFNKLFPGFETDIHGLVEDEVDGQKAYFVDCVKQ

SEQ ID NO: 9397 - DNA, 2160 bp, Haemophilus somnus 129PT; identical to SEQ ID NO: 4306
  CDS (1)..(2160): transl_table=11

SEQ ID NO: 9398 - protein, 719 aa, Haemophilus somnus 129PT; identical to SEQ ID NO: 4307

SEQ ID NO: 9399 - DNA, 2256 bp, Pseudomonas aeruginosa UCBPP-PA14
  CDS (1)..(2256): transl_table=11
atgtataaagacctcaaatttcccgtcctcatcgtccatcgcgacatcaaggccgacaccgttgccggcgaacgcgtgcggggcatcgcccacgaactggagcaggacggcttcagcattctctccaccgccagctccgccgaggggcgcatcgtcgcttccacccaccacggcctggcctgcatcctggtcgccgccgaaggtgccggggaaaaccagcgcctgctgcaggatgtggtcgaactgatccgcgtggcccgcgtgcgggcgccgcaattgccgatcttcgccctcggcgagcaggtgaccatcgagaacgcgccggccgagtccatggccgacctgcaccagttgcgcggcatcctctacctgttcgaagacaccgtgccgttcctcgcccgccaggtcgcccgggcggcgcgcaactacctggccgggctgctgccgccattcttccgtgcgctggtcgagcacaccgcgcagtccaactattcctggcatacgccgggccacggcggcggtgtcgcctatcgcaagagtccggtgggacaggcgttccaccagttcttcggggagaacacgctgcgttccgacctgtcggtctcggtccccgagctgggctcgctgctcgaccataccggccccctggccgaggccgaggaccgtgccgcgcgcaatttcggcgccgaccataccttcttcgtgatcaatggcacttccaccgcgaacaagatcgtctggcactccatggtcggtcgcgaagacctggtgctggtggaccgcaactgccacaagtcgatcctccactcgatcatcatgaccggggcgataccgctctacctgactccggaacgcaacgaactggggatcatcgggccgatcccgctgagcgaattcagcaaggagtcgatcgccgcgaagatcgccgccagcccgctggcgcgcggccgcgagccgaaggtgaagctggcggtggtgaccaactccacctacgacggcctgtgctacaacgccgagctgatcaagcagaccctcggcgacagcgtcgaggtgttgcacttcgacgaggcttggtacgcctatgccgcgttccacgagttctacgacggacgctatggcatgggcacctcgcgcagcgaggagggccccctggtgttcgccacccactccacgcacaagatgctcgccgccttcagccaggcctcgatgatccacgtgcaggatggcgggacccggaagctggacgtggcgcgcttcaacgaagccttcatgatgcacatctcgacctcgccgcagtacggcatcatcgcttcgctggacgtggcttcggcgatgatggaagggcccgccgggcgttcgctgatccaggagaccttcgacgaggccctcagcttccgccgggccctggccaacgtacggcagaacctggaccggaacgactggtggttcggcgtctggcagccggagcaggtggagggcaccgatcaggtcggcacccatgactgggtgctggagccgagcgccgactggcacggcttcggcgatatcgccgaagactacgtgctgctcgatccgatcaaggtcaccctgaccaccccgggcttgagcgccggcggcaagctcagcgagcaggggattccggctgccatcgtcagccgcttcctctgggagcgcgggctggtggtggagaaaaccggtctctactccttcctggtgctgttctcgatgggcatcaccaagggcaagtggagcaccctggtcaccgaactgctcgaattcaagcgctgttacgacgccaacctgccgctgctcgacgtcttgccctccgtggcccaggccggcggcaagcgctacaacggcgtgggcctgcgcgacctcagcgacgccatgcacgccagctaccgcgacaacgccacggcgaaggccatgaagcgcatgtacacggtgctgccggaggtcgcgatgcggccgtccgaggcctacgacaagctggtgcgcggcgaggtcgaggcggtaccgatcgctcggttggaagggcgcatcgctgccgtcatgctggtaccctatccgccgggtatcccgctgatcatgccgggtgagcgcttcaccgaggcgacccgctcgatcctcgactatctcgagttcgcgcggaccttcgagcgcgccttccctggtttcgactccgatgtgcacggcctgcagcatcaggacggaccgtccgggcgctgctataccgttgaatgcataaaagaatga

SEQ ID NO: 9400 - protein, 751 aa, Pseudomonas aeruginosa UCBPP-PA14
MYKDLKFPVLIVHRDIKADTVAGERVRGIAHELEQDGFSILSTASSAEGRIVASTHHGLACILVAAEGAGENQRLLQDVVELIRVARVRAPQLPIFALGEQVTIENAPAESMADLHQLRGILYLFEDTVPFLARQVARAARNYLAGLLPPFFRALVEHTAQSNYSWHTPGHGGGVAYRKSPVGQAFHQFFGENTLRSDLSVSVPELGSLLDHTGPLAEAEDRAARNFGADHTFFVINGTSTANKIVWHSMVGREDLVLVDRNCHKSILHSIIMTGAIPLYLTPERNELGIIGPIPLSEFSKESIAAKIAASPLARGREPKVKLAVVTNSTYDGLCYNAELIKQTLGDSVEVLHFDEAWYAYAAFHEFYDGRYGMGTSRSEEGPLVFATHSTHKMLAAFSQASMIHVQDGGTRKLDVARFNEAFMMHISTSPQYGIIASLDVASAMMEGPAGRSLIQETFDEALSFRRALANVRQNLDRNDWWFGVWQPEQVEGTDQVGTHDWVLEPSADWHGFGDIAEDYVLLDPIKVTLTTPGLSAGGKLSEQGIPAAIVSRFLWERGLVVEKTGLYSFLVLFSMGITKGKWSTLVTELLEFKRCYDANLPLLDVLPSVAQAGGKRYNGVGLRDLSDAMHASYRDNATAKAMKRMYTVLPEVAMRPSEAYDKLVRGEVEAVPIARLEGRIAAVMLVPYPPGIPLIMPGERFTEATRSILDYLEFARTFERAFPGFDSDVHGLQHQDGPSGRCYTVECIKE

SEQ ID NO: 9401 - DNA, 2163 bp, Shewanella sp. ANA-3; identical to SEQ ID NO: 4314
  CDS (1)..(2163): transl_table=11

SEQ ID NO: 9402 - protein, 720 aa, Shewanella sp. ANA-3; identical to SEQ ID NO: 4315

SEQ ID NO: 9403 - DNA, 2244 bp, Azoarcus sp. BH72
  CDS (1)..(2244): transl_table=11
atgcgattccattttccgatcatcatcatcgacgaggacttccgctccgagaacacctcggggctgggcatccgcgcgctcgccacagccatcgaggaagagggcatggaggtgctcggggtcacgagctacggcgacctgacctctttcgcccagcagcagagccgcggttcgggcttcatcctgtcgatcgacgatgaagagttttcctcgcccgaggcctcggccaaggcaattgccgacctgcgcagcttcgtcgaggagatccgcctgcgcaacgccgacatcccgatcttcctgcacggggagacgcgcaccagccgtcatattccgaacgatgtgctgcgcgagatgcacggcttcatccacatgttcgaggacacgccggagttcatcgcgcgctacgtcgtgcgcgaggcgcgcaactacctcgagtcgctgccgccgccgttcttccgcgcgctgacgcactacgcggcggacggctcgtattcctggcactgcccgggccattccgggggcgtcgcgttcctgaagagtccggtcgggcagatgttccaccagttcttcggcgagaacatgctgcgggcggacgtctgcaacgcggtggatgaactcggccagttgctcgaccacaccggcccggtggctgcgtccgagcgtaacgcggcgcgcatcttcaactgcgatcacctgtacttcgtcaccaacggcacttcgacctcgaacaagatggtgtggcacaccacggtggcgcccggcgacatcgtcgtcgtcgaccgcaactgccacaagtccatcctgcactccatcatcatgaccggcgcggtgccggtgttcctgacgccgacccgcaaccactacggcatcatcggcccgatcccgctggaggagttctcgatggagaacatccagaagaagatcgaggccaacccgttcgcacgcgaagcgaagagcaagaagccgcgcatcctcaccatcacccagtcgacttacgacggcgtggtgtacaacgtcgagaccatcaaggagatgctcgacggcaagatcgacacgctgcacttcgatgaagcctggctgccgcacgcggccttccacgacttctacggcgactaccacgcgatcggcgaggatcgtccgcgctgccgcgagtcgatgatcttctcgacgcaatcgacccacaagctgctcgccggcctcagccaagcgtcgcagatcctcgtgcaggactcgcagacccgcaagctcgaccgcgacatcttcaacgaggcctatctgatgcacacctccacctcgccgcagtacgcgatcatcgcgtcctgcgacgtggcggcggcgatgatggagccgccgggcggtgccgcgctggtggatgaatcactggcggaggcggtcgagttccgccgtgcgatgcgcaaggtggatgccgagttcggcgaatccgactggtggttccgggtgtggggcccggagtatctcgccgaggaaggcctgggcgagcgtgacgactggatgctgaagaacggcgaacgctggcacggtttcggtgatctggcgccgggcttcaacatgctggatccgatcaaggctaccgtgatcacgccggggctggatgtggatggcgactttgccgactggggaatcccggcgggcatcctcacgcgctacctggccgagcacgggatcatcgtcgagaagaccgggctgtattcgttcttcatcatgttcacgatcggtatcaccaaggggcgctggaacacgttggtgaccgaactccagcagttcaaggacgactacgatcgcaaccagcctttgtggcgcgtgatgccggacttcattgccaagcatccgcgctacgagaaagtggggttgaaggacctgtgcgcgcagatccacagcttctacaaggcccacgacgtggcacggctgaccaccgagatgtacctgtcggacatggtgcccgcgatgaaaccggccgacgccttcgccaagatggcgcaccgtgaaatcgaacgggttctgatcgacgaactggaggatcgcgtcaccgcgatgctggtaacgccgtatccgccgggtattcccctgctaattccgggcgagcgcttcaatccgacgatcgtgcgctatctgcagttcgcacgcgatttcaacgcccgcttccccgggttcgaaaccgacatccacgggctggtgaagggagacgacggccgttactacgtggattgcgtagcggcagactag

SEQ ID NO: 9404 - protein, 747 aa, Azoarcus sp. BH72
MRFHFPIIIIDEDFRSENTSGLGIRALATAIEEEGMEVLGVTSYGDLTSFAQQQSRGSGFILSIDDEEFSSPEASAKAIADLRSFVEEIRLRNADIPIFLHGETRTSRHIPNDVLREMHGFIHMFEDTPEFIARYVVREARNYLESLPPPFFRALTHYAADGSYSWHCPGHSGGVAFLKSPVGQMFHQFFGENMLRADVCNAVDELGQLLDHTGPVAASERNAARIFNCDHLYFVTNGTSTSNKMVWHTTVAPGDIVVVDRNCHKSILHSIIMTGAVPVFLTPTRNHYGIIGPIPLEEFSMENIQKKIEANPFAREAKSKKPRILTITQSTYDGVVYNVETIKEMLDGKIDTLHFDEAWLPHAAFHDFYGDYHAIGEDRPRCRESMIFSTQSTHKLLAGLSQASQILVQDSQTRKLDRDIFNEAYLMHTSTSPQYAIIASCDVAAAMMEPPGGAALVDESLAEAVEFRRAMRKVDAEFGESDWWFRVWGPEYLAEEGLGERDDWMLKNGERWHGFGDLAPGFNMLDPIKATVITPGLDVDGDFADWGIPAGILTRYLAEHGIIVEKTGLYSFFIMFTIGITKGRWNTLVTELQQFKDDYDRNQPLWRVMPDFIAKHPRYEKVGLKDLCAQIHSFYKAHDVARLTTEMYLSDMVPAMKPADAFAKMAHREIERVLIDELEDRVTAMLVTPYPPGIPLLIPGERFNPTIVRYLQFARDFNARFPGFETDIHGLVKGDDGRYYVDCVAAD

SEQ ID NO: 9405 - DNA, 2160 bp, Haemophilus somnus 2336; identical to SEQ ID NO: 4308
  CDS (1)..(2160): transl_table=11

SEQ ID NO: 9406 - protein, 719 aa, Haemophilus somnus 2336; identical to SEQ ID NO: 4309

SEQ ID NO: 9407 - DNA, 2259 bp, Pseudoalteromonas tunicata D2
  CDS (1)..(2259): transl_table=11
atgaagtttcgttttcccgtagtaattatcgatgaagattttcgctctgaaaatatttcaggatctggcattcgcgatttagcccacgcgattggcgagcaaggttatgaaattgttggttttactagctatggcgatttaagtgcgtttgcacagcaagctagtcgtgcctcgtgttttattttatctatcgatgatgaagagtttggaaccggtactgctgaagaagttgagcacgcattagtcgcactgcgtgaatttattgtgcaagtgcgccgtcgcaatagcgatatccctatttttctttatggtgaaacgcgtaccgcagaacatattccaaatgatgtactgcgccaactacacggctttattaatatgtttgaagataccgctgattttgtggccaagtatattatccgtgaagcaaaaaaatatttagattctttagcaccgccgttttttaaagccctaatgaattatgccagcgatggttcttactcttggcattgtccgggtcactcaggtggcgtggcatttttgaaaagccccgttggacaaatgttccaccagttttttggcgaaaacatgctgcgcgccgatgtctgtaactcggttgatgagttaggccaattgcttgatcacacaggcccagttgctaaaagtgagcaaaatgcggcgcgaatttttaaagccgaccatttgttttttgttactaacggcacttcaacatcgaataaaattgtttggcattctaccgttgcgccgggtgatattgtcgtagttgaccgtaactgtcataaatcgattttacattcgatcatcatgaccggtgctattccggtgtttttaatgccaacacgtaaccattacggcattattgggcctattccaaaacatgagttttcaccggagtctatcaaagctaaaattgatgcccatccgtttgcgtctaaagctaaaaataaaaatccacgtattttaaccattacccaaagtacctacgatggcgtactttataatgtggaacaaattaaagcagagcttggttcgtatgttgatacgctgcattttgatgaggcgtggctaccccatgcgacgtttcatgagttttatcaagatatgcatgccattggtggcgatgaacgcccgcgttctgatgatgcggtggtatttgcaacgcaatcaacccataagctactagctggtatttctcaggcatcacaaattttggtgcaaaatgctaaaaatcgtccacttgatacccatagatttaatgaatcatacttaatgcattcatcaacgagcccgcaatattcaattattgcttcgtgtgatattgcagctgccatgatggagcaacctggtggccgagctttggttgaagaatcgttatctgaagcgattgattttcgccgagcgatgcgcaaagtcgctgctgaatttggtgacgatgattggtggttcagcgtttggggaccaaaaaatctgccagaaagtggcattggtggccgtgaagattggttagtaaaagcacaagatgattggcatcaatttggtgatattgaagctggctttaatatgctcgatccgattaaagcgaccattattacccctggacttggtgctgatggcagctttgaggccacaggtattccggctacaattttaactaaatatttggctgaacacggtattgtggttgaaaaaacaggcctgtattcattctttattatgtttaccattggtattactaaaggtcgttggaattcaatggtcactgaattacaacagtttaaagatgattatgaccaaaacttacctctttggcgtattttacctgagtttgtagagcgcaatcctcaatatgaaaaagtaggtttaaaagatttgtgtcagcagatccacgcgatttatcagcagtttgatatttctaaagtgacaacaaatatgtacctttccagtattgagcctgcgatgttaccagccgatgcatggactaaaatggctcaccgtgaaattgagcgtgtcagtattgatgagctagaagggcgcattaccgcgatgttagtgacaccgtatccaccggggatcccattgatggtgccaggtgagcgtttcaatacaacgattatcaattatttaaagttcactcgtgaatttaacgagcgtttcccagggtttgagacagatgttcatggtctggtgcgcgaaaaaattgatggcactaaccattattttgttgatgtagttggtcaataa

SEQ ID NO: 9408 - protein, 752 aa, Pseudoalteromonas tunicata D2
MKFRFPVVIIDEDFRSENISGSGIRDLAHAIGEQGYEIVGFTSYGDLSAFAQQASRASCFILSIDDEEFGTGTAEEVEHALVALREFIVQVRRRNSDIPIFLYGETRTAEHIPNDVLRQLHGFINMFEDTADFVAKYIIREAKKYLDSLAPPFFKALMNYASDGSYSWHCPGHSGGVAFLKSPVGQMFHQFFGENMLRADVCNSVDELGQLLDHTGPVAKSEQNAARIFKADHLFFVTNGTSTSNKIVWHSTVAPGDIVVVDRNCHKSILHSIIMTGAIPVFLMPTRNHYGIIGPIPKHEFSPESIKAKIDAHPFASKAKNKNPRILTITQSTYDGVLYNVEQIKAELGSYVDTLHFDEAWLPHATFHEFYQDMHAIGGDERPRSDDAVVFATQSTHKLLAGISQASQILVQNAKNRPLDTHRFNESYLMHSSTSPQYSIIASCDIAAAMMEQPGGRALVEESLSEAIDFRRAMRKVAAEFGDDDWWFSVWGPKNLPESGIGGREDWLVKAQDDWHQFGDIEAGFNMLDPIKATIITPGLGADGSFEATGIPATILTKYLAEHGIVVEKTGLYSFFIMFTIGITKGRWNSMVTELQQFKDDYDQNLPLWRILPEFVERNPQYEKVGLKDLCQQIHAIYQQFDISKVTTNMYLSSIEPAMLPADAWTKMAHREIERVSIDELEGRITAMLVTPYPPGIPLMVPGERFNTTIINYLKFTREFNERFPGFETDVHGLVREKIDGTNHYFVDVVGQ

SEQ ID NO: 9409 - DNA, 2358 bp, Xanthobacter autotrophicus Py2; identical to SEQ ID NO: 4320
  CDS (1)..(2358): transl_table=11

SEQ ID NO: 9410 - protein, 785 aa, Xanthobacter autotrophicus Py2; identical to SEQ ID NO: 4321

SEQ ID NO: 9411 - DNA, 2148 bp, Vibrio sp. Ex25; identical to SEQ ID NO: 4312
  CDS (1)..(2148): transl_table=11

SEQ ID NO: 9412 - protein, 715 aa, Vibrio sp. Ex25; identical to SEQ ID NO: 4313

SEQ ID NO: 9413 - DNA, 2199 bp, Escherichia coli B
  CDS (1)..(2199): transl_table=11
atgtcaaaattaaaaattgcggttagtgattcttgcccggactgttttaccacgcagcgagaatgtatctacattaatgaaagtcgtaatatcgatgtggcggcaatagttttatcgctcaacgatgttacatgcggaaaactcgatgaaatcgatgccacgggttatggcatcccggtatttattgctactgaaaatcaagaacgtgtacccgcagagtatttgccccgtatttcgggtgtctttgagaattgcgaatcgcgacgagaattttatggtcgccagttagaaaccgctgccagccattatgaaactcaactgcgcccacctttcttccgcgcactggtcgattatgtcaatcaaggtaacagcgcgtttgattgccctggtcatcagggcggcgaatttttccgtcgccatccggcggggaatcagtttgtggaatactttggtgaggcgctgttccgtgccgacttgtgcaacgccgacgtagcgatgggcgatctgctgattcacgaaggcgcgccatgcattgcacagcaacatgcggcaaaagtgtttaatgccgataaaacctacttcgttttaaatggcacttcatcttctaacaaagtggttttaaacgccctgctaacaccgggtgatctggtgctgtttgatcgcaataaccacaaatctaaccaccacggagcgttgctacaggctggtgcaacaccggtttatctggaaacggcacgtaacccgtatggctttatcggtggcattgatgcgcactgttttgaagaaagttacctgcgtgagctgatcgcggaagtcgcaccgcagcgggcaaaagaggctcgtcctttccgcctcgctgtgattcagttaggcacctacgacggtacgatttataacgcccgccaagtggtggataaaattggtcatctgtgtgactacatcctgtttgactcagcatgggtcggctatgaacagtttattccgatgatggcggactgttcgccgctgttgctggatcttaatgagaacgatccgggtattctggttacgcaatctgtgcataaacaacaggctggtttttctcagacttcacaaattcataaaaaagacagccacatcaaagggcaacagcgttatgtaccgcacaaacgcatgaacaacgcctttatgatgcacgcctccaccagcccgttctatccgctgtttgccgcactggatatcaacgccaaaatgcatgaaggtgtcagcggtcgtaatatgtggatggattgtgtggtaaatggcattaatgcccgcaaactgatcctcgataactgtcagcatattcgtccgttcgtacctgaactggtggatggtaaaccctggcagtcgtatgaaacagcgcaaattgcggttgatctgcgcttcttccagtttgtaccaggggaacactggcattcttttgaaggctatgcagagaatcaatactttgtcgatccatgcaaactgttgctgacaaccccaggtattgatgcacgtaacggcgaatatgaagcgttcggtgtacccgcgacgattcttgctaacttcctgcgcgaaaatggcgtagtgccggaaaaatgcgatcttaactccatcctcttcctgctgactccggcagaagatatggccaaacttcagcaacttgttgccctgctggtacgcttcgaaaaactgcttgagtccgacgcgccattagcagaagtgctaccttccatctacaaacagcatgaagagcgctacgccggttataccctgcgtcagttgtgtcaggaaatgcatgatttgtatgcccgccacaacgtgaaacaactgcaaaaagagatgttccgtaaggagcacttcccacgcgtcagcatgaatccgcaagaagccaactacgcctatttacgcggtgaagtggaactggttcgtctgccggatgcagaaggccgtatcgctgccgaaggtgcgcttccttatcctccgggtgtgctgtgtgttgttccgggtgaaatctggggtggtgctgttctgcgttacttcagcgctctggaagaagggatcaacctgctgccaggttttgcaccggagctgcagggtgtctatatcgaagaacatgatggtcgtaagcaagtttggtgctatgtcatcaagcctcgtgatgcgcaaagcaccctgttgaaaggggaaaaattatga

SEQ ID NO: 9414 - protein, 732 aa, Escherichia coli B
MSKLKIAVSDSCPDCFTTQRECIYINESRNIDVAAIVLSLNDVTCGKLDEIDATGYGIPVFIATENQERVPAEYLPRISGVFENCESRREFYGRQLETAASHYETQLRPPFFRALVDYVNQGNSAFDCPGHQGGEFFRRHPAGNQFVEYFGEALFRADLCNADVAMGDLLIHEGAPCIAQQHAAKVFNADKTYFVLNGTSSSNKVVLNALLTPGDLVLFDRNNHKSNHHGALLQAGATPVYLETARNPYGFIGGIDAHCFEESYLRELIAEVAPQRAKEARPFRLAVIQLGTYDGTIYNARQVVDKIGHLCDYILFDSAWVGYEQFIPMMADCSPLLLDLNENDPGILVTQSVHKQQAGFSQTSQIHKKDSHIKGQQRYVPHKRMNNAFMMHASTSPFYPLFAALDINAKMHEGVSGRNMWMDCVVNGINARKLILDNCQHIRPFVPELVDGKPWQSYETAQIAVDLRFFQFVPGEHWHSFEGYAENQYFVDPCKLLLTTPGIDARNGEYEAFGVPATILANFLRENGVVPEKCDLNSILFLLTPAEDMAKLQQLVALLVRFEKLLESDAPLAEVLPSIYKQHEERYAGYTLRQLCQEMHDLYARHNVKQLQKEMFRKEHFPRVSMNPQEANYAYLRGEVELVRLPDAEGRIAAEGALPYPPGVLCVVPGEIWGGAVLRYFSALEEGINLLPGFAPELQGVYIEEHDGRKQVWCYVIKPRDAQSTLLKGEKL

SEQ ID NO: 9415 - DNA, 2274 bp, Pseudomonas putida GB-1
  CDS (1)..(2274): transl_table=11
atgtccttcggaggtagccacctgatgtacaaggacctcaagttcccgatcctcatcgtccaccgggctatcaaggctgacagtgtcgccggggagcgcgtgcggggcatcgccgaggaactgcgccaggacggtttcgccattctggccgccgccgaccacgccgaagcgcgcctggttgccgccactcaccacggcctggcctgcatgctgattgccgccgaaggagttggcgaaaacacccacctgctgcagaacatggccgagctgatccgcctggcgcgcatgcgcgcgcccgacttgccgatcttcgccttgggcgagcaggtgaccctggaaaacgcccctgccgaagccatgagcgagctcaaccaactgcgtggcatcctttacctgttcgaagacaccgtgccgtttctcgcccgccaggtggcgcgtgccgcacacacctaccttgacggtctgctgccaccgttcttcaaggccctggtgcagcataccgcgcagtccaactattcctggcataccccgggccatggcggtggcgtggcctatcataaaagcccggtaggccaggccttccaccagttcttcggggaaaacaccctgcgctcggacctgtctgtttcagtgccggagctgggctcgctgctcgaccacacaggccccttggccgaagccgaggccagggcggcgcgcaacttcggtgccgaccacaccttcttcgtcatcaatggcacctccacagccaacaagattgtctggcacgccatggtcggtcgcgacgacctggtgttggtggaccgcaactgccataagtcagtggtgcacgcgatcatcatgaccggcgccattccgctgtacctgtgcccagagcgcaacgagctgggcatcatcggcccgatcccgctcagcgagttcagccccgaggcaatcgaggcgaagatccaggccaacccccttgcccatggccgtgggcaacgtatcaagctggcggtagtgaccaactccacctatgacgggctgtgctaccacgccgggatgatcaagcaggccctgggtgccagcgtggaagtactgcacttcgacgaggcctggttcgcttatgcggcgtttcacggcttcttcaccgggcgctatgccatgggcactgcctgcgcagccgacagcccgttggtgttcagcacccattccacccacaagctgctggcggcgttcagccaggcctcgatgatccatgtgcaggacggggccaggcggcagctggaccgggaccgcttcaacgaagcgttcatgatgcatatctcgacttcgccgcagtacagcatccttgcctcgctggacgtggcctcgaccatgatggaagggcaggccgggcattcgctgttgcaagaaatgttcgatgaggcgctgagttttcgtcgtgccctggccaacctgcgcgagcacattgctgcggatgactggtggttcagtatttggcagccgcccagcactgaaggcatccagcccttggccgcgcaggactggctgctgcagccgggggcgcagtggcatggctttggtgaggtggcggacggctacgtgttgctcgaccctctgaaggtgaccctggtaatgccggggctgagtgcgggcggtgtgctgggtgagcgtggcatcccggcggcggtggtcagcaagtttctctgggagcgcgggctggtggtggaaaaaaccggcttgtacagcttcctggtgctgttttccatgggcatcaccaagggcaagtggagcaccttgctcaccgaactgctggagttcaagcgccactatgacggcaatacaccgctgagcagttgcctgccgagtgtgggggttgccgatgcctcacgctaccggggcatgggcctgcgcgacctgtgtgaacagttgcatgactgctaccgtgccaatgccacggccaagcagctgaagcgggtgttcacgcgtttgccggaggtggccgtgagccccgctcgggcttatgaccagatggtacgtggcgaggtggaagcggtgccgatcgaagctttgctgggccgtgtggccgcggtgatgctggtgccgtacccgcccggtattccgttgatcatgccgggagagcggttcaccgaggcgacccgctcgatacttgactacttggccttcgcccgagccttcaaccaaggctttccggggtttgtcgcggatgttcacggcctgcagaacgaaaatggccgctacaccgtggattgcatcatggaatgcgagtga

SEQ ID NO: 9416 - protein, 757 aa, Pseudomonas putida GB-1
MSFGGSHLMYKDLKFPILIVHRAIKADSVAGERVRGIAEELRQDGFAILAAADHAEARLVAATHHGLACMLIAAEGVGENTHLLQNMAELIRLARMRAPDLPIFALGEQVTLENAPAEAMSELNQLRGILYLFEDTVPFLARQVARAAHTYLDGLLPPFFKALVQHTAQSNYSWHTPGHGGGVAYHKSPVGQAFHQFFGENTLRSDLSVSVPELGSLLDHTGPLAEAEARAARNFGADHTFFVINGTSTANKIVWHAMVGRDDLVLVDRNCHKSVVHAIIMTGAIPLYLCPERNELGIIGPIPLSEFSPEAIEAKIQANPLAHGRGQRIKLAVVTNSTYDGLCYHAGMIKQALGASVEVLHFDEAWFAYAAFHGFFTGRYAMGTACAADSPLVFSTHSTHKLLAAFSQASMIHVQDGARRQLDRDRFNEAFMMHISTSPQYSILASLDVASTMMEGQAGHSLLQEMFDEALSFRRALANLREHIAADDWWFSIWQPPSTEGIQPLAAQDWLLQPGAQWHGFGEVADGYVLLDPLKVTLVMPGLSAGGVLGERGIPAAVVSKFLWERGLVVEKTGLYSFLVLFSMGITKGKWSTLLTELLEFKRHYDGNTPLSSCLPSVGVADASRYRGMGLRDLCEQLHDCYRANATAKQLKRVFTRLPEVAVSPARAYDQMVRGEVEAVPIEALLGRVAAVMLVPYPPGIPLIMPGERFTEATRSILDYLAFARAFNQGFPGFVADVHGLQNENGRYTVDCIMECE

SEQ ID NO: 9417 - DNA, 2163 bp, Serratia liquefaciens
  CDS (1)..(2163): transl_table=11
atgaaaaagttaaaaattgccgctaatgaaaaaacactgggctgctttgaaacagaacgtgaaattgtcgatgtgcatcagagcgatttcaatgatgtcgccgccattgtgctgtccgttgaggacgttgcaaagggcatggtgacgcatctcgaagagatcggattgaacatcccgctgtttgtggcggtttgctgcgaagaagagttggacaatgccgtattaccggcgctgcacggggtatttgaactgtgcgggaaaaacacccagttctacggcaagcagttggaggccgcggcggtaaaatatgaaaaagatctgctgccaccgttcttcaacacgctgacgcagtatgtcgaaatgggtaacgccacctttgcctgtccgggccatcagggcggtgaattcttccgtaaacatccggccggacgtcagttctttgatttctatggcgagacgctgttccgttccgatatgtgcaacgcggacgtcaaactgggcgacttattgatccacgaggggctcccctgtgccgcgcagcaacacgcagccaaggtctttaacgccgataagacctatttcgtgctgaatgggacctcggcatcaaacaaagttgcgaccaacgccctgttaacacgcggcgatttagtgttgttcgaccgtaataaccataaatccaatcaccatggcgctctgattcaagctggcgcaacgccggtgtatctggagaccgcccgcaacccatttggctttatcggcggtattgatgcgcactgctttgatgaacgttatttacgtcagcaaatccgcgaagtggcgccggagcgtgccaatgaggcccggcctttccgtctggcaatcatccagttaggcacctacgacggtaccatttacaacgctcgccaggtggtcgacaagattgggcacctgtgcgattacatcctgtttgactccgcctgggtgggctacgaacaattcatcccaatgatgaaagattgttcgcctttactgcttgaactgaatgaaaacgacccggggatcattgtgacccagtccgttcacaaacagcaggccggcttctcgcaaacctcacaaatccataaaaaagacaaacatatcaaaggccaaagtcgctattgcaaccataaacgctttaacaacgcttttatgctgcatgcttccaccagcccgttctatccgctgtttgccgctctggacgtcaatgccaaaatgcatgaagggaaaagcggtcagcgcctgtggaaggagtgcgttcgcgtagggattgaagcccgtaaaatgctgctggagacctgccagttaatcaaaccttttgttccagaccagatcgacggcaagccctggcagtcttatgacaccgagacaatggccaacgatttgcgcttcttcaactttgtgccaggcgagaagtggcatgcctttgaaggctatgcggaatcgcagtattttgtcgacccttgcaagctgttgctcaccacgccgggcatagacacggcgagcggtaactacagtgacttcggcattccggcgaccattttggccaactatctgcgcgaaaacggcatagtaccggaaaaatgcgatctcaactcgatcctgttccttctcacgccggccgaagacatcgccaaaatgcagcatctggtggcgctgattgcccgctttgaaaaacacatcgagcaggattcattactcagtgaagtcctgcccgcggtatataaaagcaatgagcaacgctacaagaattataccctgcgtcaactttgccaagaaatgcacgatctctatgtcagttacgatgttaaagaactgcaaaaagagatgttccgcaagaattatttccctcgtatcgccatgaacccgcaagatgccaatacagaatttgtccgcggcaatatcgaattggtttcattggccaaggctgagggccgtattgcggcagagggtgcactgccttaccctccgggtgttttatgtgtcgtccctggagaaatatggggcggcgctgcacagcgttatttcctggcattggaggaaggcattaatttacttcctggtttcgcaccggaattgcagggtgtttatatccaacaagatgaagatggctggaatcgcgcttacggctacgtcatgagtaattaa

SEQ ID NO: 9418 - protein, 720 aa, Serratia liquefaciens
MKKLKIAANEKTLGCFETEREIVDVHQSDFNDVAAIVLSVEDVAKGMVTHLEEIGLNIPLFVAVCCEEELDNAVLPALHGVFELCGKNTQFYGKQLEAAAVKYEKDLLPPFFNTLTQYVEMGNATFACPGHQGGEFFRKHPAGRQFFDFYGETLFRSDMCNADVKLGDLLIHEGLPCAAQQHAAKVFNADKTYFVLNGTSASNKVATNALLTRGDLVLFDRNNHKSNHHGALIQAGATPVYLETARNPFGFIGGIDAHCFDERYLRQQIREVAPERANEARPFRLAIIQLGTYDGTIYNARQVVDKIGHLCDYILFDSAWVGYEQFIPMMKDCSPLLLELNENDPGIIVTQSVHKQQAGFSQTSQIHKKDKHIKGQSRYCNHKRFNNAFMLHASTSPFYPLFAALDVNAKMHEGKSGQRLWKECVRVGIEARKMLLETCQLIKPFVPDQIDGKPWQSYDTETMANDLRFFNFVPGEKWHAFEGYAESQYFVDPCKLLLTTPGIDTASGNYSDFGIPATILANYLRENGIVPEKCDLNSILFLLTPAEDIAKMQHLVALIARFEKHIEQDSLLSEVLPAVYKSNEQRYKNYTLRQLCQEMHDLYVSYDVKELQKEMFRKNYFPRIAMNPQDANTEFVRGNIELVSLAKAEGRIAAEGALPYPPGVLCVVPGEIWGGAAQRYFLALEEGINLLPGFAPELQGVYIQQDEDGWNRAYGYVMSN

SEQ ID NO: 9419 - DNA, 2181 bp, Vibrio harveyi; identical to SEQ ID NO: 4322
  CDS (1)..(2181): transl_table=11

SEQ ID NO: 9420 - protein, 726 aa, Vibrio harveyi; identical to SEQ ID NO: 4323

SEQ ID NO: 9421 - DNA, 2145 bp, Erwinia amylovora; identical to SEQ ID NO: 4324
  CDS (1)..(2145): transl_table=11

SEQ ID NO: 9422 - protein, 714 aa, Erwinia amylovora; identical to SEQ ID NO: 4325

SEQ ID NO: 9423 - DNA, 2238 bp, Oenococcus oeni; identical to SEQ ID NO: 4326
  CDS (1)..(2238): transl_table=11

SEQ ID NO: 9424 - protein, 745 aa, Oenococcus oeni; identical to SEQ ID NO: 4327

SEQ ID NO: 9425 - DNA, 2220 bp, Hafnia alvei
  CDS (1)..(2220): transl_table=11
atgaatatcattgccatcatgaacgatttaagcgcttattttaaggaagaacccctgcgcgagctgcatcaagagttagagaaggaaggcttccgtattgcttatcccaaagaccgcaacgatctgctgaagctgattgaaaacaactcccgcctgtgtggcgtcattttcgactgggataaatataacctcgaactcagcgctgaaatcagcgagctcaacaaactgctgccaatttatgccttcgccaatacctattcgacgcttgacgtcaacatgagcgacctgcgtcttaatgttcgcttctttgaatatgcattaggcagcgcgcaagacattgccaccaagatccgccaaagcaccgatcagtatattgataccattctgccaccgctgaccaaggcgctgttcaaatacgtcaaagaagagaaatacacagtctgtacgccggggcatatgggcggaactgcgttcgataaaagccctgtcggtagcctgttctatgatttcttcggtgaaaacaccatgcgttcggatatctcgatctccgtatctgagctcggatcgctgctcgatcatagcggcccacaccgtgacgccgaagagtatatcgcgcgcacgttcaacgccgatcgcagctatatcgtaaccaacggaacatctacggcgaataaaattgtcggcatgtattcatctcctgccggtgccactattctgatagaccgtaactgccataaatcattgacccatttgatgatgatgagcaacgttgtccccgtctatctgcgcccaacccgtaacgcctacggcattttaggcgggataccgcaaagcgagttcacccgcgccagcattgaagagaaagtgaaaaatacgcccaatgcgacatggccggtgcatgcggtagtcaccaactctacctatgacggcctgttctacaataccgaatacatcaaaaacacgcttgatgttaagtcgattcacttcgattcggcatgggtgccttacaccaacttccatccgatttaccaaggcaaagcagggatgagcggtgaacgtgtgccggggaaaatcatctacgagactcagtccacccacaaactgctggcggcattctcgcaggcatcgatgatccacgtgaaaggtgagatcaacgaagaaaccttcaatgaagcctatatgatgcatacctcaacatcaccgcattacgggatcgttgcgtcgacggaaaccgcggcggctatgatgaagggcaacgccggtaagcgtttaattaacggttcaattgaacgagcgatccgcttccgtaaagagatccgccgcttacgtacagaatctgatggctggttctttgacgtatggcagccggataacattgacgaggttgcttgctggccactcaatccacgtaatgaatggcatggattcccgaacatcgacaacgatcatatgtatcttgatccgatcaaagtcactctgctgaccccaggtttaagccccaatggcactctggaagaggaagggataccggcgtcgatcgtgtcgaaatatctggatgagcacggcatcatcgtggaaaaaaccgggccatataacctgctcttcctgtttagtatcgggatcgataaaaccaaggcgttgagcttgttgcgggcattaaccgatttcaaacgcgtgtatgacctcaacctgcgcgtgaaaaacgtgttgccatcgctctataacgaggcgcctgatttctataaagagatgcgaattcaggagttggctcaggggattcatgctctggtgaaacaccacaatctaccagacctgatgtatcgtgcatttgaggtattaccaaagctggtgatgacgccgcatgatgcgttccaagaagaagtgcgtggcaatattgagccatgtgccttggatgatatgttagggaaagttagcgccaacatgatcttgccgtatcctccgggtgttccggtggttatgccgggagaaatgctcactaaggagagccgccctgttctgagcttcttgcagatgctatgtgaaattggcgcacactatccgggctttgaaacggatattcacggcgttcatcgtgatggtgcaacgggtaaatacatggtcgtggtgctcaaacaaggcgcagatgaaccgggtgataaaccgagtgatacggtgaagaaagcgccgggtaaaaaaccatcagcggcgaagaagtcataa

SEQ ID NO: 9426 - protein, 739 aa, Hafnia alvei
MNIIAIMNDLSAYFKEEPLRELHQELEKEGFRIAYPKDRNDLLKLIENNSRLCGVIFDWDKYNLELSAEISELNKLLPIYAFANTYSTLDVNMSDLRLNVRFFEYALGSAQDIATKIRQSTDQYIDTILPPLTKALFKYVKEEKYTVCTPGHMGGTAFDKSPVGSLFYDFFGENTMRSDISISVSELGSLLDHSGPHRDAEEYIARTFNADRSYIVTNGTSTANKIVGMYSSPAGATILIDRNCHKSLTHLMMMSNVVPVYLRPTRNAYGILGGIPQSEFTRASIEEKVKNTPNATWPVHAVVTNSTYDGLFYNTEYIKNTLDVKSIHFDSAWVPYTNFHPIYQGKAGMSGERVPGKIIYETQSTHKLLAAFSQASMIHVKGEINEETFNEAYMMHTSTSPHYGIVASTETAAAMMKGNAGKRLINGSIERAIRFRKEIRRLRTESDGWFFDVWQPDNIDEVACWPLNPRNEWHGFPNIDNDHMYLDPIKVTLLTPGLSPNGTLEEEGIPASIVSKYLDEHGIIVEKTGPYNLLFLFSIGIDKTKALSLLRALTDFKRVYDLNLRVKNVLPSLYNEAPDFYKEMRIQELAQGIHALVKHHNLPDLMYRAFEVLPKLVMTPHDAFQEEVRGNIEPCALDDMLGKVSANMILPYPPGVPVVMPGEMLTKESRPVLSFLQMLCEIGAHYPGFETDIHGVHRDGATGKYMVVVLKQGADEPGDKPSDTVKKAPGKKPSAAKKS

SEQ ID NO: 9427 - DNA, 2374 bp, Escherichia coli
  CDS (146)..(2281): transl_table=11
ctgcaggacaacagtaaaatcagagcgtttctgcttttactgatgtctggcggtcggagctggtgaccagtttgacccatatctcatggggcagggttttccaccttgtccggtattcttacttccccgaaacgggtttgcgcttatgaaatcaatgaatattgccgccagtagtgaactggtatcccgactttcttctcatcgtcgcgtggtggcgttgggagatactgattttacggacgtcgcggcagtcgtcattaccgctgcggatagtcgcagtggcattcttgcgttgcttaagcgcaccggttttcatctaccggtgtttttgtattccgaacatgctgttgaattacctgcgggcgttacggcggtaatcaacggcaacgagcagcagtggctggagctggaatccgcagcctgtcagtatgaagagaatttgctgccaccgttttatgacacgctgacgcagtacgttgagatgggcaacagcacctttgcttgccctggacatcaacatggtgcgttttttaaaaagcatcctgccggacgccatttttacgatttctttggtgagaacgtctttcgcgccgatatgtgtaacgctgacgtaaaattgggcgatctgcttattcatgaaggatcggcgaaagatgcgcagaaattcgcagccaaagtctttcatgccgataaaacctattttgtgctgaacggcacatcggcagcgaataaagtggtgacgaatgcgctgttaacgcgtggcgatctggtgctcttcgaccgtaacaaccataagtcgaatcatcacggcgcgctgattcaggcgggggcgacgccggtctatctggaagcttcacgcaacccgtttggtttcattggcggtattgatgcgcactgttttaatgaagagtatctgcgccagcaaattcgcgacgttgcgccagaaaaagccgacctgccgcgcccgtatcgcctggcgattattcagctgggaacctatgacggcactgtctataacgcccgtcaggtgatcgataccgttgggcatctgtgtgattacattctgtttgattccgcgtgggtcggttatgaacaatttatcccgatgatggcggatagctcgccgctgctgttagaacttaacgaaaacgatccggggatctttgtgactcagtcggtgcacaaacagcaggcgggattctcacagacgtcgcagatccataaaaaagataaccatatccgcggacaggcgcgtttttgcccgcataagcggttgaataacgcctttatgctccatgcttctaccagccctttctatccgctgtttgctgcactggatgttaacgccaaaattcatgaaggggagagtgggcgtcggctgtgggctgagtgtgttgagatagggattgaagcgcgcaaggctattcttgcgcgctgtaagctgttccgcccgtttatcccgcccgttgttgatggcaaattgtggcaggattatccgacatcagtgttagccagcgaccgccgttttttcagttttgagccgggggcgaagtggcacggctttgaaggatatgccgcggatcagtattttgttgatccgtgcaagctgttactcactacaccaggtatcgatgccgaaaccggcgaatatagcgactttggcgttccggcgacgattctggcgcactatctgcgtgagaacggcattgtgccggagaagtgcgatctcaactccattctgtttttattaactccggcggaaagccacgagaagctggcacaactggtggcgatgctggcgcaatttgaacagcatattgaggatgactcgccgctggttgaggtgttgccgagcgtttataacaagtatccggtgcgctatcgcgactacaccctgcgccagttgtgtcaggagatgcacgatctgtatgtcagtttcgacgtcaaagacctacaaaaagcgatgttccgccagcagagtttcccgtcagtggtgatgaacccccaggatgcgcatagcgcttatattcgcggtgacgtggagttggtgcggattcgtgatgccgaagggcgaattgcggcagaaggggcgttgccttatccacctggcgtgctttgcgtggtacccggggaagtctggggtggggcggttcaacgttatttccttgcactggaagaaggggtgaatttgttgccgggattttcgccggagctgcaaggtgtttatagcgaaaccgatgcggatggcgtgaaacggttgtacggttatgtgttgaagtaagaataaaaaaaacgggtcaccttctggcgacccgtttttctttgcgtaattagtggctaaccgtctgtgtgcctgtcgggacacgaacgtgtt

SEQ ID NO: 9428 - protein, 711 aa, Escherichia coli; identical to SEQ ID NO: 4261

SEQ ID NO: 9429 - DNA, 2199 bp, Escherichia coli; identical to SEQ ID NO: 4330
  CDS (1)..(2199): transl_table=11

SEQ ID NO: 9430 - protein, 732 aa, Escherichia coli; identical to SEQ ID NO: 4331

SEQ ID NO: 9431 - DNA, 20 bp, Artificial sequence
  primer
atggggcagggttttccacc

SEQ ID NO: 9432 - DNA, 25 bp, Artificial sequence
  primer
ttacttcaacacataaccgtacaac

SEQ ID NO: 9433 - protein, 689 aa, Artificial sequence
  consensus sequence
  Variant (2)..(2): Xaa in position 2 is any amino acid
  Variant (4)..(24): Xaa in position 4 to 24 is any amino acid
  Variant (25)..(49): Xaa in position 25 to 49 is any or no amino acid
  Variant (51)..(53): Xaa in position 51 to 53 is any amino acid
  Variant (55)..(55): Xaa in position 55 is any amino acid
  Variant (60)..(61): Xaa in position 60 to 61 is any amino acid
  Variant (63)..(64): Xaa in position 63 to 64 is any amino acid
  Variant (66)..(74): Xaa in position 66 to 74 is any amino acid
  Variant (79)..(79): Xaa in position 79 is any amino acid
  Variant (82)..(87): Xaa in position 82 to 87 is any amino acid
  Variant (89)..(89): Xaa in position 89 is any amino acid
  Variant (91)..(92): Xaa in position 91 to 92 is any amino acid
  Variant (94)..(97): Xaa in position 94 to 97 is any amino acid
  Variant (100)..(102): Xaa in position 100 to 102 is any amino acid
  Variant (104)..(104): Xaa in position 104 is any amino acid
  Variant (106)..(107): Xaa in position 106 to 107 is any amino acid
  Variant (109)..(112): Xaa in position 109 to 112 is any amino acid
  Variant (115)..(115): Xaa in position 115 is any amino acid
  Variant (118)..(118): Xaa in position 118 is any amino acid
  Variant (120)..(120): Xaa in position 120 is any amino acid
  Variant (122)..(129): Xaa in position 122 to 129 is any amino acid
  Variant (132)..(133): Xaa in position 132 to 133 is any amino acid
  Variant (135)..(135): Xaa in position 135 is any amino acid
  Variant (138)..(140): Xaa in position 138 to 140 is any amino acid
  Variant (143)..(143): Xaa in position 143 is any amino acid
  Variant (148)..(149): Xaa in position 148 to 149 is any amino acid
  Variant (152)..(152): Xaa in position 152 is any amino acid
  Variant (154)..(160): Xaa in position 154 to 160 is any amino acid
  Variant (163)..(163): Xaa in position 163 is any amino acid
  Variant (165)..(166): Xaa in position 165 to 166 is any amino acid
  Variant (170)..(170): Xaa in position 170 is any amino acid
  Variant (174)..(175): Xaa in position 174 to 175 is any amino acid
  Variant (177)..(177): Xaa in position 177 is any amino acid
  Variant (179)..(182): Xaa in position 179 to 182 is any amino acid
  Variant (184)..(185): Xaa in position 184 to 185 is any amino acid
  Variant (188)..(188): Xaa in position 188 is any amino acid
  Variant (190)..(192): Xaa in position 190 to 192 is any amino acid
  Variant (195)..(196): Xaa in position 195 to 196 is any amino acid
  Variant (198)..(198): Xaa in position 198 is any amino acid
  Variant (201)..(206): Xaa in position 201 to 206 is any amino acid
  Variant (208)..(215): Xaa in position 208 to 215 is any amino acid
  Variant (217)..(225): Xaa in position 217 to 225 is any amino acid
  Variant (226)..(234): Xaa in position 226 to 234 is any or no amino acid
  Variant (236)..(242): Xaa in position 236 to 242 is any amino acid
  Variant (247)..(248): Xaa in position 247 to 248 is any amino acid
  Variant (251)..(258): Xaa in position 251 to 258 is any amino acid
  Variant (260)..(260): Xaa in position 260 is any amino acid
  Variant (261)..(262): Xaa in position 261 to 262 is any or no amino acid
  Variant (264)..(266): Xaa in position 264 to 266 is any amino acid
  Variant (269)..(269): Xaa in position 269 is any amino acid
  Variant (272)..(276): Xaa in position 272 to 276 is any amino acid
  Variant (278)..(299): Xaa in position 278 to 299 is any amino acid
  Variant (300)..(302): Xaa in position 300 to 302 is any or no amino acid
  Variant (306)..(306): Xaa in position 306 is any amino acid
  Variant (309)..(310): Xaa in position 309 to 310 is any amino acid
  Variant (313)..(313): Xaa in position 313 is any amino acid
  Variant (316)..(316): Xaa in position 316 is any amino acid
  Variant (320)..(322): Xaa in position 320 to 322 is any amino acid
  Variant (324)..(326): Xaa in position 324 to 326 is any amino acid
  Variant (327)..(330): Xaa in position 327 to 330 is any or no amino acid
  Variant (332)..(336): Xaa in position 332 to 336 is any amino acid
  Variant (338)..(338): Xaa in position 338 is any amino acid
  Variant (340)..(340): Xaa in position 340 is any amino acid
  Variant (342)..(344): Xaa in position 342 to 344 is any amino acid
  Variant (346)..(346): Xaa in position 346 is any amino acid
  Variant (351)..(351): Xaa in position 351 is any amino acid
  Variant (353)..(355): Xaa in position 353 to 355 is any amino acid
  Variant (357)..(358): Xaa in position 357 to 358 is any amino acid
  Variant (361)..(361): Xaa in position 361 is any amino acid
  Variant (363)..(369): Xaa in position 363 to 369 is any amino acid
  Variant (371)..(372): Xaa in position 371 to 372 is any amino acid
  Variant (374)..(384): Xaa in position 374 to 384 is any amino acid
  Variant (386)..(421): Xaa in position 386 to 421 is any amino acid
  Variant (422)..(454): Xaa in position 422 to 454 is any or no amino acid
  Variant (457)..(457): Xaa in position 457 is any amino acid
  Variant (459)..(468): Xaa in position 459 to 468 is any amino acid
  Variant (471)..(471): Xaa in position 471 is any amino acid
  Variant (473)..(476): Xaa in position 473 to 476 is any amino acid
  Variant (480)..(489): Xaa in position 480 to 489 is any amino acid
  Variant (490)..(490): Xaa in position 490 is any or no amino acid
  Variant (492)..(492): Xaa in position 492 is any amino acid
  Variant (495)..(500): Xaa in position 495 to 500 is any amino acid
  Variant (502)..(502): Xaa in position 502 is any amino acid
  Variant (504)..(504): Xaa in position 504 is any amino acid
  Variant (506)..(508): Xaa in position 506 to 508 is any amino acid
  Variant (511)..(512): Xaa in position 511 to 512 is any amino acid
  Variant (514)..(514): Xaa in position 514 is any amino acid
  Variant (516)..(518): Xaa in position 516 to 518 is any amino acid
  Variant (520)..(520): Xaa in position 520 is any amino acid
  Variant (522)..(531): Xaa in position 522 to 531 is any amino acid
  Variant (533)..(538): Xaa in position 533 to 538 is any amino acid
  Variant (540)..(548): Xaa in position 540 to 548 is any amino acid
  Variant (550)..(552): Xaa in position 550 to 552 is any amino acid
  Variant (555)..(561): Xaa in position 555 to 561 is any amino acid
  Variant (562)..(562): Xaa in position 562 is any or no amino acid
  Variant (565)..(569): Xaa in position 565 to 569 is any amino acid
  Variant (571)..(571): Xaa in position 571 is any amino acid
  Variant (574)..(576): Xaa in position 574 to 576 is any amino acid
  Variant (578)..(579): Xaa in position 578 to 579 is any amino acid
  Variant (581)..(587): Xaa in position 581 to 587 is any amino acid
  Variant (589)..(600): Xaa in position 589 to 600 is any amino acid
  Variant (601)..(602): Xaa in position 601 to 602 is any or no amino acid
  Variant (604)..(604): Xaa in position 604 is any amino acid
  Variant (606)..(607): Xaa in position 606 to 607 is any amino acid
  Variant (609)..(626): Xaa in position 609 to 626 is any amino acid
  Variant (629)..(635): Xaa in position 629 to 635 is any amino acid
  Variant (641)..(645): Xaa in position 641 to 645 is any amino acid
  Variant (649)..(656): Xaa in position 649 to 656 is any amino acid
  Variant (657)..(659): Xaa in position 657 to 659 is any or no amino acid
  Variant (661)..(671): Xaa in position 661 to 671 is any amino acid
  Variant (675)..(679): Xaa in position 675 to 679 is any amino acid
  Variant (681)..(685): Xaa in position 681 to 685 is any amino acid
  Variant (686)..(688): Xaa in position 686 to 688 is any or no amino acid
PXFXXXXXXXXXXXXXXXXXXXXXXXXXXXXXXXXXXXXXXXXXXXXXXYXXXLXPPFFXXLXXYXXXXXXXXXCPGHXGGXXXXXXPXGXXFXXXXGEXXXRXDXXNXXXXLGXLLXHXGXXXXXXXXAAXXFXADXXXFVXNGTSXXNKXVXXXXXXXGDXVXXDRNXHKSXXHXAXXXXGXXPVXLXXXRNXXGXIGXXXXXXFXXXXXXXXIXXXXXXXXXXXXXXXXXXRXXXXXXXTYDGXXYNXXXXXXXXGXXXDXXXFDXAWXXXXXFXXXXXXXXXXXXXXXXXXXXXXXXXTQSXHKXXAGXSQXSQIXXXDXXXXXXXRXXXXXRXNXAXXXHXSTSPXYXXXAXXDVXAXXXXXXXGXXLXXXXXXXXXXXRXXXXXXXXXXXXXXXXXXXXXXXXXXXXXXXXXXXXXXXXXXXXXXXXXXXXXXXXXXXXXXXXXXXXXWHXFXXXXXXXXXXDPXKXXXXTPGXXXXXXXXXXXGXPAXXXXXXLXEXGXXXEKXXLXSXXXLXTXXXXXXXXXXLXXXXXXFXXXXXXXXXLXXXLPXXXXXXXXRYXXXXXRXLCXXXHXXYXXXXXXXLXXXXXXXXXXXXXXMXPXXAXXXXXXXXXXXXXXXXXXGRXXXXXXXPYPPGXXXXXPGEXXXXXXXXXXXYXXXXXXXXXXXPGFXXXXXGXXXXXXXXG

SEQ ID NO: 9434 - protein, 60 aa, Artificial sequence
  protein pattern
  Variant (2)..(5): Xaa in position 2 to 5 is any amino acid
  Variant (7)..(7): Xaa in position 7 is Glu or Thr
  Variant (9)..(9): Xaa in position 9 is any amino acid
  Variant (10)..(10): Xaa in position 10 is Ala, Leu, Pro or Val
  Variant (11)..(12): Xaa in position 11 to 12 is any amino acid
  Variant (13)..(13): Xaa in position 13 is Ala or Ser
  Variant (14)..(14): Xaa in position 14 is Glu or Gln
  Variant (15)..(16): Xaa in position 15 to 16 is any amino acid
  Variant (19)..(20): Xaa in position 19 to 20 is any amino acid
  Variant (22)..(22): Xaa in position 22 is any amino acid
  Variant (23)..(23): Xaa in position 23 is Ala, Cys or Ser
  Variant (24)..(24): Xaa in position 24 is Asp or Glu
  Variant (25)..(25): Xaa in position 25 is His, Lys or Arg
  Variant (26)..(26): Xaa in position 26 is any amino acid
  Variant (27)..(27): Xaa in position 27 is Phe or Tyr
  Variant (30)..(30): Xaa in position 30 is any amino acid
  Variant (35)..(35): Xaa in position 35 is Ala, Ser or Thr
  Variant (36)..(36): Xaa in position 36 is Ala or Ser
  Variant (39)..(39): Xaa in position 39 is Ile, Met or Val
  Variant (40)..(40): Xaa in position 40 is Ala or Val
  Variant (41)..(42): Xaa in position 41 to 42 is any amino acid
  Variant (43)..(43): Xaa in position 43 is Ala, Gly, Ser or Thr
  Variant (44)..(44): Xaa in position 44 is any amino acid
  Variant (45)..(45): Xaa in position 45 is Leu or Val
  Variant (46)..(46): Xaa in position 46 is Ala, Gly or Thr
  Variant (47)..(47): Xaa in position 47 is any amino acid
  Variant (48)..(48): Xaa in position 48 is Asp, Glu or Gly
  Variant (50)..(50): Xaa in position 50 is Ile, Leu or Val
  Variant (52)..(52): Xaa in position 52 is Leu, Met or Val
  Variant (53)..(53): Xaa in position 53 is Phe or Val
  Variant (57)..(57): Xaa in position 57 is Cys or Asn
  Variant (60)..(60): Xaa in position 60 is Ala or Ser
GXXXXHXGXXXXXXXXAAXXFXXXXXXFVXNGTSXXNKXXXXXXXXXXDXVXXDRNXHKX

SEQ ID NO: 9435 - protein, 27 aa, Artificial sequence
  protein pattern
  Variant (2)..(3): Xaa in position 2 to 3 is any amino acid
  Variant (4)..(5): Xaa in position 4 to 5 is any or no amino acid
  Variant (7)..(7): Xaa in position 7 is any or no amino acid
  Variant (9)..(9): Xaa in position 9 is any amino acid
  Variant (14)..(14): Xaa in position 14 is any amino acid
  Variant (16)..(16): Xaa in position 16 is Ala, Gly, Pro or Ser
  Variant (17)..(17): Xaa in position 17 is Ile or Leu
  Variant (18)..(18): Xaa in position 18 is Phe or Ile
  Variant (20)..(20): Xaa in position 20 is Ala, Ser or Thr
  Variant (21)..(21): Xaa in position 21 is any amino acid
  Variant (23)..(23): Xaa in position 23 is Ile or Val
  Variant (24)..(24): Xaa in position 24 is Ala, Gly or Asn
  Variant (25)..(25): Xaa in position 25 is Ala or Ser
  Variant (26)..(26): Xaa in position 26 is any amino acid
  Variant (27)..(27): Xaa in position 27 is Ile or Met
NXXXXMXHXSTSPXYXXXAXXDXXXXX

SEQ ID NO: 9436 - protein, 59 aa, Artificial sequence
  protein pattern
  Variant (2)..(2): Xaa in position 2 is any or no amino acid
  Variant (5)..(5): Xaa in position 5 is Phe or Tyr
  Variant (6)..(7): Xaa in position 6 to 7 is any amino acid
  Variant (9)..(10): Xaa in position 9 to 10 is any amino acid
  Variant (11)..(11): Xaa in position 11 is His or Tyr
  Variant (12)..(12): Xaa in position 12 is Ala, Thr or Val
  Variant (13)..(13): Xaa in position 13 is Ala, Asp, Glu, Asn, Gln or Ser
  Variant (14)..(14): Xaa in position 14 is any amino acid
  Variant (15)..(15): Xaa in position 15 is Glu, Gly, Asn or Ser
  Variant (16)..(17): Xaa in position 16 to 17 is any amino acid
  Variant (18)..(18): Xaa in position 18 is Ala, Gln, Ser or Thr
  Variant (19)..(19): Xaa in position 19 is Phe or Trp
  Variant (20)..(20): Xaa in position 20 is any amino acid
  Variant (21)..(21): Xaa in position 21 is Cys or Thr
  Variant (25)..(25): Xaa in position 25 is Gly, Gln or Ser
  Variant (26)..(26): Xaa in position 26 is any amino acid
  Variant (28)..(29): Xaa in position 28 to 29 is any amino acid
  Variant (30)..(30): Xaa in position 30 is Phe or Tyr
  Variant (31)..(31): Xaa in position 31 is any amino acid
  Variant (32)..(32): Xaa in position 32 is Lys or Arg
  Variant (33)..(33): Xaa in position 33 is any amino acid
  Variant (35)..(35): Xaa in position 35 is Ala, Ile, Leu or Val
  Variant (37)..(38): Xaa in position 37 to 38 is any amino acid
  Variant (39)..(39): Xaa in position 39 is Phe or Leu
  Variant (40)..(40): Xaa in position 40 is any amino acid
  Variant (41)..(41): Xaa in position 41 is Asp, Glu, Asn or Gln
  Variant (42)..(43): Xaa in position 42 to 43 is Phe or Tyr
  Variant (46)..(47): Xaa in position 46 to 47 is any amino acid
  Variant (48)..(48): Xaa in position 48 is Phe or Leu
  Variant (50)..(50): Xaa in position 50 is Ala or Ser
  Variant (52)..(52): Xaa in position 52 is Ile, Leu, Met or Val
  Variant (53)..(53): Xaa in position 53 is Cys or Ser
  Variant (54)..(54): Xaa in position 54 is Asn or Val
  Variant (55)..(55): Xaa in position 55 is Ala or Ser
  Variant (56)..(56): Xaa in position 56 is Asp or Val
  Variant (57)..(58): Xaa in position 57 to 58 is any amino acid
  Variant (59)..(59): Xaa in position 59 is Leu or Met
PXPFXXXLXXXXXXXXXXXXXPGHXXGXXXXXXPXGXXXXXXXGEXXXRXDXXXXXXXX

SEQ ID NO: 9437 - protein, 24 aa, Artificial sequence
  protein pattern
  Variant (2)..(2): Xaa in position 2 is any amino acid
  Variant (4)..(4): Xaa in position 4 is Thr or Val
  Variant (7)..(8): Xaa in position 7 to 8 is any amino acid
  Variant (10)..(10): Xaa in position 10 is Gly or Ser
  Variant (11)..(11): Xaa in position 11 is Phe, Ile or Leu
  Variant (14)..(14): Xaa in position 14 is Ala or Thr
  Variant (17)..(23): Xaa in position 17 to 23 is any or no amino acid
TXSXHKXXAXXSQXSQXXXXXXXI

SEQ ID NO: 9438 - protein, 32 aa, Artificial sequence
  protein pattern
  Variant (2)..(2): Xaa in position 2 is any amino acid
  Variant (3)..(4): Xaa in position 3 to 4 is any or no amino acid
  Variant (6)..(10): Xaa in position 6 to 10 is any amino acid
  Variant (11)..(11): Xaa in position 11 is any or no amino acid
  Variant (16)..(17): Xaa in position 16 to 17 is any amino acid
  Variant (19)..(19): Xaa in position 19 is Asp or Asn
  Variant (20)..(20): Xaa in position 20 is Ala or Val
  Variant (21)..(21): Xaa in position 21 is Glu, Lys or Arg
  Variant (22)..(22): Xaa in position 22 is any amino acid
  Variant (23)..(23): Xaa in position 23 is Ile, Leu, Met or Val
  Variant (24)..(24): Xaa in position 24 is any amino acid
  Variant (25)..(25): Xaa in position 25 is Ala, Asp, Glu, Asn or Gln
  Variant (26)..(26): Xaa in position 26 is any amino acid
  Variant (27)..(27): Xaa in position 27 is Ile, Leu or Val
  Variant (28)..(28): Xaa in position 28 is Ala, Asp, Gly or Thr
  Variant (29)..(31): Xaa in position 29 to 31 is any amino acid
  Variant (32)..(32): Xaa in position 32 is Asp or Glu
RXXXLXXXXXXTYDGXXYXXXXXXXXXXXXXX

SEQ ID NO: 9439 - protein, 38 aa, Artificial sequence
  protein pattern
  Variant (2)..(2): Xaa in position 2 is Ile or Val
  Variant (5)..(5): Xaa in position 5 is any amino acid
  Variant (6)..(10): Xaa in position 6 to 10 is any or no amino acid
  Variant (12)..(12): Xaa in position 12 is any amino acid
  Variant (14)..(14): Xaa in position 14 is any amino acid
  Variant (15)..(15): Xaa in position 15 is Gly or Asn
  Variant (16)..(16): Xaa in position 16 is Ile, Leu or Val
  Variant (17)..(17): Xaa in position 17 is Ile or Val
  Variant (18)..(18): Xaa in position 18 is Ile, Pro or Val
  Variant (21)..(21): Xaa in position 21 is Cys or Thr
  Variant (22)..(22): Xaa in position 22 is Asp or Gly
  Variant (23)..(24): Xaa in position 23 to 24 is any amino acid
  Variant (25)..(25): Xaa in position 25 is Asn or Ser
  Variant (26)..(26): Xaa in position 26 is Phe, Ile or Leu
  Variant (27)..(27): Xaa in position 27 is Phe or Leu
  Variant (28)..(28): Xaa in position 28 is Phe, Ile or Val
  Variant (29)..(29): Xaa in position 29 is Leu or Met
  Variant (30)..(30): Xaa in position 30 is Phe, Leu or Met
  Variant (31)..(31): Xaa in position 31 is Ser or Thr
  Variant (32)..(32): Xaa in position 32 is any amino acid
  Variant (33)..(33): Xaa in position 33 is Ala or Gly
  Variant (34)..(34): Xaa in position 34 is any amino acid
  Variant (35)..(35): Xaa in position 35 is Asp, Asn, Ser or Thr
  Variant (36)..(36): Xaa in position 36 is any amino acid
  Variant (37)..(37): Xaa in position 37 is Ala, Glu, Gly or Thr
  Variant (38)..(38): Xaa in position 38 is Lys or Arg
GXPAXXXXXXLXEXXXXXEKXXXXXXXXXXXXXXXXXX

SEQ ID NO: 9440 - protein, 45 aa, Artificial sequence
  protein pattern
  Variant (2)..(7): Xaa in position 2 to 7 is any amino acid
  Variant (8)..(14): Xaa in position 8 to 14 is any or no amino acid
  Variant (16)..(16): Xaa in position 16 is Ile or Val
  Variant (17)..(17): Xaa in position 17 is Ala or Thr
  Variant (18)..(18): Xaa in position 18 is Ala, Gly, Ser or Thr
  Variant (19)..(20): Xaa in position 19 to 20 is any amino acid
  Variant (21)..(21): Xaa in position 21 is Ala, Leu or Val
  Variant (22)..(22): Xaa in position 22 is any amino acid
  Variant (28)..(28): Xaa in position 28 is Ile or Val
  Variant (29)..(30): Xaa in position 29 to 30 is any amino acid
  Variant (31)..(31): Xaa in position 31 is Ile, Leu, Met or Val
  Variant (32)..(32): Xaa in position 32 is Ile, Met or Val
  Variant (33)..(33): Xaa in position 33 is Pro or Thr
  Variant (36)..(36): Xaa in position 36 is any amino acid
  Variant (37)..(37): Xaa in position 37 is Phe or Trp
  Variant (38)..(38): Xaa in position 38 is Gly, Asn, Ser or Thr
  Variant (39)..(44): Xaa in position 39 to 44 is any amino acid
  Variant (45)..(45): Xaa in position 45 is Phe, Ile or Leu
RXXXXXXXXXXXXXRXXXXXXXPYPPGXXXXXXGEXXXXXXXXXX

SEQ ID NO: 9441 - protein, 41 aa, Artificial sequence
  protein pattern
  Variant (2)..(6): Xaa in position 2 to 6 is any amino acid
  Variant (7)..(7): Xaa in position 7 is any or no amino acid
  Variant (9)..(9): Xaa in position 9 is Ala, Gly or Thr
  Variant (10)..(10): Xaa in position 10 is any amino acid
  Variant (12)..(12): Xaa in position 12 is Ile, Leu or Val
  Variant (13)..(13): Xaa in position 13 is Phe or Tyr
  Variant (15)..(15): Xaa in position 15 is any amino acid
  Variant (16)..(16): Xaa in position 16 is Ala, Pro or Thr
  Variant (17)..(17): Xaa in position 17 is any amino acid
  Variant (20)..(21): Xaa in position 20 to 21 is any amino acid
  Variant (23)..(23): Xaa in position 23 is any amino acid
  Variant (26)..(26): Xaa in position 26 is Gly or Pro
  Variant (27)..(27): Xaa in position 27 is Ile, Met or Val
  Variant (28)..(31): Xaa in position 28 to 31 is any amino acid
  Variant (33)..(36): Xaa in position 33 to 36 is any amino acid
  Variant (37)..(37): Xaa in position 37 is Ile or Leu
  Variant (38)..(40): Xaa in position 38 to 40 is any amino acid
  Variant (41)..(41): Xaa in position 41 is Ile, Leu or Val
HXXXXXXGXXPXXLXXXRNXXGXIGXXXXXXFXXXXXXXXX

SEQ ID NO: 9442 - protein, 32 aa, Artificial sequence
  protein pattern
  Variant (3)..(3): Xaa in position 3 is any amino acid
  Variant (5)..(5): Xaa in position 5 is any or no amino acid
  Variant (7)..(14): Xaa in position 7 to 14 is any amino acid
  Variant (15)..(15): Xaa in position 15 is any or no amino acid
  Variant (18)..(18): Xaa in position 18 is any amino acid
  Variant (20)..(21): Xaa in position 20 to 21 is any amino acid
  Variant (22)..(22): Xaa in position 22 is Ile, Leu or Val
  Variant (23)..(24): Xaa in position 23 to 24 is any amino acid
  Variant (25)..(25): Xaa in position 25 is Ala or Pro
  Variant (27)..(30): Xaa in position 27 to 30 is any amino acid
  Variant (31)..(31): Xaa in position 31 is any or no amino acid
WHXFXGXXXXXXXXXDPXKXXXXXXGXXXXXG

SEQ ID NO: 9443 - protein, 18 aa, Artificial sequence
  protein pattern
  Variant (3)..(6): Xaa in position 3 to 6 is any amino acid
  Variant (7)..(7): Xaa in position 7 is Ile or Leu
  Variant (8)..(8): Xaa in position 8 is any amino acid
  Variant (9)..(9): Xaa in position 9 is Asp, Glu, Gln or Arg
  Variant (11)..(11): Xaa in position 11 is Cys or Ser
  Variant (12)..(12): Xaa in position 12 is Ala, Asp, Glu, Gly, Gln or Thr
  Variant (13)..(13): Xaa in position 13 is Ala, Asp, Glu or Gln
  Variant (14)..(14): Xaa in position 14 is Ile, Leu, Met or Val
  Variant (16)..(17): Xaa in position 16 to 17 is any amino acid
  Variant (18)..(18): Xaa in position 18 is Phe or Tyr
RYXXXXXXXLXXXXHXXX

SEQ ID NO: 9444 - DNA, 1458 bp, ESCHERICHIA COLI
  CDS (1)..(1458): transl_table=11
atggcgatggagtcatccttacgtattgtcgcgatcaccaactgccccgccgggatcgctcacacctacatggtggcggaagccctggaacagaaagcccgttctctcggtcataccataaaagtggaaactcaagggtccagtggcgttgaaaaccgcttatccagcgaagagattgccgctgccgattacgtcattctcgctaccgggcgtggcctgagcggtgatgatcgcgcgcggtttgccgggaagaaagtttatgagattgccatctcccaggcgttgaaaaatatcgaccagattttcagcgaattaccgacaaactcgcagctttttgccgcagatagcggcgtgaagcttggcaaacaggaagtgcaaagcggtagcgtgatgagccacctgatggcgggcgtctctgcggcgctgccgtttgtcatcggcggtggtatcctggtggcgcttgccaacatgctggtgcagttcggtttgccgtataccgatatgtcgaaaggcgcgccgtcgtttacctgggtagttgaatccatcggttaccttggcttcacctttatgatccccatcatgggcgcttatattgcctcgtcgattgccgataaaccggctttcgctccggcgtttctggtttgctatctggcgaacgacaaagcgctgctcggcacccagtcgggtgcgggattcctcggcgcggtggtgctggggctggcgattggctatttcgtcttctggttccgcaaagtgcgccttggcaaagcattacaaccgctgctcggttcaatgctgatcccgttcgttactctgctggttttcggcgtgctcacttactacgttatcgggccggtgatgtccgacctcatgggcgggctgctccacttcctgaataccattcctccatcaatgaagtttgcggcagcgtttctggtcggtgcgatgctggcgttcgatatgggcggccccatcaataaaaccgcctggttcttctgcttctcactgctggaaaaacacatttatgactggtacgccatcgtcggcgttgtcgcgctgatgccgcccgtcgcggcgggtcttgcgacgttcattgcgcccaaactgtttacccgacaggaaaaagaggctgccagtagtgccattgtggtcggtgccacagtcgcaaccgaaccggctattccttacgctctggcagctccgttgccgatgattaccgccaatacgctggcgggcggcattaccggcgtgctggtgatcgctttcggaatcaaacgtctggcacctggtttgggtatctttgacccgctgatcggcctgatgtcgccggtgggttcgttttatctggtgctggcgattggcctcgcgctgaacatttcattcattatcgtcctgaaaggattgtggttacgccgcaaagcgaaagccgcgcaacaggagcttgtccatgaacattga

SEQ ID NO: 9445 - protein, 485 aa, ESCHERICHIA COLI
MAMESSLRIVAITNCPAGIAHTYMVAEALEQKARSLGHTIKVETQGSSGVENRLSSEEIAAADYVILATGRGLSGDDRARFAGKKVYEIAISQALKNIDQIFSELPTNSQLFAADSGVKLGKQEVQSGSVMSHLMAGVSAALPFVIGGGILVALANMLVQFGLPYTDMSKGAPSFTWVVESIGYLGFTFMIPIMGAYIASSIADKPAFAPAFLVCYLANDKALLGTQSGAGFLGAVVLGLAIGYFVFWFRKVRLGKALQPLLGSMLIPFVTLLVFGVLTYYVIGPVMSDLMGGLLHFLNTIPPSMKFAAAFLVGAMLAFDMGGPINKTAWFFCFSLLEKHIYDWYAIVGVVALMPPVAAGLATFIAPKLFTRQEKEAASSAIVVGATVATEPAIPYALAAPLPMITANTLAGGITGVLVIAFGIKRLAPGLGIFDPLIGLMSPVGSFYLVLAIGLALNISFIIVLKGLWLRRKAKAAQQELVHEH

SEQ ID NO: 9446 - DNA, 1797 bp, Deinococcus radiodurans R1
  CDS (1)..(1797): transl_table=11
atggcaaaacttgtcgccgtcaccgcctgtcccaccggcatcgcccacacctttatggccgccgaggccctgcgccgcgccgcgctcgccgccgggcacgacatccgggtggaaacccagggcagcgtgggcaccgccgacgccctgacgcccagtgaaattgccgccgccgacgccgtgattctggcgaccgacgtgcgggtggacgaggcgcgctttgccggaaaacccgtcgtgcagaccagcacccaggacgccattcggaatgcggcgggcctagtcgcgcaggcgacggcggcgctgggcgcggcggcccccgcagccgcccccgtcagcgacggcaaaaagtacatcgtcggcatcacgtcgtgcccgaccggcatcgcccacaccttcatggccgccgaagggctcgaaggcggcgccaagtcgctcggttacgacgtgaaaatcgagacgcagggcagcgtgggcgccggcaacgcgctgagcgacgacgatgttcgccgcgccgacgtggtggtcatcgccgccgacaccaacgtggacctgagccgctttgccggcaaacgcgtgtaccagaccggcaccaagcccgccatcaaggacggcgcggcggtcgtccgcacggcgctcgccgaggcgccggtgtacggaagcgggtcggcggcgagttcgggcgactacgtggccgacgcggcggcggcgaaagcggccaagaacgcgggcgtgccgagcttctacaagcacctgatgaccggcgtgagccacatgctgcccttcgtggtggcgggcgggctgctcatcgcgctgggcttcgccttcgggtcgtttcagtttggggaccagggcattttcatctacgaggacaagtacgccgggaccatcggcaacctgctgttcaacatcggggcgaacggggcgttcaagctgttcgtgccggtgctggccggctacatcgccttttcgattgccgaccgaccggggctggcgccgggcatggtgggcggcctgatcgccgcgaacaccggcagcggctttctgggcgggatggtcgcgggctttatcgccgggtacttcgtgcgctggctcaaccgcgccctgaagttgccgcgcacgctcgaaggcctcaagcccacgctgctgctgccgctgctcggcaccctggtggtcgggctgctgatgctgacggtggtgggcaagccggtggccgccgccctgaccgccgtgacgaactggctgcaaggcctgggccaggggtcggcggggctgctcggcgccctgctcggcgggatgatggccttcgacatgggtggccccatcaacaaggcggcctacaccttcagcaccggcctgctgacgaacaaggtctacggccccatcgccgccacgatggctgcgggcatgacgcccccgctggcgctgtttttcgccacacaactgttcaagaaccgctttaccaaagatgagcaggaagcgggcaaggcggcaggcgtgctgggcatttcctttatcacggaaggcgccattcccttcgccgcccgtgaccccctgcgcgtgattccggcgctgatggcggggtcggcggtggcgggctttatcagcatggcgaccgggtgcctgctgcgggcgccgcacggcgggattttcgtgctgtttattcccaacgcggtgaccaacctgccgatgtacatcgtggccatcgtggcgggcacggctgtgagcacgctgctgctcgggctgctgaaaaaaccgctggccgtcacgcccgtgccgagcggtgaaggaacactctga

SEQ ID NO: 9447 - protein, 598 aa, Deinococcus radiodurans R1
MAKLVAVTACPTGIAHTFMAAEALRRAALAAGHDIRVETQGSVGTADALTPSEIAAADAVILATDVRVDEARFAGKPVVQTSTQDAIRNAAGLVAQATAALGAAAPAAAPVSDGKKYIVGITSCPTGIAHTFMAAEGLEGGAKSLGYDVKIETQGSVGAGNALSDDDVRRADVVVIAADTNVDLSRFAGKRVYQTGTKPAIKDGAAVVRTALAEAPVYGSGSAASSGDYVADAAAAKAAKNAGVPSFYKHLMTGVSHMLPFVVAGGLLIALGFAFGSFQFGDQGIFIYEDKYAGTIGNLLFNIGANGAFKLFVPVLAGYIAFSIADRPGLAPGMVGGLIAANTGSGFLGGMVAGFIAGYFVRWLNRALKLPRTLEGLKPTLLLPLLGTLVVGLLMLTVVGKPVAAALTAVTNWLQGLGQGSAGLLGALLGGMMAFDMGGPINKAAYTFSTGLLTNKVYGPIAATMAAGMTPPLALFFATQLFKNRFTKDEQEAGKAAGVLGISFITEGAIPFAARDPLRVIPALMAGSAVAGFISMATGCLLRAPHGGIFVLFIPNAVTNLPMYIVAIVAGTAVSTLLLGLLKKPLAVTPVPSGEGTL

SEQ ID NO: 9448 - DNA, 1743 bp, Vibrio cholerae O1 biovar eltor str. N16961; identical to SEQ ID NO: 5509
  CDS (1)..(1743): transl_table=11

SEQ ID NO: 9449 - protein, 580 aa, Vibrio cholerae O1 biovar eltor str. N16961; identical to SEQ ID NO: 5510

SEQ ID NO: 9450 - DNA, 1446 bp, Escherichia coli O157:H7 EDL933
  CDS (1)..(1446): transl_table=11
gtggcgatggagtcatccttacgtattgtcgcgatcaccaactgccccgccgggatcgctcacacctacatggtggcggaagccctggaacagaaagcccgttctctcggccataccattaaagtggaaactcaagggtccagcggcgttgaaaaccgcttatccagcgaagagattgccgctgccgattacgtgattctcgccaccgggcgtggcctgagcggtgacgatcgcgcacggtttgccgggaaaaaagtttatgagattgccatctcccaggcgctgaaaaatatcgatcagattttcagtgaattaccgacaaattcgcagctttttgccgcagatagcggcgtgaagctaggcaaacaggaagtacaaagcggcagcgtgatgagccacctgatggcgggcgtctctgcggcgctgccgtttgtcatcggcggtggtatcctggtggcgcttgccaacatgctggtgcagttcggtttgccgtataccgatatgtcgaaaggcgcgccgtcgtttacctgggtagttgaatccatcggttaccttggcttcacctttatgatccccatcatgggcgcttatattgcctcgtcgattgccgataaaccggctttcgctccggcgtttctggtttgctatctggcgaacgacaaagcgctgctcggcacccagtcgggtgcgggattcctcggcgcggtggtgctggggctggcgattggctatttcgtcttctggttccgtaaagtccgtcttggcaaagcattacaaccgctgctcggctccatgcttatcccattcgttactctgctggtttttggcgtgctcacttactacgttatcgggccggtgatgtccgacctcatgggcgggctactgcacttcctgaataccattcctccatcaatgaagtttgcggcagcgtttctggtcggtgcgatgctggcgttcgatatgggcggccccatcaataaaaccgcctggttcttctgcttctcactgctggaaaaacacatttatgactggtacgccatcgtcggcgttgtccccgtcgcggcgggtcttgcgacgttcattgcgcccaaactgtttacccgacaggaaaaagaggctgccagtagtgccattgtggtcggtgccacagtcgcaaccgaaccggctattccttacgctctggcagctccgttgccgatgattaccgccaatacgctggcgggcggcattaccggcgtgctggtgatcgctttcggaatcaaacgtctggcacctggtttgggtatctttgacccgctgatcggcctgatgtcgccggtaggttcgttttatctggtgctggcgattggcctcgcgctgaacatttcattcattatcgtcctgaaaggattgtggttacgccgcaaagcgaaagccgcgcaacaggagcttgtccatgaacattga

SEQ ID NO: 9451 - protein, 481 aa, Escherichia coli O157:H7 EDL933
MAMESSLRIVAITNCPAGIAHTYMVAEALEQKARSLGHTIKVETQGSSGVENRLSSEEIAAADYVILATGRGLSGDDRARFAGKKVYEIAISQALKNIDQIFSELPTNSQLFAADSGVKLGKQEVQSGSVMSHLMAGVSAALPFVIGGGILVALANMLVQFGLPYTDMSKGAPSFTWVVESIGYLGFTFMIPIMGAYIASSIADKPAFAPAFLVCYLANDKALLGTQSGAGFLGAVVLGLAIGYFVFWFRKVRLGKALQPLLGSMLIPFVTLLVFGVLTYYVIGPVMSDLMGGLLHFLNTIPPSMKFAAAFLVGAMLAFDMGGPINKTAWFFCFSLLEKHIYDWYAIVGVVPVAAGLATFIAPKLFTRQEKEAASSAIVVGATVATEPAIPYALAAPLPMITANTLAGGITGVLVIAFGIKRLAPGLGIFDPLIGLMSPVGSFYLVLAIGLALNISFIIVLKGLWLRRKAKAAQQELVHEH

SEQ ID NO: 9452 - DNA, 1689 bp, Salmonella typhimurium LT2
  CDS (1)..(1689): transl_table=11
atgaaaacgctgctgataattgacgctaatctcggccaggctcgcgcttacatggcgaaaaccctgcttggagcggcggcgcataaagcaaatctggaaattatcgacaatccgaatgatgctgagctggcgatcgtgctgggcgaatctctgccgaacgacaatgctctgaacggcaaaaaggtttggctgggggatattggtcgcgccgtcgcgcatccggaactgtttctgagtgaagccaaaagccatgcgaccccttacagcgcccctgctgcggctgttcctgcggcgagcggcggtccgaaacgcgtggtcgcggtaacggcctgcccgaccggcgtcgcccatacttttatggcggctgaagccattgaaacggaagcgaaaaaacgcggctggtgggtaaaagtcgaaacgcgcggctccgtgggggccggcaatgccatcaccccggaagaggtggcggaagcggatttagtgattgtggcggcggatatcgaagtggatctggcgaagtttgccggtctcccgatgtaccgcacgtcgaccggcctggcgctgaaaaagacggcgcaggagctggataaagccgtagcggaagcgacgccgtatcaaccggcgggtaaggcatcgcaagcggcgaccgaagggaagaaagagagcgctggcgcataccggcatctgttgacgggcgtttcttacatgctgcctatggtggttgccgggggactgtgtattgcgctttccttcgcctttggtattgaagcctttaaggtgccggacacgctggcggcggcgctgatgcagattggcggcggttcggcgtttgcgctgatggtgccggtactggcgggctatatcgctttctccatcgcggatcgcccaggccttacgccaggtctgattggcggtatgctggcggttagcaccggttccggttttatcggcgggatcattgccggcttccttgccgggtatatggcgaagcttatcagtaccaaactgaaacttccgcaaagtatggaagcgctgaagccaatcctgatcatcccgttaatttccagtctggtggtggggctggcgatgatttacctgatcggtaaaccggttgccgggattctggaagggctcacccactggctgcaaaccatggggacggtaaacgcggtgctgctgggcgcgattctcggcgggatgatgtgtaccgacatgggtggcccggtgaacaaagcggcgtatgcgtttggtgttggtctgctgagtacgcaaacttacgcgccgatggcggcgatcatggccgcaggtatggtaccgccgttagcgctgggtctggcgacgatggtggcgcgccgtaagttcgacaaagcgcagcaggaaggcggtaaagcggcgttggtgctggggctgtgctttatcactgaaggcgctattccgtttgcggcacgcgacccgatgcgtgtactgccgtgctgtatcgttggcggcgcgttgaccggggccatttctatggcggtaggcgcaaaattgatggcgccgcatggcggtctgtttgttctgcttatcccaggcgcaattacgccggtattgggatacctgctggcaattgtggccggtacgctggtggcagggctggcttatgccgtcctgaaacgtccggagacggaagtcacggcaaaagcggcataa

SEQ ID NO: 9453 - protein, 562 aa, Salmonella typhimurium LT2
MKTLLIIDANLGQARAYMAKTLLGAAAHKANLEIIDNPNDAELAIVLGESLPNDNALNGKKVWLGDIGRAVAHPELFLSEAKSHATPYSAPAAAVPAASGGPKRVVAVTACPTGVAHTFMAAEAIETEAKKRGWWVKVETRGSVGAGNAITPEEVAEADLVIVAADIEVDLAKFAGLPMYRTSTGLALKKTAQELDKAVAEATPYQPAGKASQAATEGKKESAGAYRHLLTGVSYMLPMVVAGGLCIALSFAFGIEAFKVPDTLAAALMQIGGGSAFALMVPVLAGYIAFSIADRPGLTPGLIGGMLAVSTGSGFIGGIIAGFLAGYMAKLISTKLKLPQSMEALKPILIIPLISSLVVGLAMIYLIGKPVAGILEGLTHWLQTMGTVNAVLLGAILGGMMCTDMGGPVNKAAYAFGVGLLSTQTYAPMAAIMAAGMVPPLALGLATMVARRKFDKAQQEGGKAALVLGLCFITEGAIPFAARDPMRVLPCCIVGGALTGAISMAVGAKLMAPHGGLFVLLIPGAITPVLGYLLAIVAGTLVAGLAYAVLKRPETEVTAKAA

SEQ ID NO: 9454 - DNA, 1899 bp, Listeria monocytogenes EGD-e; identical to SEQ ID NO: 5515
  CDS (1)..(1899): transl_table=11

SEQ ID NO: 9455 - protein, 632 aa, Listeria monocytogenes EGD-e; identical to SEQ ID NO: 5516

SEQ ID NO: 9456 - DNA, 1899 bp, Listeria innocua Clip11262; identical to SEQ ID NO: 5517
  CDS (1)..(1899): transl_table=11

SEQ ID NO: 9457 - protein, 632 aa, Listeria innocua Clip11262; identical to SEQ ID NO: 5518

SEQ ID NO: 9458 - DNA, 2067 bp, Corynebacterium glutamicum ATCC 13032
  CDS (1)..(2067): transl_table=11
atgaatagcgtaaataattcctcgcttgtccggctggatgtcgatttcggcgactccaccacggatgtcatcaacaaccttgccactgttattttcgacgctggccgagcttcctccgccgacgcccttgccaaagacgcgctggatcgtgaagcaaagtccggcaccggcgttcctggtcaagttgctatcccccactgccgttccgaagccgtatctgtccctaccttgggctttgctcgcctgagcaagggtgtggacttcagcggacctgatggcgatgccaacttggtgttcctcattgcagcacctgctggcggcggcaaagagcacctgaagatcctgtccaagcttgctcgctccttggtgaagaaggatttcatcaaggctctgcaggaagccaccaccgagcaggaaatcgtcgacgttgtcgatgccgtgctcaacccagcaccaaaaaccaccgagccagctgcagctccggctgcggcggcggttgctgagagtggggcggcgtcgacaagcgttactcgtatcgtggcaatcaccgcatgcccaaccggtatcgcacacacctacatggctgcggattccctgacgcaaaacgcggaaggccgcgatgatgtggaactcgttgtggagactcagggctcttccgctgtcaccccagtcgatccgaagatcatcgaagctgccgacgccgtcatcttcgccaccgacgtgggagttaaagaccgcgagcgtttcgctggcaagccagtcattgaatccggcgtcaagcgcgcgatcaatgagccagccaagatgatcgacgaggccatcgcagcctccaagaacccaaacgcccgcaaggtttccggttccggtgtcgcggcatctgctgaaaccaccggcgagaagctcggctggggcaagcgcatccagcaggcagtcatgaccggcgtgtcctacatggttccattcgtagctgccggcggcctcctgttggctctcggcttcgcattcggtggatacgacatggcgaacggctggcaagcaatcgccacccagttctctctgaccaacctgccaggcaacaccgtcgatgttgacggcgtggccatgaccttcgagcgttcaggcttcctgttgtacttcggcgcagtcctgttcgccaccggccaagcagccatgggcttcatcgtggcagccctgtctggctacaccgcatacgcacttgctggacgcccaggcatcgcgccgggcttcgtcggtggcgccatctccgtcaccatcggcgctggcttcattggtggtctggttaccggtatcttggctggtctcattgccctgtggattggctcctggaaggtgccacgcgtggtgcagtcactgatgcctgtggtcatcatcccgctacttacctcagtggttgttggtctcgtcatgtacctcctgctgggtcgcccactcgcatccatcatgactggtttgcaggactggctatcgtcaatgtccggaagctccgccatcttgctgggtatcatcttgggcctcatgatgtgtttcgacctcggcggaccagtaaacaaggcagcctacctctttggtaccgcaggcctgtctaccggcgaccaagcttccatggaaatcatggccgcgatcatggcagctggcatggtcccaccaatcgcgttgtccattgctaccctgctgcgcaagaagctgttcaccccagcagagcaagaaaacggcaagtcttcctggctgcttggcctggcattcgtctccgaaggtgccatcccattcgccgcagctgacccattccgtgtgatcccagcaatgatggctggcggtgcaaccactggtgcaatctccatggcactgggcgtcggctctcgggctccacacggcggtatcttcgtggtctgggcaatcgaaccatggtggggctggctcatcgcacttgcagcaggcaccatcgtgtccaccatcgttgtcatcgcactgaagcagttctggccaaacaaggccgtcgctgcagaagtcgcgaagcaagaagcacaacaagcagctgtaaacgcataa

SEQ ID NO: 9459 - protein, 688 aa, Corynebacterium glutamicum ATCC 13032; identical to SEQ ID NO: 5500

SEQ ID NO: 9460 - DNA, 1947 bp, Streptococcus pyogenes MGAS8232; identical to SEQ ID NO: 5523
  CDS (1)..(1947): transl_table=11

SEQ ID NO: 9461 - protein, 648 aa, Streptococcus pyogenes MGAS8232; identical to SEQ ID NO: 5524

SEQ ID NO: 9462 - DNA, 1359 bp, Thermoanaerobacter tengcongensis MB4; identical to SEQ ID NO: 5525
  CDS (1)..(1359): transl_table=11

SEQ ID NO: 9463 - protein, 452 aa, Thermoanaerobacter tengcongensis MB4; identical to SEQ ID NO: 5526

SEQ ID NO: 9464 - DNA, 2100 bp, Streptomyces coelicolor A3(2); identical to SEQ ID NO: 5527
  CDS (1)..(2100): transl_table=11

SEQ ID NO: 9465 - protein, 699 aa, Streptomyces coelicolor A3(2); identical to SEQ ID NO: 5528

SEQ ID NO: 9466 - DNA, 1743 bp, Xanthomonas axonopodis pv. citri str. 306; identical to SEQ ID NO: 5529
  CDS (1)..(1743): transl_table=11

SEQ ID NO: 9467 - protein, 580 aa, Xanthomonas axonopodis pv. citri str. 306; identical to SEQ ID NO: 5530

SEQ ID NO: 9468 - DNA, 1965 bp, Streptococcus agalactiae 2603V/R; identical to SEQ ID NO: 5533
  CDS (1)..(1965): transl_table=11

SEQ ID NO: 9469 - protein, 654 aa, Streptococcus agalactiae 2603V/R; identical to SEQ ID NO: 5534

SEQ ID NO: 9470 - DNA, 1965 bp, Streptococcus agalactiae NEM316; identical to SEQ ID NO: 5535
  CDS (1)..(1965): transl_table=11

SEQ ID NO: 9471 - protein, 654 aa, Streptococcus agalactiae NEM316; identical to SEQ ID NO: 5536

SEQ ID NO: 9472 - DNA, 1743 bp, Pseudomonas putida KT2440
  CDS (1)..(1743): transl_table=11
atgaacattgccatagtcaccgcctgccccaatggccaggtatcgagtgtactgagtgcacgcttgctgtccgccgccgcccagcgtcgcggctggagcaccagcgtcgaagtgcagaatactgaacaccccgagcggcaactgagcgccgcacagatcgccgaggctgactgggtgcttgtggtcagcaccgggccggtggacctggcccgcttcgtcggcaagcgcctgtaccaaagcacaccgtcccaggcgctggctgatcgcgaaggctttctcgacgaagcggcggccaacgccgagctgctggccgcagtgacaggcgcccctgccgcagctagcagtgctggcgctcgcatcgttgccgtcactgcatgcccgaccggcgtagcccataccttcatggccgcagaagccttgcagcaagccgcacagcaactgggctaccagttgaccgtcgagacccagggctcggtcggtgcgcgcaatcccttgtctgctgaagccatcgcagcggcggacgtggtgctgctggccgccgacattgaagtacccactgcacgtttcgccggcaaacgtatttaccgttgtggtactggcattgccctcaagcaggcccgcgctaccctggacaaagccctggcgcaggccacggtggaaaacggtgccgacgctgcagcggcgaccacgccgaccaagagcgagaaaaccggcgtgtacaagcacttgctgaccggcgtctcgttcatgcttccgatggtggtggccggcggcctgctgattgcgttgtcgttcgtgttcggtatcgaggcctacaaagaggcgggcaccttgccggcggcgttgatgcagattggcggtgaggctgccttcaaactgatggttccgctactggcaggctatatcgcctggtctatcgccgaccgccccgggctggccccgggcatgatcggcggcctgttggccagcaccttgggggccggcttcatcggtggcattgtcgccggtttcctcgccggttacagcgccaaggccattgcccgatgggcgcgcttgcccagcagcctggaggcgctcaagccgatccttatcattccattgctggccagtctgttcaccgggctggtgatgatctacgtggttggccagccggtagcggcgatgctcgaaggcctgacgcattttctcgacagcatgggcaccaccaatgccatcctgctggggctgttgctgggcggcatgatgtgcgtcgaccttggcgggccgatcaacaaggccgcctatgcgttctcggtggggctgctggcctcgtcgagctacgcgccaatggcggcgaccatggccgccggcatggtgccgccgattggcttgggtattgccaccttcctggcccggcgcaagttcgcccagagcgagcgcgaggcgggcaaggcggcgctggcgctggggctgtgcttcatctccgagggggcgattccgtttgccgccaaggacccgttacgggtgatcccggccagtatcgccggtggtgcgttgaccggggcattgtcgatgtattttggctgcaagctgatggcgccgcatggcggcttgttcgtgttgttgatccccaacgcgatcaaccatgcgttgctttatctgctggcgattgtggcgggtagcctggtgacagcggtggtgtatgcggttatcaagaagagcgagcgtgtggagttggccgtggcgcctgctaaaagtgtatga

SEQ ID NO: 9473 - protein, 580 aa, Pseudomonas putida KT2440
MNIAIVTACPNGQVSSVLSARLLSAAAQRRGWSTSVEVQNTEHPERQLSAAQIAEADWVLVVSTGPVDLARFVGKRLYQSTPSQALADREGFLDEAAANAELLAAVTGAPAAASSAGARIVAVTACPTGVAHTFMAAEALQQAAQQLGYQLTVETQGSVGARNPLSAEAIAAADVVLLAADIEVPTARFAGKRIYRCGTGIALKQARATLDKALAQATVENGADAAAATTPTKSEKTGVYKHLLTGVSFMLPMVVAGGLLIALSFVFGIEAYKEAGTLPAALMQIGGEAAFKLMVPLLAGYIAWSIADRPGLAPGMIGGLLASTLGAGFIGGIVAGFLAGYSAKAIARWARLPSSLEALKPILIIPLLASLFTGLVMIYVVGQPVAAMLEGLTHFLDSMGTTNAILLGLLLGGMMCVDLGGPINKAAYAFSVGLLASSSYAPMAATMAAGMVPPIGLGIATFLARRKFAQSEREAGKAALALGLCFISEGAIPFAAKDPLRVIPASIAGGALTGALSMYFGCKLMAPHGGLFVLLIPNAINHALLYLLAIVAGSLVTAVVYAVIKKSERVELAVAPAKSV

SEQ ID NO: 9474 - DNA, 1458 bp, Lactobacillus plantarum WCFS1; identical to SEQ ID NO: 5541
  CDS (1)..(1458): transl_table=11

SEQ ID NO: 9475 - protein, 485 aa, Lactobacillus plantarum WCFS1; identical to SEQ ID NO: 5542

SEQ ID NO: 9476 - DNA, 1734 bp, Vibrio parahaemolyticus RIMD 2210633; identical to SEQ ID NO: 5543
  CDS (1)..(1734): transl_table=11

SEQ ID NO: 9477 - protein, 577 aa, Vibrio parahaemolyticus RIMD 2210633; identical to SEQ ID NO: 5544

SEQ ID NO: 9478 - DNA, 1947 bp, Streptococcus pyogenes SSI-1; identical to SEQ ID NO: 5545
  CDS (1)..(1947): transl_table=11

SEQ ID NO: 9479 - protein, 648 aa, Streptococcus pyogenes SSI-1; identical to SEQ ID NO: 5546

SEQ ID NO: 9480 - DNA, 1923 bp, Enterococcus faecalis V583
  CDS (1)..(1923): transl_table=11
gtgaacattaatgatttattaataaaagatgtcatgattatggatttacaagctactgataaaaaaggcgcgattgatgaaatggtccaaaaattatacgatggtggccgcatctctgacattgacacttacaaagaaggaattttaaaacgcgaagcacaaacatcgactggtttaggcgacggcatcgctatgcctcacgcaaaaaatagtgccgtaaaagaaccgacagttctttttgctaaaagtaaaaaaggtgttgattatgaagcactagatggacaacctacttatctattcttcatgattgctgctccagaaggcgccaatgatacacatctccaagcgcttgcggccctttctcgattacttatcgatccagaatttgttggcaaattgaaagaagcggaaactccagaagctgtacaagcacttttccaagcagcggaagatcaaaaagaagcggaagaaaaagcagaacaagaacaaacaacgccagcaccagaaagcaatcgtaaatatattattgctgtgactgcttgtcctacaggaattgctcatacttacatggccgaagatgcgctgaagaaaaaagcaaaagaaatgggcgtagacattaaagtagaaacaaacggttcagaaggaattaaaaatcgtttaactgctgaagatattgctcgtgctgatggcgtgattgtcgcagccgataaaaaagtagaaatgaatcgatttgatggtaaaaaattagtcaatcgtcccgtcagtgatggaattcgtaaaaccgaagaactaattaacttagccattagtggtgaagctcctactttccatggcagtgactcggctgcaagcgaccaagaggattcagcggaaggttcaatcggttctcgtatctataaagatttaatgaatggtgtttctcatatgttacctttcgttattggtggcggaattgccattgctctttcctttatgattgatcaatttatcggggttcctcaagatcaattagccaatttagggaattacaatgacgtagctagctggtttaaccaaattggtggcgcagcatttggctttatgttacctgtcttagctggttttattgcttctagtatcggggatcgtccaggcttagttgctggtttcgcggctggtgcattagcaaacgccggaggagctgggttccttggggccctaatcggtggtttcttagctggttatgtagtggttcttttacgtaaagttttcaaaggcttgccaaaatcattagatggaattaaaaccattttattctatccagtttttggtttgattattacaggcttattaatgttagtcattaacatcccaatgaaagcaattaatgatgcgttaaatcatttcctacttggcttagatggcacaaatgctgctttacttggtgccttattagctggtatgatggccatcgacttaggtggaccagttaacaaagctgcttatgttttcggtacagctacgctagcaagtactgttgcagaaggtggcagcgtggtcatggcttctgtaatggctggcggaatggttcctccattagcaattttcgtagcaactcgtttatttaaaaataaatttacaaaagatcaacaagatgccggcttaaccaatattgtaatgggactttcttttgtcactgaaggggcaattccttttgcagcagctgacccattacgtgtgattccaagtttcgtggtaggttctgcctttactggtgcgttggttggtgcgtttggtatcaaattattggcaccacatggaggaatcttcgtcgtcttcctattaagtaatccattactatatctattgttcatcttaattggggcgattatttcaggaattgtctacggacttttgaaaaaacctgtcgaagtacctgcttaa

SEQ ID NO: 9481 - protein, 640 aa, Enterococcus faecalis V583
MNINDLLIKDVMIMDLQATDKKGAIDEMVQKLYDGGRISDIDTYKEGILKREAQTSTGLGDGIAMPHAKNSAVKEPTVLFAKSKKGVDYEALDGQPTYLFFMIAAPEGANDTHLQALAALSRLLIDPEFVGKLKEAETPEAVQALFQAAEDQKEAEEKAEQEQTTPAPESNRKYIIAVTACPTGIAHTYMAEDALKKKAKEMGVDIKVETNGSEGIKNRLTAEDIARADGVIVAADKKVEMNRFDGKKLVNRPVSDGIRKTEELINLAISGEAPTFHGSDSAASDQEDSAEGSIGSRIYKDLMNGVSHMLPFVIGGGIAIALSFMIDQFIGVPQDQLANLGNYNDVASWFNQIGGAAFGFMLPVLAGFIASSIGDRPGLVAGFAAGALANAGGAGFLGALIGGFLAGYVVVLLRKVFKGLPKSLDGIKTILFYPVFGLIITGLLMLVINIPMKAINDALNHFLLGLDGTNAALLGALLAGMMAIDLGGPVNKAAYVFGTATLASTVAEGGSVVMASVMAGGMVPPLAIFVATRLFKNKFTKDQQDAGLTNIVMGLSFVTEGAIPFAAADPLRVIPSFVVGSAFTGALVGAFGIKLLAPHGGIFVVFLLSNPLLYLLFILIGAIISGIVYGLLKKPVEVPA

SEQ ID NO: 9482 - DNA, 2115 bp, Streptomyces avermitilis MA-4680; identical to SEQ ID NO: 5547
  CDS (1)..(2115): transl_table=11

SEQ ID NO: 9483 - protein, 704 aa, Streptomyces avermitilis MA-4680; identical to SEQ ID NO: 5548

SEQ ID NO: 9484 - DNA, 1665 bp, Chromobacterium violaceum ATCC 12472
  CDS (1)..(1665): transl_table=11
atgagcatcgtcgccatcatccgcgccccggagcgcagcacccaggccaggctggccgccgaagcgctgcgccaggccgcccagcggcagggcaaacggatagacatcgagatagacggccagcccgcgctgggcgctgacatcctgcaggccgccagccagatcctgctggtggactgtcccgacgacgcccgcgccgggcaaaaacccgcgcgccgcgccacgctggacgcggtattggccgatccggccgcgcagctggacggcgccgcggctgccgagcgcgcgctcagcatcgtcgccatcaccggctgccccaccggcatcgcccacaccttcatggcggccgaggggctggtccagggcgccaaggcgctgggccacgcgatgcgggtggaaacccagggctcggtcggcgcgcagaacgcgttgaccgacgccgagatcgccgccgccgacttggtggtgatcgccgccgacacccaggtgcagctggaccgcttcgccggcaaacggctgttcaagagcggcaccaaggccgccatcggcgacggcaaggcgctgatccgccgcgcgatagcggaggcgcagccctggagcggcgcggccgcgcccgccgcccaggccgccggcaaggagaaaaccaaggacggcccctatcgccacctgatgaccggcgtgtccttcatgctgcccttcgtcaccgccggcggcatcctgatcgcgctcgccttcgcgctgggcggcatctacgccttcgacgacgcgcacaagggcacgctggcctggtcgctgttccagatcggcgccaaatcggcattcgcgctgatggtgccgatactggccggctacatcgcctactccgtcgccgaccgccccggcatcgcccccggcatggtgggcggcatgctggccgccagcctgggatcgggcttcctcggcggcatcgtcgccggcttcatcgcaggctacggcacgcgggagctgaaccgccgcatccagctgggccagcatctggacggcctgaagccggtgctgatcctgccggtgctgggctcgctgctgaccggcctcttgatgatctacgtggtgggccagccggtggccgccgtgctggcggcgctgaccgacgcgctgaagggcatgcagggcagcagcgcgctggcattgggcgcgctgctgggcgcgatgatggccttcgacatgggcggcccggtcaacaaggcggcctacgccttcgccaccggcctgatcgccagccaggtctacacgccgatggcggcggtgatggccgccggcatgacgccgccgctgggcatcgcgctggccacccgcctgttccgagaccgcttcaccgtcgacgagcatgaggccggcaaggctgccgccgtgctgggcctggccttcatcagcgaaggcgccatccccttcgccgcgcgcgatcctttccgcgtgattccggcgctgatggccggctcggcgctggccggcgccgtctcgatgaccatgggcgtggaactgaaagtgccgcacggcggcgtgttcgtgctgcccatccccaacgcggtcgaacacctcgccagctacctggcggcgctcgccgccggcaccgccgtcaccgcgctggcgctgggcctgctgaagaagagaatcccccaggcctga

SEQ ID NO: 9485 - protein, 554 aa, Chromobacterium violaceum ATCC 12472
MSIVAIIRAPERSTQARLAAEALRQAAQRQGKRIDIEIDGQPALGADILQAASQILLVDCPDDARAGQKPARRATLDAVLADPAAQLDGAAAAERALSIVAITGCPTGIAHTFMAAEGLVQGAKALGHAMRVETQGSVGAQNALTDAEIAAADLVVIAADTQVQLDRFAGKRLFKSGTKAAIGDGKALIRRAIAEAQPWSGAAAPAAQAAGKEKTKDGPYRHLMTGVSFMLPFVTAGGILIALAFALGGIYAFDDAHKGTLAWSLFQIGAKSAFALMVPILAGYIAYSVADRPGIAPGMVGGMLAASLGSGFLGGIVAGFIAGYGTRELNRRIQLGQHLDGLKPVLILPVLGSLLTGLLMIYVVGQPVAAVLAALTDALKGMQGSSALALGALLGAMMAFDMGGPVNKAAYAFATGLIASQVYTPMAAVMAAGMTPPLGIALATRLFRDRFTVDEHEAGKAAAVLGLAFISEGAIPFAARDPFRVIPALMAGSALAGAVSMTMGVELKVPHGGVFVLPIPNAVEHLASYLAALAAGTAVTALALGLLKKRIPQA

SEQ ID NO: 9486 - DNA, 1947 bp, Streptococcus pyogenes str. Manfredo
  CDS (1)..(1947): transl_table=11
atgaaaattcaagatttattgagaaaagatattatgattctcgatttacaggctatttctaaagaagttgccattgacgagatgattactaaattagttgaaaaagatattgtacatgattttgatgtctttaaaaagagtatcatgacacgtgaagaacaaacatcaacagggcttggtgatgggattgccatgcctcattctaaaaatattgtagtagataaaccagcggtcttgtttgcgaaatcaaataaaggtgtggattataaggctttagatggtcaaccaacggatctcttctttatgattgctgcgcctcaaggagcaaatgatactcacttggctgcgctagcagaattatcacaataccttttgaaagacggctttgctgataaacttcgtgctgcagagacaccagaagcagtcattgctgtttttgatgaagcgtcaacagctaaagaagaagtggttgctccaacaagtggtcaagactttatcgttgctgttacagcttgtccgacaggaattgctcacacttatatggcagaagaggctttgaaaaaacaagctgcagaaatgggagtagctattaaagttgaaacaaacggtgcttctggtgtggctaatcgtttaaccgctgaagatattcagagagctaaaggagttattgttgcagctgataaagcggttgaaatggaccgttttgatggtaaacaattcattgctcgccctgttgcagatggtatcaagaaaagtcaggaattgatttctttgattttgaataatgaaggacacacttaccacgctaagaacagaaagtctgaaacagcagtatcatctgagaaaacaagcttaggcggtgctttctataaacacttgatgggtggtgtctcacaaatgttgccatttgttattggtggcgggattatgattgctctagcatttttattggataacatgcttggtgtgccaaatgatcagcttggaagacttggatcctatcatgaaatagcagctatttttatgaacattggtggagcagccttttccttcatgttaccagtactagcaggttatatcgcttattctattgctgaaaaaccgggcttagtagctggttttgtggcaggtgccattgcctcaaatggtcttgcttttggtaaggtaccatttgcagcaggaggagaagtgagcttgggcttaacgggcgtgccatcaggtttccttggggcgcttgtgggtggtttccttgccggtggtgttattcttgcccttcgtaaattgttggcaggcctaccacgttctctagaaggggttaaatctatcctcctttacccattacttggcgtccttgtcactggtttcttgatgctttttgtcaatattccaatggcagctattaacacagctcttaatgatttcttacaaggtctttcaggaagctctgctgtccttatgggacttcttgttggtggaatgatggctgttgacatgggtggtcctgttaataaggcagcttatgtttttggtacaggaactttagcagctactgtggcaaatggtggttcggtcgttatggccgctgttatggcaggtggtatggtacctcctcttgctgtttttgtagccactctcttgtttaaagataaatttaccaaagaagaacgcgaatcaggtttgaccaacattgtcatgggactttctttcatcactgaaggagcaatcccgtttggcgcagctgacccagcgcgtgcaattcctagctttattgctggttctgccttgacaggagctcttgttggtttggctggcattaaattaatggcgccacatggtggtatcttcgtaatcgctttaacaagcaatccaatcttatatcttgtctttgttgtgattggtgcccttgtatcaggtatcttatttggcgctcttcgcaaaaaagcctaa

SEQ ID NO: 9487 - protein, 648 aa, Streptococcus pyogenes str. Manfredo
MKIQDLLRKDIMILDLQAISKEVAIDEMITKLVEKDIVHDFDVFKKSIMTREEQTSTGLGDGIAMPHSKNIVVDKPAVLFAKSNKGVDYKALDGQPTDLFFMIAAPQGANDTHLAALAELSQYLLKDGFADKLRAAETPEAVIAVFDEASTAKEEVVAPTSGQDFIVAVTACPTGIAHTYMAEEALKKQAAEMGVAIKVETNGASGVANRLTAEDIQRAKGVIVAADKAVEMDRFDGKQFIARPVADGIKKSQELISLILNNEGHTYHAKNRKSETAVSSEKTSLGGAFYKHLMGGVSQMLPFVIGGGIMIALAFLLDNMLGVPNDQLGRLGSYHEIAAIFMNIGGAAFSFMLPVLAGYIAYSIAEKPGLVAGFVAGAIASNGLAFGKVPFAAGGEVSLGLTGVPSGFLGALVGGFLAGGVILALRKLLAGLPRSLEGVKSILLYPLLGVLVTGFLMLFVNIPMAAINTALNDFLQGLSGSSAVLMGLLVGGMMAVDMGGPVNKAAYVFGTGTLAATVANGGSVVMAAVMAGGMVPPLAVFVATLLFKDKFTKEERESGLTNIVMGLSFITEGAIPFGAADPARAIPSFIAGSALTGALVGLAGIKLMAPHGGIFVIALTSNPILYLVFVVIGALVSGILFGALRKKA

SEQ ID NO: 9488 - DNA, 1845 bp, Dichelobacter nodosus VCS1703A
  CDS (1)..(1845): transl_table=11
atgttgttaacagcaaattttgttcgtttgggcgccgcgcccactgataaaactgccgcaatttgtgaagcggcagcaattttggttgaaaatggtgccgtgagtgcggaatacattcaaggaatgcttaatcgtgaagcgcaggaaaacacttatttaggcaacggcgttgctattccgcacggcacgcccgaatcgcgtgaatatattcataaaaccgcggttgccgtattacaaattccgcaaggcattgattgggaagacggcgaacgcgcgcatttaattgtggcaattgctgccagcgatgctgaacatttaacggttttaaaaaaattaagccacgtggttggcgatgaagacgttgccgcgcaattagcacaaaccacgcaagttgatgatattgtgcgcgctttatccgcgctcaacgatgaagaaactgctgaatccgcgccagaatctgctgctaaaggattgattgttggcgtaactgcttgtccaacgggtgttgcgcatacttatatggcgcaagaagctttagaaaaagccgccgaaactttgcattatcactgcaaaattgaaacgcagggtagcgtcggcgttgatcatgctttaacggcggaagaaattgaacgcgccgatgtcgttattattgctgctgataccaacattgatttagatcgttttgcgggtaaaaaaatctataaaacgagtactaaagccgctattaatgatgctgccgccgtgattgcgcaaagttttcaagccggaacttttgccgccggagaacaaaaaattgctgcaaaatcagaacaaaacggtatttataaacatttaatgaccggcgtttcttatatgttgccgtttgtcgttgccggcggattattaattgctttgggctttgccatcggttcattcatgtttggcgcgcagggcatttatatttatcaagagcaatttgctggaactttggggcaaacgttattccaaatcggaaaagatgcttttgctttatttataccaattttaggtggttatatcgcttattctattgccggacgcgcgggcatcgcgccagcaatggtcggcgcttatattgcggcaaataccggcgcgggctttttaggcgcgattattgcgggttttattgccggttattttgtttcctttttagcaaaactgatcaagttgccgcaaactttagaaagtttaaaaccaatgttaattttgccgttaattggcacggcggtgaccggtttattgatgtattacttgattgcgcagccgatggcacaggtgcagcattatatggaaacgtggttaacgtccatgaatgaaaccagcgcgtttgttttaggtgcaactttaggcggcatgatggctttagatatgggcggccctattaataaagcggcttatttattttctacggctttaattgcgtctgaagtttttgcgccgatggcagccacaatggcagctggcatgacgccgccgatggcaattttcttagcaacaatattctttaaaaaccgctttaccgatgaagaacgccaagccggcaaagctacgggcattttaggtttgagttttattacggaaggcgcgattccttttgccgctaaagatcctttgcgcgtgattccagcgttagttatgggatcggcggttgcaggcggtttatcaatggcatttggttgcggattacgcgcgccgcacggtggcgttttcgtgttatttattcccaatgccgtgattcatttaggactttatgctttagccattattttaggaacattggtttccactgttttattgggcgtcttaaaacctaaattaagccattaa

SEQ ID NO: 9489 - protein, 614 aa, Dichelobacter nodosus VCS1703A
MLLTANFVRLGAAPTDKTAAICEAAAILVENGAVSAEYIQGMLNREAQENTYLGNGVAIPHGTPESREYIHKTAVAVLQIPQGIDWEDGERAHLIVAIAASDAEHLTVLKKLSHVVGDEDVAAQLAQTTQVDDIVRALSALNDEETAESAPESAAKGLIVGVTACPTGVAHTYMAQEALEKAAETLHYHCKIETQGSVGVDHALTAEEIERADVVIIAADTNIDLDRFAGKKIYKTSTKAAINDAAAVIAQSFQAGTFAAGEQKIAAKSEQNGIYKHLMTGVSYMLPFVVAGGLLIALGFAIGSFMFGAQGIYIYQEQFAGTLGQTLFQIGKDAFALFIPILGGYIAYSIAGRAGIAPAMVGAYIAANTGAGFLGAIIAGFIAGYFVSFLAKLIKLPQTLESLKPMLILPLIGTAVTGLLMYYLIAQPMAQVQHYMETWLTSMNETSAFVLGATLGGMMALDMGGPINKAAYLFSTALIASEVFAPMAATMAAGMTPPMAIFLATIFFKNRFTDEERQAGKATGILGLSFITEGAIPFAAKDPLRVIPALVMGSAVAGGLSMAFGCGLRAPHGGVFVLFIPNAVIHLGLYALAIILGTLVSTVLLGVLKPKLSH

SEQ ID NO: 9490 - DNA, 1743 bp, Pseudomonas putida GB-1
  CDS (1)..(1743): transl_table=11
atgaacattgccattgtcaccgcctgccccaacggccaggtatcgagtgtgctgagcgcgcgcctgctggctgccgctgcccagcgacgtggttggagcaccagtgtcgaagtgctggatgccgagcaccctgagcggcaactgagtgcggcacagatcgccgaggccgactgggtgctggtggtcagcaccggcccggtggacctggcccgcttcgtcggcaagcgcctatacaagagtacgccgtcccaggccttggctgatcgcgagggcttcctcgacgaagcggccgccaacgcccaactgctgagcgcattgccagacaccccggccgcagctggcagcgccgctgctcgtatcgttgccgtcactgcctgcccgaccggcgttgcgcacaccttcatggctgcagaagctttgcagcaagccgcacagcaactgggataccagctcaccgtcgagacccagggctcggtcggtgcgcgcaacccgttgtccgccgaagccatcgctgcagcagacgtggtgttgctggccgccgacatcgaagtacccaccgcgcgtttcgccggcaagcgtatttaccgctgcggcaccggcatcgccctcaagcaggcccgcgccacgctggacaaagccttggccgaagccaaggtggaaaacagtgcagaggctgcggcggccagcacggcagccaaaggcgagaagagtggggtatacaagcacctgctcactggcgtgtcgttcatgctgccgatggtggtggccggtggcctgctgattgccctgtcgttcgtgttcggcatcgaggcctacaaacagccgggcaccttgccggcggcgttgatgcagattggcggcgaggctgcgttcaagctgatggtgcctttgctggccggttacatcgcctggtccattgccgaccgaccggggttggccccaggcatgatcggcggtttgctggccagcaccctgggggctggtttcattggtggcatcgtcgcgggttttcttgccggttacagcgccaaggccattgcccgttgggcgcgcttgccgagcagcctggaagcgctcaagccgatcttgatcattccgctgctggccagcctgttcaccggcctggtgatgatctacgtggttggccagccggtagcggcgatgctcgaaggccttacgcacttcctcgacagcatgggcaccaccaatgccattctgctggggctgttgctgggcggcatgatgtgcgtcgaccttggcgggccgatcaacaaggccgcctatgcgttctcggtggggctgttggcttcgtcgagctacgcgccgatggcggcgaccatggccgctggcatggtgccgccgatcggcctgggtattgccaccttcctggcccggcgcaagttcgcccagagcgagcgtgaggcgggcaaggcggcactggcgctgggcttgtgctttatctccgagggggctatcccgtttgccgccaaggacccgctgcgggtgatcccggccagtatcgtcggcggtgcgctgaccggtgcattgtcgatgtactttggctgcaagctgatggcaccgcatggcggcttgttcgtgctgttgatccccaatgcgatcaaccatgcgctgctgtacttgctggcgatcgtggcgggcagcctgttgacggcggtggtgtatgcggtgatcaagaagagcgagcaggtggagctggcggtggcgccggttaaaagtgcctga

SEQ ID NO: 9491 - protein, 580 aa, Pseudomonas putida GB-1
MNIAIVTACPNGQVSSVLSARLLAAAAQRRGWSTSVEVLDAEHPERQLSAAQIAEADWVLVVSTGPVDLARFVGKRLYKSTPSQALADREGFLDEAAANAQLLSALPDTPAAAGSAAARIVAVTACPTGVAHTFMAAEALQQAAQQLGYQLTVETQGSVGARNPLSAEAIAAADVVLLAADIEVPTARFAGKRIYRCGTGIALKQARATLDKALAEAKVENSAEAAAASTAAKGEKSGVYKHLLTGVSFMLPMVVAGGLLIALSFVFGIEAYKQPGTLPAALMQIGGEAAFKLMVPLLAGYIAWSIADRPGLAPGMIGGLLASTLGAGFIGGIVAGFLAGYSAKAIARWARLPSSLEALKPILIIPLLASLFTGLVMIYVVGQPVAAMLEGLTHFLDSMGTTNAILLGLLLGGMMCVDLGGPINKAAYAFSVGLLASSSYAPMAATMAAGMVPPIGLGIATFLARRKFAQSEREAGKAALALGLCFISEGAIPFAAKDPLRVIPASIVGGALTGALSMYFGCKLMAPHGGLFVLLIPNAINHALLYLLAIVAGSLLTAVVYAVIKKSEQVELAVAPVKSA

SEQ ID NO: 9492 - DNA, 1899 bp, Listeria monocytogenes str. 4b F2365; identical to SEQ ID NO: 5553
  CDS (1)..(1899): transl_table=11

SEQ ID NO: 9493 - protein, 632 aa, Listeria monocytogenes str. 4b F2365; identical to SEQ ID NO: 5554

SEQ ID NO: 9494 - DNA, 1953 bp, Staphylococcus aureus subsp. aureus MSSA476; identical to SEQ ID NO: 5531
  CDS (1)..(1953): transl_table=11

SEQ ID NO: 9495 - protein, 650 aa, Staphylococcus aureus subsp. aureus MSSA476; identical to SEQ ID NO: 5532

SEQ ID NO: 9496 - DNA, 1728 bp, Acinetobacter sp. ADP1; identical to SEQ ID NO: 5557
  CDS (1)..(1728): transl_table=11

SEQ ID NO: 9497 - protein, 575 aa, Acinetobacter sp. ADP1; identical to SEQ ID NO: 5558

SEQ ID NO: 9498 - DNA, 2013 bp, Propionibacterium acnes KPA171202
  CDS (1)..(2013): transl_table=11
atgagcactcctctcattaccccggaattagtatctcttgacgccaacctcggctcgaccaaaaccgaggtcatcacctcagtcgccggactcattgctgccgctggacgcgccgatgctgacggcctcgcccacgacgctctggaccgcgagtccaaaagcccgaccggtatgcccggcggattcgccatcccccactgccgctcagccgcggtatctcaggtatccctggggttcgcccggctatcgcccgctgtcgacttcaatggacctgacggcccggccgacctcatctttatgatcgcggcctccgaagacggcggcgcggaccatatgaaacttctgaccaagctggctcgcgccctcgtcaatcctgagttcgtcgagcagttgcgtcaggcccccgacgcgcaaaccgtcgtcgacctcatcggtggggtcgtcgagccgaaggaagaagcctcgacctcatctgcaacggccctccccgctcctgggcacgccgcggtgaccaatgccgcctccgatacgccccgcatcgtcgccattacggcctgtcccaccggcatcgcccacacttacatggcagccgactatttgagggctgctgggaagaagctgggtgttgacgtcaaggtcgagccccaagggtccaccgccaccgagcctctcagcaccgacgacatcgagggtgctgacgctgtcattttcgccaccgacgttggtgtcaagggccgggagcgcttcgccggaaagccagtcattgagtccggggtgaagcgggccgtcgacgagcctgagaagatgatttcggaggccgtcgccgcctccaaagacccacacgcccatcgggtccccgctggccatggtgaacagcaggagcccgagcaggctggatctcacattggctggggcaagcgcatccagcaggccctcatgacgggcgtgtcctacatgattccgttcgtcgccgcaggtggtctgctcatcgccctgggattcctcttcggcgggtatgagattgccaaggacggcatggatattgccttgcacaacaccttcagcaacctgccgacgccaaccgcccatgctctaggcggatcagccaccatgacctacatcggcgcggtccttttcgcggtcggacaagcggctttcggcttcttgctacctgccctcgctgggtatatcggcttcggcctggcagaccgccccggcatcgcccccggtttcgtagcgggtgccgtcgctggggtgaccggggcgggattcatcggtgccatcatcggtggtctgctcggcggtttcgtcgcctactggttcacccgtctcaacccgccgcgctggctgcgtggcctcatgccggtcgtcatcatcccgctcgtcgggtccctggtcgccggtgggttgatgtacgtcgtactgggacgtccgctggcagccttgacgaacgctctcaacaactggctaggcggcatgagcggcgcctcggccgtcatcctcggaatcgtcctgggactcatgatgtgctctgacctgggcggccccatcaacaaggcggcttacctcttcgcgacaacgaacctcgcggtcaccaacgtcggatccctcaaagtgatggccgccgtcatggctgccgggatggttcccccgctggccatggcgctatcgacgaccctgcgtccgaagctctaccagcctgccgagcgtgaaaacggcactgctgcctggctgctgggagcctccttcatctccgagggcgctatcccgttcgcagctgcggatccgctacgagtgattccctcaatgatggtcggaggcgcaatcaccggtgccctgtcaatggctctgggggccgcttctaaagctccccatggcggaatcttcgtcttctttgccattgatcgggtctgggccttcatcctggccattgtcgtcggcaccctcgtggcagccttgctcgtaaccgctctcaaagcctcagctcggcgcaaggccgcggctgccgcgtaa

SEQ ID NO: 9499 - protein, 670 aa, Propionibacterium acnes KPA171202
MSTPLITPELVSLDANLGSTKTEVITSVAGLIAAAGRADADGLAHDALDRESKSPTGMPGGFAIPHCRSAAVSQVSLGFARLSPAVDFNGPDGPADLIFMIAASEDGGADHMKLLTKLARALVNPEFVEQLRQAPDAQTVVDLIGGVVEPKEEASTSSATALPAPGHAAVTNAASDTPRIVAITACPTGIAHTYMAADYLRAAGKKLGVDVKVEPQGSTATEPLSTDDIEGADAVIFATDVGVKGRERFAGKPVIESGVKRAVDEPEKMISEAVAASKDPHAHRVPAGHGEQQEPEQAGSHIGWGKRIQQALMTGVSYMIPFVAAGGLLIALGFLFGGYEIAKDGMDIALHNTFSNLPTPTAHALGGSATMTYIGAVLFAVGQAAFGFLLPALAGYIGFGLADRPGIAPGFVAGAVAGVTGAGFIGAIIGGLLGGFVAYWFTRLNPPRWLRGLMPVVIIPLVGSLVAGGLMYVVLGRPLAALTNALNNWLGGMSGASAVILGIVLGLMMCSDLGGPINKAAYLFATTNLAVTNVGSLKVMAAVMAAGMVPPLAMALSTTLRPKLYQPAERENGTAAWLLGASFISEGAIPFAAADPLRVIPSMMVGGAITGALSMALGAASKAPHGGIFVFFAIDRVWAFILAIVVGTLVAALLVTALKASARRKAAAAA

SEQ ID NO: 9500 - DNA, 1560 bp, Propionibacterium acnes KPA171202; identical to SEQ ID NO: 5559
  CDS (1)..(1560): transl_table=11

SEQ ID NO: 9501 - protein, 519 aa, Propionibacterium acnes KPA171202; identical to SEQ ID NO: 5560

SEQ ID NO: 9502 - DNA, 1947 bp, Streptococcus pyogenes MGAS10394; identical to SEQ ID NO: 5561
  CDS (1)..(1947): transl_table=11

SEQ ID NO: 9503 - protein, 648 aa, Streptococcus pyogenes MGAS10394; identical to SEQ ID NO: 5562

SEQ ID NO: 9504 - DNA, 1374 bp, Symbiobacterium thermophilum IAM 14863; identical to SEQ ID NO: 5563
  CDS (1)..(1374): transl_table=11

SEQ ID NO: 9505 - protein, 457 aa, Symbiobacterium thermophilum IAM 14863; identical to SEQ ID NO: 5564

SEQ ID NO: 9506 - DNA, 1746 bp, Rhodobacter sphaeroides 2.4.1
  CDS (1)..(1746): transl_table=11
atgacaggcatcgtcgccgtcatttcgacggggagcttcgggccccatgcggccctcgcgcgcgaggccttgcgcaaggccgcgcaggggctgggccgcgccatcgcggtcgagctgcgcacgcaggagaccgtgaccgacgcgctgccgcccgaggcggtgagcggcgcaagtcaggtgctgctcgtgaccgagcccggcggagccgcggccgacgaggcccgcttcgccggccgccccacgatccatgcgacgttggccgaggtgctggaagatgcgccgggcgtgctggcccgcaccggatccggcgccgccgcggctccggccgcggatcctgccgcggccgagggcgcgctgaagatcgtggccatcacctcctgccccaccggcatcgcccataccttcatggcggccgaggggctcgtcgagggcgccagcgcgcagggtcaccagatccgggtcgagacccagggctctgtcggcgcgcaggacgaactgaccgcggccgagattgcggcggccgatctcgtcatcatcgcggccgacaagcaggtggatctcgggcgtttcggcggcaagcgcctgttcctctcgcccaccaagcccgcgatcaccgacggcgcgggcctgatccgcaaggcgcaggccgaggcgcggatgcaggccggatcggcctcctccgaggccgcgcagcccgaggccaagaaggtcggcgtctacaagcacctgatgacgggcgtctccttcatgctgcccttcgtggtggcgggcgggcttctcatcgccatcgccttcgctctgggcgggatctacgtctatgaggaccagtatgccggcacgctcggccatacgctgttccagatcggcgcgaagggggccttcacgctgatggtgccggcgctggcgggctacatcgcctggtccatcgccgaccggcccggcctcgcccccggcatgaccggcggcgtcatcgcgggcaccatcggcgcgggcttcctcggcgggatcgtcgcgggcttcatcgcgggctacggcgtcctctggctcaaccgcgcgatcaagctgccgaagaccctgcaggggctgaagcccgtgctgatcctgccgcttctcggcacggcgctgaccgggcttctgatgtattatgtcgtgggcgagcccacggcgcggctgctggccaccatcaccgccttcctgcaggggatgcagggcacgtcggccgcccttctggggctgctcctcggcggcatgatggcggtggacatgggcgggcccgtcaacaaggcggcctatgccttcgccaccacgctcatcgcggccaatgtgctggagccgatggcggccgtcatgtgcgcgggcatggtgccgcccatcgcgctcgcggtggcgtgccggcttctgcccgcccgcttcaccccggaagagcgcgaggccggcaatgcggccttcgtgctgggcctcgccttcgtcaccgagggcgcgatccccttcgcggcgcgcgatccgctgcgggtgatcccgagccttatcgcgggctcggcggtggcgggggcgatctgcatggcgctcggcgtggcgcagcgcgtgccgcacggcgggatcttcgtcctgccgatccccaatgccgtgacgaacctcacgggcttcgggatcgccctcgtggcgggcacggcggtctcggttctcgcgctggcgctggtcaagcggcggatcgtggtgcccgccgcggtgccctcggccgtctga

SEQ ID NO: 9507 - protein, 581 aa, Rhodobacter sphaeroides 2.4.1
MTGIVAVISTGSFGPHAALAREALRKAAQGLGRAIAVELRTQETVTDALPPEAVSGASQVLLVTEPGGAAADEARFAGRPTIHATLAEVLEDAPGVLARTGSGAAAAPAADPAAAEGALKIVAITSCPTGIAHTFMAAEGLVEGASAQGHQIRVETQGSVGAQDELTAAEIAAADLVIIAADKQVDLGRFGGKRLFLSPTKPAITDGAGLIRKAQAEARMQAGSASSEAAQPEAKKVGVYKHLMTGVSFMLPFVVAGGLLIAIAFALGGIYVYEDQYAGTLGHTLFQIGAKGAFTLMVPALAGYIAWSIADRPGLAPGMTGGVIAGTIGAGFLGGIVAGFIAGYGVLWLNRAIKLPKTLQGLKPVLILPLLGTALTGLLMYYVVGEPTARLLATITAFLQGMQGTSAALLGLLLGGMMAVDMGGPVNKAAYAFATTLIAANVLEPMAAVMCAGMVPPIALAVACRLLPARFTPEEREAGNAAFVLGLAFVTEGAIPFAARDPLRVIPSLIAGSAVAGAICMALGVAQRVPHGGIFVLPIPNAVTNLTGFGIALVAGTAVSVLALALVKRRIVVPAAVPSAV

SEQ ID NO: 9508 - DNA, 1389 bp, Moorella thermoacetica ATCC 39073; identical to SEQ ID NO: 5567
  CDS (1)..(1389): transl_table=11

SEQ ID NO: 9509 - protein, 462 aa, Moorella thermoacetica ATCC 39073; identical to SEQ ID NO: 5568

SEQ ID NO: 9510 - DNA, 1953 bp, Staphylococcus aureus subsp. aureus NCTC 8325; identical to SEQ ID NO: 5569
  CDS (1)..(1953): transl_table=11

SEQ ID NO: 9511 - protein, 650 aa, Staphylococcus aureus subsp. aureus NCTC 8325; identical to SEQ ID NO: 5570

SEQ ID NO: 9512 - DNA, 1758 bp, Pseudomonas aeruginosa UCBPP-PA14
  CDS (1)..(1758): transl_table=11
atgaaactagcgatcgtcaccgcctgccctggcggacaggtcaccagcgtgctcgccgcgcgcctgctgcggggcgccgccgagcgcctgggctgggaaacctgcgtcgaggcgaatgccgggtcgaggcccgagggcgaactgagcgccgaacagatcgccgaagccgactgggtcctgctggtcggcgtcgagccgctggcggcggcgcgtttcgtcggcaagccggtgtatcgcgcgcgtcccgccgaggcgctggccgatccgcgcgccttcctccagcgggccgccgccctggcgagtgtggaggtcgccggggacgaggccggcctggttgcgccggaggccggagcggcaccgcggatcgtcgcggtgaccgcctgtccgaccggcgtggcgcataccttcatggccgccgaggcgttgcagctcgcggcggggcaactgggcttcgcgttgcaggtcgagacccagggctcggtcggcgcgcgcaacccgctcgacccggcggacatcgccgccgccgacgtggtcctgctggccgccgacatcgacgtggacacggcccgtttcgccggcaagaagatctaccgttgcggcaccggcgtggccctcaagcaggcccgcgcgacgctcgagcgggcgctggcggaagggcaggtcgagagcgcgggcgcagccagcgcggtggtcgccagggacgagaagcgcggggtgtacaagcacctgctgaccggggtgtcgttcatgttgccgatggtggtcgcgggcggcctgctgatcgccctgtcgctggccttcggcatcgatgcctacaagcagccgggcagcctggcggcggtgctgaggacggtcggcgacacggctttcgtcctgatggtgccgatgctcgccggctacatcgcctattccatcgccgaccgcccgggcctggcgccgggcatgctcggcggcctgctcgccgggaccctcggcgccgggttcatcggcgggatagtcgccggcttcatcgccggctatgcggcgcgggccatcagccacgggctgaggctgccggcgagcctggaagcgctgaagccgatcctggtcatcccgttgctggccagcctggtcaccggcctgctgatgctctacgtggtcggcaagccggtggccgggatgctcgcggcactgaccgggttcctcgacggcatgggtacctccaatgccatcctcctcggcctgctgctcggcgggatgatgtgcgtcgacctcggcggaccggtcaacaaggccgcctacgccttttccgtcggcctgctctcgtcgcacagctacgcgccgatggcggcggtgatggcggcgggcatggtgccgccgatcggcatgggcctggcgaccctgctggcgcggcgcaagttcgccgagagcgagcggcaggccggcaaggcagcctcggtgctggggctgtgcttcatctccgaaggcgcgatcccgttcgccgccaaggacccgttgcgggtgatcccggcgagcatcgccggcggcgcgctgaccggcgccctgtcgatgtatttcggctgcaagttgcaggcgcctcacggcgggttgttcgtgatgctggtgcccaacgcgatcaaccacgccctggcgtacctgctggcgatcgtcgccggcagcctgcttaccgggctgctctacgccgtgctcaagcgcggcgccgagccgggactggcgttggggacctcgtcctcgcgggagccggcggctggcggatag

SEQ ID NO: 9513 - protein, 585 aa, Pseudomonas aeruginosa UCBPP-PA14; identical to SEQ ID NO: 5502

SEQ ID NO: 9514 - DNA, 2016 bp, Mycobacterium smegmatis str. MC2 155
  CDS (1)..(2016): transl_table=11
atgacccaaccgatcatcaccgacgatctggtcctgctcgatgtcgatgccggcagcgacaaggaggcggtcatcgcccggctggccggcgccctcggcggtgcgggccgcgcaagtgacaccgcgggcctggtgggtgcggcgatggcccgcgaggcacagtcggcgaccgggttgcccggcggcatcgcgataccgcactgccgctccccgtacgtcgacaccgcgaccatcggattcgcccggctcgacccgaaggtcgacttcggcgcccctgacggcccggccgatctcgcgttcctgatcgccgcgccggaatccggtgggtccgagcacatgaagctgctctccagcctggcccgggcgttggtgcgcaaggatttcgtcgaatccctgcgctcggcgtccagcacccaggaggtcgtggaactggtgaactcggcggtcaagcccgccgccgcaccgcctgcgtccgcgccgaagcctgctgccgagccgaagcctgctgccgacaagagcgtgtcgatagtcgccgtcacctcgtgtcccaccgggatcgcgcacacctacatggccgccgacgcgctcaaggctgccgccgagaaggccggcgtggcgtgcaccgtcgaaacccagggctcggcgggcagcaccccgctgtcggcagagaccatcgccgcggccgatgcggtcatcttcgccaccgatgtcggcgtcaaggaccggcagcgtttcgcgggtaaacccgtcatcgcctcgggcgtcaaacgcgcgatcaacgagcccgacaagatggtggccgaagccatcagcgccgcaagcgatcccggcgcgccttgggtcgccgggcaggccgccgagtccgcttccgcgcccgcgggtgacgtcggatggggcacccgcatccggcagatcctgctcaccggcgtgagctacatgatcccgttcgtcgccgcgggcggtctgctgatcgcactcggattcctgttggcgggctacgagatcgggaacacccccgacggcgagacgcagtcgctgggcaacatcatcgccacgcacaactcgctgaccaacctgcccagcggcggagtggcgcagtacctcggggcggtgctgttcacgctcggcgggctggccttttccttcctggtgcccgcgctggccggctacatcgcgttcgcgatcgccgaccggcccggtatcgcaccgggtttcaccgccggtgcggtcgcggtgttcgtcggcggcggattcatcggcggcatcgtcggcggcctgatcgccgggttcgccgcgctgtggatcagccggatcggggtgccgcagtgggcacgtgggctcatgcccgtcgtcgtgatcccgctgttcgcctcgatggtcgtcgggctgctgatgttcctgctcctgggacggccactcgctgcgctgacctcgggcctgaccaactggctcggtggtctgtctggcggttcggcgatcgcgctgggcgtcatcctcggcctgatgatgtgcttcgacctgggcggcccggtcaacaaggcggcctacgcattcgccaccgcgagcctggtcaatcccacccaggccaacctgcagatcatggccgccgtgatggccgcgggcatggtgccaccgctggccatggcgctggccaccgtgatccggccgcggttgttcagcgagcccgagcgggagaacggacgcgcggcgtggttgctgggcgcgtcgttcatcaccgaaggtgcgatcccgttcgcggcggccgacccgctgcgcgtgatcccgtcgatgatggtgggcggggccgtgaccggcgctaccgtcatggccgcggccgtcacgttacgtgcgccccacgggggcatcttcgtgttcttcgcgatcggcaacctgctgtggttcgtcatcgcggtcgcactcggcaccgtcgtcagcgcgctgacggtcatcgccgccaagcagttcaccaaacgtcccgtcaccgcgccggaggcaccggcgctggccaccacctaa

SEQ ID NO: 9515 - protein, 671 aa, Mycobacterium smegmatis str. MC2 155
MTQPIITDDLVLLDVDAGSDKEAVIARLAGALGGAGRASDTAGLVGAAMAREAQSATGLPGGIAIPHCRSPYVDTATIGFARLDPKVDFGAPDGPADLAFLIAAPESGGSEHMKLLSSLARALVRKDFVESLRSASSTQEVVELVNSAVKPAAAPPASAPKPAAEPKPAADKSVSIVAVTSCPTGIAHTYMAADALKAAAEKAGVACTVETQGSAGSTPLSAETIAAADAVIFATDVGVKDRQRFAGKPVIASGVKRAINEPDKMVAEAISAASDPGAPWVAGQAAESASAPAGDVGWGTRIRQILLTGVSYMIPFVAAGGLLIALGFLLAGYEIGNTPDGETQSLGNIIATHNSLTNLPSGGVAQYLGAVLFTLGGLAFSFLVPALAGYIAFAIADRPGIAPGFTAGAVAVFVGGGFIGGIVGGLIAGFAALWISRIGVPQWARGLMPVVVIPLFASMVVGLLMFLLLGRPLAALTSGLTNWLGGLSGGSAIALGVILGLMMCFDLGGPVNKAAYAFATASLVNPTQANLQIMAAVMAAGMVPPLAMALATVIRPRLFSEPERENGRAAWLLGASFITEGAIPFAAADPLRVIPSMMVGGAVTGATVMAAAVTLRAPHGGIFVFFAIGNLLWFVIAVALGTVVSALTVIAAKQFTKRPVTAPEAPALATT

SEQ ID NO: 9516 - DNA, 2049 bp, Nocardioides sp. JS614
  CDS (1)..(2049): transl_table=11
atgtccgacctcatcaacgccgagctcgtccgcctcgatgcggacctcggcgccgacaagcacaccgtgatccgggcgctggcccggatcgtcggcgacgccggccgcgccggcgacgccgaccagctcgtggcggacgcgttcgcccgtgaggcgacgtccgccaccggcctcccgggcgggatcgcgatcccgcactgccgcacggccggcgtcgcggagcccgtcctggccttcgcacggctccagcccgccgtggacttcggtgccaaagacggcccggctgacctggtgttcctgatcgccgcacccaccggcggtgacaacacccacctccagctgctcaccaagctcgcccgtgccctggtgaagcccgccttcaccgactcgctgcgcgcggccgggaccccggcagaggtggccgagctggtcaccggcgcgatcggcgctgccccgcagccggcagccccggcagccccggccgcctcggccgcgccgcggcggctggtcgcggtcaccgcgtgcccgaccgggatcgcccacacctacatggccgccgaggcgctcgaggccgccgcagcacgggccggggtggacctgcaggtcgagacccagggctcagccggcgcgacgccgctggacccggccacgatcgccgcggccgacgccgtcatcttcgccgtcgacgtcggcgtgcgcgaccgacaccgcttcgccggcaagcccctggtctcctcgggggtcaagcgccccttcgaccaggccgacgcgatgatcgccgaggccctccggtacgccgacgacccggacgccccgcgcgtcgagggcagcgcggccgacgccgcgacgacgtctcgctcgaccgccggcgagagctggggcgcccggacccgccgggtgctgatgaccggtgtgtcgtacatgatcccgttcgtcgcggccgggggtctgctcatcgccctgtcgttcctgctcggcggctacgagatcgtcgggccctacggcgacatcgccgtgaacaacacgctcttcgacctgccggatcccgacgccctcgggctcgagcacgcgctcctgggctccgggctcgcggcctacatcggcgcgctgttcttcatcatcggcaagacggccttcatgctcttcatcccggcgctcgccggctacatcgcgtacgcgatcgccgaccggcccggcatcgcgcccggcttcgtgatgggcggtctggcggcgaacatcttcaacgtgcagagctcgggtgacagccccgtctcgattccggcgaccgggttcttgggcgcgatcatcggcggtgtgctggccggcctgatcgcgcactgggtcggcggccggcaggtccccgcctggatgcgcggtctgatgccggtgctgatcatcccgctggtcacctcgatcgtcgccggcctgttgatgatcgtggtgttcggcaagccgatcggctggctgatggaccagctgaacgacggcctgaactcgctcagcggcagcagcgcgatggtgctcggcgccatcctcggcctgatgatggccttcgacatgggcggtccgctcaacaaggtggcctacaccttcgccgccaccggcgtcggcggggcagcgctcgcgagcgacgcgccgcagctgaagatcatggctgccgtgatgctcgccggcatggtcccgccgttggcgctggccctggccaccgtcgtccgccccgggctgttcaaccaggccgagcgcgagaacggcaaggcggcctgggccctgggcgcgagcttcatcaccgagggcgcgatccccttcgccgcggcggacccgctccgcgtcatcccggccatcatgtgcggcagcgccgtcaccggcggcatctcgatggccctcgacgtcggggtgcgcgcgccgcacggcgggatcttcgtgctcttcgccgtcagcaacatcctgggctacctgatcgcgctcgcggtgggcaccctcgtcggcgccgcggccgtcatcggcctgaagtccctcggcaagcccgaccccgacctcgccatcggctga

SEQ ID NO: 9517 - protein, 682 aa, Nocardioides sp. JS614
MSDLINAELVRLDADLGADKHTVIRALARIVGDAGRAGDADQLVADAFAREATSATGLPGGIAIPHCRTAGVAEPVLAFARLQPAVDFGAKDGPADLVFLIAAPTGGDNTHLQLLTKLARALVKPAFTDSLRAAGTPAEVAELVTGAIGAAPQPAAPAAPAASAAPRRLVAVTACPTGIAHTYMAAEALEAAAARAGVDLQVETQGSAGATPLDPATIAAADAVIFAVDVGVRDRHRFAGKPLVSSGVKRPFDQADAMIAEALRYADDPDAPRVEGSAADAATTSRSTAGESWGARTRRVLMTGVSYMIPFVAAGGLLIALSFLLGGYEIVGPYGDIAVNNTLFDLPDPDALGLEHALLGSGLAAYIGALFFIIGKTAFMLFIPALAGYIAYAIADRPGIAPGFVMGGLAANIFNVQSSGDSPVSIPATGFLGAIIGGVLAGLIAHWVGGRQVPAWMRGLMPVLIIPLVTSIVAGLLMIVVFGKPIGWLMDQLNDGLNSLSGSSAMVLGAILGLMMAFDMGGPLNKVAYTFAATGVGGAALASDAPQLKIMAAVMLAGMVPPLALALATVVRPGLFNQAERENGKAAWALGASFITEGAIPFAAADPLRVIPAIMCGSAVTGGISMALDVGVRAPHGGIFVLFAVSNILGYLIALAVGTLVGAAAVIGLKSLGKPDPDLAIG

SEQ ID NO: 9518 - DNA, 1935 bp, Exiguobacterium sibiricum 255-15; identical to SEQ ID NO: 5573
  CDS (1)..(1935): transl_table=11

SEQ ID NO: 9519 - protein, 644 aa, Exiguobacterium sibiricum 255-15; identical to SEQ ID NO: 5574

SEQ ID NO: 9520 - DNA, 1839 bp, Corynebacterium glutamicum
  CDS (1)..(1839): transl_table=11
ttgggctttgctcgcctgagcaagggtgtggacttcagcggacctgatggcgatgccaacttggtgttcctcattgcagcacctgctggcggcggcaaagagcacctgaagatcctgtccaagcttgctcgctccttggtgaagaaggatttcatcaaggctctgcaggaagccaccaccgagcaggaaatcgtcgacgttgtcgatgccgtgctcaacccagcaccaaaaaccaccgagccagctgcagctccggctgcggcggcggttgctgagagtggggcggcgtcgacaagcgttactcgtatcgtggcaatcaccgcatgcccaaccggtatcgcacacacctacatggctgcggattccctgacgcaaaacgcggaaggccgcgatgatgtggaactcgttgtggagactcagggctcttccgctgtcaccccagtcgatccgaagatcatcgaagctgccgacgccgtcatcttcgccaccgacgtgggagttaaagaccgcgagcgtttcgctggcaagccagtcattgaatccggcgtcaagcgcgcgatcaatgagccagccaagatgatcgacgaggccatcgcagcctccaagaacccaaacgcccgcaaggtttccggttccggtgtcgcggcatctgctgaaaccaccggcgagaagctcggctggggcaagcgcatccagcaggcagtcatgaccggcgtgtcctacatggttccattcgtagctgccggcggcctcctgttggctctcggcttcgcattcggtggatacgacatggcgaacggctggcaagcaatcgccacccagttctctctgaccaacctgccaggcaacaccgtcgatgttgacggcgtggccatgaccttcgagcgttcaggcttcctgttgtacttcggcgcagtcctgttcgccaccggccaagcagccatgggcttcatcgtggcagccctgtctggctacaccgcatacgcacttgctggacgcccaggcatcgcgccgggcttcgtcggtggcgccatctccgtcaccatcggcgctggcttcattggtggtctggttaccggtatcttggctggtctcattgccctgtggattggctcctggaaggtgccacgcgtggtgcagtcactgatgcctgtggtcatcatcccgctacttacctcagtggttgttggtctcgtcatgtacctcctgctgggtcgcccactcgcatccatcatgactggtttgcaggactggctatcgtcaatgtccggaagctccgccatcttgctgggtatcatcttgggcctcatgatgtgtttcgacctcggcggaccagtaaacaaggcagcctacctctttggtaccgcaggcctgtctaccggcgaccaagcttccatggaaatcatggccgcgatcatggcagctggcatggtcccaccaatcgcgttgtccattgctaccctgctgcgcaagaagctgttcaccccagcagagcaagaaaacggcaagtcttcctggctgcttggcctggcattcgtctccgaaggtgccatcccattcgccgcagctgacccattccgtgtgatcccagcaatgatggctggcggtgcaaccactggtgcaatctccatggcactgggcgtcggctctcgggctccacacggcggtatcttcgtggtctgggcaatcgaaccatggtggggctggctcatcgcacttgcagcaggcaccatcgtgtccaccatcgttgtcatcgcactgaagcagttctggccaaacaaggccgtcgctgcagaagtcgcgaagcaagaagcacaacaagcagctgtaaacgcataa

SEQ ID NO: 9521 - protein, 612 aa, Corynebacterium glutamicum
MGFARLSKGVDFSGPDGDANLVFLIAAPAGGGKEHLKILSKLARSLVKKDFIKALQEATTEQEIVDVVDAVLNPAPKTTEPAAAPAAAAVAESGAASTSVTRIVAITACPTGIAHTYMAADSLTQNAEGRDDVELVVETQGSSAVTPVDPKIIEAADAVIFATDVGVKDRERFAGKPVIESGVKRAINEPAKMIDEAIAASKNPNARKVSGSGVAASAETTGEKLGWGKRIQQAVMTGVSYMVPFVAAGGLLLALGFAFGGYDMANGWQAIATQFSLTNLPGNTVDVDGVAMTFERSGFLLYFGAVLFATGQAAMGFIVAALSGYTAYALAGRPGIAPGFVGGAISVTIGAGFIGGLVTGILAGLIALWIGSWKVPRVVQSLMPVVIIPLLTSVVVGLVMYLLLGRPLASIMTGLQDWLSSMSGSSAILLGIILGLMMCFDLGGPVNKAAYLFGTAGLSTGDQASMEIMAAIMAAGMVPPIALSIATLLRKKLFTPAEQENGKSSWLLGLAFVSEGAIPFAAADPFRVIPAMMAGGATTGAISMALGVGSRAPHGGIFVVWAIEPWWGWLIALAAGTIVSTIVVIALKQFWPNKAVAAEVAKQEAQQAAVNA

SEQ ID NO: 9522 - DNA, 1452 bp, Escherichia coli; identical to SEQ ID NO: 5495
  CDS (1)..(1452): transl_table=11

SEQ ID NO: 9523 - protein, 483 aa, Escherichia coli; identical to SEQ ID NO: 5496

SEQ ID NO: 9524 - DNA, 23 bp, Artificial sequence
  primer
atggcgatggagtcatccttacg

SEQ ID NO: 9525 - DNA, 26 bp, Artificial sequence
  primer
tcaatgttcatggacaagctcctgtt

SEQ ID NO: 9526 - protein, 528 aa, Artificial sequence
  consensus sequence
  Variant (3)..(3): Xaa in position 3 is any amino acid
  Variant (5)..(5): Xaa in position 5 is any amino acid
  Variant (14)..(14): Xaa in position 14 is any amino acid
  Variant (17)..(17): Xaa in position 17 is any amino acid
  Variant (19)..(19): Xaa in position 19 is any amino acid
  Variant (21)..(23): Xaa in position 21 to 23 is any amino acid
  Variant (25)..(27): Xaa in position 25 to 27 is any amino acid
  Variant (29)..(32): Xaa in position 29 to 32 is any amino acid
  Variant (33)..(33): Xaa in position 33 is any or no amino acid
  Variant (37)..(37): Xaa in position 37 is any amino acid
  Variant (39)..(40): Xaa in position 39 to 40 is any amino acid
  Variant (42)..(44): Xaa in position 42 to 44 is any amino acid
  Variant (45)..(45): Xaa in position 45 is any or no amino acid
  Variant (47)..(50): Xaa in position 47 to 50 is any amino acid
  Variant (52)..(53): Xaa in position 52 to 53 is any amino acid
  Variant (55)..(56): Xaa in position 55 to 56 is any amino acid
  Variant (59)..(59): Xaa in position 59 is any amino acid
  Variant (61)..(61): Xaa in position 61 is any amino acid
  Variant (63)..(64): Xaa in position 63 to 64 is any amino acid
  Variant (66)..(68): Xaa in position 66 to 68 is any amino acid
  Variant (69)..(71): Xaa in position 69 to 71 is any or no amino acid
  Variant (74)..(74): Xaa in position 74 is any amino acid
  Variant (77)..(122): Xaa in position 77 to 122 is any amino acid
  Variant (123)..(139): Xaa in position 123 to 139 is any or no amino acid
  Variant (142)..(142): Xaa in position 142 is any amino acid
  Variant (146)..(146): Xaa in position 146 is any amino acid
  Variant (148)..(148): Xaa in position 148 is any amino acid
  Variant (152)..(153): Xaa in position 152 to 153 is any amino acid
  Variant (156)..(157): Xaa in position 156 to 157 is any amino acid
  Variant (160)..(181): Xaa in position 160 to 181 is any amino acid
  Variant (182)..(214): Xaa in position 182 to 214 is any or no amino acid
  Variant (217)..(218): Xaa in position 217 to 218 is any amino acid
  Variant (219)..(219): Xaa in position 219 is any or no amino acid
  Variant (222)..(225): Xaa in position 222 to 225 is any amino acid
  Variant (227)..(227): Xaa in position 227 is any amino acid
  Variant (229)..(229): Xaa in position 229 is any amino acid
  Variant (234)..(235): Xaa in position 234 to 235 is any amino acid
  Variant (238)..(239): Xaa in position 238 to 239 is any amino acid
  Variant (242)..(244): Xaa in position 242 to 244 is any amino acid
  Variant (246)..(248): Xaa in position 246 to 248 is any amino acid
  Variant (250)..(251): Xaa in position 250 to 251 is any amino acid
  Variant (253)..(257): Xaa in position 253 to 257 is any amino acid
  Variant (258)..(278): Xaa in position 258 to 278 is any or no amino acid
  Variant (281)..(281): Xaa in position 281 is any amino acid
  Variant (283)..(286): Xaa in position 283 to 286 is any amino acid
  Variant (288)..(289): Xaa in position 288 to 289 is any amino acid
  Variant (292)..(302): Xaa in position 292 to 302 is any amino acid
  Variant (303)..(304): Xaa in position 303 to 304 is any or no amino acid
  Variant (306)..(317): Xaa in position 306 to 317 is any amino acid
  Variant (319)..(325): Xaa in position 319 to 325 is any amino acid
  Variant (327)..(328): Xaa in position 327 to 328 is any amino acid
  Variant (330)..(334): Xaa in position 330 to 334 is any amino acid
  Variant (335)..(335): Xaa in position 335 is any or no amino acid
  Variant (337)..(343): Xaa in position 337 to 343 is any amino acid
  Variant (345)..(347): Xaa in position 345 to 347 is any amino acid
  Variant (349)..(355): Xaa in position 349 to 355 is any amino acid
  Variant (357)..(359): Xaa in position 357 to 359 is any amino acid
  Variant (361)..(363): Xaa in position 361 to 363 is any amino acid
  Variant (365)..(365): Xaa in position 365 is any amino acid
  Variant (368)..(369): Xaa in position 368 to 369 is any amino acid
  Variant (371)..(371): Xaa in position 371 is any amino acid
  Variant (375)..(375): Xaa in position 375 is any amino acid
  Variant (378)..(378): Xaa in position 378 is any amino acid
  Variant (381)..(381): Xaa in position 381 is any amino acid
  Variant (383)..(394): Xaa in position 383 to 394 is any amino acid
  Variant (395)..(401): Xaa in position 395 to 401 is any or no amino acid
  Variant (405)..(405): Xaa in position 405 is any amino acid
  Variant (407)..(408): Xaa in position 407 to 408 is any amino acid
  Variant (411)..(411): Xaa in position 411 is any amino acid
  Variant (414)..(418): Xaa in position 414 to 418 is any amino acid
  Variant (419)..(419): Xaa in position 419 is any or no amino acid
  Variant (422)..(427): Xaa in position 422 to 427 is any amino acid
  Variant (429)..(431): Xaa in position 429 to 431 is any amino acid
  Variant (433)..(435): Xaa in position 433 to 435 is any amino acid
  Variant (437)..(442): Xaa in position 437 to 442 is any amino acid
  Variant (444)..(445): Xaa in position 444 to 445 is any amino acid
  Variant (447)..(448): Xaa in position 447 to 448 is any amino acid
  Variant (457)..(457): Xaa in position 457 is any amino acid
  Variant (460)..(460): Xaa in position 460 is any amino acid
  Variant (462)..(462): Xaa in position 462 is any amino acid
  Variant (465)..(468): Xaa in position 465 to 468 is any amino acid
  Variant (470)..(470): Xaa in position 470 is any amino acid
  Variant (472)..(473): Xaa in position 472 to 473 is any amino acid
  Variant (475)..(485): Xaa in position 475 to 485 is any amino acid
  Variant (491)..(491): Xaa in position 491 is any amino acid
  Variant (494)..(509): Xaa in position 494 to 509 is any amino acid
  Variant (510)..(516): Xaa in position 510 to 516 is any or no amino acid
  Variant (518)..(527): Xaa in position 518 to 527 is any amino acid
VAXTXCPTGIAHTXMAXEXLXXXAXXXGXXXXXVETXGXXGXXXXLXXXXIXXAXXVIXAXDXXVXXXXXXRFXGKXXXXXXXXXXXXXXXXXXXXXXXXXXXXXXXXXXXXXXXXXXXXXXXXXXXXXXXXXXXXXXXLMXGVSXMXPFVXXGGXXIAXXXXXXXXXXXXXXXXXXXXXXXXXXXXXXXXXXXXXXXXXXXXXXXXXXXXXXXIGXXXAFXXXXPXLXGYIAXXIAXXPGXXXGXXXGXXAXXXXXXXXXXXXXXXXXXXXXXXXXXGFXGXXXXGXXAGXXXXXXXXXXXXXPXXXXXXXXXXXXPXXXXXXXGXXMXXXXXXPXXXXXXXLXXXLXXXXXXXAXXXGXXXGXMMXXDXGGPXNKXAYXFXXXXXXXXXXXXXXXXXXXMAAXMXXGMXPPXXXXXXATXXXXXXFXXXEXXXGXXXXXXGXXFXXEGAIPFAAXDPXRXIPXXXXGXAXXGXXXXXXXXXXXAPHGGXFVXXXXXXXXXXXXXXXXXXXXXXXGXXXXXXXXXXL

SEQ ID NO: 9527 - protein, 15 aa, Artificial sequence
  protein pattern
  Variant (4)..(4): Xaa in position 4 is Asn, Gln or Arg
  Variant (6)..(6): Xaa in position 6 is any or no amino acid
  Variant (8)..(8): Xaa in position 8 is any or no amino acid
  Variant (10)..(12): Xaa in position 10 to 12 is any amino acid
  Variant (13)..(13): Xaa in position 13 is any or no amino acid
  Variant (15)..(15): Xaa in position 15 is Asp, Ser or Thr
VETXGXSXGXXXXLX

SEQ ID NO: 9528 - protein, 12 aa, Artificial sequence
  protein pattern
  Variant (2)..(3): Xaa in position 2 to 3 is any amino acid
  Variant (5)..(6): Xaa in position 5 to 6 is any amino acid
  Variant (9)..(9): Xaa in position 9 is Phe, Ile, Leu or Val
  Variant (11)..(11): Xaa in position 11 is any amino acid
  Variant (12)..(12): Xaa in position 12 is Asp or Gly
IXXAXXVIXAXX

SEQ ID NO: 9529 - DNA, 1482 bp, Escherichia coli
  CDS (1)..(1482): transl_table=11
atgtgtttaaagcaaatcattggcagcttgaaaaagaaggttcacatgtcaaacaacattcgtatcgaagaagatctgttgggtaccagggaagttccagctgatgcctactatggtgttcacactctgagagcgattgaaaacttctatatcagcaacaacaaaatcagtgatattcctgaatttgttcgcggtatggtaatggttaaaaaagccgcagctatggcaaacaaagagctgcaaaccattcctaaaagtgtagcgaatgccatcattgccgcatgtgatgaagtcctgaacaacggaaaatgcatggatcagttcccggtagacgtctaccagggcggcgcaggtacttccgtaaacatgaacaccaacgaagtgctggccaatatcggtctggaactgatgggtcaccaaaaaggtgaatatcagtacctgaacccgaacgaccatgttaacaaatgtcagtccactaacgacgcctacccgaccggtttccgtatcgcagtttactcttccctgattaagctggtagatgcgattaaccaactgcgtgaaggctttgaacgtaaagctgtcgaattccaggacatcctgaaaatgggtcgtacccagctgcaggacgcagtaccgatgaccctcggtcaggaattccgcgctttcagcatcctgctgaaagaagaagtgaaaaacatccaacgtaccgctgaactgctgctggaagttaaccttggtgcaacagcaatcggtactggtctgaacacgccgaaagagtactctccgctggcagtgaaaaaactggctgaagttactggcttcccatgcgtaccggctgaagacctgatcgaagcgacctctgactgcggcgcttatgttatggttcacggcgcgctgaaacgcctggctgtgaagatgtccaaaatctgtaacgacctgcgcttgctctcttcaggcccacgtgccggcctgaacgagatcaacctgccggaactgcaggcgggctcttccatcatgccagctaaagtaaacccggttgttccggaagtggttaaccaggtatgcttcaaagtcatcggtaacgacaccactgttaccatggcagcagaagcaggtcagctgcagttgaacgttatggagccggtcattggccaggccatgttcgaatccgttcacattctgaccaacgcttgctacaacctgctggaaaaatgcattaacggcatcactgctaacaaagaagtgtgcgaaggttacgtttacaactctatcggtatcgttacttacctgaacccgttcatcggtcaccacaacggtgacatcgtgggtaaaatctgtgccgaaaccggtaagagtgtacgtgaagtcgttctggaacgcggtctgttgactgaagcggaacttgacgatattttctccgtacagaatctgatgcacccggcttacaaagcaaaacgctatactgatgaaagcgaacagtaa

SEQ ID NO: 9530 - protein, 493 aa, Escherichia coli
MCLKQIIGSLKKKVHMSNNIRIEEDLLGTREVPADAYYGVHTLRAIENFYISNNKISDIPEFVRGMVMVKKAAAMANKELQTIPKSVANAIIAACDEVLNNGKCMDQFPVDVYQGGAGTSVNMNTNEVLANIGLELMGHQKGEYQYLNPNDHVNKCQSTNDAYPTGFRIAVYSSLIKLVDAINQLREGFERKAVEFQDILKMGRTQLQDAVPMTLGQEFRAFSILLKEEVKNIQRTAELLLEVNLGATAIGTGLNTPKEYSPLAVKKLAEVTGFPCVPAEDLIEATSDCGAYVMVHGALKRLAVKMSKICNDLRLLSSGPRAGLNEINLPELQAGSSIMPAKVNPVVPEVVNQVCFKVIGNDTTVTMAAEAGQLQLNVMEPVIGQAMFESVHILTNACYNLLEKCINGITANKEVCEGYVYNSIGIVTYLNPFIGHHNGDIVGKICAETGKSVREVVLERGLLTEAELDDIFSVQNLMHPAYKAKRYTDESEQ

SEQ ID NO: 9531 - DNA, 2008 bp, Sorghum bicolor
  CDS (111)..(1607)
  misc_feature (5)..(5): n is a, g, c or t
cgggnccgcacgagggtccaccacctgccctgctcgggtgctctctttcttcccattctccagccgccgcggcgacgcgcagacctagcactaccagagaaacacccgagatggcgatggctctgcgccgcctcgcgggcgtgtccggctcgccgtcggcctccgctgccgcggccgcgctgctactccggccggcgctgacccgcccgatctccaccggcttccgcgaggagcgcgacaccttcggtcccatccaagtccccaacgacaagctgtggggcgcgcagacgcagaggtcgctgcagaacttcgacattggcggggagcgcgagaggatgcccgtgcccatcatccgcgcttttggcgtgctaaaaaaatgcgccgctaaggtgaatatggagtatggtctggatccaacaatagggaaggccataatgcaggcagctgaggaggtcgcagagggaaagttggatgatcacttcccacttgttatctggcaaactggcagtggcacgcaaagcaacatgaatgccaatgaggtaattgcaaatagggcagccgagatccttggacacaagcgcggtgagaagtttgtgcacccaaatgatcatgtgaataggtcacaatcttcaaatgatacatttcccactgtaatgcatatagcagcggccgttgagctcgaggcgaggtttatcccaagtttgcaacagttgcatgattcacttcattcaaaaactgttgagtttaaagacataattaaaattggacgtacacatacccaagatgccaccccgttgactcttggccaagaattcagtggttacactacacaggtcaaatatggaattgaccgtattaattgtacattacctcggatgtaccagcttgctcaaggtggaactgcagttggaactggcttgaacactaagaaaggatttgatgtcaaaatagctgctgcagtggctgaggaaacaaacctaccctttgtgacagcagagaacaagtttgaagctttggcagcgcatgacgcttttgtcgagagcagtggcgcggtaaatacaatttctgcatctcttatgaagatagcaaatgacatacgcttgctaggaagtggtcctcgatgtggtcttggtgaactaatcctaccagaaaatgagcctgggagcagcattatgcctggaaaagttaatccaacccagtgcgaagctctgacaatggtttgtgctcaggttatgggtaatcatgttggtgttacagttggtggtgcaaatgggcattttgaactgaatgtttttaagccaatgatagcagccggattgcttcgatcattgaggttgttaggggatgcatctgtgtccttcgagaaaaattgtgtcaggggaattcaagcaaaccataagagaatttcacaacttttgcatgagtctctgatgttggtgacatctttgaaccctaaaattggctatgacaatgctgcagctgttgctaagaaagcccacaaagaaggaaccacgttgaagaaagctgcattagaccttggagtattaacggagcaagaattccatgaacttgttgtcccagagaaaatgatcggtccttctgattgataaccccatgttcattatgtttctttaaagcattcaggttgccacatccggagttctggtggtttcctgtgatgccaacttaatgattctagtgcacccgtaaataaaccaaataatttttcatatggtcattaggtcctctccacactggagaaatgatttttgcatggcggatggtacctgagaaaacaattgtacgcttgttccaataggacaatagggcactttgatggatgaggcaccttccattctcctggcatcggtcaagcttttgttgccaggtagctaatgctatgtaataagtgacatggcaaccatgtctagaaactatttgcattggtctttgacaagtggaagtagaaatatacccgagttttagttctttttaccgattttgagct

SEQ ID NO: 9532 - protein, 498 aa, Sorghum bicolor
MAMALRRLAGVSGSPSASAAAAALLLRPALTRPISTGFREERDTFGPIQVPNDKLWGAQTQRSLQNFDIGGERERMPVPIIRAFGVLKKCAAKVNMEYGLDPTIGKAIMQAAEEVAEGKLDDHFPLVIWQTGSGTQSNMNANEVIANRAAEILGHKRGEKFVHPNDHVNRSQSSNDTFPTVMHIAAAVELEARFIPSLQQLHDSLHSKTVEFKDIIKIGRTHTQDATPLTLGQEFSGYTTQVKYGIDRINCTLPRMYQLAQGGTAVGTGLNTKKGFDVKIAAAVAEETNLPFVTAENKFEALAAHDAFVESSGAVNTISASLMKIANDIRLLGSGPRCGLGELILPENEPGSSIMPGKVNPTQCEALTMVCAQVMGNHVGVTVGGANGHFELNVFKPMIAAGLLRSLRLLGDASVSFEKNCVRGIQANHKRISQLLHESLMLVTSLNPKIGYDNAAAVAKKAHKEGTTLKKAALDLGVLTEQEFHELVVPEKMIGPSD

SEQ ID NO: 9533 - DNA, 1437 bp, Salmonella enterica subsp. enterica serovar Typhi
  CDS (1)..(1437): transl_table=11
atgtcaaacaacattcgtatcgaagaagatctgttgggtaccagggaagttccagctgaagcctactatggtgttcacactctgagagcgattgaaaacttctacattagcaataacaaaatcagcgacatccctgaatttgtgcgtggcatggttatggtaaaaaaagcggcggcgctggccaacaaagagctgcaaaccattcctaagagtgtggcgaatgccatcattgccgcatgtgatgaagtccttaacaacggtaagtgcatggaccagttcccggtagatgtctaccagggcggcgcgggcacttccgtcaacatgaataccaacgaagtgctggccaacatcgggctggaactgatgggtcatcagaaaggtgaatatcagtacctgaacccgaacgaccacgtgaataaatgtcaatccactaacgacgcctatccgacaggcttccgtgtagcggtttacgcctctatcgtcaaactgatcgatgccatcaaccagttgcgtgaaggtttcgaacgtaaagcggttgaattccaggacatcctgaaaatgggtcgtacccagttgcaggacgccgtaccgatgacgcttggtcaagaattccgtgcgttcagcattctgctgaaagaagaagtgaaaagcatcgagcgtactgctgagctgctgctggaagtcaaccttggcgcaacggcaatcggtactggtctgaacacgccgaaagaatactctccgctggcggtgaaaaaactggctgaagtcactggtttcgcctgtgttccggctgaagatctgattgaggcgacatctgactgtggcgcgtatgttatggttcacagcgcgctgaaacgtctggcagtgaagatgtccaaaatctgtaacgacctgcgcttgctctcttctggtcctcgtgccggcctgaacgagatcaacctgccggaactgcaggcgggctcttccatcatgccagccaaagtgaacccggtagtaccggaagtcgtaaaccaggtatgctttaaagtcatcggtaacgacaccaccgttacgatggcggcggaagccggtcagttgcagttgaacgttatggagccggttatcggtcaggcgatgttcgaatccatccacattctgagcaacgcgtgctacaacctgctggaaaaatgcgttaacggcattaccgcgaataaagaagtgtgcgaagggtacgtttataactccatcggtatcgtcacttacctcaacccgttcatcggccaccacaacggcgacatcgtcggtaaaatctgtgctgaaaccggtaagagcgtacgtgaagttgtgctagagcgcggcctgttaacggaagccgagctggacgatattttctccgtacagaacttgatgcacccggcttataaagctaaacgttatactgatgaaagcgaacagtaa

SEQ ID NO: 9534 - protein, 478 aa, Salmonella enterica subsp. enterica serovar Typhi
MSNNIRIEEDLLGTREVPAEAYYGVHTLRAIENFYISNNKISDIPEFVRGMVMVKKAAALANKELQTIPKSVANAIIAACDEVLNNGKCMDQFPVDVYQGGAGTSVNMNTNEVLANIGLELMGHQKGEYQYLNPNDHVNKCQSTNDAYPTGFRVAVYASIVKLIDAINQLREGFERKAVEFQDILKMGRTQLQDAVPMTLGQEFRAFSILLKEEVKSIERTAELLLEVNLGATAIGTGLNTPKEYSPLAVKKLAEVTGFACVPAEDLIEATSDCGAYVMVHSALKRLAVKMSKICNDLRLLSSGPRAGLNEINLPELQAGSSIMPAKVNPVVPEVVNQVCFKVIGNDTTVTMAAEAGQLQLNVMEPVIGQAMFESIHILSNACYNLLEKCVNGITANKEVCEGYVYNSIGIVTYLNPFIGHHNGDIVGKICAETGKSVREVVLERGLLTEAELDDIFSVQNLMHPAYKAKRYTDESEQ

SEQ ID NO: 9535 - DNA, 1461 bp, Photobacterium profundum; identical to SEQ ID NO: 6090
  CDS (1)..(1461): transl_table=11

SEQ ID NO: 9536 - protein, 486 aa, Photobacterium profundum; identical to SEQ ID NO: 6091

SEQ ID NO: 9537 - DNA, 1764 bp, Glycine max; identical to SEQ ID NO: 6060
  CDS (34)..(1521)

SEQ ID NO: 9538 - protein, 495 aa, Glycine max; identical to SEQ ID NO: 6061

SEQ ID NO: 9539 - DNA, 2014 bp, Zea mays; identical to SEQ ID NO: 6068
  CDS (30)..(1526)

SEQ ID NO: 9540 - protein, 498 aa, Zea mays; identical to SEQ ID NO: 6069

SEQ ID NO: 9541 - DNA, 1726 bp, Brassica napus; identical to SEQ ID NO: 6058
  CDS (76)..(1554)

SEQ ID NO: 9542 - protein, 492 aa, Brassica napus; identical to SEQ ID NO: 6059

SEQ ID NO: 9543 - DNA, 1860 bp, Glycine max; identical to SEQ ID NO: 6062
  CDS (135)..(1622)

SEQ ID NO: 9544 - protein, 495 aa, Glycine max; identical to SEQ ID NO: 6063

SEQ ID NO: 9545 - DNA, 1401 bp, Dichelobacter nodosus VCS1703A
  CDS (1)..(1401): transl_table=11
atgacagcaactcgtcaagaacatgatttattaggttatcgcgatgttcccgccgatgcatattatggtattcaaacgctccgtggcgttgaaaactttaatatcaccggtgtaaaactccatcaattttcaacctttattcgtgctttagcgacagtgaaaaaagccgcggcaattgccaatcatgaagtgggaattttagatagcaaaattaaggatgctattgttgccgcgtgtgatgaaattattgccgataaattccatgatcattttgtggtagacatgatccaaggcggcgccggcacatcaaccaatatgaatgccaacgaagttattgccaaccgcgctttggaaattttgggacacaaacgcggtgaatatcaatatgttcaccccaataatcacgtcaacctctcgcaatcaaccaacgatgcttatccaaccgcgttgcatatcgctttagatgattattgcgcgcgtttgctcgataaaatggtgattttgcgggacagtttcttgaagaaaagtgaagagtttgccgataaactcaaaatgggacggacgcatttgcaagacgccgttccgatgaccgctgggcaagaattccatgcttttgccacgatgatcagcaaagaaatggaacgcattgaacaaacccgtaatttactttacgaaattaatatgggtgcaaccgctatcggtaccgaattaaacgcgccgaaaggttatgctaaagcctgcgcgcaagcgttagccgatttaaccggtaaaccgtattacacttctaaagatttgattcaagccacgcaagataccagtccttatgcggcgttatcaggaaatttacgtttattggcagcgcggttgtcaaaaattgcgcacgatttgcgtttggaatcttcaggtccgcgcgcgggtttggcgcaatatcgtttgccggaaatgcaacccggtagttctattatgcctggcaaagtcaatcccgtaattccggaagtcgttaaccaaacttgtttccatgtgatgggcattgaccatgctattttattggcgtgcgaatcagggcaattgcaattgaacgtttttgagccagtgatgacgtttaacctctttaccggcattaatatgttagccaatgcttgcgaaactttcgcaaaacgttgcattgacggcattatgctcaatgaagaacattgccgcgaacaagttttatccaatattggtttgatcacagctttaaatcctcatattggttatgaagcttcaaaccgcattgctcgcaaagcgcaagaaaccggcggcagcgtttatgaactggttttggcagaaggtctgctcaaacgcgaagaactcgatcgcatcatcgctccagagaatatggtgcaccccaataaagattaa

SEQ ID NO: 9546 - protein, 466 aa, Dichelobacter nodosus VCS1703A
MTATRQEHDLLGYRDVPADAYYGIQTLRGVENFNITGVKLHQFSTFIRALATVKKAAAIANHEVGILDSKIKDAIVAACDEIIADKFHDHFVVDMIQGGAGTSTNMNANEVIANRALEILGHKRGEYQYVHPNNHVNLSQSTNDAYPTALHIALDDYCARLLDKMVILRDSFLKKSEEFADKLKMGRTHLQDAVPMTAGQEFHAFATMISKEMERIEQTRNLLYEINMGATAIGTELNAPKGYAKACAQALADLTGKPYYTSKDLIQATQDTSPYAALSGNLRLLAARLSKIAHDLRLESSGPRAGLAQYRLPEMQPGSSIMPGKVNPVIPEVVNQTCFHVMGIDHAILLACESGQLQLNVFEPVMTFNLFTGINMLANACETFAKRCIDGIMLNEEHCREQVLSNIGLITALNPHIGYEASNRIARKAQETGGSVYELVLAEGLLKREELDRIIAPENMVHPNKD

SEQ ID NO: 9547 - DNA, 1410 bp, Oryza sativa (japonica cultivar-group)
  CDS (1)..(1410)
atggcgatggtcctgcggcgcctcgcgggcgcgtccgccggtggcgccccgtcgccggcggcggcagcggccgcggccgcgctgctgctccgcccggcgctggctcgcccgatctccaccggcttccgcgaggagcgcgacaccttcggccccatccgagtccccaacgacaagctgtggggcgcgcagacgcagaggtcgctgcagaacttcgacatcggcggcgagcgcgagcggatgccggtgcccatcatccgcgcctttggggtgctcaaaaagtgcgccgctaaggtgaatatggagtatggccttgatccaacaatcgggaaggcaataatgcaggctgctcaggaggttgctgaaggacagttagatgaccactttccacttgttatctggcaaactgggagtggcacacaaagcaacatgaacgccaatgaggttattgcaaatagggccgctgagattcttggacataagcgtggcgagaagtttgtacaccctaatgatcatgtgaacagatcacagtcctcaaatgatacatttcccactgtcatgcacatagcagcagccacagagatcaattcaaggtttgtcccaagcttgcaacagttgcataagtcacttgattcaaaggtgaaatatggaattgatagaattgtttgtaccttaccacggatgtatcagcttgctcaaggtggaactgcagttggaacgggcttgaacactaagaaaggatttgatgtcaaaattgctgctgcagtagctgaggaaacggaactacctttcgtgacagctgagaacaagttcgaagctttggcagcgcatgatgcttttgttgagagcagtggtgctgtaaacacaatttctgcatctcttatgaagatagcaaatgacatacgcttgttaggaagcggcccccgatgtggacttggtgaacttatcctacctgaaaatgagcctgggagcagcattatgcctggaaaagttaaccctacccagtgtgaggccttgaccatggtttgtgctcaggttatgggtaatcatgttggtgtcacagtaggtggttcgaatggacattttgagttgaatgtctttaagccaatgattgcagctggattacttagatcactgagattgctaggggatgcctctgtgtcctttgagaaaaactgtgtcaggggaattcaagcaaaccataagagaatttcacaattattgcacgagtctttgatgttggtgacatctttgaaccctaaaattggctatgacaatgctgcagctgttgctaagaaagcacacaaagaaggaagcacattgaaggaagctgctctagacctcggagtattgacagaatcagaattccatgagcttgttgttccagagaaaatgattggtccttctgattga

SEQ ID NO: 9548 - protein, 469 aa, Oryza sativa (japonica cultivar-group)
MAMVLRRLAGASAGGAPSPAAAAAAAALLLRPALARPISTGFREERDTFGPIRVPNDKLWGAQTQRSLQNFDIGGERERMPVPIIRAFGVLKKCAAKVNMEYGLDPTIGKAIMQAAQEVAEGQLDDHFPLVIWQTGSGTQSNMNANEVIANRAAEILGHKRGEKFVHPNDHVNRSQSSNDTFPTVMHIAAATEINSRFVPSLQQLHKSLDSKVKYGIDRIVCTLPRMYQLAQGGTAVGTGLNTKKGFDVKIAAAVAEETELPFVTAENKFEALAAHDAFVESSGAVNTISASLMKIANDIRLLGSGPRCGLGELILPENEPGSSIMPGKVNPTQCEALTMVCAQVMGNHVGVTVGGSNGHFELNVFKPMIAAGLLRSLRLLGDASVSFEKNCVRGIQANHKRISQLLHESLMLVTSLNPKIGYDNAAAVAKKAHKEGSTLKEAALDLGVLTESEFHELVVPEKMIGPSD

SEQ ID NO: 9549 - DNA, 1419 bp, Pasteurella multocida subsp. multocida str. Pm70; identical to SEQ ID NO: 6186
  CDS (1)..(1419): transl_table=11

SEQ ID NO: 9550 - protein, 472 aa, Pasteurella multocida subsp. multocida str. Pm70; identical to SEQ ID NO: 6187

SEQ ID NO: 9551 - DNA, 1398 bp, Neisseria meningitidis MC58; identical to SEQ ID NO: 6190
  CDS (1)..(1398): transl_table=11

SEQ ID NO: 9552 - protein, 465 aa, Neisseria meningitidis MC58; identical to SEQ ID NO: 6191

SEQ ID NO: 9553 - DNA, 1407 bp, Campylobacter jejuni subsp. jejuni NCTC 11168; identical to SEQ ID NO: 6192
  CDS (1)..(1407): transl_table=11

SEQ ID NO: 9554 - protein, 468 aa, Campylobacter jejuni subsp. jejuni NCTC 11168; identical to SEQ ID NO: 6193

SEQ ID NO: 9555 - DNA, 1494 bp, Agrobacterium tumefaciens str. C58
  CDS (1)..(1494): transl_table=11
ttgcagcgctttcattgccggcgcgatgattctatatatcggccgcgcaaggcgggcgaagtgccgttttggcggaggaaaacgagtaaaaaggcaagattgatgacagccacacggacagaaaccgatacatttggccctattgaagttcaggccgatcgctactggggcgcgcaggcgcagcgctcgctcggcaacttcaagatcggctgggaaaagcagcccgcctctgtcgttcgtgcgctcggcatcgtcaagcaggccgctgcccgcgccaacatggcgcttgcaggtctcgaccccaaggtgggagatgccatcatcgccgccgcgcaggaagtcatcgacggcaagctgaccgagcatttcccgctcgtcgtctggcagaccggctccggcacccagtccaacatgaatgccaacgaggtgatttccaaccgcgcgatcgaaatgctcggcggcgaaatgggcaccaagaagcctgttcacccgaatgaccacgtcaatatgagccagtcctcgaacgacacctacccgacggcgatgcacatcgcctgcgtggaagagatcgttcaccacctgttgccggccctcaagcacctgcacacggcgctggaagccaaggtcaagcagttcgaaaagatcatcaagatcggccgtacccacacgcaggacgcgaccccgctgacgctcggccaggaattctccggttacgccgctcaggtcgcctcggcgatcgccaatatcgaactcacactgcccgcactgtcgaagctcgcccagggcggtacggcggttggcacgggcctcaatgcccctgttggttttgccgaaaaggtcgccgaggaaatctctgagattaccggcctttccttcgtcaccgcgccgaacaagttcgaagcgcttgcctcgcatgattccatggtcttctcgcacggcgcgatcaacgccgctgccgctgcactcttcaagatcgccaacgacatccgcttcctcggttccggcccgcgcgccggtctcggcgaattgtcgctgccggaaaacgagcccggctcgtcgatcatgccgggcaaggtcaacccgacgcagtcggaggcactgacgcaggtttgcgcccatatcttcggcaacaatgcagcgctttccttcgcaggctcgcagggccacttcgaactcaacgtctataatccgatgatggcctacaactttctgcagtcggtccagcttctgggcgatgcggccgtgtccttcaccgacaactgcgtcgtcggcatcgaggcgcgcgaagacaatatccggaagggcgtcgagaactcgctgatgctcgtcacggcgctcaacggcaagctcggctacgacatctgcgccaagatcgccaagaccgcccacaagaacggcacgacgctgcgcgaagaagccgttggtggtggatacctcaccaacgaggaattcgaccagtatgtgcgccccgaaaacatgatcggcccgaagtaa

SEQ ID NO: 9556 - protein, 497 aa, Agrobacterium tumefaciens str. C58
MQRFHCRRDDSIYRPRKAGEVPFWRRKTSKKARLMTATRTETDTFGPIEVQADRYWGAQAQRSLGNFKIGWEKQPASVVRALGIVKQAAARANMALAGLDPKVGDAIIAAAQEVIDGKLTEHFPLVVWQTGSGTQSNMNANEVISNRAIEMLGGEMGTKKPVHPNDHVNMSQSSNDTYPTAMHIACVEEIVHHLLPALKHLHTALEAKVKQFEKIIKIGRTHTQDATPLTLGQEFSGYAAQVASAIANIELTLPALSKLAQGGTAVGTGLNAPVGFAEKVAEEISEITGLSFVTAPNKFEALASHDSMVFSHGAINAAAAALFKIANDIRFLGSGPRAGLGELSLPENEPGSSIMPGKVNPTQSEALTQVCAHIFGNNAALSFAGSQGHFELNVYNPMMAYNFLQSVQLLGDAAVSFTDNCVVGIEAREDNIRKGVENSLMLVTALNGKLGYDICAKIAKTAHKNGTTLREEAVGGGYLTNEEFDQYVRPENMIGPK

SEQ ID NO: 9557 - DNA, 1446 bp, Agrobacterium tumefaciens str. C58; identical to SEQ ID NO: 6196
  CDS (1)..(1446): transl_table=11

SEQ ID NO: 9558 - protein, 481 aa, Agrobacterium tumefaciens str. C58; identical to SEQ ID NO: 6197

SEQ ID NO: 9559 - DNA, 1374 bp, Thermoplasma acidophilum DSM 1728; identical to SEQ ID NO: 6108
  CDS (1)..(1374): transl_table=11

SEQ ID NO: 9560 - protein, 457 aa, Thermoplasma acidophilum DSM 1728; identical to SEQ ID NO: 6109

SEQ ID NO: 9561 - DNA, 1437 bp, Yersinia pestis CO92; identical to SEQ ID NO: 6198
  CDS (1)..(1437): transl_table=11

SEQ ID NO: 9562 - protein, 478 aa, Yersinia pestis CO92; identical to SEQ ID NO: 6199

SEQ ID NO: 9563 - DNA, 1488 bp, Drosophila melanogaster
  CDS (1)..(1488)
atggtgctaccattattgcaacgctccacgcttcgcggcgttcaacaaatgacgaaaccctgggccgccattggaagtttgcgtctggcctcccaggagtttcgcgtggagagcgacacctttggcgaactgaaggtgcccgcggataagtactatggcgcccaaacgatgcgatcccagatcaatttccccatcggcggagccaccgaacggatgcccaaacccgtggtccaggccatgggcatcctgaagaaggccgccgccgaggtgaacaaggagttcggactggacagcaaggttagcgaggcgatctcgaaggcggccgacgatgtgatctctggcaagctatacgacgaccacttcccgctggtcatctggcagacgggctcgggcacgcagagcaacatgaatgtgaatgaggtgatcagcaatcgtgccattgagctgctgggcggcaaactgggctccaagacgcccgtgcatcccaacgatcatgtgaacaaatcgcagagctccaacgataccttccccaccgccattcacatctcggtggcgctggagctgaacaacaaccttaagccggcgattaagacgctgcacgatgcgctgcgtgccaagtcggaggagttcaaggacattatcaagatcggacgcacgcatacgatggatgcggtgccattgacgctgggccaagagttcagcggctatgcccagcaattggcctacgcccaggagcgcatcgatgcctgtctgccgcgcgtctatgagctggctctgggcggcactgctgtgggtacgggtctgaacacacgcaagggattcgccgagaagtgcgctgcaaagatcgccgagctgaccagcctgcccttcgttaccgcgcccaacaagttcgaggcactggctgcccgcgatgccatggtggaggtgcatggtgtgctcaacacgatcgccgttagcctgatgaagattgccaacgatattcgtttccttggctccggaccgcgttgcggtttgggtgagctctcgctaccggagaacgagccaggtagctccatcatgcccggcaaggtgaatcccacgcaatgcgagtcgctgacaatgctctccgcccaggtgatgggcaatcaggtggcggtgaccatcggtggatccaatgggcacttcgagctgaatgtattcaagcccctgatcgtgtccaatgtgctgcgctccattcggctattgtctgatggcagcaggaccttcactgccaactgtgtgaatggcatccaggcgaaccgcgagaatattgccaagatcatgaacgagtcgctcatgctggtgaccgctctgaatccgcacattggttacgacaaggctgcgaaaattgcaaagacggcgcacaagaatggcaccacactcaaggaggaggccatcaatttgggttacctgacggagcagcagttcaacgactgggtgcgacccgaacagatgctgggacccaagtga

SEQ ID NO: 9564 - protein, 495 aa, Drosophila melanogaster
MVLPLLQRSTLRGVQQMTKPWAAIGSLRLASQEFRVESDTFGELKVPADKYYGAQTMRSQINFPIGGATERMPKPVVQAMGILKKAAAEVNKEFGLDSKVSEAISKAADDVISGKLYDDHFPLVIWQTGSGTQSNMNVNEVISNRAIELLGGKLGSKTPVHPNDHVNKSQSSNDTFPTAIHISVALELNNNLKPAIKTLHDALRAKSEEFKDIIKIGRTHTMDAVPLTLGQEFSGYAQQLAYAQERIDACLPRVYELALGGTAVGTGLNTRKGFAEKCAAKIAELTSLPFVTAPNKFEALAARDAMVEVHGVLNTIAVSLMKIANDIRFLGSGPRCGLGELSLPENEPGSSIMPGKVNPTQCESLTMLSAQVMGNQVAVTIGGSNGHFELNVFKPLIVSNVLRSIRLLSDGSRTFTANCVNGIQANRENIAKIMNESLMLVTALNPHIGYDKAAKIAKTAHKNGTTLKEEAINLGYLTEQQFNDWVRPEQMLGPK

SEQ ID NO: 9565 - DNA, 1410 bp, Corynebacterium glutamicum ATCC 13032
  CDS (1)..(1410): transl_table=11
atgaccgagcaggaattccgtattgagcacgacaccatgggtgaagtgaaggttccagcaaaggctctgtggcaggcacagacccagcgcgctgttgagaacttccctatctctggtcgtggtctggaatccgcacagatccgcgcaatgggtctgctgaaggcagcttgtgcgcaggtaaacaaggactccggtgcgctggatgcagagaaggcagatgccatcattgcagctggtaaggagatcgcgtccggtaagcatgacgctgagttcccaattgatgtgttccagactggttccggtacttcctccaacatgaacaccaatgaggttatcgcttccatcgcgaaggctaacggcgttgaggttcacccaaatgaccacgtcaacatgggtcagtcctccaatgacaccttccctactgcaactcacgttgctgcaaccgaagctgctgtcaatgacctcatcccaggcctgaaggttctgcacgagtctttggcgaagaaggctaacgagtggtctgaggttgttaagtccggccgcacccacctgatggacgctgttccagtaaccctgggccaggagttcggtggctacgctcgccagatccagctcggcatcgagcgcgttgaggctactcttcctcgccttggtgagctggctattggtggcaccgctgctggtaccggtatcaacacctccgctgatttcggcggcaaggttgttgctgaactgatcaacttgaccgacgtcaaggagctcaaggaagctgagaaccacttcgaggctcaggctgcacgcgacgctcttgttgagttctccggcgcaatgcgcgttatcgctgtctccttgtacaagatcgctaacgatatccgcctcatgggctccggcccactgaccggtcttggcgagatccgtctcccagacctgcagccaggttcctccatcatgccaggcaaggtcaacccagttctctgtgagaccgctacccaggtttccgctcaggttatcggcaatgacgcagctgttgcgttctccggcacccagggccagttcgagctcaacgtgttcatcccagtgatggctcgcaacgtgcttgagtccgctcgcctgctggctaacacttcccgcgtgttcgcaacccgtctcgttgatggcattgagccaaacgaggcacacatgaaggagctcgctgagtcttcaccttccatcgttaccccactgaactctgcaatcggctacgaagctgctgcaaaggtggctaagactgctttggctgagggcaagaccatccgccagactgtcatcgatttgggcttggttgatggcgagaagctcaccgaggaagagctggacaagcgcctcgacgttcttgctatggctcacaccgagcgcgagaacaagttctaa

SEQ ID NO: 9566 - protein, 469 aa, Corynebacterium glutamicum ATCC 13032
MTEQEFRIEHDTMGEVKVPAKALWQAQTQRAVENFPISGRGLESAQIRAMGLLKAACAQVNKDSGALDAEKADAIIAAGKEIASGKHDAEFPIDVFQTGSGTSSNMNTNEVIASIAKANGVEVHPNDHVNMGQSSNDTFPTATHVAATEAAVNDLIPGLKVLHESLAKKANEWSEVVKSGRTHLMDAVPVTLGQEFGGYARQIQLGIERVEATLPRLGELAIGGTAAGTGINTSADFGGKVVAELINLTDVKELKEAENHFEAQAARDALVEFSGAMRVIAVSLYKIANDIRLMGSGPLTGLGEIRLPDLQPGSSIMPGKVNPVLCETATQVSAQVIGNDAAVAFSGTQGQFELNVFIPVMARNVLESARLLANTSRVFATRLVDGIEPNEAHMKELAESSPSIVTPLNSAIGYEAAAKVAKTALAEGKTIRQTVIDLGLVDGEKLTEEELDKRLDVLAMAHTERENKF

SEQ ID NO: 9567 - DNA, 1386 bp, Thermoanaerobacter tengcongensis MB4; identical to SEQ ID NO: 6106
  CDS (1)..(1386): transl_table=11

SEQ ID NO: 9568 - protein, 461 aa, Thermoanaerobacter tengcongensis MB4; identical to SEQ ID NO: 6107

SEQ ID NO: 9569 - DNA, 1413 bp, Drosophila melanogaster
  CDS (1)..(1413)
atgagctccaccaagaaggttgagacccgccaagagagcgacaccctgggacccatggaggtgcccatggatcgctattacggcgcccagacgatgcgctgcctcataaactttcgcattggcggcgaggaggagcgaatgccgcgccagataatccaggccatgggcatactgaagaaggcggcagccgaaacaaaccaagaattcggattggatcccaagttgagcacggccatctcgaatgcggccgacgatgtgatctccggaaagctttacgatgagggtcacttcccgctgcccatttggcagacgggttcgggcacccagagcaacatgaacagcaacgaggttatcgggaatcgtgccatcgagctgctgggcggacgtattggtaccaaggacccagtgcatcccaacgaccatgtgaacaagtcgcagagctccaacgacacctttccgtcggccattcacattgcggtggccactgcgctgaccaaggatctccgaccggcggtcaccgctctgcgggattcactgcaggccaagtcgaatgaatggaaggatatcattaagattggacgcactcacacccaggatgcagtgccgctaacgctgggccaggagttcagtggctatgcccaacagctgaccaacgggctgcagaggatcgatgcggtcctgccgcgagtttatcagctcgcactgggtggaaccgctgtgggaactggattgaatacccgccggggattcgccgagaagtgtgtcaagcggatcgcccagctcagtggattgcccttcgtggtggcgcccaattttttcgaggccctcgcctgtcgagatgccatggtggaggtgcatggagcgctcaatgtcctggctgttagcctgatgaaggtcaccaatgatatacgtttcctgggatcgggaccacgttgcggtctgggcgagctgtttctgccggagaatgagccgggcagttctattatgcccggcaaggtgaatcccacgcagtgcgaggccatgaccatgatctgcgcccaggtgatgggcaaccacgtggccgtctccgtcggcggtgccaatggacactttgagctcaacgttttcaagccactgatcgcatccaatgtgctccgctccatcaagctgctggctgatgggtgcatcagcttcaactgcaactgcgtcaagggcattaagcccaacaaggagaagctggcaaagatcgtgaatgagtcgctaatgctggtgacagccctcaatccgcacattggctatgacaagtccgcccagattgccaaggcggcccacaagaatggaactactctaaaggtggaggcattgaacgccggcatatcggagaaggatttcaacgagtgggtgcgtcccgagaagatgctgggtccttcttag

SEQ ID NO: 9570 - protein, 470 aa, Drosophila melanogaster; identical to SEQ ID NO: 6389

SEQ ID NO: 9571 - DNA, 1437 bp, Yersinia pestis KIM; identical to SEQ ID NO: 6200
  CDS (1)..(1437): transl_table=11

SEQ ID NO: 9572 - protein, 478 aa, Yersinia pestis KIM; identical to SEQ ID NO: 6201

SEQ ID NO: 9573 - DNA, 1452 bp, Brucella suis 1330
  CDS (1)..(1452): transl_table=11
atgacaaccctggaaaatattcatcccctgacacggcgcgagcaggattcccttggggagcgcgatattcccacggatgcctatttcggcatccagaccctacgggcagttgaaaacttctcgctttccgatgttgcgctgaaccatattcctgccctcgttcgcgcccttgcaatggtcaagaaagcggctgccaccgccaattacaagctgcggcagctgccggagcccaaatatgcggccatcgtcgccgcctgcgacgacatcattgacgggcttttgatggagcaattcgtcgtggatgtgtttcagggcggcgcgggcacctcaagcaatatgaacgcaaatgaggttatcgcaaaccgcgcccttgaacatctggggcggccgcgaggcgactaccagacgatccatcccaatgatgacgtcaacatgtcgcagtccaccaatgatgtgtatccaaccgcggtaaggctggcgcttcttctcagccagaaccaggttcagacggcgctgcaccggctgattgccgcctttgaagcaaaggggcgggaattcgcgacggtcatcaagatcgggcgcacacagttgcaggatgcggttccgatcactcttggacaggagttcgaggcatttgccgcaacgttgcgggaggacacagcccggctggaggaggttgccgcgcttttccgcgaagtaaacctcggtggaaccgctatcggcacgcgcatcaacgcctcgcacgcctatgccgaacaggccatcgcggaactttcgcagatttccggtatcgaactgaaagccgccggcaatctcgtggaagcgagctgggataccggtgcgttcgtcaccttttccgggatattgcgccggatcgcagtcaagctttccaagatcgccaacgatctgcggctactctcaagcgggccgcgaagcggccttggtgaaatccgcctgcctgcggttcagccgggatcgtcgatcatgccgggaaaggtcaatccggtcataccggaatcggtcaatcaggtctgctatcaggtgatcggcaatgacctgactgtaaccatggcagccgaaagcgggcaattgcagctcaacgcgttcgagccgctgatcgtctacaatatcctcagttccatgcgactgctcggccgcgccatgaccaatctggccgaacgttgcgtcgacggaattgaagccaatgtggaacgctgtcgcgcaggcgcggaggaaagcatttcgcttgcaaccgccctcgtcccggtcgtgggctatgccagggcggcagagatcgccaagcaggcgcttgcctcagggcagaccgtcatggaagtggcgatttccaaggggctggacgcatctgcgctcacgataatgcttgaccccttgagaatggcattcccgccggaaacgcacgacaaggaggcacatcatgcatctgtcggctaa

SEQ ID NO: 9574 - protein, 483 aa, Brucella suis 1330
MTTLENIHPLTRREQDSLGERDIPTDAYFGIQTLRAVENFSLSDVALNHIPALVRALAMVKKAAATANYKLRQLPEPKYAAIVAACDDIIDGLLMEQFVVDVFQGGAGTSSNMNANEVIANRALEHLGRPRGDYQTIHPNDDVNMSQSTNDVYPTAVRLALLLSQNQVQTALHRLIAAFEAKGREFATVIKIGRTQLQDAVPITLGQEFEAFAATLREDTARLEEVAALFREVNLGGTAIGTRINASHAYAEQAIAELSQISGIELKAAGNLVEASWDTGAFVTFSGILRRIAVKLSKIANDLRLLSSGPRSGLGEIRLPAVQPGSSIMPGKVNPVIPESVNQVCYQVIGNDLTVTMAAESGQLQLNAFEPLIVYNILSSMRLLGRAMTNLAERCVDGIEANVERCRAGAEESISLATALVPVVGYARAAEIAKQALASGQTVMEVAISKGLDASALTIMLDPLRMAFPPETHDKEAHHASVG

SEQ ID NO: 9575 - DNA, 1455 bp, Drosophila melanogaster
  CDS (1)..(1455)
atgtctttcgatcagaaggagattttcagtttgatgtacaaactggctcggctaatagtgccggatactcgagttgaatatgattcgatgggtgccgtgcacattcctctcgatcgaatgttcggtccgcaaaccatgagatccctgatgaaatttccaattggcggagttgaggaacgaatgccacgacccctaataaaagccctgggcatagtgaagaaatcagctgcggagacgaacaaaatccattgtctggaggagcatctatgcgatgccatttccaaggcctgcgatgatgttatatcgggcaaactctatgacgaggaacactttccgttggttatatggcaggatggaagcggcgagcacacaaacatgaacgtaaacgaggttatatgcaatcgagccatcgaaattctgggcggtcagatgggctccaaggagccggtggatcccaatgaacatgtcaacatggcgcaaagttcccatgacaccttctcgacagccgtgcgcatcgccgtggccatgcagttgcaggagacgctgtatcccagcttaaggacctttattgatttgctgggcaagaagtcgaacgattggatggatttgatcaagattggtagaacgcatctgatggacgcagttcctctgtccctcggccaggagttcagtggctatcagcagcaacttgtgaacggaaggacgcgattggactgtgccatgtgccgattgtatcagttgcccatgggcggcaccagtgtgggcaccaaagtggacaccaaggcggaatattctgcgcagtgcatcaagcgtatagccgagctaacattcctaccctttgtcgagtccccgaacttttttgaatccatctccgcctgcgattgcctggtggaactgcacggtgaactcaacacgattgcagcgagtgtgatgaagatagcgaatgatatacgattccttggatcgggaccacgttgcggatttggtgaactacatctgccggagaacgaaccaggtagttccataatgcccggcaaagtgaatcccacgcaatgcgaggccatgtccatgatctgtgcccaggtgatgggcaaccatgtggccgtctccatgggtggttcctctggccactttcagctgaacacctttatgcccatgattgcctccaatgttttgcgctcgattacacttttgggcgatggcatgaagtccttttgcaccaattgcctcgagggcatcgagcccaataggagcaagattggtagcatcgtcaaggagtccctgatgctggtcactgccctcagtccacacattggctacgaacgatccgctgcgatcgccaaggcagcgcatcacaatggaaccactttggaacaggaggccatacttgatggcattcaacgggaggacttcagggagtgggtgcagcccagcaagatgctgggtcccgaatag

SEQ ID NO: 9576 - protein, 484 aa, Drosophila melanogaster; identical to SEQ ID NO: 6375

SEQ ID NO: 9577 - DNA, 1404 bp, Drosophila melanogaster
  CDS (1)..(1404)
atggcctcccaggagtttcgcgtggagagcgacacctttggcgaactgaaggtgcccgcggataagtactatggcgcccaaacgatgcgatcccagatcaatttccccatcggcggagccaccgaacggatgcccaaacccgtggtccaggccatgggcatcctgaagaaggccgccgccgaggtgaacaaggagttcggactggacagcaaggttagcgaggcgatctcgaaggcggccgacgatgtgatctctggcaagctatacgacgaccacttcccgctggtcatctggcagacgggctcgggcacgcagagcaacatgaatgtgaatgaggtgatcagcaatcgtgccattgagctgctgggcggcaaactgggctccaagacgcccgtgcatcccaacgatcatgtgaacaaatcgcagagctccaacgataccttccccaccgccattcacatctcggtggcgctggagctgaacaacaaccttaagccggcgattaagacgctgcacgatgcgctgcgtgccaagtcggaggagttcaaggacattatcaagatcggacgcacgcatacgatggatgcggtgccattgacgctgggccaagagttcagcggctatgcccagcaattggcctacgcccaggagcgcatcgatgcctgtctgccgcgcgtctatgagctggctctgggcggcactgctgtgggtacgggtctgaacacacgcaagggattcgccgagaagtgcgctgcaaagatcgccgagctgaccagcctgcccttcgttaccgcgcccaacaagttcgaggcactggctgcccgcgatgccatggtggaggtgcatggtgtgctcaacacgatcgccgttagcctgatgaagattgccaacgatattcgtttccttggctccggaccgcgttgcggtttgggtgagctctcgctaccggagaacgagccaggtagctccatcatgcccggcaaggtgaatcccacgcaatgcgagtcgctgacaatgctctccgcccaggtgatgggcaatcaggtggcggtgaccatcggtggatccaatgggcacttcgagctgaatgtattcaagcccctgatcgtgtccaatgtgctgcgctccattcggctattgtctgatggcagcaggaccttcactgccaactgtgtgaatggcatccaggcgaaccgcgagaatattgccaagatcatgaacgagtcgctcatgctggtgaccgctctgaatccgcacattggttacgacaaggctgcgaaaattgcaaagacggcgcacaagaatggcaccacactcaaggaggaggccatcaatttgggttacctgacggagcagcagttcaacgactgggtgcgacccgaacagatgctgggacccaagtga

SEQ ID NO: 9578 - protein, 467 aa, Drosophila melanogaster; identical to SEQ ID NO: 6377

SEQ ID NO: 9579 - DNA, 1512 bp, Drosophila melanogaster
  CDS (1)..(1512)
atgctgaagcaaaacaatggtctgcatctggctaggcgcaatctctgggtggtttgcagtggcctccgtgccaaggattgcgacagtggcggtaagggcggcaagggcaaggagaatggcaagtttcgtacggagaaggacaccttcggggagctaaaggtgccggcggacaagctgtacggcgcacagacgatgcgctccaaattgaattttcccattggcgacataggcgaacgtatgccgatgccggtgatccaggccatgggcatactgaagaaggcatgtgccgaggtcaacaaggattacggactagatggcaaggtgtcggatgccgtatcctgcgcctgcgacgatgtcatttccggcaagctatacaaacagggtcacttcccattggtcatctggcaaaccggttcgggcacccagaccaatatgaacaccaacgaggtgatcagcaatgcggccattaagatgatgggcggcgaactgggcagcaagaagccggtgcatcccaacgatcatgtgaacaagtcgcagagctccaacgacaccttccccacggccattcacatttcggtgggcatggagctgaacgagcggcttgttccggcggttacacacttgagggatgccctcaagtccaagtcggatgagttcaaggacatcatcaagatcggacgcacccacttgatggacgcagttccgctgactttgggccaggaattcagcggttatacacagcagttgaccaacggtctggaaaggatcaagggctgtctgccgcgcgtctatgagctggctctgggcggcactgctgtgggtacgggtctgaacacacgcaagggattcgccgagaaggtggccaagcgcatttcggagctaacctgcttgcccttcgtgtcggcgcccaacaagttcgaggcactggctgcccgcgatgccatggtggaggtgcatggtgtgctcaacacgatcgccgtcagcctgatgaagatcgccaacgatatccgattgctgggatcgggtccgcgttgcggtctgggcgaactaatgctgccggagaacgagcccggtagctccatcatgcccggcaaggtgaatcccacgcaatgcgaatcaatgaccatgctgtgtgcccaggtgatgggcaatcaggtggcggtgaccatcggcggctccaacgggcacttcgagctaaatgtattcaaacccctggtcgtgtccaatgtgctgcgctccattcgcttgttggctgatggcagcatgaccttcagcaagaactgcgtggagggactgcaggccaacaaggagaggatcgacaagatcatgaacgagtccttgatgctggtgaccgcgctgaatccgcacattggctatgacaaggccgccctgatcgccaagacggcgcacaagaataagacgaccttgaaggaggaggcactgaagaccggaattaccgaagagcagttcaaggagtgggtcaatcccaaggagatgctgggaccgaagtga

SEQ ID NO: 9580 - protein, 503 aa, Drosophila melanogaster
MLKQNNGLHLARRNLWVVCSGLRAKDCDSGGKGGKGKENGKFRTEKDTFGELKVPADKLYGAQTMRSKLNFPIGDIGERMPMPVIQAMGILKKACAEVNKDYGLDGKVSDAVSCACDDVISGKLYKQGHFPLVIWQTGSGTQTNMNTNEVISNAAIKMMGGELGSKKPVHPNDHVNKSQSSNDTFPTAIHISVGMELNERLVPAVTHLRDALKSKSDEFKDIIKIGRTHLMDAVPLTLGQEFSGYTQQLTNGLERIKGCLPRVYELALGGTAVGTGLNTRKGFAEKVAKRISELTCLPFVSAPNKFEALAARDAMVEVHGVLNTIAVSLMKIANDIRLLGSGPRCGLGELMLPENEPGSSIMPGKVNPTQCESMTMLCAQVMGNQVAVTIGGSNGHFELNVFKPLVVSNVLRSIRLLADGSMTFSKNCVEGLQANKERIDKIMNESLMLVTALNPHIGYDKAALIAKTAHKNKTTLKEEALKTGITEEQFKEWVNPKEMLGPK

SEQ ID NO: 9581 - DNA, 1617 bp, Corynebacterium efficiens YS-314; identical to SEQ ID NO: 6202
  CDS (1)..(1617): transl_table=11

SEQ ID NO: 9582 - protein, 538 aa, Corynebacterium efficiens YS-314; identical to SEQ ID NO: 6203

SEQ ID NO: 9583 - DNA, 1380 bp, Pseudomonas putida KT2440; identical to SEQ ID NO: 6368
  CDS (1)..(1380): transl_table=11

SEQ ID NO: 9584 - protein, 459 aa, Pseudomonas putida KT2440; identical to SEQ ID NO: 6369

SEQ ID NO: 9585 - DNA, 1437 bp, Pseudomonas putida KT2440; identical to SEQ ID NO: 6204
  CDS (1)..(1437): transl_table=11

SEQ ID NO: 9586 - protein, 478 aa, Pseudomonas putida KT2440; identical to SEQ ID NO: 6205

SEQ ID NO: 9587 - DNA, 1452 bp, Vibrio vulnificus CMCP6; identical to SEQ ID NO: 6206
  CDS (1)..(1452): transl_table=11

SEQ ID NO: 9588 - protein, 483 aa, Vibrio vulnificus CMCP6; identical to SEQ ID NO: 6207

SEQ ID NO: 9589 - DNA, 1401 bp, Bradyrhizobium japonicum USDA 110; identical to SEQ ID NO: 6208
  CDS (1)..(1401): transl_table=11

SEQ ID NO: 9590 - protein, 466 aa, Bradyrhizobium japonicum USDA 110; identical to SEQ ID NO: 6209

SEQ ID NO: 9591 - DNA, 1413 bp, Clostridium tetani E88; identical to SEQ ID NO: 6102
  CDS (1)..(1413): transl_table=11

SEQ ID NO: 9592 - protein, 470 aa, Clostridium tetani E88; identical to SEQ ID NO: 6103

SEQ ID NO: 9593 - DNA, 1401 bp, Lactobacillus plantarum WCFS1; identical to SEQ ID NO: 6100
  CDS (1)..(1401): transl_table=11

SEQ ID NO: 9594 - protein, 466 aa, Lactobacillus plantarum WCFS1; identical to SEQ ID NO: 6101

SEQ ID NO: 9595 - DNA, 1452 bp, Vibrio parahaemolyticus RIMD 2210633; identical to SEQ ID NO: 6212
  CDS (1)..(1452): transl_table=11

SEQ ID NO: 9596 - protein, 483 aa, Vibrio parahaemolyticus RIMD 2210633; identical to SEQ ID NO: 6213

SEQ ID NO: 9597 - DNA, 1461 bp, Bacteroides thetaiotaomicron VPI-5482; identical to SEQ ID NO: 6214
  CDS (1)..(1461): transl_table=11

SEQ ID NO: 9598 - protein, 486 aa, Bacteroides thetaiotaomicron VPI-5482; identical to SEQ ID NO: 6215

SEQ ID NO: 9599 - DNA, 1413 bp, Streptomyces avermitilis MA-4680; identical to SEQ ID NO: 6216
  CDS (1)..(1413): transl_table=11

SEQ ID NO: 9600 - protein, 470 aa, Streptomyces avermitilis MA-4680; identical to SEQ ID NO: 6217

SEQ ID NO: 9601 - DNA, 1434 bp, Bacillus anthracis str. Ames; identical to SEQ ID NO: 6220
  CDS (1)..(1434): transl_table=11

SEQ ID NO: 9602 - protein, 477 aa, Bacillus anthracis str. Ames; identical to SEQ ID NO: 6221

SEQ ID NO: 9603 - DNA, 1533 bp, Arabidopsis thaliana
  CDS (1)..(1533)
atggccgctttgacaatgcagtttgaaggagagaagaaaaacgtatccgaagttgcagacgtaaccctcaagcaagaagatgaacaacaagaacgtagatcttattcgacgccgtttagggaagagagagacacctttggcccgatccaagttccttccgataaattatggggagcacagacgcagagatcgcttcagaacttcgagattggtggtgaccgcgagcgaatgcccgaaccaatcgtccgagcttttggtgtcttgaagaaatgtgctgccaaggttaacatggagtatggtcttgatccaatgattggggaagccataatggaagctgcacaagaagtagcagaaggaaagctcaatgatcatttccctcttgttgtatggcaaactggtagtgggacgcagagtaatatgaatgctaatgaggtcattgccaatagagcagctgagattcttggtcacaaacgtggtgaaaaaattgtgcacccaaatgaccatgtgaacagatcacaatcttctaatgacacttttccaactgtcatgcacattgcagctgcaaccgagattacttcgaggctaatccctagtttgaaaaatttgcatagctctttggaatctaagtccttcgagtttaaagatatagtgaaaatcggaagaactcatactcaagatgctacacctttgacattaggacaagaatttggtggctatgctactcaagttgagtatggacttaatagagtcgcatgtactctaccccgcatctatcagcttgcacaaggtggaactgctgttgggaccggattaaacactaagaaagggtttgatgtaaagatcgctgctgcagtagctgaagaaacaaacttgccattcgtcaccgcagaaaacaagtttgaagctctggctgcacacgatgcttgtgttgaaacaagtggatctcttaacacaatcgccacatcattgatgaagattgccaatgatatacgttttcttggaagtggtccaagatgtggtcttggtgaactttctctgcctgagaatgaaccaggaagcagtattatgcctggaaaggtaaatcctacacagtgtgaggccttgactatggtttgtgctcaagttatgggaaaccatgtagccgtgacaattggtgggtcgaatggtcattttgaattgaatgtattcaagccggttatcgcaagcgctctcttacattccattagactaatagcagatgcttcagcttcatttgagaaaaactgtgttagaggcattgaggccaacagagaaaggatctcaaagctattgcacgagtctcttatgcttgtgacatcattgaatcctaaaattggctatgacaatgctgcagcagtagccaaaagagctcacaaagaaggatgcacattaaaggtaaacaataaactattaacgttttcatcactaaataaatcggaatttaaacccatttttagcaagagaaaacatgttcatgtttgttacaatatatttgttgttctattttggatttaa

SEQ ID NO: 9604 - protein, 510 aa, Arabidopsis thaliana; identical to SEQ ID NO: 6141

SEQ ID NO: 9605 - DNA, 1440 bp, Wigglesworthia glossinidia endosymbiont of Glossina brevipalpis; identical to SEQ ID NO: 6224
  CDS (1)..(1440): transl_table=11

SEQ ID NO: 9606 - protein, 479 aa, Wigglesworthia glossinidia endosymbiont of Glossina brevipalpis; identical to SEQ ID NO: 6225

SEQ ID NO: 9607 - DNA, 1428 bp, Haemophilus ducreyi 35000HP; identical to SEQ ID NO: 6226
  CDS (1)..(1428): transl_table=11

SEQ ID NO: 9608 - protein, 475 aa, Haemophilus ducreyi 35000HP; identical to SEQ ID NO: 6227

SEQ ID NO: 9609 - DNA, 1404 bp, Chromobacterium violaceum ATCC 12472; identical to SEQ ID NO: 6228
  CDS (1)..(1404): transl_table=11

SEQ ID NO: 9610 - protein, 467 aa, Chromobacterium violaceum ATCC 12472; identical to SEQ ID NO: 6229

SEQ ID NO: 9611 - DNA, 1428 bp, Porphyromonas gingivalis W83; identical to SEQ ID NO: 6230
  CDS (1)..(1428): transl_table=11

SEQ ID NO: 9612 - protein, 475 aa, Porphyromonas gingivalis W83; identical to SEQ ID NO: 6231

SEQ ID NO: 9613 - DNA, 1410 bp, Gloeobacter violaceus PCC 7421; identical to SEQ ID NO: 6098
  CDS (1)..(1410): transl_table=11

SEQ ID NO: 9614 - protein, 469 aa, Gloeobacter violaceus PCC 7421; identical to SEQ ID NO: 6099

SEQ ID NO: 9615 - DNA, 1425 bp, Photorhabdus luminescens subsp. laumondii TTO1; identical to SEQ ID NO: 6234
  CDS (1)..(1425): transl_table=11

SEQ ID NO: 9616 - protein, 474 aa, Photorhabdus luminescens subsp. laumondii TTO1; identical to SEQ ID NO: 6235

SEQ ID NO: 9617 - DNA, 1452 bp, Vibrio vulnificus YJ016; identical to SEQ ID NO: 6236
  CDS (1)..(1452): transl_table=11

SEQ ID NO: 9618 - protein, 483 aa, Vibrio vulnificus YJ016; identical to SEQ ID NO: 6237

SEQ ID NO: 9619 - DNA, 1575 bp, Corynebacterium diphtheriae NCTC 13129; identical to SEQ ID NO: 6238
  CDS (1)..(1575): transl_table=11

SEQ ID NO: 9620 - protein, 524 aa, Corynebacterium diphtheriae NCTC 13129; identical to SEQ ID NO: 6239

SEQ ID NO: 9621 - DNA, 1392 bp, Geobacter sulfurreducens PCA
  CDS (1)..(1392): transl_table=11
gtgacgttccgggtcgagaaggataccctcggtgaggtgcgggttccggcggacgcctactacggcgcccagacggtccgggccgtggagaatttccccatctccgggctgcggccccatccggccctcgtccgggcgacggtgctcgtcaaaatgtgtgcggcccgggccaacatggccacgggcaggctcgattcccggcttggagacgctatcgtccgggcggccgacgagtgcctggccggtgcctttgatgcccacttcgtggtggacccgtttcaagccggcgccggcacctcccacaacatgaacgtgaacgaggtcctcgccaaccgggccaatgaactgctgggagaggagcggggcaggtatgctcccgtccatcccaacgaccacgtgaacatggcccagtccaccaacgacgtcttccccacggccatgcgtctggcggcccttcgggtggcgggggatctccggccggccctagagggactcgttgccgcgcttcggaaaaagtccgctgaattcgacggcattctcaagagcggccggactcacctgcaggatgcggtgccgatccgtctcggccaggagttcgaggcgtgggccgtggcgctggagaagaacctggccgccatcgagggggcggtgccgggccttgcggaactgggtatcggcggcaccgcggcaggtaccggcatgaacgccgagccggcctacatcgatcttgtggtggcagagctcgcccgggaaaccggctttcccctcgtacggggtgcgaacctggttgagcggatgcagaacatggaccccttcgtggccctctcctccgctctcaagggacttgccgtaaacctcgcccgtatcgccaacgacctgcggctcctttcctctggcccccggaccgggctggccgagatcgcgctgccggcgctgcagcccggctcctctatcatgccggggaaggtcaacccggtcatggccgaggtgaccgacatggtcgcctttcaagtgatgggtgcggacacgacaatcatgctcgccgcccaggcagggcagctggagcttaacgtcatgatgccggtcatcgcgttcaaccttctgttcagccttgaaatcctgaagaacacggtgcccaagctggctgatgcctgcatcgccggcatcactgcggaccgggagcgctgcctccggtacctggagcagtcggtaggactggccacggtgctcgcgccctacatcggctatgccgcggccgcggaggtggccaaggaatcgactgccacgggccggagtatccggcagatcgtggaagaccggcagctcctgtcggccgggcgtctggcggagatcctcgaccccttccctctcaccagccctggcgttccgtga

SEQ ID NO: 9622 - protein, 463 aa, Geobacter sulfurreducens PCA; identical to SEQ ID NO: 6097

SEQ ID NO: 9623 - DNA, 1395 bp, Wolbachia endosymbiont of Drosophila melanogaster; identical to SEQ ID NO: 6346
  CDS (1)..(1395): transl_table=11

SEQ ID NO: 9624 - protein, 464 aa, Wolbachia endosymbiont of Drosophila melanogaster; identical to SEQ ID NO: 6347

SEQ ID NO: 9625 - DNA, 1431 bp, Bdellovibrio bacteriovorus HD100; identical to SEQ ID NO: 6240
  CDS (1)..(1431): transl_table=11

SEQ ID NO: 9626 - protein, 476 aa, Bdellovibrio bacteriovorus HD100; identical to SEQ ID NO: 6241

SEQ ID NO: 9627 - DNA, 1392 bp, Treponema denticola ATCC 35405; identical to SEQ ID NO: 6094
  CDS (1)..(1392): transl_table=11

SEQ ID NO: 9628 - protein, 463 aa, Treponema denticola ATCC 35405; identical to SEQ ID NO: 6095

SEQ ID NO: 9629 - DNA, 1434 bp, Bacillus cereus ATCC 10987; identical to SEQ ID NO: 6242
  CDS (1)..(1434): transl_table=11

SEQ ID NO: 9630 - protein, 477 aa, Bacillus cereus ATCC 10987; identical to SEQ ID NO: 6243

SEQ ID NO: 9631 - DNA, 1422 bp, Nasonia vitripennis
  CDS (1)..(1422)
atggcattcaacgcactgagacagcgggtgacgagcgtcgggcttcgccgtcagccgagggaaatcagcgccttcctcgggccgcggctcgtcatgtgcgagcccaagtgccgagcggcctccaaggccagcggcgagtacaggctcgagagggacaccttcggggagctgaaggtgccggctgataagtattatggagcccagacgatgcgatcggtaatgaacttcccgatcggcgaccaggccgagcgcatgccgaaaggcgtcatcgtggctatgggtatcctgaagaaagccgccgccgaggtgaacaaggaattcggcctcgacgcgaaagtcgcggatgccatcagcaaagtgatctcgaaccgagcgatcgagctgcttggtggtcagctgggctccaagaacccggtccatcccaacgaccacgtgaacaagtcccagagctcgaacgacaccttccctacggcgatgcacatcgccgtagccctggaaatcaacaagatcctcatccccggcctccagcagctgcactcggcacttaaggaaaaatctcaggcatggaaggacatcatcaagatcggcaggacgcacacgcaggacgccgtgccgctgactctcggccaggaattttccgcttacgcgacacaggtggagaacggaatcgcccgagtgaaggacacgctgccgaggctctaccagctggcccttggaggtaccgccgtaggtactggtttgaacacgaggataggcttcgctgagaaagccgctgcgagaatcgcttccctcacaggtctgcccttcgttacggctcccaacaagttcgaagcgctggctgctcacgatgcgctcgttgaggtccacggtgcgctcaacactgtcgctgtctctctgatgaagatcgccaacgacatccgattcctgggcagcggaccccgctgtggtcttggcgagctctccctgcccgaaaacgagcctggtagctccatcatgcctggaaaggtgaacccaactcagtgcgaggccctgacgatggtgtgtgcccaggtgatgggtaaccacgtcgcgacgacgatcggcggcagcaacggccacttcgagctcaacgtcttcaagcccgtcatcgtcgccaacgtcctcaggtcggccagacttcttggtgacgcctctgctacgttcaccaagaactgcgtcgtcggaattcagcccaacatcgacgccatcaacaagatcatgaacgagagtcttatgctagtcacggcccttaatcctcatatcggttacgataaggctgctgcgatagcgaagcaagcacacaaagagaagctgacgctgaaggaatcggcattgaagaacggcctcaccgaggaacaattcaaccagtgggtcaaacccgaggagatgcttggacctaagtaa

SEQ ID NO: 9632 - protein, 473 aa, Nasonia vitripennis
MAFNALRQRVTSVGLRRQPREISAFLGPRLVMCEPKCRAASKASGEYRLERDTFGELKVPADKYYGAQTMRSVMNFPIGDQAERMPKGVIVAMGILKKAAAEVNKEFGLDAKVADAISKVISNRAIELLGGQLGSKNPVHPNDHVNKSQSSNDTFPTAMHIAVALEINKILIPGLQQLHSALKEKSQAWKDIIKIGRTHTQDAVPLTLGQEFSAYATQVENGIARVKDTLPRLYQLALGGTAVGTGLNTRIGFAEKAAARIASLTGLPFVTAPNKFEALAAHDALVEVHGALNTVAVSLMKIANDIRFLGSGPRCGLGELSLPENEPGSSIMPGKVNPTQCEALTMVCAQVMGNHVATTIGGSNGHFELNVFKPVIVANVLRSARLLGDASATFTKNCVVGIQPNIDAINKIMNESLMLVTALNPHIGYDKAAAIAKQAHKEKLTLKESALKNGLTEEQFNQWVKPEEMLGPK

SEQ ID NO: 9633 - DNA, 1638 bp, Magnaporthe grisea 70-15
  CDS (1)..(1638)
atgcgacaggtgcaggcggctgcggccaggtcttttcagacatgtgggccgaggttaggtgcttcaattaacccctccgcagctgtaacgaggagggcattgagcagctccagtagatggactagctcccctcgttgtaccatcatcgcatcttcacctttctccaacactcagacgcatatctcccgcagctccaggctgttccactccacaccagttaccatgtccgcgaacactagggctgagaccgatgcctttggcgaggttcaggtgcctgccgacaagtactggggcgcccagacacagcgctcgctcggcaacttcgacatcaaccagcctcaggatcgcatgcccccgccaattgtcaaggctctgggtatcctcaagggcgccgccgccacggtgaacatgaactatggccttgaccccaccatcggcaaggccattcagcaggcggccaaggaggtcgctgacctgaagctgctcgaccacttccccttggtcgtctggcagaccggctctggcactcagtccaacatgaacgcgaacgaggtcatctccaaccgagccatcgagatcctgggcggcgagaagggcagcaagaaacccgtccaccccaacgaccacgtcaaccgcagcgcctcctctaacgacaccttccccaccgtcatgcacatcgccgccgtcctcgagatcgagggtgagctgattccttccctgcgcagcctgcgagacgccctgcaggccaaggtggacgagttcgaggccaagaagattatcaagattggccgcacacatctccaggacgccacgcctctgactctggctcaggagttctctggctacgtcgcccagcttgactttggcatcaagcgcgtcgaggctaccctgccggacctgaggctgctcgctcagggcggtaccgctgtcggcaccggcattaacacctttgagggctttgctgagggcatcgccgaggaggtcagccgcatgactggcaccgagttcaagacggcccccaacaagttcgaggcccttgctgcgcatgacgcgcttgtgcatgcctcgggcgctctcaacactctcgccacctcgctgaccaaggttgctcaggacatccgctacctgggcagcggcccgcgctgcggcctgggcgagctcgttctgcctgagaacgagccgggcagcagcatcatgcctggaaaggtcaatccgacccagtgcgaggccctgaccatggtttgcgcgcaggtcatgggcaaccatgttgctgctaccattggtggcatgaacggccagtttgagcttaacgtctacaagcccctcatcatccgcaacgtcctgcacagcgtcaggctgctgtcagatggcatgcggtcgtttgagaagcacctcgtcgagggcctcaaggccaacgaggagaagattgccagcattatgaaggagtctctcatgcttgtcacctgccttaaccccaagattggctatgacatggctagcaaggtcgcaaagaacgcccacaagaagggtctgaccctaaaggaaagcgccctcgagctcaatgctctgactgaggaagagtttgacaccttggtcaagcccgagctcatgatcactcccaagccctacaaggcctag

SEQ ID NO: 9634 - protein, 545 aa, Magnaporthe grisea 70-15
MRQVQAAAARSFQTCGPRLGASINPSAAVTRRALSSSSRWTSSPRCTIIASSPFSNTQTHISRSSRLFHSTPVTMSANTRAETDAFGEVQVPADKYWGAQTQRSLGNFDINQPQDRMPPPIVKALGILKGAAATVNMNYGLDPTIGKAIQQAAKEVADLKLLDHFPLVVWQTGSGTQSNMNANEVISNRAIEILGGEKGSKKPVHPNDHVNRSASSNDTFPTVMHIAAVLEIEGELIPSLRSLRDALQAKVDEFEAKKIIKIGRTHLQDATPLTLAQEFSGYVAQLDFGIKRVEATLPDLRLLAQGGTAVGTGINTFEGFAEGIAEEVSRMTGTEFKTAPNKFEALAAHDALVHASGALNTLATSLTKVAQDIRYLGSGPRCGLGELVLPENEPGSSIMPGKVNPTQCEALTMVCAQVMGNHVAATIGGMNGQFELNVYKPLIIRNVLHSVRLLSDGMRSFEKHLVEGLKANEEKIASIMKESLMLVTCLNPKIGYDMASKVAKNAHKKGLTLKESALELNALTEEEFDTLVKPELMITPKPYKA

SEQ ID NO: 9635 - DNA, 1590 bp, Gibberella zeae PH-1
  CDS (1)..(1590)
atgcttcgatctgtcacgggacgcgctgccgcctcgggccttatgaagtcagctctgcctcgggtctcccaagcagcagctcccacatgctcgcttgccccgcagctgcgactccaaagcaagtcttctgttgctggtcttcgactctccagagctattcacagcacctcagtcaggatgtctcaaacacgaacagaaagcgatgcctttggcgagatccaggtccccgccgaccgctactggggagctcagacggagcgatccctcgagaacttccgtatcaaccagccccaggaccgcatgcccccacctattgtcaaggcgtttggtatcctgaagggtgctgccgccactgttaacatgaaatatggacttgaccccaagatcggtgccgctatccagcaggctgccaaggaggtcgctgatggcaagctcatcgaccacttccctctcgtcgtctggcagactggctccggtactcagtccaacatgaacgccaacgaggtcatctccaaccgtgccattgagattcttggcggtaccatgggcagcaagaagcctgtccaccccaatgaccacgtcaaccgcagcgcttcctccaacgacacttttcctaccgtcatgcacattgctgctgtcctcgacattgaaagcgagctcctgcctgctctccgcagcctgcgcgacgctatccagaagaaggtcgacgagttcgaggccaagaagatcatcaagatcggccgtactcaccttcaggacgccactcctctcactctcgcccaggagttctccggttacgttgcccagctcgactttggcatcaagcgtgtcgagagctctctgcccgacctacgactcctcgcccagggtggtaccgctgtcggtactggcatcaacactttccagggatttgccgaggctatcgctgaggaggtcacaaagatgaccggtactgagttcaagactgcccccaacaagttcgaggccctcgccgcccacgacgctattgtccaggcccacggctccctcaacaccctggctgcttctcttaccaaaatcgcacaagacgtccgataccttggtagcggcccccgttgcggtcttggtgagctgaacctgcccgagaacgagcctggcagcagtatcatgcctggcaaggtcaaccctacccagtgtgaggccttgactatggtctgcgcccaggttatgggcaaccacgttgccaccactatcggaggcatgaacggccagtttgaactcaacgtttacaagcctctggtcattcgtaacctgctccacagctcccgtcttctgactgacggcatgcgctctttcgagaagaacctggttgccggcctcaacgctaacgaggagaagattgccagcatcatgaaggagtcgcttatgcttgtcacctgcctgaaccccaagattggatacgacatggctagcaaggttgccaagaacgctcataagaagggccttaccctcaagcagagtgctctcgaactaaacgctctgactgaggaggaatttgacactttggttaagcctgagctgatggtcggtcccagtccttacaagggttag

SEQ ID NO: 9636 - protein, 529 aa, Gibberella zeae PH-1
MLRSVTGRAAASGLMKSALPRVSQAAAPTCSLAPQLRLQSKSSVAGLRLSRAIHSTSVRMSQTRTESDAFGEIQVPADRYWGAQTERSLENFRINQPQDRMPPPIVKAFGILKGAAATVNMKYGLDPKIGAAIQQAAKEVADGKLIDHFPLVVWQTGSGTQSNMNANEVISNRAIEILGGTMGSKKPVHPNDHVNRSASSNDTFPTVMHIAAVLDIESELLPALRSLRDAIQKKVDEFEAKKIIKIGRTHLQDATPLTLAQEFSGYVAQLDFGIKRVESSLPDLRLLAQGGTAVGTGINTFQGFAEAIAEEVTKMTGTEFKTAPNKFEALAAHDAIVQAHGSLNTLAASLTKIAQDVRYLGSGPRCGLGELNLPENEPGSSIMPGKVNPTQCEALTMVCAQVMGNHVATTIGGMNGQFELNVYKPLVIRNLLHSSRLLTDGMRSFEKNLVAGLNANEEKIASIMKESLMLVTCLNPKIGYDMASKVAKNAHKKGLTLKQSALELNALTEEEFDTLVKPELMVGPSPYKG

SEQ ID NO: 9637 - DNA, 1452 bp, Candida glabrata CBS 138; identical to SEQ ID NO: 6320
  CDS (1)..(1452)

SEQ ID NO: 9638 - protein, 483 aa, Candida glabrata CBS 138; identical to SEQ ID NO: 6321

SEQ ID NO: 9639 - DNA, 1479 bp, Kluyveromyces lactis NRRL Y-1140
  CDS (1)..(1479)
atgttgagaaatagcattgtatcacgtggtctagctcaaacccgcgttagtgcaaaggttaacagactagcatcgttaagaatggtttcgtatagagtggagaccgatgcgttcggtgagatccaagttccttctgataagtactggggtgctcaaacccaacgttctttgcaaaatttcaagattggtggtcctcgtgaaagaatgcctgagccaattgtcaaggcttttggtgttttgaagaagtcggctgctgtggtcaatgagcgtctggggacgttggaccctgaaatcgctaagcctatcaagcaagcagccgatgaagttgctcagggtaaactaatggaacattttccattggttgtgttccaaactgggtctggtactcagtccaacatgaacgccaacgaagttatttcaaacagggccatcgaattgattggtggtgaattgggttctaagaagattcacccaaacaaccactgtaaccaagctcaatccagtaacgatactttcccatctgttatgcatattgctgctgtcactgaaattacacaccatttgttgccagaattggaaggtttgaaagttgctttaaagcaaaaatctgatgagttccagcatatcgttaagatcggtagaacccatttgcaagatgctactccattgaccctaggtcaagagttcagcggatacgtgcaacaggtggagaacggtattgctcgtgttaaacaatctctatatcatttgaagttcttggcacaaggtggtactgccgttggtactggtttgaatactaaggtcggttttgctgaagatatcgctgaacaagtttctaaagaaactggtatcgatttcaagaccgctccaaacaagttcgaagcattggctgctcacgatgctgtcgttgaagcctctggtgccctaaacactctggctgtctctttattcaagattgctaacgatatcagatacttgggttctggacctcgttgcggttacggtgaattaagtttgccagaaaacgaaccaggttcttctatcatgcctggtaaagtgaaccctactcagaatgaagccatgactcaagtgtgtgttcaagttatgggtaaccatgccgctatcacttttgcaggtgcttctggtcaatttgaattgaatgtcttcaagccagttatgatctcgaacttgttgagttcaatcagactattgggagatgcttctaactctttcagaattcactgtgttgaaggtattaaggctaacgaggacagaatcgctaaattgttgcatgaatccttaatgttggtaactgcattgaacccaaagatcggttacgatgccgcttctaaggtcgctaagaacgctcacaagaagggaatcactttgaaggaatctgctttggaattgaaggttctatcaagtgaagaattcgaccaatgggtcatccctgaaaagatgattggtccaaaggagtaa

SEQ ID NO: 9640 - protein, 492 aa, Kluyveromyces lactis NRRL Y-1140
MLRNSIVSRGLAQTRVSAKVNRLASLRMVSYRVETDAFGEIQVPSDKYWGAQTQRSLQNFKIGGPRERMPEPIVKAFGVLKKSAAVVNERLGTLDPEIAKPIKQAADEVAQGKLMEHFPLVVFQTGSGTQSNMNANEVISNRAIELIGGELGSKKIHPNNHCNQAQSSNDTFPSVMHIAAVTEITHHLLPELEGLKVALKQKSDEFQHIVKIGRTHLQDATPLTLGQEFSGYVQQVENGIARVKQSLYHLKFLAQGGTAVGTGLNTKVGFAEDIAEQVSKETGIDFKTAPNKFEALAAHDAVVEASGALNTLAVSLFKIANDIRYLGSGPRCGYGELSLPENEPGSSIMPGKVNPTQNEAMTQVCVQVMGNHAAITFAGASGQFELNVFKPVMISNLLSSIRLLGDASNSFRIHCVEGIKANEDRIAKLLHESLMLVTALNPKIGYDAASKVAKNAHKKGITLKESALELKVLSSEEFDQWVIPEKMIGPKE

SEQ ID NO: 9641 - DNA, 1479 bp, Debaryomyces hansenii CBS767
  CDS (1)..(1479)
atgttaagattaaccagtaaatataccccagtggctagatctattcaattaagatcattatcgtcaacttctgcattattaagttcgaccagaaccgaatcagatgctttcggtgaaatcgaagttgattcagctaagtattacggtgcccaaactgccagatccaagcataacttcaagatcggtggtgaagccgcaagaatgccaattccggttgtgagagcatttggtattttaaaaaaatctgctgctattgtgaacgaaggtttaggagctttagatcctaaattatccaaggctatccaacaagctgctactgaagttgcggaaggtaaattggatgaccacttcccattggttgtgttccaaactggttcaggtactcaatctaacatgaatgctaacgaagttatttccaacagagccattgaaatcttaggtggtgaattgggttccaagaagccagttcatccaaacgatcactgtaacatgtctcaatcatctaatgatactttcccaacagtcatgcacattgctgctgctactgaaatttctaactctttgattccggagttaaccaagttacgtgatgcgttacaagctaagtctgatgaattcaaggatatcattaagattggtagaactcatttacaagatgctactcctttgactttaggtcaagaattttctggttacgttcaacaattaaccaacggtattgaaagaattgaaaagactttaccaaacttgcaattcttagctcaaggtggtactgctgttggtactggtttaaacaccgtcaaaggttttgactctaagattgctgaagaagtctctaagttgacttctattcctttcaagactgctcctaacaagttcgaagccttagctgctcatgatgccgttgttgaagcttcaggtgccttaaacaccgttgctgtttctttattcaagattgccaacgatatcagatacttgggttccggtccaagatgtggttacggtgaattatccttgccagaaaacgaaccaggctcgtcaattatgcctggtaaggttaacccaacccaaaatgaagccttaacaatggtcgctacccaagtcttcggtaaccactctgcaatcacttttgctggtgcatctggtcaattcgaattgaatgtcttcaagcctgtcatgatttctaacttgttgtcttcaattagattaattgctgacggttctgcttctttcagagagcattgtgttgtaggtattactgccaatgtagacaaaatcgagaaaactttacacgaatctttaatgttggttactgctttaaacccaaagattggttatgatgctgcttcaaagactgccaagaatgctcacaagaagggtttaactttgaaagaatctgctttggaattgggtgttttaaatgaacaagaattcgacgaatgggtcagaccagaaaagatgattggtccaaaggattag

SEQ ID NO: 9642 - protein, 492 aa, Debaryomyces hansenii CBS767
MLRLTSKYTPVARSIQLRSLSSTSALLSSTRTESDAFGEIEVDSAKYYGAQTARSKHNFKIGGEAARMPIPVVRAFGILKKSAAIVNEGLGALDPKLSKAIQQAATEVAEGKLDDHFPLVVFQTGSGTQSNMNANEVISNRAIEILGGELGSKKPVHPNDHCNMSQSSNDTFPTVMHIAAATEISNSLIPELTKLRDALQAKSDEFKDIIKIGRTHLQDATPLTLGQEFSGYVQQLTNGIERIEKTLPNLQFLAQGGTAVGTGLNTVKGFDSKIAEEVSKLTSIPFKTAPNKFEALAAHDAVVEASGALNTVAVSLFKIANDIRYLGSGPRCGYGELSLPENEPGSSIMPGKVNPTQNEALTMVATQVFGNHSAITFAGASGQFELNVFKPVMISNLLSSIRLIADGSASFREHCVVGITANVDKIEKTLHESLMLVTALNPKIGYDAASKTAKNAHKKGLTLKESALELGVLNEQEFDEWVRPEKMIGPKD

SEQ ID NO: 9643 - DNA, 1404 bp, Debaryomyces hansenii CBS767
  CDS (1)..(1404)
atgtcaggtaacaaagctaacgaaagggtcgaaagcgatgcgttcggagaaatctccgttccaaacgataagtattggggtgcccaaagtcaaagatcgttaggtaattttgatatcggtgatattagaatgccagaatccattgttaaatcatttggtattttaaagaaggctgctgccattgttaatgaggaaatcggtgcgttagaccctctgttagctaaggctatcaaagaagctgcaactgaagttgcggaaggtaaattgacggaacatttcccattagtagtctaccagacaggatccggtactcaatcaaacatgaatgccaacgaggttatttcgaacagagcaatcgagattttaggcggtgaaatgggttcaaagtcccctgttcatccaaatgatcactgtaatatgtcccaatcttcaaatgatactttcccaacagttatgcatattgcagccgttactgagatcagcaacaagttaattccttctttaacacagcttcgtgatgcatttgatgccaaggcaaaagaattcgaaaagatcattaaaatcggtagaactcatttgcaagatgctactccattaactttgggtcaagaattctcaggttacgttcaacaattaagttttggtattgaacgtattcaacaaacccttccaagattatcatacttagctcaaggtggtactgctgttggtactggtttgaacacttcaaagggttttgatgttaagattgcgaaagaggtttctaatattactgggttgaaattccaaactgctccaaataaattcgaagccttagctgcacatgatgcctttgttgaagcttctggtgccttaaatacattagctgtatctcttttcaagattgctaatgatattagatacttaggttctggtccaagatgtggatacggcgaattatcccttccagaaaatgaaccaggttcctccatcatgccaggtaaggttaaccctacccaatgtgaagctatgaccatggtttgtgcgcaagttatgggtaaccatactactatcactttttcaggtgcatctggtcaatttgaattaaatgttttcaagcctgtcatggccagcaacttattgtcttcgattagattaattggtgatgtatgtaagtcattcagaatccactgtgttgaaggtattgttgccaatgaagaaaagatttcaaaagtcttgaatgagtccttaatgttggtcacagccttgaacccaaagattggttacgacaatgcttccaaggtcgccaaaaatgcccacaaaaagggactcaccttaaagcaatcctgtttagatttaaacatgttgtccgaagaagagttcgaccaatgggtcagaccagaaaatatgcttggtccaaaataa

SEQ ID NO: 9644 - protein, 467 aa, Debaryomyces hansenii CBS767
MSGNKANERVESDAFGEISVPNDKYWGAQSQRSLGNFDIGDIRMPESIVKSFGILKKAAAIVNEEIGALDPLLAKAIKEAATEVAEGKLTEHFPLVVYQTGSGTQSNMNANEVISNRAIEILGGEMGSKSPVHPNDHCNMSQSSNDTFPTVMHIAAVTEISNKLIPSLTQLRDAFDAKAKEFEKIIKIGRTHLQDATPLTLGQEFSGYVQQLSFGIERIQQTLPRLSYLAQGGTAVGTGLNTSKGFDVKIAKEVSNITGLKFQTAPNKFEALAAHDAFVEASGALNTLAVSLFKIANDIRYLGSGPRCGYGELSLPENEPGSSIMPGKVNPTQCEAMTMVCAQVMGNHTTITFSGASGQFELNVFKPVMASNLLSSIRLIGDVCKSFRIHCVEGIVANEEKISKVLNESLMLVTALNPKIGYDNASKVAKNAHKKGLTLKQSCLDLNMLSEEEFDQWVRPENMLGPK

SEQ ID NO: 9645 - DNA, 1470 bp, Yarrowia lipolytica CLIB122
  CDS (1)..(1470)
atgctccgaacagtccgactagccaaggtctctcgacctctcacccttcgaaccttctccaccacccccgccttcctcggcaagcgagtcgagaaggacgcctttggagacattgatgtcgacgactcccactactggggcgcccagacccagcgatctctgcagaactttgacattggcggagagaaggccaagatgcccgagcccattgtcaaggcctttggcatcctcaagaaggccgctgccaccgtcaacatgaagtacggtctggaccccaaggttggcgaggccatccagaaggctgcccaggaggtcattgacggcaagcttaccaaggatttccccctggttgtcttccagaccggttccggtacccagtccaacatgaactccaacgaggtcatctccaaccgagccattgagatgctcggcggaaagctcggctccaagtcccccgtgcaccccaacgaccacgtcaacatgtcccagtcttccaacgacaccttccccaccgtcatgcacattgccgccgtcatggagatcaccaagaacctgatcccccagctgcagctgctcgaggagtccctcgccaagaagtctgcagagttcgacaagattatcaagattggccgaacccatctgcaggacgctacccccctgaccctcggccaggagttctccggctacgtgacccaggtcaagtacggcattgagcgagtcaaggacgttcttccccgactccgacaccttgcccagggaggaaccgccgtcggtaccggtcttaacaccaagaagggtttcgacactgccgtcgccgctgaggtctccaagatcaccggcgaggagttctccaccgcccccaacaagtttgaggctcttgccgcccacgacgccattgtcgaggcctccggtgccctcaacaccgttgccgtgtctctgttcaagattgccaacgatatccgatacctcggttccggtccccgatgtggctacggcgagcttgctctccccgagaacgagcccggttcttccatcatgcccggtaaggtcaaccccacccagaacgaggctctgaccatggtctgctgccaggttttcggaaacaactccactatcacctacgccggtgcctccggtcagttcgagctgaacgtcttcaagcccgtcatgatcgccaacctgctcgagtccatccgactcattgctgatggatctcgatctttccgaatccactgtgtcgacggcattgtcgccaacgagaagcgaatctcccagctcatgaacgagtctctcatgctggtcaccgccctcaaccccaagattggctacgacatggcctccaaggtcgccaagaacgcccacaagaagggaatcactcttaaggagtctgccctcgagctcggcgctctcacctctgaggagtttgaccagtgggtccgacccgagaagatgattggcccctctgactaa

SEQ ID NO: 9646 - protein, 489 aa, Yarrowia lipolytica CLIB122
MLRTVRLAKVSRPLTLRTFSTTPAFLGKRVEKDAFGDIDVDDSHYWGAQTQRSLQNFDIGGEKAKMPEPIVKAFGILKKAAATVNMKYGLDPKVGEAIQKAAQEVIDGKLTKDFPLVVFQTGSGTQSNMNSNEVISNRAIEMLGGKLGSKSPVHPNDHVNMSQSSNDTFPTVMHIAAVMEITKNLIPQLQLLEESLAKKSAEFDKIIKIGRTHLQDATPLTLGQEFSGYVTQVKYGIERVKDVLPRLRHLAQGGTAVGTGLNTKKGFDTAVAAEVSKITGEEFSTAPNKFEALAAHDAIVEASGALNTVAVSLFKIANDIRYLGSGPRCGYGELALPENEPGSSIMPGKVNPTQNEALTMVCCQVFGNNSTITYAGASGQFELNVFKPVMIANLLESIRLIADGSRSFRIHCVDGIVANEKRISQLMNESLMLVTALNPKIGYDMASKVAKNAHKKGITLKESALELGALTSEEFDQWVRPEKMIGPSD

SEQ ID NO: 9647 - DNA, 1635 bp, Aspergillus nidulans FGSC A4
  CDS (1)..(1635)
atggcttccagaaccgcggtgcgctcgatgagctctttgacacatgctactgccaaagcctccaacacctccgcattggcccgggccgcgacgttggctgctcgctcccccgcctcgttcactagccgacgcgcgttgagctccaatagccgaccagttacacagttcccccgccttcagtccttccagtctttctccagcaaaagatccttcagctcaaccgtcgcaatggcttccgagactcgcactgaaagtgatgcttttggcgagatccaggtccccgccgacaagtactggggcgcgcagactcagcgttcactgggcaatttcgacatcaaccagccccaggaccgcatgcccgatgctgttgtcaaggcttttggtattctcaagggtgctgctgctaccgtcaacatgaagtttggccttgatcccaagattggtgaggctatcaagcaggctgccgctgaggtcgccgagggcaagctccttgaccacttccctctcgtcgtctggcagaccggttccggcactcagtccaacatgaactccaacgaggttatctccaaccgtgccattgagattctcggaggcaagatgggctccaagaagcccgtccaccccaacgaccacgttaacatgtccgcttcctccaatgactctttcccaaccgccatgcacattgccgccgttctagagctggagaacactctgcttcctgctcttacgagccttcgtaatgcccttcagaagaaggtggacagcttccagaacatcattaagatcggccgtacccatttgcaggatgccactcctcttacccttggccaggagttctccggatacgttgcccagctcgaccgcaacatcgagcgcgtccaagcctctctgccccacctgcgctaccttgctcagggtggtactgccgttggtactggtcttaacaccttcaagggtttcgacgaggcgattgccgctgaggtgtccaagatgactggcaccgagttcaagaccgctcccaacaagttcgaggttcttgctgctcatgatgcaatcgtcgaggcctccggctcgcttaacacccttgccggctccctgtttaagatcgcccaggacatccgttacctcggatccggcccccgctgcggtcttggtgagctcatccttcctgagaacgaacctggttcttccatcatgcctggcaaggtcaaccctacccagtgcgagtccttgaccatggtctgctctcaagtcatgggtaaccacgtcgctgctaccattggtggcatgaacggtcagttcgagctcaatgtattcaagccactcatgatccgcaaccttcttcacagtgtgcgcattctcgccgatggcatgaagagctttgagaagaacctcgttgttggtcttgaggccaacgagtccagaatcagcactctcctccacgagagtctgatgctcgttacctgcctcaaccccgtcatcggttacgacatggcttccaaggtcgccaagaacgcccacaagaagggtatcaccctcaaagagagtgccatggagctcaaggctcttagcgaggaggactttgacaagtatgtccgaccagagctgatgctgagccctaaggagaagaaatag

SEQ ID NO: 9648 - protein, 544 aa, Aspergillus nidulans FGSC A4
MASRTAVRSMSSLTHATAKASNTSALARAATLAARSPASFTSRRALSSNSRPVTQFPRLQSFQSFSSKRSFSSTVAMASETRTESDAFGEIQVPADKYWGAQTQRSLGNFDINQPQDRMPDAVVKAFGILKGAAATVNMKFGLDPKIGEAIKQAAAEVAEGKLLDHFPLVVWQTGSGTQSNMNSNEVISNRAIEILGGKMGSKKPVHPNDHVNMSASSNDSFPTAMHIAAVLELENTLLPALTSLRNALQKKVDSFQNIIKIGRTHLQDATPLTLGQEFSGYVAQLDRNIERVQASLPHLRYLAQGGTAVGTGLNTFKGFDEAIAAEVSKMTGTEFKTAPNKFEVLAAHDAIVEASGSLNTLAGSLFKIAQDIRYLGSGPRCGLGELILPENEPGSSIMPGKVNPTQCESLTMVCSQVMGNHVAATIGGMNGQFELNVFKPLMIRNLLHSVRILADGMKSFEKNLVVGLEANESRISTLLHESLMLVTCLNPVIGYDMASKVAKNAHKKGITLKESAMELKALSEEDFDKYVRPELMLSPKEKK

SEQ ID NO: 9649 - DNA, 1389 bp, Candida albicans SC5314
  CDS (1)..(1389): transl_table=12
atgtcacgtattgaatctgacgcttttggtgaaatctcagtgccggctgataaatattggggtgctcaaacccagagatctttgggtaactttgagatcggcgatattaaaatgccaattccaataattaaagctttcgggactttgaaaaaagccgcagctatcgttaatgaaaaaatgggttccttagaccctaaattatcatctgctattcaagaagctgcttccgaggtaattgagggaaaattcaatgataatttcccattggtggtttatcaaactggttcaggaacccaatcgaacatgaatgccaatgaggtaatctccaaccgtgcaattgaaatattgggtggagaaaaaggttccaaaaaaccagttcacccaaatgaccattgtaatatgtctcaatcttctaatgatactttcccaactgtcatgcacattgctgctgttagtgaagttgaacagcagttattgccaaaattgaccgctttgagagatgcctttgaagctaaatcaaaagaatttagtgacatcattaaaattggtagaactcatttgcaagatgctactccattgacattgggtcaagagttttctggttacgttcaacaattgacttttggaatcgaaagaattaagctgactttgccaagattatcaaatttagcacaaggtggtactgctgtaggaacaggtttaaacaccaaaaaggggtttgatgttaaaattgctgaagaaatatccaatttaaccggtttgcaattccacactgctccaaacaagtttgaagcattggctgcacatgatgccatcgttgaaacatctggtgctttgaatactttggctgtttcattatacaaaattgccaatgatatcagatacttggggtccggtccaagatgtggttacggtgaattatctttacctgaaaatgaaccaggaagtctgatcatgcctggaaaagttaatccaacccaatgtgaagccatgactatggtctgtgcacaagtaatgggtaataatactacaatcaccttttcaggagctctgggtcaatttgaattgaatgtattcaagcctgtgatggcatataacttattaaattctattagattgttaggtgatgcttgtcaatcatttagattgcattgtgttgaaagtattaaagccaacaaggaaaagattgataaggtgttgaatgaatctttgatgttagttactgctttgaacccaaaaattggatatgataacgcttcgaaggctgctaagaatgcccataaaaaaggcattaccttaaaggaatcctgtttggagttggaattattaacttcagaagagtttgacgaatgggtcagaccagaaaaaatgattggtccaaaggattag

SEQ ID NO: 9650 - protein, 462 aa, Candida albicans SC5314
MSRIESDAFGEISVPADKYWGAQTQRSLGNFEIGDIKMPIPIIKAFGTLKKAAAIVNEKMGSLDPKLSSAIQEAASEVIEGKFNDNFPLVVYQTGSGTQSNMNANEVISNRAIEILGGEKGSKKPVHPNDHCNMSQSSNDTFPTVMHIAAVSEVEQQLLPKLTALRDAFEAKSKEFSDIIKIGRTHLQDATPLTLGQEFSGYVQQLTFGIERIKSTLPRLSNLAQGGTAVGTGLNTKKGFDVKIAEEISNLTGLQFHTAPNKFEALAAHDAIVETSGALNTLAVSLYKIANDIRYLGSGPRCGYGELSLPENEPGSSIMPGKVNPTQCEAMTMVCAQVMGNNTTITFSGASGQFELNVFKPVMAYNLLNSIRLLGDACQSFRLHCVESIKANKEKIDKVLNESLMLVTALNPKIGYDNASKAAKNAHKKGITLKESCLELELLTSEEFDEWVRPEKMIGPKD

SEQ ID NO: 9651 - DNA, 1419 bp, Ustilago maydis 521
  CDS (1)..(1419)
atgtcgcagggcaagttccgttctgaaaaggacacgtttggtcccctccaggtgcccgccgaccgctactggggcgctcagacccagcgatcgctccaaaactttgacattggtggacctcaagagcgcatgcccgagccgctgatcgaggcctttggtgtcctcaagaaggcggctgccaccgtcaacaagtcattcggtcttgaccccaaggtcgccgatgcgatttgccaggctgccgacgaggtgattgccggtaagctccacagccacttcccccttgttgtcttccagaccggttcaggtacccagaccaacatgaacgtcaacgaggtcatcagcaaccgtgccatcgagatcctcggcggggagctcggcagcaagaaacccgtccaccctaacgaccacgtcaacatgagccagtcgtccaacgacaccttccccaccgccatgcacgtcgcctcggtcacccagatcaccaagtcgctcctccccgctcttgaggagcttcgcgccgcgctcgacgccaagcgcgccgaatttgacgatatcatcaagatcggacgtacgcacttgcaggacgcgacgcccttgacgctcggccaggagttctctggctacgtaaagcaggtcgagaacggtatcgagcgcgtcaaggcggttattcctcgtctttcgcagctcgcccagggtggtactgctgtcggaactggtctcaacacctacatcggtttcgacaagaaagtcgctgccgagatctccaacatcaccggcttgcactttgagaccgcagagaacaagttcgaagcgcttgcagctcacgatgcgatcgtggaagccagcggtgctctcaacacagtggctgtgtcgttgatgaaaatcgctaacgacatccgatacctcggctcgggacctcgttgtggtctgggagagctgagcttgcccgagaacgaaccgggttcgtcgatcatgccaggcaaggtcaaccccacgcagtgcgaggcgctcaccatggtcgctgctcaggtcatgggtaacaacaccaccatctcggtcgccggctcgtacggtcagtttgagctcaacgtcttcaagccggtcttggtcaagaacctgctccagtccatccgtctgctcgctgatggcgctcgcagcttcaccaagaactgcgtcgtcggtatcgaggctaacagggacacgatcaacaagattctcaacgaaagtctcatgcttgctaccatcttgaactcgcatctcggctacgacaatgtcgccgcggccgctaagaaggctcataaggagggcacaaagttggtcgacgctaccgtcgcgttgggtttcatgaccgaggaggagttcaaaaagatcgtcaggcccgagttcatgcttggtcccaccgagtacaaggccaagaactaa

SEQ ID NO: 9652 - protein, 472 aa, Ustilago maydis 521
MSQGKFRSEKDTFGPLQVPADRYWGAQTQRSLQNFDIGGPQERMPEPLIEAFGVLKKAAATVNKSFGLDPKVADAICQAADEVIAGKLHSHFPLVVFQTGSGTQTNMNVNEVISNRAIEILGGELGSKKPVHPNDHVNMSQSSNDTFPTAMHVASVTQITKSLLPALEELRAALDAKRAEFDDIIKIGRTHLQDATPLTLGQEFSGYVKQVENGIERVKAVIPRLSQLAQGGTAVGTGLNTYIGFDKKVAAEISNITGLHFETAENKFEALAAHDAIVEASGALNTVAVSLMKIANDIRYLGSGPRCGLGELSLPENEPGSSIMPGKVNPTQCEALTMVAAQVMGNNTTISVAGSYGQFELNVFKPVLVKNLLQSIRLLADGARSFTKNCVVGIEANRDTINKILNESLMLATILNSHLGYDNVAAAAKKAHKEGTKLVDATVALGFMTEEEFKKIVRPEFMLGPTEYKAKN

SEQ ID NO: 9653 - DNA, 1533 bp, Cryptococcus neoformans var. neoformans B-3501A
  CDS (1)..(1533)
atgacgactcccacaaagacatccagtctcaaaaccacccagatgctcgcccgatcactcagactcacccgtactcttccccgtgtctctcttgcttctcgcggattctcctccacttcatacatcatggcagagcaaaagttcaggaaggagaaggacacttttggtgacctccaggtccccgctgacaggtactggggtgcccagacgcagcgaagtttgatgaactttgacatcggcggtccgactgagcgaatgcctcctcccctcatcaaggcctttggcgtcctcaagaaggccgccgctgctgttaaccagacttatggcctccctgccgaggttgccgagcacatccaaaaggctgctgacgaagtcatttctggcaagctcattgacgaattccccctcgtcgtcttccaaactggttccggcacccagaccaacatgaatgtgaacgaggtcatttccaacagggccattgaaatgatgggtggtgagcttggcagcaagaagcccgttcaccccaacgaccacgtcaacatgagccagtcttccaacgacactttccccaccgctatgcacattgctgccgttgttgagatcaacgagcagctccttcccgccatgaaggagctccacgctgccctcaaggccaagcaggacgctttcgagaacatcatcaagatcggtcgaactcacttgcaggatgctacccctttgactctcggtcaggagttctctggttacgtcacccaggttgagaggggtatcggccgtgtcgaggccaccttgaagaatttgagcatgttggctcaaggtggtaccgccgttggtactggtttgaacaccaggaagggctttgacgagaaggttgctgccgagatctcaaagatcaccggctacgactttgtcactgctcccaacaagtttgaggcccttgccgctcatgacgctatcgtcgaggcctctggtgccctcaacgtcgtcgctgtcagcttcatgaagatcgccaacgacatcaggtacctcggatctggtcctcgatgcggtctcggtgaactcgagttgcccgagaacgagcctggatcttccatcatgcccggcaaggtcaaccccacccagtgcgaggccctcaccatggttgctgcccaagtcatgggtaacaacaccaccatctctgtcgccggatcatacggccagttcgagctcaacgtcttcaaacccgttctcatcaagaacctcttgcagtctatccgactcttgtctgatggtgccaggagcttcaccaagaactgtgtcgtcggtatcaaggcgaacgaggacaggatcaagaagattatgaacgagagtttgatgttggctacctgcttgaacagcactttgggttacgatgacgtcgccgccatcgccaaaaaggctcacaaggagggtctcaccctcaaggagtctacccttgctctcggcaagctcacttctgaacaattcgacgagaaggtcaggcctgagctcatgttggctcccactgacgcttaa

SEQ ID NO: 9654 - protein, 510 aa, Cryptococcus neoformans var. neoformans B-3501A
MTTPTKTSSLKTTQMLARSLRLTRTLPRVSLASRGFSSTSYIMAEQKFRKEKDTFGDLQVPADRYWGAQTQRSLMNFDIGGPTERMPPPLIKAFGVLKKAAAAVNQTYGLPAEVAEHIQKAADEVISGKLIDEFPLVVFQTGSGTQTNMNVNEVISNRAIEMMGGELGSKKPVHPNDHVNMSQSSNDTFPTAMHIAAVVEINEQLLPAMKELHAALKAKQDAFENIIKIGRTHLQDATPLTLGQEFSGYVTQVERGIGRVEATLKNLSMLAQGGTAVGTGLNTRKGFDEKVAAEISKITGYDFVTAPNKFEALAAHDAIVEASGALNVVAVSFMKIANDIRYLGSGPRCGLGELELPENEPGSSIMPGKVNPTQCEALTMVAAQVMGNNTTISVAGSYGQFELNVFKPVLIKNLLQSIRLLSDGARSFTKNCVVGIKANEDRIKKIMNESLMLATCLNSTLGYDDVAAIAKKAHKEGLTLKESTLALGKLTSEQFDEKVRPELMLAPTDA

SEQ ID NO: 9655 - DNA, 1494 bp, Tribolium castaneum
  CDS (1)..(1494)
atggcgttatcaaggctctacagcagtcgcgtgactgggagcgcaaaagccgcgttgaatctctaccggaaatctctccattctcaaatagccctaatgtcggacttccgcatcgaaaaggacactttcggcgagctcaaagtgccctctgacaagtactatggggcccaaaccctgcgatccgtcatgaacttccccatcgggggcgaattcgagcgcatgccgtaccccgttataacggccatgggggtcttgaaaaaagccgccgccaccgtcaacaaagactacggtctcgaccccaaaatctccgacgcgatttgcaaagccgctgacgaagtcatctccggcaagctctactgcgaccatttccccctcgtcatttggcaaacgggctccggcacccaaaccaacatgaacacgaacgaagtgatcagtaatcgagctattgaaataatgggcggaaaactcggctccaaggacccggtgcaccccaacgaccacgtcaacaagagccagagcagcaacgacaccttccccacagccatgcacattgccgtggcggtggaaatccaaaacacgctcctgcctggcctcaaaatgctaacaaatagtctcgataagaaagcgcaggagtttaaggatatcatcaaaatcgggcgcacgcacacccaggacgccgtccccctgactctggggcaggaattcagcggctatgtccagcagatgaagttcgggattgatcgaattaacgatactttgcccaggctgtacatgctggctttggggggcacagctgtggggacggggctcaatacccggaaagggttcgccgagaaatgtgccgccgaaatttcaaaactgacaggattgcccttcacttcagcaccgaataagtttgaggctttggccgctcatgacgccctggttgaggtctcgggggcgctcaatgtggtcgcttgctcgattatgaaaattgcaaacgatattaggtttttggcgtctggccctcgctgcggcttgggcgagctgtcgctgcctgagaacgaacccggcagctccatcatgccgggcaaagtgaacccaacccagtgcgaagccatcaccatggtggccgcccaggtgatgggtaaccacgtggctgtgaccattggtggttcgaacggtcatttcgaattgaacgtttttaagcccatgatggtagccaatgttttacgatcaatccgtttgttgggagattccagcaaagctttcacaaccaattgtgtagatggcattgtagccaacaaagaccgaatcgataagcttttgcacgagagtttgatgttggtcacggctcttaacccacacattggctacgacaaggcggcccaaattgccaaaacggcgcacaaggagaacagcactttgaaggaaacggcgatcaagttggggattttgaccgaggaacagttcaaagaatgggtcaaacctgaggagatgttgggccctaaataa

SEQ ID NO: 9656 - protein, 497 aa, Tribolium castaneum
MALSRLYSSRVTGSAKAALNLYRKSLHSQIALMSDFRIEKDTFGELKVPSDKYYGAQTLRSVMNFPIGGEFERMPYPVITAMGVLKKAAATVNKDYGLDPKISDAICKAADEVISGKLYCDHFPLVIWQTGSGTQTNMNTNEVISNRAIEIMGGKLGSKDPVHPNDHVNKSQSSNDTFPTAMHIAVAVEIQNTLLPGLKMLTNSLDKKAQEFKDIIKIGRTHTQDAVPLTLGQEFSGYVQQMKFGIDRINDTLPRLYMLALGGTAVGTGLNTRKGFAEKCAAEISKLTGLPFTSAPNKFEALAAHDALVEVSGALNVVACSIMKIANDIRFLASGPRCGLGELSLPENEPGSSIMPGKVNPTQCEAITMVAAQVMGNHVAVTIGGSNGHFELNVFKPMMVANVLRSIRLLGDSSKAFTTNCVDGIVANKDRIDKLLHESLMLVTALNPHIGYDKAAQIAKTAHKENSTLKETAIKLGILTEEQFKEWVKPEEMLGPK

SEQ ID NO: 9657 - DNA, 1401 bp, Herminiimonas arsenicoxydans
  CDS (1)..(1401): transl_table=11
atgcgtcaagaacgcgacttcctcggcatcaaagccatccctccaccagcctattggggtgtacacacggcccgcgcagtggagaattttcccatcaccggacaaaccgttgcgcaaatgccggagctcattcgtgcttttgcattcgtaaagaaagctgccgctcatgccaacctgcaaatgggcgtactcaacaccagccaggccgacgcgatctcaaaagcatgtgacgatctgatcgccggacaactgcacgaccaattcgtcgtcgatgtcatacaaggtggcgcaggcacatcaaccaatatgaatgccaacgaggtaatcgccaatcgtgcgcttgagcacctcggtttggacaagggtcgctacgacgtcattcacccgaatgatcacgtcaatgcatcccagagtaccaacgacgcctatccaacagcactgaaaattgcgatctggttcgaccttcatcagctgctgcaggccctcgctaatctgcgcggcgcctttgaagccaaggccaccgaattcgtttccattctgaagataggacgtacccagttacaagacgccgtgccgatgacgctggggcaggaatttgcagcatttgccagcatgattgccgacgacgagaagcgcctgcgggaaaccgccatcctgatgaccgaagtgaacctgggcggcaccgccatcggtaccggcatcaacgcgccggtgggttatgtcgatgtcgtcattcccaaactcgccgaactgtcgggcgtccctgtaaccaaggcacgcgacatgattgccgcgacctcggataccagcggcttcgtcgatgtctcgggcatactcaagcgcatcgccaccaagctttccaagatcagcaacgatctgcgtctgctctcctccggcccccaggccggtatcggcgacatccagttgccggcgcggcaggcagggtcgtcgatcatgccgggcaaggtcaatcccgtgatccccgaggtgatgaaccaggtggcctttgaagtcatcggtaacgacgttgccatcaccatggcatcggaaggcgggcaactgcaactcaacgcctttgaacccttgatcggctgggcactgcacaagagtgtgatacaccttgccaaggcttgccacacgcttcaggtgaactgcgtagaaggcatcaagagcaatcaggatttactggcgcagcgtatcgcagagtccgtcaccttggtcacggcactgaatccgctgatcggttatgaaaaggcggcggcgattgcaaaagccgccatcgcaagcggcaagccgattgccgtggtggcagaagagctgggcatcatgagtcaggctgacatgcagaaattcttgcgacctgaaaacctgactcaggcaggcgccttgatttcaggctaa

SEQ ID NO: 9658 - protein, 466 aa, Herminiimonas arsenicoxydans
MRQERDFLGIKAIPPPAYWGVHTARAVENFPITGQTVAQMPELIRAFAFVKKAAAHANLQMGVLNTSQADAISKACDDLIAGQLHDQFVVDVIQGGAGTSTNMNANEVIANRALEHLGLDKGRYDVIHPNDHVNASQSTNDAYPTALKIAIWFDLHQLLQALANLRGAFEAKATEFVSILKIGRTQLQDAVPMTLGQEFAAFASMIADDEKRLRETAILMTEVNLGGTAIGTGINAPVGYVDVVIPKLAELSGVPVTKARDMIAATSDTSGFVDVSGILKRIATKLSKISNDLRLLSSGPQAGIGDIQLPARQAGSSIMPGKVNPVIPEVMNQVAFEVIGNDVAITMASEGGQLQLNAFEPLIGWALHKSVIHLAKACHTLQVNCVEGIKSNQDLLAQRIAESVTLVTALNPLIGYEKAAAIAKAAIASGKPIAVVAEELGIMSQADMQKFLRPENLTQAGALISG

SEQ ID NO: 9659 - DNA, 1407 bp, Burkholderia vietnamiensis G4; identical to SEQ ID NO: 6306
  CDS (1)..(1407): transl_table=11

SEQ ID NO: 9660 - protein, 468 aa, Burkholderia vietnamiensis G4; identical to SEQ ID NO: 6307

SEQ ID NO: 9661 - DNA, 1392 bp, Candidatus Protochlamydia amoebophila UWE25; identical to SEQ ID NO: 6328
  CDS (1)..(1392): transl_table=11

SEQ ID NO: 9662 - protein, 463 aa, Candidatus Protochlamydia amoebophila UWE25; identical to SEQ ID NO: 6329

SEQ ID NO: 9663 - DNA, 1434 bp, Bacillus thuringiensis serovar konkukian str. 97-27; identical to SEQ ID NO: 6248
  CDS (1)..(1434): transl_table=11

SEQ ID NO: 9664 - protein, 477 aa, Bacillus thuringiensis serovar konkukian str. 97-27; identical to SEQ ID NO: 6249

SEQ ID NO: 9665 - DNA, 1419 bp, Acinetobacter sp. ADP1; identical to SEQ ID NO: 6250
  CDS (1)..(1419): transl_table=11

SEQ ID NO: 9666 - protein, 472 aa, Acinetobacter sp. ADP1; identical to SEQ ID NO: 6251

SEQ ID NO: 9667 - DNA, 1440 bp, Erwinia carotovora subsp. atroseptica SCRI1043; identical to SEQ ID NO: 6252
  CDS (1)..(1440): transl_table=11

SEQ ID NO: 9668 - protein, 479 aa, Erwinia carotovora subsp. atroseptica SCRI1043; identical to SEQ ID NO: 6253

SEQ ID NO: 9669 - DNA, 1440 bp, Erwinia carotovora subsp. atroseptica SCRI1043; identical to SEQ ID NO: 6254
  CDS (1)..(1440): transl_table=11

SEQ ID NO: 9670 - protein, 479 aa, Erwinia carotovora subsp. atroseptica SCRI1043; identical to SEQ ID NO: 6255

SEQ ID NO: 9671 - DNA, 1473 bp, Propionibacterium acnes KPA171202; identical to SEQ ID NO: 6256
  CDS (1)..(1473): transl_table=11

SEQ ID NO: 9672 - protein, 490 aa, Propionibacterium acnes KPA171202; identical to SEQ ID NO: 6257

SEQ ID NO: 9673 - DNA, 1425 bp, Leifsonia xyli subsp. xyli str. CTCB07; identical to SEQ ID NO: 6258
  CDS (1)..(1425): transl_table=11

SEQ ID NO: 9674 - protein, 474 aa, Leifsonia xyli subsp. xyli str. CTCB07; identical to SEQ ID NO: 6259

SEQ ID NO: 9675 - DNA, 1884 bp, Desulfotalea psychrophila LSv54; identical to SEQ ID NO: 6260
  CDS (1)..(1884): transl_table=11

SEQ ID NO: 9676 - protein, 627 aa, Desulfotalea psychrophila LSv54; identical to SEQ ID NO: 6261

SEQ ID NO: 9677 - DNA, 1437 bp, Yersinia pseudotuberculosis IP 32953
  CDS (1)..(1437): transl_table=11
atgtcaaataacattcgtattgaagaagacctgttaggtacacgagaagtccccgcagaggcttactacggtgttcataccctgcgtgcgattgaaaacttctatatcagtaacagtaaaatcagtgacgtgccggaatttgtacgtggcatggtcatggtaaaaaaagcggcggcaatggctaacaaagagttgcataccatcccgcgtaaaattgcagacatcattattcaggcatgtgatgaagttctggataaagggaaatgtatggatcagttccccgttgatgtgttccagggcggcgcaggtacctctctcaatatgaacaccaacgaggtcttggccaatattggcctggagctgatgggccaccaaaaaggggaatatcagtaccttaaccctaacgaccatctgaacaaatgccagtccaccaacgatgcctacccaaccggtttccgcattgcggtctacgcctccatcctcaagttgatcgatgctatcaaccaattaggcgaaggtttcggtagaaaatctaaagaattcgagaaaattctgaaaatgggccgtacccaattacaggatgccgtacccatgactctgggccaggaattccgcgctttccaggtgttattgaatgaagaaaccaagaacctgcaacggaccgccgagttgctattggaagtcaacctgggtgccactgccatcggcactgcgctgaatacaccagaaggttattcacaacttgccgtgcagaaactggcagaaatcagtggattagcctgtgttcctgccgaagatttgatcgaagcgacctctgattgcggcgcttacgtgatggtacacagcgccctaaaacgcctagctgttaagatgtccaaaatctgtaacgacctacgtttgctctcatctggcccacgtactggtttgaatgaaatcaatctgccagaattgcaggcgggctcttctatcatgcctgcaaaagtgaacccggtgatccctgaagttgtaaatcaggtttgttttaaggtgatcggcaacgatacttgcattactatggcggctgaagcgggtcagcttcagttaaacgtgatggagccggtgattggtcaggccatgtttgagtctatccatatcctgactaatgcgtgttacaacctgttagagaagtgcatcaatggcattaccgctaacaaagaggtctgcgagcgctacgtctttaactccataggcatcgtcacttatcttaacccgttcattggccaccataatggtgacattgtgggtaaaatctgtgcggaaaccggtaaaaatgtgcgggaagtggttctggagcgcggtttgttaactgaagccgaactggacgacattttctctgttgaaaacctgatgcacccagcctataaagcgaaacgttataccgatgaaaatgaacaataa

SEQ ID NO: 9678 - protein, 478 aa, Yersinia pseudotuberculosis IP 32953; identical to SEQ ID NO: 6245

SEQ ID NO: 9679 - DNA, 1410 bp, Symbiobacterium thermophilum IAM 14863; identical to SEQ ID NO: 6262
  CDS (1)..(1410): transl_table=11

SEQ ID NO: 9680 - protein, 469 aa, Symbiobacterium thermophilum IAM 14863; identical to SEQ ID NO: 6263

SEQ ID NO: 9681 - DNA, 1389 bp, Anaplasma marginale str. St. Maries
  CDS (1)..(1389): transl_table=11
atgggggtgaggattgagtctgacagcatgggtaacattgaggtgccggctgaacgctattggggtgcacaaacacagcgctccatgatgaactttgcaattggagaggaaaaaatgccccggcccttgatatgggcgctgggtgtggtgaagctggcggctgcccgggtaaacgctagaaaaggaagcatagaaaagtctgtgggagaggcaatttgtgctgctgcgcaggaagttatagatggcaagatggatggggaatttcccctggtggtgtggcagactggttctggcacccaaaccaacatgaacgccaacgaagtaatagcaaaccgggccatagagatgcttggggggaaagttggtagcaagtctcccgtacacccgaatgaccatgtcaaccactctcaatcttcaaatgatgtatttcccactgccatgcacattgccgccgtggccgaggtggaacggcgcttactgcccgcgctggagacacttcgcagcgcgttggaggcgaaagttgtggcattttcggacatagtaaaaacgggtcgcacccacctccaggatgcagtacctctcacgcttggtcaggagttttcggggtacgaatgccaagtgagaaagggaatagaaagagtcaagtcctcaatggtggatgtttatcagcttgcacaggggggtacaggtgttggcacgggtttgaacaccaagaaaggctttgctgaagagtttgcaaaagaggttgcgggcatcaccggtatgaagtttataaccgcggagaacaaattcgaggcgcttgctacgcatgatgccatggtacaactaagcggcgcgctcaatacgcttgccgtcagttgcatgaaaatagcgaatgacatccggctgcttgcatctgggcccaggtgcggaataggggagatcatccttcccgcgaatgagcctgggtcgtcaatcatgccgggtaaggtgaacccgacgcagtgcgaagcactcaccatggtttgcgcgcaggttatggggaatcacgttgcagtttctgtaggggggtccaacggacaccttgagctgaacgtattcaagcctatgattgcgtataacgttctaaactctgtccgattgttggcagatgcttgtgaaagctttgcgacgaaatgcgtaagcggcatagaggccgataaagaacgtatagccgtcatgctggggcagtctctcatgctggttactgcgctaaacaggcatataggttatgacaacgccgcaaagatctccaagtttgcgtttgagaatcgtgtgacgcttaaggatgcggctgcaaaattgggtttagtagatggggcggagtttgacgcgatagttgatcccaggaagatggtctctcctgactga

SEQ ID NO: 9682 - protein, 462 aa, Anaplasma marginale str. St. Maries
MGVRIESDSMGNIEVPAERYWGAQTQRSMMNFAIGEEKMPRPLIWALGVVKLAAARVNARKGSIEKSVGEAICAAAQEVIDGKMDGEFPLVVWQTGSGTQTNMNANEVIANRAIEMLGGKVGSKSPVHPNDHVNHSQSSNDVFPTAMHIAAVAEVERRLLPALETLRSALEAKVVAFSDIVKTGRTHLQDAVPLTLGQEFSGYECQVRKGIERVKSSMVDVYQLAQGGTGVGTGLNTKKGFAEEFAKEVAGITGMKFITAENKFEALATHDAMVQLSGALNTLAVSCMKIANDIRLLASGPRCGIGEIILPANEPGSSIMPGKVNPTQCEALTMVCAQVMGNHVAVSVGGSNGHLELNVFKPMIAYNVLNSVRLLADACESFATKCVSGIEADKERIAVMLGQSLMLVTALNRHIGYDNAAKISKFAFENRVTLKDAAAKLGLVDGAEFDAIVDPRKMVSPD

SEQ ID NO: 9683 - DNA, 1371 bp, Silicibacter pomeroyi DSS-3
  CDS (1)..(1371): transl_table=11
atggacaccaccgccagccgcaccgaacatgacagtatcggcgcctgcaccatcccccagggcgcgccctggggctcacaaacccaacgcgcgatcgagaatttcccgatcaccggaataccgatcagccactatcccgaaatcgtggtggcgctggcgcaggtcaaaaaggcctgcgccctgaccaacgccgaactgggcgcgctgaccccggacaaggcggcggtgatcgcatcggtctgcgaccggatcatcgccggtcagcatcacgaggcgttttgcgtcgacgtgatgcagggtggggccgggacctcgaccaacatgaatgccaacgaggtgatcgccaacctgggtctgatcgttttgggcggcagctacggcgactatggccacctgcatcccaatgacgacgtcaaccgctcgcaatcgaccaacgatgtctatcccacggcgatccgtcttgcgacgctgtccaaggcgcgggtgctgagtgcggcgctgcgcgatctggttcaggcctttcacgacaagggtgatgagtttgcccatatcaacaaggtgggccgtacccagttgcaggacgcggtgccgatgaccttggggcaggaatttcacagctttgccaatactctggccgaagatatcgaccggatcaccgatctgggccgactgctggccgaggtcaatctgggcggcaccgccatcggcacccggatcaacacgcccgagggatatggcccgctcgtggtagagaaactggccgatatcacggggctggcgctgtctccggcccgcgacctgatcgaggcttcttcggatcttggcgccttcgtgatgttttcaggcgcgctcaaacgggtggcgatcaaactttccaagatctgcaacgacctgcgcctgctcagctcgggcccgcgcgccgggctgggggaaatcatcctgccccccgcacaggccgggtcctcgatcatgccgggcaaggtcaatccggtgatccccgaggtggtcaaccagatctgctatcaggccatcggcaacgacctgaccgtgaccatggcggccgaggccgggcaattgcagctgaacgcgatggagccggtgatcttttacaaggtcatggaaaccatgacgacgctgacggggggcatgaacgtgctcaacaatcgctgcgtgcgggggatccgggcggatgagaaacgctgtgccgagctgctgggcggcagtctggtgctggcgacgctgctggcgccggtcatcggctatgatgcggcggccaaagtgtccaaacgcgcccgggccgaagggatcaccctgcgcgaggcttgtctgaaacaggggctggacgcggcgttggtggattctctgctatga

SEQ ID NO: 9684 - protein, 456 aa, Silicibacter pomeroyi DSS-3
MDTTASRTEHDSIGACTIPQGAPWGSQTQRAIENFPITGIPISHYPEIVVALAQVKKACALTNAELGALTPDKAAVIASVCDRIIAGQHHEAFCVDVMQGGAGTSTNMNANEVIANLGLIVLGGSYGDYGHLHPNDDVNRSQSTNDVYPTAIRLATLSKARVLSAALRDLVQAFHDKGDEFAHINKVGRTQLQDAVPMTLGQEFHSFANTLAEDIDRITDLGRLLAEVNLGGTAIGTRINTPEGYGPLVVEKLADITGLALSPARDLIEASSDLGAFVMFSGALKRVAIKLSKICNDLRLLSSGPRAGLGEIILPPAQAGSSIMPGKVNPVIPEVVNQICYQAIGNDLTVTMAAEAGQLQLNAMEPVIFYKVMETMTTLTGGMNVLNNRCVRGIRADEKRCAELLGGSLVLATLLAPVIGYDAAAKVSKRARAEGITLREACLKQGLDAALVDSLL

SEQ ID NO: 9685 - DNA, 1413 bp, Bacillus clausii KSM-K16; identical to SEQ ID NO: 6138
  CDS (1)..(1413): transl_table=11

SEQ ID NO: 9686 - protein, 470 aa, Bacillus clausii KSM-K16; identical to SEQ ID NO: 6139

SEQ ID NO: 9687 - DNA, 1398 bp, Neisseria gonorrhoeae FA 1090; identical to SEQ ID NO: 6268
  CDS (1)..(1398): transl_table=11

SEQ ID NO: 9688 - protein, 465 aa, Neisseria gonorrhoeae FA 1090; identical to SEQ ID NO: 6269

SEQ ID NO: 9689 - DNA, 1458 bp, Colwellia psychrerythraea 34H; identical to SEQ ID NO: 6278
  CDS (1)..(1458): transl_table=11

SEQ ID NO: 9690 - protein, 485 aa, Colwellia psychrerythraea 34H; identical to SEQ ID NO: 6279

SEQ ID NO: 9691 - DNA, 1425 bp, Dechloromonas aromatica RCB; identical to SEQ ID NO: 6282
  CDS (1)..(1425): transl_table=11

SEQ ID NO: 9692 - protein, 474 aa, Dechloromonas aromatica RCB; identical to SEQ ID NO: 6283

SEQ ID NO: 9693 - DNA, 1428 bp, Ralstonia eutropha JMP134; identical to SEQ ID NO: 6284
  CDS (1)..(1428): transl_table=11

SEQ ID NO: 9694 - protein, 475 aa, Ralstonia eutropha JMP134; identical to SEQ ID NO: 6285

SEQ ID NO: 9695 - DNA, 1401 bp, Thiobacillus denitrificans ATCC 25259
  CDS (1)..(1401): transl_table=11
atgaatgaattccgcaccgagaaggactcgctcggcgaagtccgggttccccgagacgcgtggtacggcgcccagaccgcacgggccgtgagcaattttcccatttcgggccgcgcgccggataaggatttcgtactagcgcacgtgcgtataaagctcgcagcggcacgcgcgaattgccagccagggtggctgccggaactcaagcgcgacgcaatcgtcgcggcctgcgagcagatcctcgcgggcgcgcacctcgaccagttcgtcgttgaccgcttccaggcgggtgcgggcacgagccacaacatgaacagcaacgaggtcatcgcgaaccttgccaacgtcgcgctcggcggcgaaaagggccgctactcgccggtcaacccgaacgacgacgtcaacatggggcagtcgaccaacgacacgatcccgaccgcgatacgtctcgcagtgttggcgaagctgccccgcctggtcgccgccgtgcgcggcatggccggtgaattttcgcggctggccgagcgcgaaaaggacacggtgaaatcgggccggacgcatttgcaggatgccgtgccgacgacgctcggccaggaattcgacggctacgcgtggacgctggcgcgttgtgcggcggcgctcgaagccgtgcgcccggccctgtgcgaaatcggcctcggcggctcggcggccgggacgggactgaacacctcgcccgattatccggaccgcgtcgcggcggaactcgccgcgctgaccggcgaatcgattcgcgccggccaactcgtcgcgcagatgcagtcgatgaacgaccttgcgcggctgtccggcgaaatccgcaatctcgcgctcgaactcacgcgcatttccaacgacctgcgcctgcttgcctcggggccgcgtaccggcctcggcgaaatccagctgccgccggtgcagcccggctcgtcgatcatgccgggcaaggtcaacccggtcatgttcgaaatgctgaaccaggtctgcttccaggtgctcgggcaggatgcggcggtctcctacatggtgcaggcaggccagctcgagctcaacgtgatgatgccggcgctcggttcggcgcttttcgacgccatggactggctgaccaacgcaatcgacgccgccaccgagaagaacctcaagggcatcgtcgccaaccgggagcgctgtgcgtttttcatccaccagagcgtcgcgctcgccacgctcctgaacacccggatcggctacatggaggccgccgaggtcgccaaggaatccgaaaaaaccggccgcccggtccgcgacatcgtcgcgcagcgcgcgctgatggatgccgccgagttcgacgcgctcgtgctcgccgcggcgcatggcgtgggtagcgggggcgggggcggctga

SEQ ID NO: 9696 - protein, 466 aa, Thiobacillus denitrificans ATCC 25259
MNEFRTEKDSLGEVRVPRDAWYGAQTARAVSNFPISGRAPDKDFVLAHVRIKLAAARANCQPGWLPELKRDAIVAACEQILAGAHLDQFVVDRFQAGAGTSHNMNSNEVIANLANVALGGEKGRYSPVNPNDDVNMGQSTNDTIPTAIRLAVLAKLPRLVAAVRGMAGEFSRLAEREKDTVKSGRTHLQDAVPTTLGQEFDGYAWTLARCAAALEAVRPALCEIGLGGSAAGTGLNTSPDYPDRVAAELAALTGESIRAGQLVAQMQSMNDLARLSGEIRNLALELTRISNDLRLLASGPRTGLGEIQLPPVQPGSSIMPGKVNPVMFEMLNQVCFQVLGQDAAVSYMVQAGQLELNVMMPALGSALFDAMDWLTNAIDAATEKNLKGIVANRERCAFFIHQSVALATLLNTRIGYMEAAEVAKESEKTGRPVRDIVAQRALMDAAEFDALVLAAAHGVGSGGGGG

SEQ ID NO: 9697 - DNA, 1416 bp, Anabaena variabilis ATCC 29413
  CDS (1)..(1416): transl_table=11
atgactacaaatacagattttcgtattgaacgcgattcgatgggcgatcgccaaattgctagtgatgtttattacggtattcaaactctccgagccattgaaaatttccccattagcggtcttaagcccttacctacttacgtagatgctggtcttctaattaaaaaagctacagcaattgtcaatggagaactaggctgtattccccaagatattagccaagcgattgtgcaagcaaccgatgaaattctggcagggaagttaagggatcagtttgtcgtggatgtttatcaagccggtgcagggacatcccaccacatgaatattaacgaagtcttagcaaatcgggctttggaaattctgggtgaagaaaaaggtaattacaaacgagttagccctaatgatcatgtgaactatgggcagtctaccaacgatgttattcctactgcaattcgcatcggcggcttattggcactgaccaaaacattacagccagcattagaaaaagcgatcgctgctttagaacacaaagctgtagaatttcaagatattgtcaaatccggcagaacccatttacaggatgccgttcccgtccgcttgggtgataatttcgccgcttgggcgcatatcctctcagaacatcaaaaccgcatttacaccgcctctggagacttgatggtactcggtttaggtggtagtgcggcgggaacaggcttaaacacccatccccaataccgcgcccgtgtggttgaagtattggcagaactactcaacttaccactccaacccgcaccccatctcatggctgctatgcagagtatgtccccatttgtgaacgtttccggggcaatacgcaacctagcccaggatttagcaaaaatctctcacgatttacggctgatggactccgggccaaaaactggcttgaaagaaattcaattacccccagtacaacccggttcctcaatcatgccaggcaaatataaccccgtcatggcagagatgacatcgatggtgtgtttccaggtgatgggttacgatcaggcgatcgctcttgcagcccaagccggacaattagaattaaacgtgatgatgccgttgattgcctatgatttaattcacagcatcgaaattctggggtcaactatcgccgccctcacagaacgctgtattcaaggaattaccgccaacaaagaacggtgtttagcctacgccgaaggcagtttagctttagttactgccctcaacactcatattggttatttaaatgccgcagatgttgccaaagaatctttaaacacaggaaaatctctacggcagattgtgttagaaaaaggactgatgagcgaagcagagttagccactgtgctaaatctagaagaaatgagtagtatattgccactccaggcagagtaa

SEQ ID NO: 9698 - protein, 471 aa, Anabaena variabilis ATCC 29413
MTTNTDFRIERDSMGDRQIASDVYYGIQTLRAIENFPISGLKPLPTYVDAGLLIKKATAIVNGELGCIPQDISQAIVQATDEILAGKLRDQFVVDVYQAGAGTSHHMNINEVLANRALEILGEEKGNYKRVSPNDHVNYGQSTNDVIPTAIRIGGLLALTKTLQPALEKAIAALEHKAVEFQDIVKSGRTHLQDAVPVRLGDNFAAWAHILSEHQNRIYTASGDLMVLGLGGSAAGTGLNTHPQYRARVVEVLAELLNLPLQPAPHLMAAMQSMSPFVNVSGAIRNLAQDLAKISHDLRLMDSGPKTGLKEIQLPPVQPGSSIMPGKYNPVMAEMTSMVCFQVMGYDQAIALAAQAGQLELNVMMPLIAYDLIHSIEILGSTIAALTERCIQGITANKERCLAYAEGSLALVTALNTHIGYLNAADVAKESLNTGKSLRQIVLEKGLMSEAELATVLNLEEMSSILPLQAE

SEQ ID NO: 9699 - DNA, 1425 bp, Desulfovibrio desulfuricans G20; identical to SEQ ID NO: 6290
  CDS (1)..(1425): transl_table=11

SEQ ID NO: 9700 - protein, 474 aa, Desulfovibrio desulfuricans G20; identical to SEQ ID NO: 6291

SEQ ID NO: 9701 - DNA, 1431 bp, Moorella thermoacetica ATCC 39073
  CDS (1)..(1431): transl_table=11
atgtctacccgccaggaacacgacctgctgggcaccagggaagtaccagctactgcttattatggtatccataccctgcgggccgcagaaaacttcaacgtcagccgggccagggtccatccggaattgattaaagccctggctactgtaaaagaagccgcggccagggctaacctggacctgggttacctgccggccgaaaaaggccgggccatcatcaccgcctgccaggaagtggcccggggtgaactggccgaccagtttttcctcgacgcctaccagggcggcgccggtacctcaaccaatatgaacgtcaacgaggtaatcgccaaccgcgccctggaaattctgggtcgccccaaaggcgattacgctaccatccatcccatcgatcacgttaacctgcatcagtccactaacgatgtctaccccacggccatgcgggtggcggccatccgcctgttgctgcccctggcggatgaactggcgaaactccaggaagccctccaggagaaagaggccgccttcgccggggtggtcaaaatcggtcgtaccgagctccaggacgccgtgccggtaaccctggggcaggaattcggcgcttacgcccaggccatttcccgggaccgctggcgcctctataaagttgaagagcgcctgcgccaggtaaacctgggtggcaccgccaccggcaccggccttaacgcccccctgaagtacatctacctggtcaacgactacctgcgccgccttacaggaataggcctggcccgggcggagaatatgattgacgccacccagaatatggacgtctttgtggaggtctctggtctggtcaaggctgccgccgttaccatgcacaaaatagcctccgacctgcgttttatggccgccggcccccggggcggcccggcggagatcaatttgccggaacgccaggcgggatcctccatcatgcccggcaaagtcaatcccgtcatcccggagatggtcagccaggtagccatgcaggtcatggccaatgattacttgatcgccatggctgccagtcagggccagctggagctcaatccctttgccccccttattgcccataccttgctggaatccctggccatgctggcggcagcggcccggatattccgcaccgagtgtatcacgggtataaccgccaaccccgagcgctgccaggaactcctggccgtgagcccggccctggctacggccctgctgccctatattggctacgagaaggccacggaagtagtgcgggaagccgtggtttccggccgatcaataaaagaaatagttctagaagaagggtatttgacctctgacgaactggaaaacgtcttaaccccggccgccatgaccaaaccgggaaccgtcggagccgtaaagcagggaataaaggagaagggaaaagcgtaa

SEQ ID NO: 9702 - protein, 476 aa, Moorella thermoacetica ATCC 39073
MSTRQEHDLLGTREVPATAYYGIHTLRAAENFNVSRARVHPELIKALATVKEAAARANLDLGYLPAEKGRAIITACQEVARGELADQFFLDAYQGGAGTSTNMNVNEVIANRALEILGRPKGDYATIHPIDHVNLHQSTNDVYPTAMRVAAIRLLLPLADELAKLQEALQEKEAAFAGVVKIGRTELQDAVPVTLGQEFGAYAQAISRDRWRLYKVEERLRQVNLGGTATGTGLNAPLKYIYLVNDYLRRLTGIGLARAENMIDATQNMDVFVEVSGLVKAAAVTMHKIASDLRFMAAGPRGGPAEINLPERQAGSSIMPGKVNPVIPEMVSQVAMQVMANDYLIAMAASQGQLELNPFAPLIAHTLLESLAMLAAAARIFRTECITGITANPERCQELLAVSPALATALLPYIGYEKATEVVREAVVSGRSIKEIVLEEGYLTSDELENVLTPAAMTKPGTVGAVKQGIKEKGKA

SEQ ID NO: 9703 - DNA, 1428 bp, Desulfitobacterium hafniense Y51
  CDS (1)..(1428): transl_table=11
atggtgcgcaaggaaaaggacttgctcggagttatggaagtaccggaagacgtctattatggaatacagaccttaagagctcgtgaaaacttcccgattacgggatatcgcccacaccatgaattaatccggggattgggtttggtgaaggctgctgccgctcaagccaatatggacatcggttccttgaaccacgagatcggcgaggctgtaattaaagcatctctggaagtggccgagggtgcctttaatgaccattttgtggtggatgtcattcaaggaggagcaggaacctcgattaatatgaatgctaatgaagtgattgctaaccgggctattgagattttgggagggcgaaaaggggattactcccgggttcatcccaatgttcatgttaacatggcgcagagcaccaatgatgtatttcccacagccatccgtattgcctgtcttaatgtagcagacgatctccttcatgccttaaatgagttgaagagtgcttttcaagagaaggccagggagtttgacggagtcatcaagatggggagaacccatcttcaggatgcggttcctattcgcttagggcaggaattcgccgcctatggacaaatgctggagagagatctgcgcaggatcactgaagcagcgaagtccttacatagtattaatatgggtgcaacagctgtaggtaccgggctgaatgctgatccgatttatattgaggaagtttctgagaatctgaggaaggttaccgggttgccgttattgcgagcggataatctggtagatgcgacacagaacacggatgcctttttggaggtgtcgggtgctcttaagaccctggccgttaacctctctaagatcgccaatgatctgcggctgatggcctctgggcccagaacgggctttggggaaattaatcttcctgctatgcagccggggtcttctattatgcccgggaaagtcaaccccgtcatggctgaggtggtcaaccaggtatccttccaggtacagggaaatgattttaccatcgccttagcctgtggagcggggcagctggaactcaatgtgatggagcctgtggtagtcttcaatctgctccaatctttggatatcctccgcaatgtgatcaaggtcttcaaagagcgctgtgtcgatgggataaccgctaatgtggaacgctgtcgggatctggttgaaaacagcgtcggtgtcgtcaccgcaatcaacccccatgtaggatacgaagtcgcttcccgaatcgccaaggaagccatagtgaccggacgtcctgtcagagagattgtcctggaaagaggacttttgacctccgaggagctggatcttatattaaatccccacgaaatgaccaatccgggtatcagcggctcggagttgcttaagggagtgcttccccgtggtcattaa

SEQ ID NO: 9704 - protein, 475 aa, Desulfitobacterium hafniense Y51
MVRKEKDLLGVMEVPEDVYYGIQTLRARENFPITGYRPHHELIRGLGLVKAAAAQANMDIGSLNHEIGEAVIKASLEVAEGAFNDHFVVDVIQGGAGTSINMNANEVIANRAIEILGGRKGDYSRVHPNVHVNMAQSTNDVFPTAIRIACLNVADDLLHALNELKSAFQEKAREFDGVIKMGRTHLQDAVPIRLGQEFAAYGQMLERDLRRITEAAKSLHSINMGATAVGTGLNADPIYIEEVSENLRKVTGLPLLRADNLVDATQNTDAFLEVSGALKTLAVNLSKIANDLRLMASGPRTGFGEINLPAMQPGSSIMPGKVNPVMAEVVNQVSFQVQGNDFTIALACGAGQLELNVMEPVVVFNLLQSLDILRNVIKVFKERCVDGITANVERCRDLVENSVGVVTAINPHVGYEVASRIAKEAIVTGRPVREIVLERGLLTSEELDLILNPHEMTNPGISGSELLKGVLPRGH

SEQ ID NO: 9705 - DNA, 1431 bp, Acidobacteria bacterium Ellin345
  CDS (1)..(1431): transl_table=11
atggcgactcggcaggagaaggattcgctgggatataaggacgttccggcggacgcgtactacgggatccagacggcgcgggcggtggagaactatcccatcagcgggatgcgggcgcatgcgacgttgatccgcgcgattgccatggtgaagcaggcggcggctgaggcgaacctggaactggatctgattgatgcgcgggtcgccgaggcgctcattctcgcggcgaaggaaatgcaggagggccgctgggacgatcagtttgtcgtggacgtattccaggcgggcgcgggcgtgagcttccacataaatgcgaacgaggtgattgcgaaccgcgctgaggaactcacgggcggaaagctgggcgagtacaagattgtgcatccgaatgatcacgtgaattacgggcagtcaaccaatgacgtcttccctaccgcgatgcgcctcgcgacgctgctggagttggagaaactgtatccggtgctcgatggactggcgtcggcgttcggggcgaagggcaaagagtttcacgacatcctgaagtcgggacgcacgcatatgcaggatgcggtgccgatgcgactggggcaagagtttgcggcgtacgcaggtgcagtgagacgcgccgagaagtcggtgcgtgagcaatcggaacttttgcgtgaattgggactcggtggatcggcagtgggaacggggatcaatacccatcccgagtatcgcgagaaggcgattcgcaatctggcgcggatttcgggacagaaactggtggtggcggatgatatgcgctacgcgatgcagtcgaacctggcgatggcgagtgtgagttcggccctgcgaaatctgtcgctggagatcattcgcatcagtaacgacctgcgattgattgcgtcgggacctaacactggactggccgagatcaatttgccggcgctgcagccgggctcgtcaattatgccgggcaagatcaatccggtgatgccggaattggcggcgatggtgtgcttccaggtgattggcaacgacacggcagtggcgttcgcggtgcaggctggtcaacttgaattgaacgtgatgatgccgaccatggcgtacagcgtgctgcaatcggtcacgatcctgacgaacatggtgcgggtgttcacggagaagtgcgttatcggaatcactgcaaacgctaagcgcaatgagatgtacgcacagagcacggtgtcgctggcgacggcgttgaatccgtatatcggctatgcgaaggcggcggagatcgcgaaagaatcggttgcgaccggcaggacgatcatcgagattgcacgagagaagaagtacctgagcgaagagcagatcaaagagatccttgatccagcgcaaatgacggagccccgtctgccatcggaggcagcgaaggatcgcgacaagatcaagttacgctga

SEQ ID NO: 9706 - protein, 476 aa, Acidobacteria bacterium Ellin345
MATRQEKDSLGYKDVPADAYYGIQTARAVENYPISGMRAHATLIRAIAMVKQAAAEANLELDLIDARVAEALILAAKEMQEGRWDDQFVVDVFQAGAGVSFHINANEVIANRAEELTGGKLGEYKIVHPNDHVNYGQSTNDVFPTAMRLATLLELEKLYPVLDGLASAFGAKGKEFHDILKSGRTHMQDAVPMRLGQEFAAYAGAVRRAEKSVREQSELLRELGLGGSAVGTGINTHPEYREKAIRNLARISGQKLVVADDMRYAMQSNLAMASVSSALRNLSLEIIRISNDLRLIASGPNTGLAEINLPALQPGSSIMPGKINPVMPELAAMVCFQVIGNDTAVAFAVQAGQLELNVMMPTMAYSVLQSVTILTNMVRVFTEKCVIGITANAKRNEMYAQSTVSLATALNPYIGYAKAAEIAKESVATGRTIIEIAREKKYLSEEQIKEILDPAQMTEPRLPSEAAKDRDKIKLR

SEQ ID NO: 9707 - DNA, 1389 bp, Cytophaga hutchinsonii ATCC 33406
  CDS (1)..(1389): transl_table=11
atgtctattcgaattgaaaaagataccatgggtttggtggaagtgccggcagataaatattggggtgcacaaacccaacgttccatagaaaattttaaaatcggtgatgcttcaacgcgcatgccgatcgaaatcatacacgccttcgctatcttaaaaaaggcagctgcacaaacaaatctcgaattagggattttagataaagaaaaagcaggcagtatcgcagaagtctgcgatgaaattctggcaaaaaaactggatgatcaatttccgttggttgtatggcaaacaggttcgggtacacaatcaaatatgaatgtgaatgaagtgattgcaaaccgtgcacatgttttgcttggcggaaatttactggatgaaacaaaaaaaattcatccaaatgatgatgtaaataaatcgcagtcatcaaacgacacgtttcccacggctatgcacattgccgcttgcctgatgttaaaaaaagtaacgattccaggaatagagcaattgcagcatacgttacggacaaaaacagaacagtttaaagatgttgttaaaataggccgtacgcatttcatggatgcaacgcctttgacattgggccaggagttttccggatatgctgcgcaattaagctatgcattaaaagcaattcacaatgcctcggcacatctttcagaactagcgctgggtggaacagctgttggtacgggaattaatgcacccaaaggatatgcggaacgggttgccgggcacattgctgcgctcacaggttttccgtttacatcagcacccaataaatttgaagcacttgctacacacgacgcattggtagaaatgcacggcgcgttaaaaacgtctgcagtgagtctgatgaaaattgcaaatgacattcgcatgcttgcatccggtcccagaagcgggattggagaaatccacattccggataatgaacccggatcttcaatcatgccgggcaaggtgaatcctacacaggtagaagccttgacgatggtttgcgcgcaggtaatgggaaatgatgtaacattgtccgttgcaggttctatgggacagtttgaattgaatgtgttcaaaccggtgattatttataattttctgcaatctgcacggctgatcggtgatgcatgtgtttcatttaatgaaaaatgtgcaaaaggaatagagcctaatacagccaccattgaacgcaatgtagaaaactcgttgatgctggttacagccttaaatccgcatattggttatgataagtctgcagaaattgcaaaacatgcgcataaagaaaacacaagtctccggcaggctgcattagcattaggctatgttaccaacgaacagtttgatgcctgggtaaatcctaaaaatatgatctag

SEQ ID NO: 9708 - protein, 462 aa, Cytophaga hutchinsonii ATCC 33406
MSIRIEKDTMGLVEVPADKYWGAQTQRSIENFKIGDASTRMPIEIIHAFAILKKAAAQTNLELGILDKEKAGSIAEVCDEILAKKLDDQFPLVVWQTGSGTQSNMNVNEVIANRAHVLLGGNLLDETKKIHPNDDVNKSQSSNDTFPTAMHIAACLMLKKVTIPGIEQLQHTLRTKTEQFKDVVKIGRTHFMDATPLTLGQEFSGYAAQLSYALKAIHNASAHLSELALGGTAVGTGINAPKGYAERVAGHIAALTGFPFTSAPNKFEALATHDALVEMHGALKTSAVSLMKIANDIRMLASGPRSGIGEIHIPDNEPGSSIMPGKVNPTQVEALTMVCAQVMGNDVTLSVAGSMGQFELNVFKPVIIYNFLQSARLIGDACVSFNEKCAKGIEPNTATIERNVENSLMLVTALNPHIGYDKSAEIAKHAHKENTSLRQAALALGYVTNEQFDAWVNPKNMI

SEQ ID NO: 9709 - DNA, 1464 bp, Rhodococcus sp. RHA1; identical to SEQ ID NO: 6292
  CDS (1)..(1464): transl_table=11

SEQ ID NO: 9710 - protein, 487 aa, Rhodococcus sp. RHA1; identical to SEQ ID NO: 6293

SEQ ID NO: 9711 - DNA, 1401 bp, Hyphomonas neptunium ATCC 15444
  CDS (1)..(1401): transl_table=11
atggccaagacccccacacgcacagaatcggacactttcggccctatcgaggttgaggcggacaagtattggggcgcgcaggcgcagcgctcgctgggcaacttcaagataggctgggagaaacagccccagcccatcgtgcgcgcgctcggcatcgtcaagaaagccgccgccgaagtgaacatggcgatggagaaaatggaccgtctggtcggccgcgccatcgttcaggccgccgatgaagtcatcgagggcaagctcgacgcgcatttcccgctggtcgtctggcagaccggctcgggcacccagtcgaacatgaacgccaatgaggtgatctccaaccgcgccatcgagatcctgaacggcaaggtcggctccaaggcgccggttcacccgaacgatcatgtgaacatgtcccagtcgtccaacgacaccttcccgaccgccatgcacatcgcctgcgccgagcaggtcgtgcacaagctggtccccgccctgcaacagctccagaacgctctgaacgacaaggcacaggcctggaaggacatcatcaagatcgggcgcacgcatacgcaggatgccaccccggtcaccctcggacaggaattctccggctacgccaaacagctcgaaaacggcatcaagcggatcgagatgaccctgccgatgctgatggaactcgcccagggcggcacggcggtgggcaccggccttgcctcgccggagggctttgccgagctggtggccgacaagatcgcccagatcaccggcctgaacttcacctccgcgcccaacaagttcgaggcgcttgccgcccatgacgcgatggtgatgacccacggcgccatcacgaccgtggcgatgagctgcttcaagatcgccaacgacatccgtttcctcggctctggcccgcgctcgggccttggcgagctggccctgccggagaacgagccgggctcctcgatcatgccgggtaaggtgaacccgacccagtgcgaagccctcacccaggtctgcgcgcatattcacggcaacaacgccgccatcggctttgccggcagccagggtcatttcgagctgaacgtgttcaacccgatgatggcctacaacttcctgcaatctgtccagctgctggcagatgcggccgtgtccttcaccgagaactgcgttgtcggcatcgagccgcgcctcgacaatatccagcgcggccttgaaaattcgctgatgctggtgacgccgctgaaggaaaagtatggctacgatctggccgcaaaagtagccaagaccgcgcacaagaatggcaccacactgaaggtcgaagccctggcgctcggcatttcggaggaagatttcgacgccatcgtgcggcctgagaaaatgatcggaccggacccggcataa

SEQ ID NO: 9712 - protein, 466 aa, Hyphomonas neptunium ATCC 15444
MAKTPTRTESDTFGPIEVEADKYWGAQAQRSLGNFKIGWEKQPQPIVRALGIVKKAAAEVNMAMEKMDRLVGRAIVQAADEVIEGKLDAHFPLVVWQTGSGTQSNMNANEVISNRAIEILNGKVGSKAPVHPNDHVNMSQSSNDTFPTAMHIACAEQVVHKLVPALQQLQNALNDKAQAWKDIIKIGRTHTQDATPVTLGQEFSGYAKQLENGIKRIEMTLPMLMELAQGGTAVGTGLASPEGFAELVADKIAQITGLNFTSAPNKFEALAAHDAMVMTHGAITTVAMSCFKIANDIRFLGSGPRSGLGELALPENEPGSSIMPGKVNPTQCEALTQVCAHIHGNNAAIGFAGSQGHFELNVFNPMMAYNFLQSVQLLADAAVSFTENCVVGIEPRLDNIQRGLENSLMLVTPLKEKYGYDLAAKVAKTAHKNGTTLKVEALALGISEEDFDAIVRPEKMIGPDPA

SEQ ID NO: 9713 - DNA, 1431 bp, Leuconostoc mesenteroides subsp. mesenteroides ATCC 8293
  CDS (1)..(1431): transl_table=11
atgcgcacagaatcagattcactcggccaaatcaacgtacccaaagatgtctactacggggcacacactcaacgtgcgctaaataattttccaatttcaaaagaaacaacccatccagaaatcattcgagcctttttagaaattaaacaggctgcggcacaaacaaatgctacatctggtaatctagatcgagctgttgctaaacatattgttgatgcaacaaaaattttgttaagtcagccaatcgatcttacaatgtttccaattagtgacgttcaaggtggtgctggtacaagtaccaatatgaacgtcaatgaagttgttgctaatacagctcttgagcaggtaggccgtgcacgtggtgaatatggctacgttaacccaaatgaccacgttaatatgggtcagagtaccaatgatacttatcctagcgcaggaaaaattgctcttatccgactactcgaaccacttttttcagaattaacattattggtagacgctcttggtaacaaagccgacgaattttcaacaacttacaaaatgggtcgtacacagctacaagatgctgtgcccatgaccttaggaaatacctttcatgcttggttaaaaccacttcgtcgagactttaaacgtatcgaagccgcacgcaatgagctatatacattaaatctgggcggatcagctattggttccggtattaacgtaagttatcattaccaagtgcacatcgttcctaacctagctagcataactgggcttccacttgagcaagcccatgatttatttgatgcaacttcaaacttagactcctatgttgccctgtctggttcattaaaaaatttagcagttaatctatctaaaatgtctaatgatctacgcttactcagttctggcccacgttcgggattacatgaaattaacttaccttcaaaacaagcaggttcatcaatcatgcctggtaaagttaatccagttattccagaagttgtcaatcaagtcgcctttgaaatgattggttttgataccaccgttacggcagcaagcgaagctggtcaattagaattgaatgcatttgaacccattatcttcaaaagcttaatcactggcattgaacatctccaacaagctatgaatactctacgcatcaatgccattgacggcattacagtaaacaaacatcgcttgtcacaagacattgatttgtcggtgagctttgcaaccgcgatggcgccaataattggctacaaagaagccgctaaaattgctaaagaatctctgcgcactggaaaatctttgcgtgaaatcgctgaaaagaaaaatagatttactgaaagtgaattggcacatattttcaaggttgaagatatcgttattaatgctcgaacaccagagcatggtctagtactgcacgcgccaaaaacaacagtataa

SEQ ID NO: 9714 - protein, 476 aa, Leuconostoc mesenteroides subsp. mesenteroides ATCC 8293
MRTESDSLGQINVPKDVYYGAHTQRALNNFPISKETTHPEIIRAFLEIKQAAAQTNATSGNLDRAVAKHIVDATKILLSQPIDLTMFPISDVQGGAGTSTNMNVNEVVANTALEQVGRARGEYGYVNPNDHVNMGQSTNDTYPSAGKIALIRLLEPLFSELTLLVDALGNKADEFSTTYKMGRTQLQDAVPMTLGNTFHAWLKPLRRDFKRIEAARNELYTLNLGGSAIGSGINVSYHYQVHIVPNLASITGLPLEQAHDLFDATSNLDSYVALSGSLKNLAVNLSKMSNDLRLLSSGPRSGLHEINLPSKQAGSSIMPGKVNPVIPEVVNQVAFEMIGFDTTVTAASEAGQLELNAFEPIIFKSLITGIEHLQQAMNTLRINAIDGITVNKHRLSQDIDLSVSFATAMAPIIGYKEAAKIAKESLRTGKSLREIAEKKNRFTESELAHIFKVEDIVINARTPEHGLVLHAPKTTV

SEQ ID NO: 9715 - DNA, 1422 bp, Mycobacterium smegmatis str. MC2 155
  CDS (1)..(1422): transl_table=11
gtgacgccggtgcagtcattccgtaccgaacacgatctgctcggtgacctcgaggtaccggccgatgtctactacggcgtgcacaccgcgcgcgcactgctgaactttccgatcagcggaatgcccatatcgcgccatcctgacctggtggtcgcgctcgcctcggtgaaacaggcggcagccgaagcgaatcgtcaactcggccagctcgactccactatcgccggcgcgatcatcaccgcctgcaccgagattcgcgacggggccctgcgcgagcagttcgtcgtcgaccagattcagggcggggcaggcacgtcgaccaacatgaacgccaacgaggtgatcgccaaccgtgcctgcgagctcctcggacatcagcgcggctcctacgacgtcgtacatccccttgagcacgtcaacctcggacagagcaccaacgacgtctacccgacggcgctcaagatcgcactcggaactgcgacccgcacgctcgaacaggccttgcggcgcctcgccgatcactgcagcaccaagtcgctcgaattcgccgacatgctcaaactcggccgtacgcagttgcaggacgcggttccgatgacactcggtcaggaattcggggccttcgcggtgaccattctcgaagacgccgaccggctcggtgaagtgtcagcgctcatcgccgagatcaacctcggcgggaccgccatcggcacgggactcaacacccatccggaatatgcggcactggtgtgcgatcacctgcgcgccgtcaccggcctgccgctcaccaccgcgggcaacctcgtggaggcgacctccgacgtcggcgcgttcgtccaactgtccggtgtcgcgaaacgcagcgcggtgaaactgtcgaagatctgcaatgacctacggctgctctcgtcgggcccacgggccggtttcggcgagatcaaccttccgcctgtgcaggccgggtcgagcatcatgcccggcaaggtgaatcccgtcatccctgaagtcgtcaaccaggtcgccttcgaggtgatcggcaacgatctcaccgtcaccatggccgccgaggccggacagttgcagctcaacgcgttcgagccgatcatcgcccgcgctctgttgtcatcgatcaaccacctggccgcggcggtcaatgtcctaggtgaacgctgtatcgagggcatcacggccaacaccgatcacatgcgtgacgcggttctgagatcggcgagtctggccaccgcgctcaaccccgtgctcggttacgaggcggcgaccgcattggtcgccgaagccatcgcgaccggcgaatcgatccccgagatggtgctgcggtgcgcactggtggacgaggcggtgctcgcccgggtgctgagcccggagaacctgtgcggactcagcgggtccgagagggctaggtag

SEQ ID NO: 9716 - protein, 473 aa, Mycobacterium smegmatis str. MC2 155
MTPVQSFRTEHDLLGDLEVPADVYYGVHTARALLNFPISGMPISRHPDLVVALASVKQAAAEANRQLGQLDSTIAGAIITACTEIRDGALREQFVVDQIQGGAGTSTNMNANEVIANRACELLGHQRGSYDVVHPLEHVNLGQSTNDVYPTALKIALGTATRTLEQALRRLADHCSTKSLEFADMLKLGRTQLQDAVPMTLGQEFGAFAVTILEDADRLGEVSALIAEINLGGTAIGTGLNTHPEYAALVCDHLRAVTGLPLTTAGNLVEATSDVGAFVQLSGVAKRSAVKLSKICNDLRLLSSGPRAGFGEINLPPVQAGSSIMPGKVNPVIPEVVNQVAFEVIGNDLTVTMAAEAGQLQLNAFEPIIARALLSSINHLAAAVNVLGERCIEGITANTDHMRDAVLRSASLATALNPVLGYEAATALVAEAIATGESIPEMVLRCALVDEAVLARVLSPENLCGLSGSERAR

SEQ ID NO: 9717 - DNA, 1422 bp, Nostoc punctiforme PCC 73102
  CDS (1)..(1422): transl_table=11
atgactgaacacacagactctcaattccgcatcgaacgcgattcgatgggcgatcgccaaattgctagtagcttttattacggcattcaaacgctacgggcgatcgaaaactttcctattagtggcattaagcctttagctacttacgtagatgctggattaatcattaaaaaagctacagcaattgtcaatggagaactgaattgtattcccgaagatattagtcaggcgattgtccaagcaactgatgaaatcctggctgggaagttccgggatcagtttgtcgtggatgtttatcaggcaggtgctggaacatcccaccacatgaatgtcaacgaagttctggcaaatcgcgccttagaaattctgggtgaagaaaagggcaattacaaacgtgttagtcctaacgatcacgttaactatgggcagtctaccaatgatgtgattcctactgccattcggattggtggtttattggcattatccaagacattacacccagcaatagaaggtgcgatcgcatccttagaaaacaaagctgtagaatttcaagatattgtcaaatctggcagaacccacttacaagacgctgtacccgtgcgtttgggtgaaaattttcgcgcttgggcgcacattcttacagaacaccaaaaccggatttacaccgcctctggagatttgatggtgctgggtttgggaggtagtgcagcaggaaccggtttaaatactcatcctctatatcgcgcccgtgtagtagaagttctttcagaattgattgatacacctttagaacctgcgccccatctcatggcagctatgcagagtatggctccatttgtaaatgtttccggtgctttacgcaatttagcgcaggatttagtcaaaatatctcatgacttgcggctgatggattcgggaccaaaaactggtttgaaagaaatccaacttcccccagtgcaacccggttcctcgattatgccagggaaatataacccagtcatggcagagatgacatcaatggtgtgttttcaggtgatgggttatgacagtgcgatcacattagccgcacaagccggacaattagaattaaatgtgatgatgccgctaattgcctataacttgattcacagtatcgaaattctcggcaataccatcgctgcactcaccgaacgctgcatcgagggaattactgcaaatcaagaacgttgtttagcttatgccgaaggcagtttagctttagtaaccgcactaaacacccacattggttatttaaacgctgctgctgtcgccaaagaatctttagaaactggtaaatccctgcggcaaattgttctagaacggggattaatgagtgaaacagacttagccacagtgttaaatctagaacacatgagtggtatcttaccgctcaaaacagaataa

SEQ ID NO: 9718 - protein, 473 aa, Nostoc punctiforme PCC 73102
MTEHTDSQFRIERDSMGDRQIASSFYYGIQTLRAIENFPISGIKPLATYVDAGLIIKKATAIVNGELNCIPEDISQAIVQATDEILAGKFRDQFVVDVYQAGAGTSHHMNVNEVLANRALEILGEEKGNYKRVSPNDHVNYGQSTNDVIPTAIRIGGLLALSKTLHPAIEGAIASLENKAVEFQDIVKSGRTHLQDAVPVRLGENFRAWAHILTEHQNRIYTASGDLMVLGLGGSAAGTGLNTHPLYRARVVEVLSELIDTPLEPAPHLMAAMQSMAPFVNVSGALRNLAQDLVKISHDLRLMDSGPKTGLKEIQLPPVQPGSSIMPGKYNPVMAEMTSMVCFQVMGYDSAITLAAQAGQLELNVMMPLIAYNLIHSIEILGNTIAALTERCIEGITANQERCLAYAEGSLALVTALNTHIGYLNAAAVAKESLETGKSLRQIVLERGLMSETDLATVLNLEHMSGILPLKTE

SEQ ID NO: 9719 - DNA, 1434 bp, Bifidobacterium longum DJO10A
  CDS (1)..(1434): transl_table=11
atgagcgaaacatcgaacaagacccgtctggaacatgactgcatcggccagatggaggtgccggcgaacgtctactggggtattcacacccagcgcgctatcggcaacttcccggtctccggcatcaccgatagccaacatcccgagctgattcgcgcctatgccacggtcaagcgcgcctgcgccatcgccaatgaggaattaggcctgatcgacccagccaaggccgaggccattcgcgccgcctgcctagaaattgaggccggcaaactggccgatcagttcccggtcgatgtgatgcagggcggtgccggcacctcgtcgaacatgaacatgaacgaggtgatcgccaaccgtgcgttggaaatcgccggccgccagcgcggcgattacacatacatccatccgaacgacgacgtcaacaagtcgcagtccacgaacgacacctacccggccgcctgcaaactcgcgcttatcgacgcgatcgggccgctcgccgagtccaccaagaaactcgccaaggccttccacgatctggccgacaaacatatcaatgacgtgacgattggccgcacgcagctgcaggacgccgtaccaatgacctatggtcaggaatttcatgcgtttgccacgctgttgaagtctgatttggctgcattcgatcgcgtggtgccgctgctggcccagctcaacctcggtgccaccgccatcggtaccggcatttgcgcggatctgcgattccgcaagtccgctatcaagcatctggcgcagatcaccggcttgccggtcaccgccgcgcccgatccggtggccgccatgacggatatgggcgcgtacgtggccacgtcggccgccatcaagagcctcgccgtgcacctgaagaaggccgccgacgatttgcgactgctcaattccgggccgcgctgcggtttcaacgatctcaacgtgccggctcgccaggccggatcgtcgatcatgccggccaaagtgaaccctgtgatccccgaatgcgtcaaccagtgctgcttcacgattttcggcatggacgtgactgtgaactgggctgtggccgagggacagttgcagctgaacgccttcgacccggtgatggtgcatgagctgctgaccggcatggcgttgctgacgcacgccatggagacgttccgcgtcaactgcgtggaaggcatcgaaatcaatgctgacctggggcgttcatacgcccagtcctcaccgtcgatttccgccgcgctcaaccactacatcggctacgagcacgcggccgacatcgccgccgaagccgtgcacaccggccgtaccgtgcgcgaggtggccggcgaacgcaccgacctgcccgccgagcagttggacgagattctcgatccgattcgactggcccgcggcctcggccagacctgccgcgagcaccaggagtag

SEQ ID NO: 9720 - protein, 477 aa, Bifidobacterium longum DJO10A
MSETSNKTRLEHDCIGQMEVPANVYWGIHTQRAIGNFPVSGITDSQHPELIRAYATVKRACAIANEELGLIDPAKAEAIRAACLEIEAGKLADQFPVDVMQGGAGTSSNMNMNEVIANRALEIAGRQRGDYTYIHPNDDVNKSQSTNDTYPAACKLALIDAIGPLAESTKKLAKAFHDLADKHINDVTIGRTQLQDAVPMTYGQEFHAFATLLKSDLAAFDRVVPLLAQLNLGATAIGTGICADLRFRKSAIKHLAQITGLPVTAAPDPVAAMTDMGAYVATSAAIKSLAVHLKKAADDLRLLNSGPRCGFNDLNVPARQAGSSIMPAKVNPVIPECVNQCCFTIFGMDVTVNWAVAEGQLQLNAFDPVMVHELLTGMALLTHAMETFRVNCVEGIEINADLGRSYAQSSPSISAALNHYIGYEHAADIAAEAVHTGRTVREVAGERTDLPAEQLDEILDPIRLARGLGQTCREHQE

SEQ ID NO: 9721 - DNA, 1416 bp, Haemophilus somnus 2336; identical to SEQ ID NO: 6298
  CDS (1)..(1416): transl_table=11

SEQ ID NO: 9722 - protein, 471 aa, Haemophilus somnus 2336; identical to SEQ ID NO: 6299

SEQ ID NO: 9723 - DNA, 1419 bp, Haemophilus influenzae R2846; identical to SEQ ID NO: 6300
  CDS (1)..(1419): transl_table=11

SEQ ID NO: 9724 - protein, 472 aa, Haemophilus influenzae R2846; identical to SEQ ID NO: 6301

SEQ ID NO: 9725 - DNA, 1464 bp, Photobacterium sp. SKA34; identical to SEQ ID NO: 6310
  CDS (1)..(1464): transl_table=11

SEQ ID NO: 9726 - protein, 487 aa, Photobacterium sp. SKA34; identical to SEQ ID NO: 6311

SEQ ID NO: 9727 - DNA, 1404 bp, Oceanospirillum sp. MED92; identical to SEQ ID NO: 6312
  CDS (1)..(1404): transl_table=11

SEQ ID NO: 9728 - protein, 467 aa, Oceanospirillum sp. MED92; identical to SEQ ID NO: 6313

SEQ ID NO: 9729 - DNA, 1383 bp, Oceanobacter sp. RED65; identical to SEQ ID NO: 6316
  CDS (1)..(1383): transl_table=11

SEQ ID NO: 9730 - protein, 460 aa, Oceanobacter sp. RED65; identical to SEQ ID NO: 6317

SEQ ID NO: 9731 - DNA, 1452 bp, Vibrio sp. Ex25; identical to SEQ ID NO: 6308
  CDS (1)..(1452): transl_table=11

SEQ ID NO: 9732 - protein, 483 aa, Vibrio sp. Ex25; identical to SEQ ID NO: 6309

SEQ ID NO: 9733 - DNA, 1437 bp, Pseudomonas putida GB-1
  CDS (1)..(1437): transl_table=11
atgatatacatcatgtcctccgctgcatcgttccgcgtcgaaaaagacttgttgggtacccttgaagttcctgcagatgcctactacggcatccagaccctgcgcgctgccaacaacttccacctctccggtgttccactgtcgcactacccgaagctggtcgtggccctggccatggtcaagcaggccgctgccgacgccaaccgtgagctgggtcacctgagcgatgccaagcacgctgccatcaccgcagcctgcgcccgcctgatcaaaggcgattaccacgaccagttcgtggtggacatgatccaaggcggtgctggtacttctaccaacatgaacgccaacgaagtcattgccaacgttgcactggaggccatgggccaccagaagggtgagtaccagtacctgcacccgaacaacgacgtgaacatggcgcagtcgaccaacgacgcctacccgaccgctatccgtctgggcctgctgctgggtcacgacgcactgctggccagcctcgacagcctgattcaggccttcgctgccaagggtaaagaattcgaccacgtactgaagatgggccgtacccagctgcaggacgccgtaccgatgaccctgggccaggaattccgcgccttcgccaccaccatgaccgaagacctgcagcgcctgcgctcgctggccccggaactgctgaccgaaatcaacctgggcggtaccgccatcggcaccggcatcaacgccgaccctggctaccaggctctggccgtacagcgcctggccgccatcagtggccagccgctggtaccggctgccgacctgatcgaagccacttccgacatgggcgccttcgtgctgttctccggcatgctcaagcgtaccgcggtcaagctctcgaaaatctgtaacgacttgcgtctgctgtccagcggcccgcgcaccggcatcaacgagatcaacctgccagcgcgtcagccaggcagctcgatcatgccaggcaaggtcaacccggttatcccggaagccgtcaaccaggtggccttcgccatcatgggcaacgacctggccctgaccgtcgccgccgaaggtggccagctgcagctgaacgtgatggagccgctgatcgcctacaagatcttcgactcgatccgcctgctgcaacgcgccatggacatgctgcgcgagcactgcatcgtcggcatcaccgccaacgaacagcgctgccgtgaactggtcgagcactcgatcggcctggtcactgcactgaacccgtacatcggctacgaaaacgccacccgtatcgcccgcgttgccctggaaagcggccgcggcgtgctggaactggtgcgtgaagagaagctgctggacgacgcgatgctcgacgacatcctgcgtccagaaaacatgatcgccccgcgcctggttccgctgaagtcgtaa

SEQ ID NO: 9734 - protein, 478 aa, Pseudomonas putida GB-1
MIYIMSSAASFRVEKDLLGTLEVPADAYYGIQTLRAANNFHLSGVPLSHYPKLVVALAMVKQAAADANRELGHLSDAKHAAITAACARLIKGDYHDQFVVDMIQGGAGTSTNMNANEVIANVALEAMGHQKGEYQYLHPNNDVNMAQSTNDAYPTAIRLGLLLGHDALLASLDSLIQAFAAKGKEFDHVLKMGRTQLQDAVPMTLGQEFRAFATTMTEDLQRLRSLAPELLTEINLGGTAIGTGINADPGYQALAVQRLAAISGQPLVPAADLIEATSDMGAFVLFSGMLKRTAVKLSKICNDLRLLSSGPRTGINEINLPARQPGSSIMPGKVNPVIPEAVNQVAFAIMGNDLALTVAAEGGQLQLNVMEPLIAYKIFDSIRLLQRAMDMLREHCIVGITANEQRCRELVEHSIGLVTALNPYIGYENATRIARVALESGRGVLELVREEKLLDDAMLDDILRPENMIAPRLVPLKS

SEQ ID NO: 9735 - DNA, 1395 bp, Pseudomonas putida GB-1
  CDS (1)..(1395): transl_table=11
atgagccgtatcgagacagacagcctgggcccggtcgaagttccggaggacgcctactggggtgcgcagacccagcgttcgctgatcaacttcgccattggcaaggaacgcatgcccctcgcggtgctgcacgccctggcactgatcaagaaggccgcggcgcgcgtcaacgaccgcaatggcgacttgccggccgacatcgcccggttgatcgaacaggccgccgatgaagtgctggatggcaagcacgatgaccagttcccgctcgtcgtctggcaaacgggcagcggcacccagagcaacatgaacgtcaacgaggttattgccgggcgcgccaacgagctggccggcaaaggccgtggcggcaaggcgccagtacaccccaacgaccacgtcaaccgctcgcaaagctccaacgactgcttccccacggccatgcacattgctgctgcgcaggcagtgcatgaacagctgctgccagcgatcgccgagctgtcgtcagggctggccgagttgtcggcgcgccacaacaagctggtgaaaaccggccgcacgcacatgatggacgccacaccgatcaccttcggccaggaggtttcggccttcgtcgcgcaactcgactacgcccagcgcgccatccgcgccaccctgccggcggtgtgtgaactggcccagggcggtaccgccgtgggtaccgggctcaacgccccgcatggttttgccgaagccatcgctgccgagttggcggcggagtccgggctgccattcgtcaccgcgcccaacaagtttgccgccctcgctggccacgaaccgctgaccagcctggccggggccctgaagaccctggctgtagccctgatgaaaatcgccaacgacctgcgcctgctgggctctggcccgcgcgcgggactggccgaggtgcgcctgccggccaacgagccgggcagttcgatcatgccgggcaaggtcaacccgacccagtgcgaggcactgtcgatgctggcctgccaggtgctgggcaatgacgcggcgattggttttgccgccagccaggggcatttgcagttgaacgtattcaagccggtaatcattcataacctgctgcaatcggtcgaattgctggccgatggttgccgcaatttccagctgcattgcgtggcgggtatcgaaccggatgcccagcagatggctgcgcacctggaacgcgggttgatgctggtgaccgcgctcaacccgcacattggctatgacaaggcagcggaaattgccaagaaggcttacagcgaaggcaagaccttgagggaggcggcattggagttgaagtatctgaccaatgagcagttcgaccagtgggtgcggccagagaacatgctggccccaggggggcatggctaa

SEQ ID NO: 9736 - protein, 464 aa, Pseudomonas putida GB-1
MSRIETDSLGPVEVPEDAYWGAQTQRSLINFAIGKERMPLAVLHALALIKKAAARVNDRNGDLPADIARLIEQAADEVLDGKHDDQFPLVVWQTGSGTQSNMNVNEVIAGRANELAGKGRGGKAPVHPNDHVNRSQSSNDCFPTAMHIAAAQAVHEQLLPAIAELSSGLAELSARHNKLVKTGRTHMMDATPITFGQEVSAFVAQLDYAQRAIRATLPAVCELAQGGTAVGTGLNAPHGFAEAIAAELAAESGLPFVTAPNKFAALAGHEPLTSLAGALKTLAVALMKIANDLRLLGSGPRAGLAEVRLPANEPGSSIMPGKVNPTQCEALSMLACQVLGNDAAIGFAASQGHLQLNVFKPVIIHNLLQSVELLADGCRNFQLHCVAGIEPDAQQMAAHLERGLMLVTALNPHIGYDKAAEIAKKAYSEGKTLREAALELKYLTNEQFDQWVRPENMLAPGGHG

SEQ ID NO: 9737 - DNA, 1380 bp, Pseudomonas putida GB-1
  CDS (1)..(1380): transl_table=11
atgatgagtgatacccgtatcgagcgtgacagcatgggtgaactgcaggtgcctgcccaggccctgtacggcgcccagacccaacgcgcggtcgacaacttcccgatcagcggccagcgcatgccggcccagttcattcgtgctctgctgctggccaaggcagccgcggccaaggccaacatcgagctggaacaactgtccgccgcgcagggccaagccatcgtcaaggctgtcgagcaactgttggccgaagacttcatccagcatttcccggtcgatgtgttccagaccggctccggcaccagctcgaacatgaacgccaacgaagtgatcgcgaccttggccagccgcgtactgggtgaggcagtcaatgccaatgatcacgtcaactgtggccagagcagcaatgacatcatcccgaccactatccacgtcagtgccgcgctggccctgcacgaacagttgctgccagccttggcgcacctggtacaggtgatcgaggccaagtcggcgcaagtgcatcagtatgtgaaaacgggccgcacccacctgatggacgccatgccggtgcgcatgagccaggtgctggatggctgggcggcacagatcaacggcgccaaggcacacctcgaagccaccttgctgagcctgcaggcgctggcccagggcggcaccgccgtgggtaccggcatcaatgcccacccccggttcgctggcgtgtttgcccgccaactcagtggcctgacccaagtcgagttcaccccagggcaaaacctgtttgccctgatcggttcgcaggataccgccgtggccctgtctggccagctcaagactaccgctgtggcactgatgaaaattgccaacgacctgcgctggatgaactccggcccgctggccggcctgggcgaaatcgagctgcaaggcctgcagcctggctcttcgatcatgccgggcaaggtcaacccggtgatcccggaggccactgccatggtcgccgcccaggtgattggcaacgacgccaccatcgccatcgcggggcagtccggtaacttcgagctgaacgtgatgctgccggtgatcgcccgcaacctgctggaaagcatcgagctgatggccaacgtcagccgcttgctggccgacaaggccatcgccaccttcaaggtcaacgagggcaagctcaaggaagccctggcgcgcaacccgatcctggtcactgcgctgaacccgatcatcggctacctcaaggccgccgaaatcgccaagaccgcgtacaagcaaggtcgcccgatcatcgatgtggcgctggagcacaccgatttgtcgcgtgaccagctcgaagcactgctggacccggaaaaactcaccgccggcggaatctga

SEQ ID NO: 9738 - protein, 459 aa, Pseudomonas putida GB-1
MMSDTRIERDSMGELQVPAQALYGAQTQRAVDNFPISGQRMPAQFIRALLLAKAAAAKANIELEQLSAAQGQAIVKAVEQLLAEDFIQHFPVDVFQTGSGTSSNMNANEVIATLASRVLGEAVNANDHVNCGQSSNDIIPTTIHVSAALALHEQLLPALAHLVQVIEAKSAQVHQYVKTGRTHLMDAMPVRMSQVLDGWAAQINGAKAHLEATLLSLQALAQGGTAVGTGINAHPRFAGVFARQLSGLTQVEFTPGQNLFALIGSQDTAVALSGQLKTTAVALMKIANDLRWMNSGPLAGLGEIELQGLQPGSSIMPGKVNPVIPEATAMVAAQVIGNDATIAIAGQSGNFELNVMLPVIARNLLESIELMANVSRLLADKAIATFKVNEGKLKEALARNPILVTALNPIIGYLKAAEIAKTAYKQGRPIIDVALEHTDLSRDQLEALLDPEKLTAGGI

SEQ ID NO: 9739 - DNA, 1380 bp, Marinobacter sp. ELB17
  CDS (1)..(1380): transl_table=11
atgagcaatgaacgggtagaaagcgacagccttggcgacgtcagggtgccggaaaacgcactttggggagcacaaacccaacgcgccatcgagaacttccccgtcagcgggcaacccatgccgccggcgttcatcgccgccgtggtgcagataaaaaaagccgcggcggaagctaatgccagcctggccttgctcaatggcccggttcgcgatgctattgtgctagcctgtgaccagttgctggccggtgattactatgatcagtttccggtagaccgctaccagaccggctctggcaccagcaccaacatgaatgttaacgaggtgatcgcggcactggccgagctcagtggtgtgatggttcatcccaacgaccacgtgaatatgagccagagttctaacgatgtcatcccgtcggctatccatatcagcgcggtgatagcgattcaccagaatctggtgccggcgctgacccatttacaaggcgttctctacgagcgcgaagccatgtatggcgagcaggtaaaaaccggtagaacccacctgatggacgcaatgccggtgaccctgggccaagagcttcgtacttggcgcgagcaattgaaagcgacacaggcgcgcatcgaacgtgcagcagatgagcttctggcgttgccccagggcggcacggctgtaggcaccgggattaatgccgttagcgagtttgcgcctgagtttacccgctgtctgaaagccaataccggttttggcttcaagccactagcccataagtttgtggcacagagcgcagtggatgcgccggtggcgctgtcggcgcagctgcgtgggcttggcatagtgctgacaaaaatcgccaacgatttgcgctggatgaacagcggccccattcacgggctgtcagaaatcagccttccggtacttcagccaggcagcagcattatgccaggcaaagtgaacccggtgatccccgagtctgtggctatggtaggcgcccagattatgggacttgatgcctctatcgcttacgccgggcagtctggtaatttccagctcaacgtgatgttaccgttggtcggtgccaacctgctggagatgattggcctgttaagcaatgccagcagtctgctgagtgacaaagcactaaaaggctttaccgtcaacgcagagcatctaaacgcaggtgttggccgtaatcccgtgctggtgacggcgttaaaccccgaaattggttacagcctggcgtctgaaattgccaaagaagcctacgccagtggccgcccggtaattgatgtggctgaagagcgcagtggtctcagccgcgagcggcttgagcagcttatggacccgttaaaactgacccgcggcgggttggcagggtag

SEQ ID NO: 9740 - protein, 459 aa, Marinobacter sp. ELB17
MSNERVESDSLGDVRVPENALWGAQTQRAIENFPVSGQPMPPAFIAAVVQIKKAAAEANASLALLNGPVRDAIVLACDQLLAGDYYDQFPVDRYQTGSGTSTNMNVNEVIAALAELSGVMVHPNDHVNMSQSSNDVIPSAIHISAVIAIHQNLVPALTHLQGVLYEREAMYGEQVKTGRTHLMDAMPVTLGQELRTWREQLKATQARIERAADELLALPQGGTAVGTGINAVSEFAPEFTRCLKANTGFGFKPLAHKFVAQSAVDAPVALSAQLRGLGIVLTKIANDLRWMNSGPIHGLSEISLPVLQPGSSIMPGKVNPVIPESVAMVGAQIMGLDASIAYAGQSGNFQLNVMLPLVGANLLEMIGLLSNASSLLSDKALKGFTVNAEHLNAGVGRNPVLVTALNPEIGYSLASEIAKEAYASGRPVIDVAEERSGLSRERLEQLMDPLKLTRGGLAG

SEQ ID NO: 9741 - DNA, 1437 bp, Bacillus cereus; identical to SEQ ID NO: 6086
  CDS (1)..(1437): transl_table=11

SEQ ID NO: 9742 - protein, 478 aa, Bacillus cereus; identical to SEQ ID NO: 6087

SEQ ID NO: 9743 - DNA, 1416 bp, Wolinella succinogenes; identical to SEQ ID NO: 6318
  CDS (1)..(1416): transl_table=11

SEQ ID NO: 9744 - protein, 471 aa, Wolinella succinogenes; identical to SEQ ID NO: 6319

SEQ ID NO: 9745 - DNA, 1650 bp, Aspergillus oryzae
  CDS (1)..(1650)
atgttggcaccctcgaactcccgagccgcggtgcggtcgatggcttctttggcgcatgcagcatcgagagcgtctgccagttcccccgcagtcgcacgctctgctttagcttgtgctgcccggtcccccgcttctctcggttgccgtcgcgctctgagcaccaatagccgacaactccagttcccccgccttcagtccttgaacaccatctccagcaagagaacttttggtacaaccgcaagaatggcttcggaaactcgcgttgaaactgacgcctttggcgagattgaggtccctgccgacaagtactggggtgcccagacccagcgttccctgggtaactttgacatcaaccagcctcaggaccgtatgcctgagggtgttgtcaaggctttcggtatcctgaagggtgctgctgctaccgtgaacatgaagtttggccttgaccccaagattggtgaggctattcagaaggctgccgccgaggttgccgagggcaagctcatggaccacttccctcttgtcgtttggcagactggttccggcacccagtccaacatgaactccaacgaggtcatctcgaaccgtgccatcgagatcttgggtggcaagatgggatctaagaagcctgtgcaccccaacgaccacgtcaacatgtctgcttcctccaacgactctttccctactgctatgcacatcgctgctgttttggagctcgagggaactttgctgccttccctcaagagccttcgcgatgctctccaggtgaaggtggagaactttgagaagatcatcaagatcggtcgtacccatctgcaggatgctactcctcttactcttggtcaggagttctccggctacgttgcccagcttgatcgcaacattgagcgcgttcagaactctcttccccacctccgctatcttgctcagggtggaactgctgtcggtactggtctgaacaccttcaagggctttgatgaggccattgccgccgaggtcaccaagatgactggcaccgaattcaagaccgcccccaacaagttcgaggttctcgctgctcacgatgcgatcgtcgaggcctctggttcccttaacacccttgcttgctctctcttcaagatcgcccaggatatccgttacctcggttctggacctcgttgcggtctgggcgagctgatcctccccgagaacgagcccggctcctctatcatgcctggaaaggtcaaccccactcagtgcgagtcccttaccatgatctgctcccaggttatgggtaaccacgtcgctgctaccgttggtggtatgaacggtcagttcgagcttaacgtgttcaagcccgtcatgatccgcaaccttctgcacagctcgcgcattctttcggatggcatgaagagcttcgagaagaacctggtgcacggtctcgaggccaacgagcccagaatcaactccctgctccacgagagtctgatgctcgtcacctgcttgaaccccgttatcggttacgacatggcgtccaaggtcgctaagaacgcccacaagaagggtctcactctgaagcagagtgctatggagctgcaggcccttagcgaggaggacttcgacacccatgtccgccctgagctgatgcttgctcctaaggagaagaaatag

SEQ ID NO: 9746 - protein, 549 aa, Aspergillus oryzae
MLAPSNSRAAVRSMASLAHAASRASASSPAVARSALACAARSPASLGCRRALSTNSRQLQFPRLQSLNTISSKRTFGTTARMASETRVETDAFGEIEVPADKYWGAQTQRSLGNFDINQPQDRMPEGVVKAFGILKGAAATVNMKFGLDPKIGEAIQKAAAEVAEGKLMDHFPLVVWQTGSGTQSNMNSNEVISNRAIEILGGKMGSKKPVHPNDHVNMSASSNDSFPTAMHIAAVLELEGTLLPSLKSLRDALQVKVENFEKIIKIGRTHLQDATPLTLGQEFSGYVAQLDRNIERVQNSLPHLRYLAQGGTAVGTGLNTFKGFDEAIAAEVTKMTGTEFKTAPNKFEVLAAHDAIVEASGSLNTLACSLFKIAQDIRYLGSGPRCGLGELILPENEPGSSIMPGKVNPTQCESLTMICSQVMGNHVAATVGGMNGQFELNVFKPVMIRNLLHSSRILSDGMKSFEKNLVHGLEANEPRINSLLHESLMLVTCLNPVIGYDMASKVAKNAHKKGLTLKQSAMELQALSEEDFDTHVRPELMLAPKEKK

SEQ ID NO: 9747 - DNA, 1865 bp, Solanum tuberosum; identical to SEQ ID NO: 6072
  CDS (66)..(1547)

SEQ ID NO: 9748 - protein, 493 aa, Solanum tuberosum; identical to SEQ ID NO: 6073

SEQ ID NO: 9749 - DNA, 1434 bp, Escherichia coli
  CDS (1)..(1434): transl_table=11
atgtcaaacaacattcgtatcgaagaagatcggttgggtaccagggaagttggagctgatgcctactatggtgttcacactctgagagcgattgaaaacttctatatcagcaacaacaaaatcagtgatattcctgaatttgttcgcggtatggtaatggttaaaaaagccgcagctatggcaaacaaagagctgcaaaccaatcctaaaagtgtagcgaatgccatcattcccgcatgtgatgaagacctgaacaacggaaaatgcatggatcagttcccggtagacgtctaccagggcggcgcacgtacttccgtaaacatgaacaccaacgaagtgctggccaatatcggtctggaactgatgggacaccagaaagctgaatatcagtacctgaacccgaacgaccatgttaacaaatgtcagtccactaacgacgcccacccgaccggtttccgtatcgcagtttactcttctatgattaagctggtagatgcgattaaccaactgcgtgaaggctttgaacgtaaagctgtcgaattgcaggacatcctgaaaatgggtcgtacccagccgcaggacgcagtaccgatgaccctgggtcaggaattccgcactttcagcatcctgctgaaagaagaagtgaaaaacatccaacgtaccgctgaactgctgctggaagttaaccttggcgcaacagcaatcggtactggtcccaacacgccgaaagagtaccgtccgctggcagtgaaaaaactggctgaagtcactggcttcccatgcgtaccggctgaacacctgatcgaagcgacctctgactgcggcgcttatgttatggttcacggcgcgctgaaacgcctggctgtgaagatgtccaaaatctgtaacgacctgcgcttgctctcttctggcccacgtgccggcctgaacgagatcaacctgccggaactgcaggcgggctcttccatcatgccagctaaagtaaacccggttgttccggaagtggttaaccaggtatgcaacaaagtcatcggtaacgacaccactgttaccatggcagcagaagcaggtcagctgcagttgaacgttatggagccggtcactggccaggctatgttcgaatccgttcacattctgaccaacgcttgctacaacctgctggtaaaatgcattaacggcatcactgctaacaaagaagtgtgcgaaggttacgtttacaacactatcggtatcgttacttacctgaacccgttcatcggtcaccacaacggtgacatcgcgggtaaaatctgtgccgaaaccggtaagagtgtacgtgaagtcctggaacgcggtctgttgtatgaagcggaacttgacgatattttctccgtacagaatctgatgcacccggcttacaaagctaaacgctatactgatgaaagcgaacagtaa

SEQ ID NO: 9750 - protein, 477 aa, Escherichia coli
MSNNIRIEEDRLGTREVGADAYYGVHTLRAIENFYISNNKISDIPEFVRGMVMVKKAAAMANKELQTNPKSVANAIIPACDEDLNNGKCMDQFPVDVYQGGARTSVNMNTNEVLANIGLELMGHQKAEYQYLNPNDHVNKCQSTNDAHPTGFRIAVYSSMIKLVDAINQLREGFERKAVELQDILKMGRTQPQDAVPMTLGQEFRTFSILLKEEVKNIQRTAELLLEVNLGATAIGTGPNTPKEYRPLAVKKLAEVTGFPCVPAEHLIEATSDCGAYVMVHGALKRLAVKMSKICNDLRLLSSGPRAGLNEINLPELQAGSSIMPAKVNPVVPEVVNQVCNKVIGNDTTVTMAAEAGQLQLNVMEPVTGQAMFESVHILTNACYNLLVKCINGITANKEVCEGYVYNTIGIVTYLNPFIGHHNGDIAGKICAETGKSVREVLERGLLYEAELDDIFSVQNLMHPAYKAKRYTDESEQ

SEQ ID NO: 9751 - DNA, 1389 bp, Neisseria meningitidis
  CDS (1)..(1389): transl_table=11
atgagcacccgcaccgaacacgacaccatgggcaatgtcgaagtcccgtccgaagcctattggggcgcgcagacccagcgcagccgcaacaatttcaaaatcggcggcgaaaccctgccgcagccgctgatttatgctttggcgctggtgaaaaaagccgctgccgcgaccaatgtttccctcggcaggattaagccggaacaggcggatttgattacgcaggcggcggatgatgtgttgaacggcaggcttgacggacagtttcctttagtggtttggcagaccggctccggcacgcagtccaatatgaacatgaacgaagtgctggcgaaccgcgccaacgaaatcgccggtacgggtttggcggcgtatcagcccgtccatcccaacgaccatgtgaaccacgcgcaatcgaccaacgacgcattcccgaccgccatccacgttgccgccgcgattgaaatcaaccgccacctcatccccgccgtaaaagccctgcgcgacaccttggacaaaaaagcccaagccttcgcccccatcgtcaaaatcggccgcacccacttgcaggacgcgacgccgctgactttaggccaagaattttccggctacgtttcccagctcgaccacggcttaggccgtctgaatgacgcgcttaaagacttgtatgaacttgctttgggcggtacggcggtcggcacgggtttgaacagccatcccgaatacgccgaaaaagccgccgccaaactcgccgaattgtccggcttgccgtttgtcagcgcgccgaacaaatttgaagccttgggcggacgcgatgccgccgttgccgcttcgggcgcattgaaaacgctggcggcaagcctgaataaaatcgccaacgacatccgctggctggcaagcggcccgcgctgcggtttgggcgaaatcaaaatccccgaaaacgagccgggttcgtccatcatgccgggcaaagtcaacccgacccaatgcgaagcgatgaccatggtgtgctgccaagtgttcggcaacgacgttaccatcggcatggcgggcgcgtcgggcaatttcgagctgaacgtctatatgcccgttatcgcctacaacctcttgcaatccatccgcctgttgggcgacgcgtgcaacagcttcaacgaacactgcgccgtcggcatcgaacccgtaccggaaaaaatcgactatttcctgcaccattccctgatgctggttactgcgttaaaccgtaaaatcggctacgaaaacgccgccaaagtcgccaaaaccgcctacaaaaacaacaaatcgttgcgcgaaaccgccgttgagttgggcttgctgacgggcgaagaatttgacgaactggtcgttcctgccgatatggttcatccgcgctaa

SEQ ID NO: 9752 - protein, 462 aa, Neisseria meningitidis
MSTRTEHDTMGNVEVPSEAYWGAQTQRSRNNFKIGGETLPQPLIYALALVKKAAAATNVSLGRIKPEQADLITQAADDVLNGRLDGQFPLVVWQTGSGTQSNMNMNEVLANRANEIAGTGLAAYQPVHPNDHVNHAQSTNDAFPTAIHVAAAIEINRHLIPAVKALRDTLDKKAQAFAPIVKIGRTHLQDATPLTLGQEFSGYVSQLDHGLGRLNDALKDLYELALGGTAVGTGLNSHPEYAEKAAAKLAELSGLPFVSAPNKFEALGGRDAAVAASGALKTLAASLNKIANDIRWLASGPRCGLGEIKIPENEPGSSIMPGKVNPTQCEAMTMVCCQVFGNDVTIGMAGASGNFELNVYMPVIAYNLLQSIRLLGDACNSFNEHCAVGIEPVPEKIDYFLHHSLMLVTALNRKIGYENAAKVAKTAYKNNKSLRETAVELGLLTGEEFDELVVPADMVHPR

SEQ ID NO: 9753 - DNA, 1395 bp, Eikenella corrodens; identical to SEQ ID NO: 6360
  CDS (1)..(1395): transl_table=11

SEQ ID NO: 9754 - protein, 464 aa, Eikenella corrodens; identical to SEQ ID NO: 6361

SEQ ID NO: 9755 - DNA, 1380 bp, Pseudomonas putida
  CDS (1)..(1380): transl_table=11
atgatgagtgatacccgtatcgagcgtgacagcatgggcgaactgcaggtgccggcccaggccctgtacggtgcccagactcagcgcgcggtcgacaacttcccggtcagcggccagcgcatgccggcccagttcattcgcgcgctgttgctggccaaggcggctgccgccaaggccaacgtcgagctggagcaattgtctgccgcgcagggcaatgccatcgtcaaggcggtcgagcaactgctggccgaggacttcatccagcacttcccggtggatgtgttccagaccggctccggcaccagctcgaacatgaacgccaacgaggtgatcgccaccctggccagccgtgtactgggtgatgcggtcaacgccaacgaccacgtcaactgtggccagagcagcaacgacatcatcccgaccaccattcacgtcagtgctgcactggccctgcacgaacaactgcttccggccctgagccacctggtgcaggtgatcgagaccaagtcggtgcaggtgcatcagtacgtgaaaaccggccgtacccacttgatggacgccatgccggtgcgcatgagccaggtgctggatggctgggccgcgcagatcaacgctgccaaggcgcacatcgaggcgaccctgccgagcttgcaggcgctggcccagggtggcacggccgtgggtaccggcatcaacgcccacccacagttcgcggccggtttcgcccgccagctcagcggcctgacccaggtcgagttcaccccgggccagaacctgtttgccctgatcggctcgcaagacactgccgtggcgctgtctggccagctcaagaccactgctgtggcgctgatgaagatcgccaacgacctgcgctggatgaactccggcccgctcgccggcctgggcgaaattgagctgcaaggcctgcaaccgggctcttcgatcatgcctggcaaggtcaacccggtgattcctgaggccaccgccatggttgctgcccaggtgatcggcaacgacgccaccatcgctgtcgctggccagtccggcaacttcgagctgaacgtgatgctgccggtgatcgcccgcaacctgctggaaagcatcgagctgatggccaacgtcagccgtctgctggccgacaaggccatcgccacgttcagggtcaacgagggcaagctcaaggaagccctggcgcgcaacccgattctggtcactgcgctgaacccgatcatcggctacctcaaggccgccgaaatcgccaagaccgcctacaagcagggccgcccgatcatcgacgtggcgctggagcacaccgacctgtcgcgggaccagctggaagcactgctggacccggaaaaactcaccgctggcggtatctga

SEQ ID NO: 9756 - protein, 459 aa, Pseudomonas putida
MMSDTRIERDSMGELQVPAQALYGAQTQRAVDNFPVSGQRMPAQFIRALLLAKAAAAKANVELEQLSAAQGNAIVKAVEQLLAEDFIQHFPVDVFQTGSGTSSNMNANEVIATLASRVLGDAVNANDHVNCGQSSNDIIPTTIHVSAALALHEQLLPALSHLVQVIETKSVQVHQYVKTGRTHLMDAMPVRMSQVLDGWAAQINAAKAHIEATLPSLQALAQGGTAVGTGINAHPQFAAGFARQLSGLTQVEFTPGQNLFALIGSQDTAVALSGQLKTTAVALMKIANDLRWMNSGPLAGLGEIELQGLQPGSSIMPGKVNPVIPEATAMVAAQVIGNDATIAVAGQSGNFELNVMLPVIARNLLESIELMANVSRLLADKAIATFRVNEGKLKEALARNPILVTALNPIIGYLKAAEIAKTAYKQGRPIIDVALEHTDLSRDQLEALLDPEKLTAGGI

SEQ ID NO: 9757 - DNA, 1428 bp, Bacillus subtilis; identical to SEQ ID NO: 6132
  CDS (1)..(1428): transl_table=11

SEQ ID NO: 9758 - protein, 475 aa, Bacillus subtilis; identical to SEQ ID NO: 6133

SEQ ID NO: 9759 - DNA, 1407 bp, Helicobacter pylori; identical to SEQ ID NO: 6398
  CDS (1)..(1407): transl_table=11

SEQ ID NO: 9760 - protein, 468 aa, Helicobacter pylori; identical to SEQ ID NO: 6399

SEQ ID NO: 9761 - DNA, 1425 bp, Pseudomonas aeruginosa; identical to SEQ ID NO: 6188
  CDS (1)..(1425): transl_table=11

SEQ ID NO: 9762 - protein, 474 aa, Pseudomonas aeruginosa; identical to SEQ ID NO: 6189

SEQ ID NO: 9763 - DNA, 2066 bp, Pseudomonas fluorescens
  CDS (323)..(1759): transl_table=11
gttgaccagcgtcagccccaacgcggcttccaggctgcggatacgccgactgaacgccggctgggtgacaaagcgccgctcagccgcctgggaaaaactacgcgtcgccgccagggcgctgaagtcttccaaccacttgctctcaaggttcatcactgcctcccacggaatgcaccattttggcacacacgcccgccaagataaccgggtcacatccacattatgccgtttgtgcataggccagtgtttaacagcattggcccaaaaagtcctacaagcctagcattcgcagcgttccggccagtcccgggtccatattgagatgatctccgtcatgtcctctgctgcatctttccgtaccgaaaaagacctgcttggcgtactcgaagtaccggctcaagcgtattacggcatccagaccctgcgagcggtgaataacttccgcctctcgggcgttccgatttcgcattacccgaaattggtggtcggtctggcaatggtcaagcaagcagcggctgacgccaaccgcgagttgggccagctcagcgaacgcaagcacgctgccatcagcgaagcctgcgctcgtctgatccgcggcgatttccacgaagagttcgtggtggacatgattcaaggcggcgctggcacttcaaccaacatgaatgccaacgaagtcatcgccaacatcgcgctggaggccatgggtcaccagaagggcgaataccagtacctgcaccccaacaacgacgtgaacatggcgcagtcgaccaacgacgcctacccgaccgcgatccgcctgggtctgctgctgggccatgacgcgctgctggccagcctcgacagcctgatccaggcgttcgccgccaaaggcgccgagttcagccatgtgctgaaaatgggccgcacacaattgcaagacgccgtgccgatgaccctcggccaggaattccgcgcgttcgccaccaccctgggtgaagacctggcccgcctgaaaaccctggcgccagagctgctgaccgaagtgaacctgggcggaaccgcgatcggtaccggcatcaacgccgacccgcgctaccaggccctcgccgtacaacgcctggccaccatcagcggtcagccgctggtaccggcggccgacctgatcgaagccacctccgacatgggcgctttcgtactgttctccggcatgctcaagcgtactgccgtgaagctgtccaagatctgcaacgacctgcgcctgctgtccagcggcccacgcaccggcatcaacgagatcaacctgccggctcgccagccaggcagctcgatcatgcccggcaaggtcaacccggtcatcccggaagcggtcaaccaggtagcgttccaagtcatcggtaacgacctggccctgaccatggcagccgaaggcggccaactgcagttgaacgtgatggagccgctgatcgccttcaagatcttcgactcgatccgcctgctgcaacgcgccatggacatgctgcgcgagcactgcatcgtcggcatcaccgccaacgaagcccgctgccgcgaactggtggaacattccatcggcctggtcaccgcgctgaacccatacatcggctatgaaaacgccacccgcattgcgcgtatcgcgcttgaaagcgggcgcggcgtgctggaactggtgcgtgaagaaggcttgctcgacgacgccatgctcgacgacatcctgcgccccgaaaacatgattgccccacgcttggtcccgctgaaggcctaagcgtttgttgcaccgctcaccaggctgagggactagacacctctcaccttttgagggcttgaagactcgttcttcaggcccttttttttgctcgtaattcctctccttatataaagcgctgttagtgcgtttcacctataaaacatcacgcctgcggcgttacttgaaaaagcattcattcattgcaaattcccattgcgtgcacaaacggtgtgcagtttcgtgccatataaaaacaatggtttcatatatgaaacgctcaataagtaaccttaatctcgcaactaattaatttaaaagggaattc

SEQ ID NO: 9764 - protein, 478 aa, Pseudomonas fluorescens; identical to SEQ ID NO: 6401

SEQ ID NO: 9765 - DNA, 2867 bp, Serratia marcescens
  CDS (787)..(2223): transl_table=11
gaattcgccgtcgaaggtattgccgttggcggcgtcgccgcccgtccaaccgccggggcgatacaccgacaggtgcggcatcagtttcagcgtcagcgatttttgcaccggcggcagcagcagcaacaggccgaggaaatcggtgaagaaacccggtatcagcagcaggaagcccgccagcaccagcgaaacgcttttcaccatttccgccgccgggctttcgccggccgccagtttttgctgcatctgcacgaaggttttcatgccctgattgcgcaccagcgaaatgccgacgcaggagctgaacaccaccagcagcagggtgacagccacgccgagcacggcggcgactttgataaagatggatatttctatgtaagccagcagaaatatcagcagtagcggtaaccagcgcacctggttctcctatcggtaggtaaggcacggccgccacggggcgacggcgcgaaaaaagaggccgtaaacggccgacactattacaatgagggcatccccccaccatttcaaccgagagccggtttttattgctaaagttcacaaacgtgaaagaagtcacagaaccgaaaaagggcatatccttaaacaccataaggtgatctggattcagtcatttcttaccaaccagcatatgatctgggcagctacgggcgatttggttaatcgtttcacgccccaagccttcggcaatattaatttaggctgtgcccttactagccttgacctgacaaattattaattcggcagcaacacatagagaaggttctcatgtcaaacaacattcgtatcgaagaagacctgttaggaacacgtgaagtccccgcagacgcttactacggagttcacactctgcgtgcgattgaaaacttctacatcagcaacagcaaaatcagcgatgtccccgagttcgttcgcggcatggtgatggtgaaaaaggccgcggcgatggccaacaaagaactcaaaaccatcccgcgcaaaatcgccgacgtgatcatccaggcctgcgacgaggtgctggataaaggcaagtgcatggatcagttcccggtggacgtattccagggcggcgcgggcacctcgctgaacatgaacaccaacgaagtgctggcgaacatcggcctggagctgatgggccatcaaaaaggcgaataccagtacctgaacccgaacgatcacctcaataagtgtcagtccaccaacgacgcctacccgaccgggttccgcatcgcggtgtacgcctccaaccagaaactgatcgacgccatcaaccagctgcgcgaaggcttcgatcgcaaggcgaaagagttcgaaaccatcctgaaaatgggccgcacccagctgcaggacgcggtgccgatgaccctaggccaggaattccacgccttcagcgtgctgctgaacgaagagacccgcaatctgcaccgcaccgcgacgctgctgctggaagtgaacctcggcgccaccgccatcggcaccgcgctcaacaccccggaaggctaccagccgctggcggtgcaaaaactggcggaagtcagcggcctgccggtggtgccggcagaagacctgatcgaagccacctccgactgcggcgcctacgtgatggtgcacagcgcgctcaaacgcctggcggtgaaactgtccaaaatctgtaacgacctgcgcctgctctcctccggcccgcgcgccggcctgaacgaaatcaacttgccggagctgcaggcgggatcgtccatcatgccggccaaagtgaatccggtggtgccggaagtggtcaatcaggtgtgtttcaaggtgattggcaacgacacttgcgttaccatggcggccgaagcgggccagctgcagctgaacgtgatggagccggtgatcggccaggcgatgttcgagtcgatccacatcctgaccaacgcctgctacaacctgctggaaaaatgcattaacggcatcaccgcgaataaagaagtctgcgaacactacgtcttcaactcgatcggtatcgtcacctatctgaacccgttcatcggccaccataacggtgacatcgtcgggaagatctgcgccgaaaccggcaagagcgtgcgcgaagtggtgctggaacgcggcctgctgaccgaagccgagctggatgacatcttctccgtggagaacctgatgcacccggcctataaagccaaacgctatacggatgaaaatgaacaataacagacctacccggtagccctgaaaggcacgctaaatcctctggatagcgtgcctttttacttttaggtgcccacaaaattttaacgttttattttcaatttacaccctaaatcattgggactgcatcaaggcggcaagagcgcaagtccccaggagcttactcaagtaagtgactggggtgagcgctcgcagccaacaccgatgcagtttcaaggatgacgggaaatctcattttaaggagtaaacactatgctagccgtagaattggttatcgttctgctggccatctttttaggggccaggttgggcggtatcggtatcgggttcgcggggggactgggcgtattggcgctggcgctgatcggcgtcaaaccgggcaacattcccttcgacgtcatctccatcatcatggcggtgattgcggcgatctccgccatgcaggtcgccggggggatggactacctggtgcaacagaccgaaaaactgctgcgcaagaaccccaagcacatcaccattctcgcccctatcgtcacctacttcctgaccatcttcgccggcaccggcaacatctcgctctcggcgctgccggtgatcgccgaggtggcgaaagaacagggcatcaagccttgccgcccgctgtcgac

SEQ ID NO: 9766 - protein, 478 aa, Serratia marcescens; identical to SEQ ID NO: 6403

SEQ ID NO: 9767 - DNA, 1479 bp, Arabidopsis thaliana
  CDS (1)..(1479)
atgtcgatttacgtcgcgtcgcgacggctctccggcggaacaactgtgacggcgctgcgttatgccacctctctgagatcttattcgacctcgtttagggaggagagggacaccttcgggccgattcaagttccttccgataaattgtggggagcccagacgcagagatcgctgcagaacttcgaaatcggtggtgagcgcgagcgaatgcctgaaccaattgtccgcgcttttggcgtcttgaagaaatgcgctgccaaggttaacatggaatacggccttgatccgacgattgggaaagcaattatgcaagctgctcaggaagtagctgagggaaagctcaatgatcatttcccccttgttgtctggcaaactggtagtgggactcagagtaatatgaatgctaatgaggtcattgctaatagagcagctgagattcttggtcgcaaacgtggtgagaaatgtgtgcacccaaatgaccatgtgaacagatcacaatcttctaacgacacttttcctaccgtcatgcacattgcagctgcaaccgagattaattcgaggctcatccctagtttaaaaactttgcatagcactttggaatctaagtccttcgagttcaaagatattgtgaaaattggaagaactcacactcaagatgctacacctttgacactaggacaagaatttggtggctatgctactcaagttaagtatggactaaatagagtcacctgcactcttcctcgcctctatcagcttgcacaaggtggaactgcggttgggacaggattaaacactaagaaagggtttgatgtaaagatagctgctgcagtagctgaagaaacaaacttgccatttgtcactgcagaaaacaagtttgaagctctggctgcacacgatgcttgtgttgaaaccagtgggtcacttaacacaatcgccacatcgctgatgaagatcgccaatgatatacgttttcttggaagtggcccaagatgtggtcttggtgaacttgtactacctgaaaatgagccaggaagcagtatcatgcctgggaaggtaaatcctacacagtgtgaggccttgactatggtttgtgcacaggttatgggaaaccatgtagctgtgacagttggtgggtcaaatggtcatttcgaattgaatgtattcaagccggtgatcgcgagtgctcttttacattccgtcagattaatagcagatgcttcagcttcgttcgagaaaaactgtgtgaggggcattgaggccaacagagaaagaatctcaaagctattgcacgagtctcttatgcttgtgacatcattgaatccgaaaatcgggtatgacaatgctgcagcagttgccaagaaagctcacaaagaaggatgtacattgaaggaagcggctctgaatttaggcgtgcttactgcggaagagtttgatacacttgttgttcctgagaagatgattggtccctccgattga

SEQ ID NO: 9768 - protein, 492 aa, Arabidopsis thaliana; identical to SEQ ID NO: 6067

SEQ ID NO: 9769 - DNA, 1500 bp, Arabidopsis thaliana; identical to SEQ ID NO: 6070
  CDS (1)..(1500)

SEQ ID NO: 9770 - protein, 499 aa, Arabidopsis thaliana; identical to SEQ ID NO: 6071

SEQ ID NO: 9771 - DNA, 1467 bp, Bradyrhizobium japonicum
  CDS (46)..(1467): transl_table=11
atgaagaggccgcgcggcatttcgcgcggcggaatggatgtgctcatggccaaatctgcacgcacgaagaccgctcgccccgcgacccgcaccgagaccgacagtttcggtcccatcgaggtcccctccgatcgctattggggcgcgcagaccgaacgttcgcggcagaatttccgcatcggcacggatcgcatgccgatctcgctcgtgcatgcgctcggcatcgtcaagctcgccgcggcgcagtccaaccgcgagctcggcctgctcgaccagcgccgcgccagtgccatcatccgcgccgcgcgcgaggtgatcgacggcagcctcgacgatcatttcccgctcgtcgtgtggcagaccggctcgggcacgcagaccaacatgaacctcaacgaggtgatcgccaaccgcgccaatgagctgctcggcggcgagctcggcgccaagaagccggtgcatccgaacgatcacgtcaacatgagccagtcgtcgaacgactcttttcccaccgcaatgcatatcgcggcggcgagccgcatcaccgccgatctcgttcctgcccttggcgaactgctccgcgcgctgcgcaagaaggagaaggagttcgccaagatcgtcaagatcggccgcacccacacccaggacgcgacgccgctgacgctcggccaggaattctccggctatgccgcgcaggtcgaaagcgggatcgcgcgactgaaggtcgcggtgaaggagctctatccgctggcgcagggcggcaccgccgtcggcaccggcctcaacgcgaagccgcgctttgcaagactgttcgcaaagcacgttgccggaatcaccaaactgcccttcaccagcgccgccaacaaattcgaggcgctggcctcgaacgatgcttatgtgctggcgcacggcgccatcagttcggtcgcgacaggcctgttcaagatcgccaacgacatccgcctgctcggatcgggtccgcgctcagggctcggcgagctgatcctgccggagaacgaaccgggctcgtcgatcatgccgggcaaggtcaatccgacgcagtgcgaggcgatgaccatggtgtgctgccaggtgttcggcaatcacaccgcgatcacggtcgccggcagccagggccatttcgagctcaacgtctacaagcccgtgctggcctacaacatgctgcactcgatccgcctgatggccgatgccgcgcgctccttcaccgaacattgcgtcagcggcatccgcgccgacgaaaagcgcataagtgagctgatgcagcgctcgctgatgctggtgaccgcgctcgcaccgaagatcggctacgacaacgccgccaaggtcgcgaagacggcgcatgccaacggcaccacgctgaaggaggaagcgctgcggctcggcttcgtcacagcggacgagttcgaccgtttggtgcagccggagaagatgacgaaaccggggtaa

SEQ ID NO: 9772 - protein, 473 aa, Bradyrhizobium japonicum
MAKSARTKTARPATRTETDSFGPIEVPSDRYWGAQTERSRQNFRIGTDRMPISLVHALGIVKLAAAQSNRELGLLDQRRASAIIRAAREVIDGSLDDHFPLVVWQTGSGTQTNMNLNEVIANRANELLGGELGAKKPVHPNDHVNMSQSSNDSFPTAMHIAAASRITADLVPALGELLRALRKKEKEFAKIVKIGRTHTQDATPLTLGQEFSGYAAQVESGIARLKVAVKELYPLAQGGTAVGTGLNAKPRFARLFAKHVAGITKLPFTSAANKFEALASNDAYVLAHGAISSVATGLFKIANDIRLLGSGPRSGLGELILPENEPGSSIMPGKVNPTQCEAMTMVCCQVFGNHTAITVAGSQGHFELNVYKPVLAYNMLHSIRLMADAARSFTEHCVSGIRADEKRISELMQRSLMLVTALAPKIGYDNAAKVAKTAHANGTTLKEEALRLGFVTADEFDRLVQPEKMTKPG

SEQ ID NO: 9773 - DNA, 1665 bp, Bradyrhizobium japonicum
  CDS (229)..(1665): transl_table=11
gtgcgttctctggctctgccggcatcgaagccatcaacattggagccgtgcgattgtctgagtgttccgcacgcgcaacgcgcgttcgctcgctgcaagccgaggcgcccaccatgccattcggaaaaaggacgttcgttcgcggaagcgtgtgcgctgtgccgtccgtacactttaggtcggcgccgcaagagtgctcccgacatcaactgccacgagaggcaaaggatgaacgacctccgcaaagagacagacagcctgggtgaagtgaacgttcccgcggacaagctctggggcgcgcagacgcagcgctcgctcgagcatttcagcatcggccgggacctgatgccgcgcgaaatgatccagtcctacgcgatcctgaagaaagcggccgcgaatgcgaattacgctggcggccgtctcgacggcaagattcacaaactgatcgtccacacctgcgacgagattctcgccggccagcatcacgacatgtttccccttcacgtctggatgacgggtagcggaacgcagttcaacatgaacgtgaacgaggtgatctcgaaccgatgctgccagcttgctggcacggcgctcggcagcaagctgccggttcatccgaacgatcacgtcaacatgtcgcagtcgtcgaacgatagcttcccgtcggccatgtacatcgcggccgcgatgaacgtgacgcaacggctggttcctgcggtcgaagctctgcacgatgcgatcgcggcgaaatcgaaccagtgggacgacatcgtcaagatcggccgaacccacatgcaggatgccacacccctgacgctcgggcaggagtggtccggttatgccgcgatgctcgccgacggtctggcgcgcatcgacgacgcgctcaagggcgtcttccgcctcgcgctgggcggcaccgccgtgggcaccgggattaacgcggcgccgggctttgcagaagccgtcgcagccgagatcgcgcggttgacgggcctgcccttcgtcagtgcgccgaacaagttcgccgtgcagggtgcacacgacgcgctggtgcagctctccggtacactgcgcacgctcgccggctcgctctacaagatcgcaaacgacatccgccttttgtcctgcggtccgcgcgcgggctttgccgagttgcggattcccgagaacgagccgggctcgtcgatcatgccgggcaaggtcaatccgacgcaggctgaggcgctgacgatgatcgccgtgcaggtgatggcgaacgacgtcgccgtcgggttcggtggcgccggcggctacctggagatgaacgtctacaagccgctgatcatccacaacatcgcgcaatccgtcaccatcctcaccgacggctgcacgaatttccgcacctttctggtcgagggtaccgagccgaaccgcaagaaaatcaaggagtatgtcgagcggtcgctgatgctcgtgaccgccctggcgccggtgatcggctacgacaaggcatcgcggatcgcgcattacgcgatggacaacgatctcacgctgaagtcggcggcgctgaagctcggcttcgtgaccgagccggagttcgaccgcatcgtggatcccgccaagatggtcaagccctacgttgccgagatcaaggtgccgctcgcaatcggtgcgaaaaccggttga

SEQ ID NO: 9774 - protein, 478 aa, Bradyrhizobium japonicum
MNDLRKETDSLGEVNVPADKLWGAQTQRSLEHFSIGRDLMPREMIQSYAILKKAAANANYAGGRLDGKIHKLIVHTCDEILAGQHHDMFPLHVWMTGSGTQFNMNVNEVISNRCCQLAGTALGSKLPVHPNDHVNMSQSSNDSFPSAMYIAAAMNVTQRLVPAVEALHDAIAAKSNQWDDIVKIGRTHMQDATPLTLGQEWSGYAAMLADGLARIDDALKGVFRLALGGTAVGTGINAAPGFAEAVAAEIARLTGLPFVSAPNKFAVQGAHDALVQLSGTLRTLAGSLYKIANDIRLLSCGPRAGFAELRIPENEPGSSIMPGKVNPTQAEALTMIAVQVMANDVAVGFGGAGGYLEMNVYKPLIIHNIAQSVTILTDGCTNFRTFLVEGTEPNRKKIKEYVERSLMLVTALAPVIGYDKASRIAHYAMDNDLTLKSAALKLGFVTEPEFDRIVDPAKMVKPYVAEIKVPLAIGAKTG

SEQ ID NO: 9775 - DNA, 1389 bp, Bacillus anthracis; identical to SEQ ID NO: 6406
  CDS (1)..(1389): transl_table=11

SEQ ID NO: 9776 - protein, 462 aa, Bacillus anthracis; identical to SEQ ID NO: 6407

SEQ ID NO: 9777 - DNA, 1389 bp, Bacillus subtilis; identical to SEQ ID NO: 6408
  CDS (1)..(1389): transl_table=11

SEQ ID NO: 9778 - protein, 462 aa, Bacillus subtilis; identical to SEQ ID NO: 6409

SEQ ID NO: 9779 - DNA, 1392 bp, Bordetella pertussis; identical to SEQ ID NO: 6410
  CDS (1)..(1392): transl_table=11

SEQ ID NO: 9780 - protein, 463 aa, Bordetella pertussis; identical to SEQ ID NO: 6411

SEQ ID NO: 9781 - DNA, 1422 bp, Corynebacterium glutamicum
  CDS (1)..(1422): transl_table=11
atgagtgatttcatgaccgagcaggaattccgtattgagcacgacaccatgggtgaagtgaaggttccagcaaaggctctgtggcaggcacagacccagcgcgctgttgagaacttccctatctctggtcgtggtctggaatccgcacagatccgcgcaatgggtctgctgaaggcagcttgtgcgcaggtaaacaaggactccggtgcgctggatgcagagaaggcagatgccatcattgcagctggtaaggagatcgcgtccggtaagcatgacgctgagttcccaattgatgtgttccagactggttccggtacttcctccaacatgaacaccaatgaggttatcgcttccatcgcgaaggctaacggcgttgaggttcacccaaatgaccacgtcaacatgggtcagtcctccaatgacaccttccctactgcaactcacgttgctgcaaccgaagctgctgtcaatgacctcatcccaggcctgaaggttctgcacgagtctttggcgaagaaggctaacgagtggtctgaggttgttaagtccggccgcacccacctgatggacgctgttccagtaaccctgggccaggagttcggtggctacgctcgccagatccagctcggcatcgagcgcgttgaggctactcttcctcgccttggtgagctggctattggtggcaccgctgctggtaccggtatcaacacctccgctgatttcggcggcaaggttgttgctgaactgatcaacttgaccgacgtcaaggagctcaaggaagctgagaaccacttcgaggctcaggctgcacgcgacgctcttgttgagttctccggcgcaatgcgcgttatcgctgtctccttgtacaagatcgctaacgatatccgcctcatgggctccggcccactgaccggtcttggcgagatccgtctcccagacctgcagccaggttcctccatcatgccaggcaaggtcaacccagttctctgtgagaccgctacccaggtttccgctcaggttatcggcaatgacgcagctgttgcgttctccggcacccagggccagttcgagctcaacgtgttcatcccagtgatggctcgcaacgtgcttgagtccgctcgcctgctggctaacacttcccgcgtgttcgcaacccgtctcgttgatggcattgagccaaacgaggcacacatgaaggagctcgctgagtcttcaccttccatcgttaccccactgaactctgcaatcggctacgaagctgctgcaaaggtggctaagactgctttggctgagggcaagaccatccgccagactgtcatcgatttgggcttggttgatggcgagaagctcaccgaggaagagctggacaagcgcctcgacgttcttgctatggctcacaccgagcgcgagaacaagttctaa

SEQ ID NO: 9782 - protein, 473 aa, Corynebacterium glutamicum; identical to SEQ ID NO: 6421

SEQ ID NO: 9783 - DNA, 1404 bp, Escherichia coli
  CDS (1)..(1404): transl_table=11
atgaatacagtacgcagcgaaaaagattcgatgggggcgattgatgtcccggcagataagctgtggggcgcacaaactcaacgctcgctggagcatttccgcatttcgacggagaaaatgcccacctcactgattcatgcgctggcgctaaccaagcgtgcagcggcaaaagttaatgaagatttaggcttgttgtctgaagagaaagcgagcgccattcgtcaggcggcggatgaagtactggcaggacagcatgacgacgaattcccgctggctatctggcagaccggctccggcacgcaaagtaacatgaacatgaacgaagtgctggctaaccgggccagtgaattactcggcggtgtgcgcgggatggaacgtaaagttcaccctaacgacgacgtgaacaaaagccaaagttccaacgatgtctttccgacggcgatgcacgttgcggcgctgctggcgctgcgcaagcaactcattcctcagcttaaaaccctgacacagacactgaatgagaaatcccgtgcttttgccgatatcgtcaaaattggtcgtactcacttgcaggatgccacgccgttaacgctggggcaggagatttccggctgggtagcgatgctcgagcataatctcaaacatatcgaatacagcctgcctcacgtagcggaactggctcttggcggtacagcggtgggtactggactaaatacccatccggagtatgcgcgtcgcgtagcagatgaactggcagtcattacctgtgcaccgtttgttaccgcgccgaacaaatttgaagcgctggcgacctgtgatgccctggttcaggcgcacggcgcgttgaaagggttggctgcgtcactgatgaaaatcgccaatgatgtccgctggctggcctctggcccgcgctgcggaattggtgaaatctcaatcccggaaaatgagccgggcagctcaatcatgccggggaaagtgaacccaacacagtgtgaggcattaaccatgctctgctgtcaggtgatggggaacgacgtggcgatcaacatggggggcgcttccggtaactttgaactgaacgtcttccgtccaatggtgatccacaatttcctgcaatcggtgcgcttgctggcagatggcatggaaagttttaacaaacactgcgcagtgggtattgaaccgaatcgtgagcgaatcaatcaattactcaatgaatcgctgatgctggtgactgcgcttaacacccacattggttatgacaaagccgccgagatcgccaaaaaagcgcataaagaagggctgaccttaaaagctgcggcccttgcgctggggtatcttagcgaagccgagtttgacagctgggtacggccagaacagatggtcggcagtatgaaagccgggcgttaa

SEQ ID NO: 9784 - protein, 467 aa, Escherichia coli
MNTVRSEKDSMGAIDVPADKLWGAQTQRSLEHFRISTEKMPTSLIHALALTKRAAAKVNEDLGLLSEEKASAIRQAADEVLAGQHDDEFPLAIWQTGSGTQSNMNMNEVLANRASELLGGVRGMERKVHPNDDVNKSQSSNDVFPTAMHVAALLALRKQLIPQLKTLTQTLNEKSRAFADIVKIGRTHLQDATPLTLGQEISGWVAMLEHNLKHIEYSLPHVAELALGGTAVGTGLNTHPEYARRVADELAVITCAPFVTAPNKFEALATCDALVQAHGALKGLAASLMKIANDVRWLASGPRCGIGEISIPENEPGSSIMPGKVNPTQCEALTMLCCQVMGNDVAINMGGASGNFELNVFRPMVIHNFLQSVRLLADGMESFNKHCAVGIEPNRERINQLLNESLMLVTALNTHIGYDKAAEIAKKAHKEGLTLKAAALALGYLSEAEFDSWVRPEQMVGSMKAGR

SEQ ID NO: 9785 - DNA, 1413 bp, Halobacterium salinarium; identical to SEQ ID NO: 6116
  CDS (1)..(1413): transl_table=11

SEQ ID NO: 9786 - protein, 470 aa, Halobacterium salinarium; identical to SEQ ID NO: 6117

SEQ ID NO: 9787 - DNA, 1419 bp, Methylobacterium extorquens; identical to SEQ ID NO: 6432
  CDS (1)..(1419): transl_table=11

SEQ ID NO: 9788 - protein, 472 aa, Methylobacterium extorquens; identical to SEQ ID NO: 6433

SEQ ID NO: 9789 - DNA, 1395 bp, Pseudomonas putida; identical to SEQ ID NO: 6446
  CDS (1)..(1395): transl_table=11

SEQ ID NO: 9790 - protein, 464 aa, Pseudomonas putida; identical to SEQ ID NO: 6447

SEQ ID NO: 9791 - DNA, 1494 bp, Rhizobium meliloti
  CDS (103)..(1494): transl_table=11
atggccaaggcagagaaatgcccggcagcggggagtaagatcggccttggacccggtccccgcctcggcttcatgaaccgcatgacgaaagcaggtatcacgatgacatcgacccgcacggaaacagatacgttcggccccatcgaagtggcgagcgaccgctattggggcgcccaggcgcagcgatcgctgggcaatttcaaaatcggctgggaaaagcagcctctggcaatcgtgcgcgcactcggcatcgtcaaacaggcggctgcccgcgccaacatggcgctcggccgcctcgacccggcgatcggcgacgccatcgtcaaggccgcacaggaggtgatcgacggcaagcttgacgagcacttccctctcgtcgtgtggcagacgggctccggaacccagtcgaacatgaatgcgaacgaggtcgtttccaaccgtgcgatcgagctgctcggcggcgtcatgggttcgaagaagccggttcacccgaacgatcacgtcaatatgagccagtcgtcgaacgacacctatcccacggccatgcacatcgcctgtgcggagcgcgtgatccacgatctgctgccggcgctcaagcacctgcacaaggcgctcgaagagaaggtgaaggctttcgatcacatcatcaagatcggccgcacccacacgcaggacgcaacgcccctgacgctggggcaggagttttccggctatgcggcgcaggtcgcctcctcgatcaaacggatcgagatgacgctccccggcctttgcgagctcgcccagggggggaccgcggtcggcaccgggctcaatgcgccggtcggatttgccgagaaggtcgccgaggaaatcgctgccatcaccggcatcggcttcacttccgcgccgaacaagttcgaagcgctggccgcccacgactcgatggtcttcagccacggggcaatcaacgccaccgccgccgcgctcttcaagatcgccaacgacatccgcttcctcggctccggcccccgctccggcctcggcgagctttcactgccggaaaacgagccgggctcgtccatcatgccgggcaaggtcaacccgactcagtgcgaggcgctcacccaggtctgcgtccaggtcttcggcaatcatgcggcgctgacctttgccggcagccagggccacttcgagctcaacgtctacaatccgctgatggcgtacaacttcctgcagtcggtgcaactgctcgccgatgcggctatctccttcaccgacaattgcgtcgtcgggatcgaggcgcgggaggacaacatcaaggcggcgctcgaccgttcgctcatgctggtgactgcgcttgcgccgaagatcggctacgacaacgcggccaagatcgccaagaccgcccacaagaacggtaccacgcttcgcgaggaggccgtcggcggcggttacgtcacggacgaggagttcgacgccgtcgtccgccccgaaaccatgatcggcccggcctga

SEQ ID NO: 9792 - protein, 463 aa, Rhizobium meliloti; identical to SEQ ID NO: 6453

SEQ ID NO: 9793 - DNA, 1404 bp, Salmonella typhimurium; identical to SEQ ID NO: 6454
  CDS (1)..(1404): transl_table=11

SEQ ID NO: 9794 - protein, 467 aa, Salmonella typhimurium; identical to SEQ ID NO: 6455

SEQ ID NO: 9795 - DNA, 1404 bp, Streptomyces avermitilis; identical to SEQ ID NO: 6126
  CDS (1)..(1404): transl_table=11

SEQ ID NO: 9796 - protein, 467 aa, Streptomyces avermitilis; identical to SEQ ID NO: 6127

SEQ ID NO: 9797 - DNA, 1386 bp, Streptomyces coelicolor; identical to SEQ ID NO: 6128
  CDS (1)..(1386): transl_table=11

SEQ ID NO: 9798 - protein, 461 aa, Streptomyces coelicolor; identical to SEQ ID NO: 6129

SEQ ID NO: 9799 - DNA, 1485 bp, Rhizopus oryzae; identical to SEQ ID NO: 6472
  CDS (1)..(1485)

SEQ ID NO: 9800 - protein, 494 aa, Rhizopus oryzae [sequence omitted]

SEQ ID NO: 9801 - DNA, 1449 bp, Schizosaccharomyces pombe
  CDS (1)..(1449)
atgaattccactactccgacttatcatctcattcccaaaggcggtaagcatggcgagttccgacaggaatctgacacctttggtcccatacaagtccctgcagaaaagtattggggtgctcaaactcagcgttctcttcaaaactttcgaattggtggtgaaaaagagcgacttcctcttcccttagttcgcgcatttggagttttaaagcgtgcggctgcttctgttaatcgtgaattcggtttggatcccaaacttgcagatgccattgaacaggctgcccaagaagtcattgatggtcgtttggatgataacttccccttggttgttttccaaactggctcgggcacccaatccaatatgaacagtaacgaggtaatcgctaatcgtgccatagaaatccttggtggtacgttaggttcgaaaaagcccgttcatccaaacgatcacgttaacatgtctcaatcttctaacgacactttccccactgttatgcatattgcctctgttttgcaaattcacactcatttacttcctgccatgaagcacctccaccgggccttgaagggtaaggaagaggagtttaagaacattatcaaaatcggtcgaacccacatgcaagatgccactcctctttctttaggtcaagaattttccggctatgttactcaggttggttatggcattgagcgcataaacaacgctcttcctcgtctttgtcttctcgctcaaggtggtactgccgtgggtactggactaaatacttttgaaggatttgacgtgaaggttgctgagaaggtttcaaagcttacaaatattgagtttaagaccgcccctaacaagtttgaggctcttgcagcccatgatgcgattgtggagatgagtggtgctttaaatgttattgcttgttctcttatgaaaattgctaacgatattcgtcaacttggttctggccctcgttgtggtttaggcgaattgatccttcctgctaatgaacctggaagttcaatcatgccaggcaaagtaaaccccacccaatgtgaagccttaacaatggtttgtgctcaagtaatgggcaatcatgccactattactgtcgctggtgcctccggacactgtgaactcaatgtttttaaacctcttttagcaaagaacattctaagcagtattcgtcttttaggggatgcttgcgagtcttttactgatcattgcgttgtcggcattgagccaaattacgaaggtattgcccgtcatcttcgtgattccttgatgcttgttactgcgttaaatcctcacatcggttatgataactgtgccaagattgccaagactgctcttaaaaataagagcactctcaagcacgagtttgttactttgggtttcggtacccccgagcaattcgatgaatgggttcgccctgaattaatgatttcagctaagaaagtataa

SEQ ID NO: 9802 - protein, 482 aa, Schizosaccharomyces pombe
MNSTTPTYHLIPKGGKHGEFRQESDTFGPIQVPAEKYWGAQTQRSLQNFRIGGEKERLPLPLVRAFGVLKRAAASVNREFGLDPKLADAIEQAAQEVIDGRLDDNFPLVVFQTGSGTQSNMNSNEVIANRAIEILGGTLGSKKPVHPNDHVNMSQSSNDTFPTVMHIASVLQIHTHLLPAMKHLHRALKGKEEEFKNIIKIGRTHMQDATPLSLGQEFSGYVTQVGYGIERINNALPRLCLLAQGGTAVGTGLNTFEGFDVKVAEKVSKLTNIEFKTAPNKFEALAAHDAIVEMSGALNVIACSLMKIANDIRQLGSGPRCGLGELILPANEPGSSIMPGKVNPTQCEALTMVCAQVMGNHATITVAGASGHCELNVFKPLLAKNILSSIRLLGDACESFTDHCVVGIEPNYEGIARHLRDSLMLVTALNPHIGYDNCAKIAKTALKNKSTLKHEFVTLGFGTPEQFDEWVRPELMISAKKV

SEQ ID NO: 9803 - DNA, 2489 bp, Saccharomyces cerevisiae; identical to SEQ ID NO: 6182
  CDS (830)..(2296)

SEQ ID NO: 9804 - protein, 488 aa, Saccharomyces cerevisiae; identical to SEQ ID NO: 6183

SEQ ID NO: 9805 - DNA, 1488 bp, Glycine max; identical to SEQ ID NO: 6474
  CDS (1)..(1488)

SEQ ID NO: 9806 - protein, 495 aa, Glycine max; identical to SEQ ID NO: 6475

SEQ ID NO: 9807 - DNA, 1485 bp, Hordeum vulgare; identical to SEQ ID NO: 6480
  CDS (1)..(1485)

SEQ ID NO: 9808 - protein, 494 aa, Hordeum vulgare; identical to SEQ ID NO: 6481

SEQ ID NO: 9809 - DNA, 1485 bp, Triticum aestivum; identical to SEQ ID NO: 6482
  CDS (1)..(1485)

SEQ ID NO: 9810 - protein, 494 aa, Triticum aestivum; identical to SEQ ID NO: 6483

SEQ ID NO: 9811 - DNA, 1497 bp, Zea mays; identical to SEQ ID NO: 6486
  CDS (1)..(1497)

SEQ ID NO: 9812 - protein, 498 aa, Zea mays; identical to SEQ ID NO: 6487

SEQ ID NO: 9813 - DNA, 26 bp, Artificial sequence
  primer
atgtgtttaaagcaaatcattggcag

SEQ ID NO: 9814 - DNA, 25 bp, Artificial sequence
  primer
ttactgttcgctttcatcagtatag

SEQ ID NO: 9815 - protein, 461 aa, Artificial sequence
  consensus sequence
  Variant (2)..(2): Xaa in position 2 is any amino acid
  Variant (4)..(4): Xaa in position 4 is any amino acid
  Variant (5)..(10): Xaa in position 5 to 10 is any or no amino acid
  Variant (12)..(13): Xaa in position 12 to 13 is any amino acid
  Variant (15)..(17): Xaa in position 15 to 17 is any amino acid
  Variant (20)..(24): Xaa in position 20 to 24 is any amino acid
  Variant (26)..(27): Xaa in position 26 to 27 is any amino acid
  Variant (29)..(29): Xaa in position 29 is any amino acid
  Variant (31)..(33): Xaa in position 31 to 33 is any amino acid
  Variant (36)..(36): Xaa in position 36 is any amino acid
  Variant (38)..(53): Xaa in position 38 to 53 is any amino acid
  Variant (54)..(55): Xaa in position 54 to 55 is any or no amino acid
  Variant (57)..(57): Xaa in position 57 is any amino acid
  Variant (61)..(62): Xaa in position 61 to 62 is any amino acid
  Variant (64)..(75): Xaa in position 64 to 75 is any amino acid
  Variant (76)..(76): Xaa in position 76 is any or no amino acid
  Variant (78)..(79): Xaa in position 78 to 79 is any amino acid
  Variant (81)..(92): Xaa in position 81 to 92 is any amino acid
  Variant (93)..(94): Xaa in position 93 to 94 is any or no amino acid
  Variant (96)..(100): Xaa in position 96 to 100 is any amino acid
  Variant (102)..(102): Xaa in position 102 is any amino acid
  Variant (104)..(104): Xaa in position 104 is any amino acid
  Variant (107)..(108): Xaa in position 107 to 108 is any amino acid
  Variant (112)..(112): Xaa in position 112 is any amino acid
  Variant (116)..(117): Xaa in position 116 to 117 is any amino acid
  Variant (119)..(119): Xaa in position 119 is any amino acid
  Variant (121)..(121): Xaa in position 121 is any amino acid
  Variant (123)..(123): Xaa in position 123 is any amino acid
  Variant (124)..(124): Xaa in position 124 is any or no amino acid
  Variant (126)..(127): Xaa in position 126 to 127 is any amino acid
  Variant (128)..(129): Xaa in position 128 to 129 is any or no amino acid
  Variant (131)..(132): Xaa in position 131 to 132 is any amino acid
  Variant (133)..(136): Xaa in position 133 to 136 is any or no amino acid
  Variant (139)..(139): Xaa in position 139 is any amino acid
  Variant (143)..(144): Xaa in position 143 to 144 is any amino acid
  Variant (147)..(147): Xaa in position 147 is any amino acid
  Variant (150)..(151): Xaa in position 150 to 151 is any amino acid
  Variant (154)..(157): Xaa in position 154 to 157 is any amino acid
  Variant (159)..(165): Xaa in position 159 to 165 is any amino acid
  Variant (166)..(166): Xaa in position 166 is any or no amino acid
  Variant (168)..(173): Xaa in position 168 to 173 is any amino acid
  Variant (175)..(180): Xaa in position 175 to 180 is any amino acid
  Variant (182)..(184): Xaa in position 182 to 184 is any amino acid
  Variant (186)..(189): Xaa in position 186 to 189 is any amino acid
  Variant (190)..(191): Xaa in position 190 to 191 is any or no amino acid
  Variant (193)..(193): Xaa in position 193 is any amino acid
  Variant (197)..(198): Xaa in position 197 to 198 is any amino acid
  Variant (202)..(202): Xaa in position 202 is any amino acid
  Variant (204)..(204): Xaa in position 204 is any amino acid
  Variant (211)..(230): Xaa in position 211 to 230 is any amino acid
  Variant (231)..(237): Xaa in position 231 to 237 is any or no amino acid
  Variant (239)..(239): Xaa in position 239 is any amino acid
  Variant (242)..(242): Xaa in position 242 is any amino acid
  Variant (246)..(246): Xaa in position 246 is any amino acid
  Variant (248)..(270): Xaa in position 248 to 270 is any amino acid
  Variant (271)..(271): Xaa in position 271 is any or no amino acid
  Variant (273)..(276): Xaa in position 273 to 276 is any amino acid
  Variant (277)..(277): Xaa in position 277 is any or no amino acid
  Variant (279)..(285): Xaa in position 279 to 285 is any amino acid
  Variant (287)..(291): Xaa in position 287 to 291 is any amino acid
  Variant (293)..(295): Xaa in position 293 to 295 is any amino acid
  Variant (297)..(298): Xaa in position 297 to 298 is any amino acid
  Variant (300)..(300): Xaa in position 300 is any amino acid
  Variant (303)..(303): Xaa in position 303 is any amino acid
  Variant (306)..(306): Xaa in position 306 is any amino acid
  Variant (308)..(308): Xaa in position 308 is any amino acid
  Variant (310)..(310): Xaa in position 310 is any amino acid
  Variant (315)..(315): Xaa in position 315 is any amino acid
  Variant (317)..(318): Xaa in position 317 to 318 is any amino acid
  Variant (320)..(321): Xaa in position 320 to 321 is any amino acid
  Variant (324)..(327): Xaa in position 324 to 327 is any amino acid
  Variant (334)..(334): Xaa in position 334 is any amino acid
  Variant (339)..(341): Xaa in position 339 to 341 is any amino acid
  Variant (343)..(350): Xaa in position 343 to 350 is any amino acid
  Variant (352)..(352): Xaa in position 352 is any amino acid
  Variant (355)..(364): Xaa in position 355 to 364 is any amino acid
  Variant (366)..(368): Xaa in position 366 to 368 is any amino acid
  Variant (371)..(373): Xaa in position 371 to 373 is any amino acid
  Variant (375)..(382): Xaa in position 375 to 382 is any amino acid
  Variant (384)..(386): Xaa in position 384 to 386 is any amino acid
  Variant (388)..(397): Xaa in position 388 to 397 is any amino acid
  Variant (399)..(400): Xaa in position 399 to 400 is any amino acid
  Variant (403)..(404): Xaa in position 403 to 404 is any amino acid
  Variant (406)..(415): Xaa in position 406 to 415 is any amino acid
  Variant (417)..(419): Xaa in position 417 to 419 is any amino acid
  Variant (422)..(422): Xaa in position 422 is any amino acid
  Variant (426)..(426): Xaa in position 426 is any amino acid
  Variant (429)..(436): Xaa in position 429 to 436 is any amino acid
  Variant (438)..(442): Xaa in position 438 to 442 is any amino acid
  Variant (444)..(454): Xaa in position 444 to 454 is any amino acid
  Variant (455)..(460): Xaa in position 455 to 460 is any or no amino acid
RXEXXXXXXXDXXGXXXVPXXXXXGXXTXRXXXNFXIXXXXXXXXXXXXXXXXXXKXAAAXXNXXXXXXXXXXXXXIXXAXXXXXXXXXXXXXXFXXXXXQXGXGTXXNMNXNEVXXNXAXEXXGXXXXGXXXXXXPNXHVNXXQSXNDXXPTXXXXAXXXXXXXXLXXXXXXLXXXXXXKXXXFXXXXXXKXGRTXXQDAXPXTLGQEFXXXXXXXXXXXXXXXXXXXXXXXXXXXGXTAXGTGXNXXXXXXXXXXXXXXXXXXXXXXXXAXXXXXAXXXXXXXVXXXXXLXXXAXXLXKIXNDXRXLXSGPRXGXXEXXLPXXXXGSSIMPXKVNPXXXEXXXXXXXXVXGNXXXXXXXXXXGXXXLNXXXPXXXXXXXXSXXXLXXXXXXXXXXCXXGIXXNXXXXXXXXXXSXXXVTXLNPXIGXXXXXXXXKXXXXXGXXXXXXXXXXXXXXXXXL

SEQ ID NO: 9816 - protein, 54 aa, Artificial sequence
  protein pattern
  Variant (2)..(2): Xaa in position 2 is any amino acid
  Variant (3)..(3): Xaa in position 3 is Ala, Cys, Gly, Ser or Thr
  Variant (4)..(4): Xaa in position 4 is Asn or Gln
  Variant (6)..(6): Xaa in position 6 is Ile, Leu or Val
  Variant (8)..(8): Xaa in position 8 is any or no amino acid
  Variant (10)..(10): Xaa in position 10 is any amino acid
  Variant (12)..(12): Xaa in position 12 is any or no amino acid
  Variant (15)..(15): Xaa in position 15 is any amino acid
  Variant (16)..(16): Xaa in position 16 is Ala, Cys, Asn, Ser or Thr
  Variant (18)..(19): Xaa in position 18 to 19 is any amino acid
  Variant (21)..(21): Xaa in position 21 is Phe, Ile, Leu or Val
  Variant (22)..(23): Xaa in position 22 to 23 is any amino acid
  Variant (25)..(26): Xaa in position 25 to 26 is any amino acid
  Variant (27)..(27): Xaa in position 27 is Ala, Glu or Gln
  Variant (28)..(28): Xaa in position 28 is any amino acid
  Variant (35)..(35): Xaa in position 35 is Ala or Gly
  Variant (37)..(37): Xaa in position 37 is Ile or Val
  Variant (40)..(40): Xaa in position 40 is Ser, Thr or Val
  Variant (41)..(42): Xaa in position 41 to 42 is any amino acid
  Variant (44)..(44): Xaa in position 44 is any amino acid
  Variant (45)..(45): Xaa in position 45 is Ile, Leu, Met or Val
  Variant (46)..(46): Xaa in position 46 is Asn, Ser or Thr
  Variant (47)..(53): Xaa in position 47 to 53 is any amino acid
  Variant (54)..(54): Xaa in position 54 is Ala, Gly or Ser
KXXXDXRXLXSXGPXXGXXEXXXPXXXXGSSIMPXKXNPXXXEXXXXXXXXXXX

SEQ ID NO: 9817 - protein, 28 aa, Artificial sequence
  protein pattern
  Variant (2)..(2): Xaa in position 2 is any amino acid
  Variant (3)..(4): Xaa in position 3 to 4 is any or no amino acid
  Variant (6)..(6): Xaa in position 6 is any amino acid
  Variant (7)..(8): Xaa in position 7 to 8 is any or no amino acid
  Variant (10)..(10): Xaa in position 10 is Gly or Thr
  Variant (12)..(12): Xaa in position 12 is Ala or Ser
  Variant (15)..(15): Xaa in position 15 is Gln or Ser
  Variant (16)..(16): Xaa in position 16 is any amino acid
  Variant (20)..(20): Xaa in position 20 is any amino acid
  Variant (24)..(24): Xaa in position 24 is Ile, Leu or Val
  Variant (25)..(25): Xaa in position 25 is Ala, Cys, Ser or Thr
  Variant (26)..(26): Xaa in position 26 is Gly, Asn, Ser or Thr
  Variant (27)..(27): Xaa in position 27 is any amino acid
  Variant (28)..(28): Xaa in position 28 is Ala, Gly or Leu
FXXXVXXXQXGXGTXXNMNXNEVXXXXX

SEQ ID NO: 9818 - protein, 27 aa, Artificial sequence
  protein pattern
  Variant (2)..(3): Xaa in position 2 to 3 is any amino acid
  Variant (4)..(4): Xaa in position 4 is Phe, Ile, Leu, Met or Val
  Variant (5)..(5): Xaa in position 5 is any amino acid
  Variant (7)..(7): Xaa in position 7 is any amino acid
  Variant (8)..(8): Xaa in position 8 is Ala or Gly
  Variant (11)..(13): Xaa in position 11 to 13 is any amino acid
  Variant (16)..(16): Xaa in position 16 is any amino acid
  Variant (18)..(18): Xaa in position 18 is Ile, Leu, Met or Val
  Variant (19)..(19): Xaa in position 19 is any amino acid
  Variant (20)..(20): Xaa in position 20 is Ala, Leu or Val
  Variant (22)..(22): Xaa in position 22 is any amino acid
  Variant (24)..(24): Xaa in position 24 is Phe or Ile
  Variant (25)..(25): Xaa in position 25 is any amino acid
  Variant (26)..(26): Xaa in position 26 is Ala, Gly, Ser or Thr
  Variant (27)..(27): Xaa in position 27 is Phe, Trp or Tyr
FXXXXKXXRTXXXDAXPXXXGXEXXXX

SEQ ID NO: 9819 - protein, 21 aa, Artificial sequence
  protein pattern
  Variant (2)..(2): Xaa in position 2 is any amino acid
  Variant (3)..(3): Xaa in position 3 is Asp or His
  Variant (4)..(4): Xaa in position 4 is any amino acid
  Variant (6)..(6): Xaa in position 6 is any amino acid
  Variant (7)..(7): Xaa in position 7 is Ala, Cys, Gly or Ser
  Variant (10)..(10): Xaa in position 10 is Gln, Ser or Thr
  Variant (13)..(14): Xaa in position 13 to 14 is any amino acid
  Variant (16)..(16): Xaa in position 16 is Ala, Ser or Thr
  Variant (17)..(19): Xaa in position 17 to 19 is any amino acid
  Variant (20)..(20): Xaa in position 20 is Ile, Leu, Met or Val
  Variant (21)..(21): Xaa in position 21 is Ala, Gly, Ser or Thr
NXXXNXXQSXNDXXPXXXXXX

SEQ ID NO: 9820 - protein, 29 aa, Artificial sequence
  protein pattern
  Variant (2)..(2): Xaa in position 2 is Ile or Leu
  Variant (3)..(3): Xaa in position 3 is any amino acid
  Variant (4)..(4): Xaa in position 4 is Ala, Pro or Val
  Variant (5)..(15): Xaa in position 5 to 15 is any amino acid
  Variant (16)..(16): Xaa in position 16 is Gly, Ser or Thr
  Variant (17)..(17): Xaa in position 17 is Ala, Ile, Leu, Pro or Val
  Variant (18)..(18): Xaa in position 18 is any amino acid
  Variant (19)..(19): Xaa in position 19 is Ile, Leu or Val
  Variant (20)..(20): Xaa in position 20 is Ala, Ile or Val
  Variant (22)..(22): Xaa in position 22 is any amino acid
  Variant (24)..(27): Xaa in position 24 to 27 is any amino acid
  Variant (29)..(29): Xaa in position 29 is His or Tyr
GXXXXXXXXXXXXXXXXXXXTXLXXXXGX

SEQ ID NO: 9821 - protein, 15 aa, Artificial sequence
  protein pattern
  Variant (2)..(2): Xaa in position 2 is any or no amino acid
  Variant (4)..(4): Xaa in position 4 is Ala, Ile or Val
  Variant (5)..(5): Xaa in position 5 is any amino acid
  Variant (6)..(6): Xaa in position 6 is Ala, Ser or Thr
  Variant (7)..(7): Xaa in position 7 is any amino acid
  Variant (9)..(9): Xaa in position 9 is Ala, Gly or Ser
  Variant (10)..(11): Xaa in position 10 to 11 is any amino acid
  Variant (13)..(13): Xaa in position 13 is Phe or Tyr
  Variant (14)..(14): Xaa in position 14 is any amino acid
  Variant (15)..(15): Xaa in position 15 is Ile, Leu or Val
YXGXXXXRXXXNXXX

SEQ ID NO: 9822 - protein, 19 aa, Artificial sequence
  protein pattern
  Variant (2)..(2): Xaa in position 2 is any amino acid
  Variant (3)..(3): Xaa in position 3 is Phe or Leu
  Variant (4)..(4): Xaa in position 4 is Glu or Gln
  Variant (7)..(7): Xaa in position 7 is Ala or Val
  Variant (8)..(9): Xaa in position 8 to 9 is any amino acid
  Variant (11)..(12): Xaa in position 11 to 12 is Ile, Leu, Met or Val
  Variant (13)..(15): Xaa in position 13 to 15 is any amino acid
  Variant (16)..(16): Xaa in position 16 is Phe, Ile, Leu, Met or Val
  Variant (17)..(18): Xaa in position 17 to 18 is any amino acid
GXXXLNXXXPXXXXXXXXS

SEQ ID NO: 9823 - protein, 15 aa, Artificial sequence
  protein pattern
  Variant (2)..(2): Xaa in position 2 is Ala or Gly
  Variant (3)..(3): Xaa in position 3 is Ser or Thr
  Variant (5)..(5): Xaa in position 5 is Ala, Ile or Val
  Variant (9)..(9): Xaa in position 9 is Ile, Leu, Met or Val
  Variant (11)..(11): Xaa in position 11 is Ala, Cys, Gly, Ser or Thr
  Variant (12)..(14): Xaa in position 12 to 14 is any amino acid
  Variant (15)..(15): Xaa in position 15 is Phe or Tyr
GXXAXGTGXNXXXXX

SEQ ID NO: 9824 - DNA, 1254 bp, ESCHERICHIA COLI
  CDS (1)..(1254): transl_table=11
atgagatatacggagggagatatgtcgtcatttgattacctgaaaactgccatcaagcaacagggctgcacgctacagcaggtagctgatgccagcggtatgaccaaagggtatttaagccagttactgaatgccaaaatcaaaagccccagcgcgcaaaagctggaggcgttgcaccgttttttggggcttgagtttccccggcagaagaaaacgatcggtgtcgtattcggtaagttctacccactgcataccggacatatctaccttatccagcgcgcctgtagccaggttgacgagctgcatatcattatgggttttgacgatacccgtgaccgcgcgttgttcgaagacagtgccatgtcgcagcagccgaccgtgccggatcgtctgcgttggttattgcaaacttttaaatatcagaaaaatattcgcattcatgctttcaacgaagagggcatggagccgtatccgcacggctgggatgtgtggagcaacggcatcaaaaagtttatggctgaaaaagggatccagccggatctgatctacacctcggaagaagccgatgcgccacagtatatggaacatctggggatcgagacggtgctggtcgatccgaaacgtacctttatgagtatcagcggtgcgcagatccgcgaaaacccgttccgctactgggaatatattcctaccgaagtgaagccgttttttgtgcgtaccgtggcgatccttggcggcgagtcgagcggtaaatccaccctggtaaacaaacttgccaatatcttcaacaccaccagtgcgtgggaatatggccgcgattatgtcttttcacacctcggcggtgatgagatcgcattgcagtattctgactacgataaaatcgcgctgggccacgctcaatacattgattttgcggtgaaatatgccaataaagtggcatttatcgataccgattttgtcaccactcaggcgttctgcaaaaagtacgaagggcgggaacatccgttcgtgcaggcgctgattgatgaataccgtttcgatctggtgatcctgctggagaacaacacgccgtgggtggcggatggtttacgcagcctcggcagttcggtggatcgcaaagagttccagaacttgctggtggagatgctcgaagagaacaatatcgaatttgtgcgggttgaagaggaagattacgacagtcgtttcctgcgctgcgtggaactggtgcgggagatgatgggggagcagagataa

SEQ ID NO: 9825 - protein, 417 aa, ESCHERICHIA COLI
MRYTEGDMSSFDYLKTAIKQQGCTLQQVADASGMTKGYLSQLLNAKIKSPSAQKLEALHRFLGLEFPRQKKTIGVVFGKFYPLHTGHIYLIQRACSQVDELHIIMGFDDTRDRALFEDSAMSQQPTVPDRLRWLLQTFKYQKNIRIHAFNEEGMEPYPHGWDVWSNGIKKFMAEKGIQPDLIYTSEEADAPQYMEHLGIETVLVDPKRTFMSISGAQIRENPFRYWEYIPTEVKPFFVRTVAILGGESSGKSTLVNKLANIFNTTSAWEYGRDYVFSHLGGDEIALQYSDYDKIALGHAQYIDFAVKYANKVAFIDTDFVTTQAFCKKYEGREHPFVQALIDEYRFDLVILLENNTPWVADGLRSLGSSVDRKEFQNLLVEMLEENNIEFVRVEEEDYDSRFLRCVELVREMMGEQR

SEQ ID NO: 9826 - DNA, 1227 bp, Xenorhabdus bovienii
  CDS (1)..(1227): transl_table=11
atggggcaatttgactacttgaaagaagctattaaacaggcgagttacacattgcagcaagtggctgatgcctgtggaatgacaaaaggctatttgagccaacttattaacggcaaaataaagagtccgagtgcgcagaaactggcatctattcatcaatatttaggattagcgtatcccatggaaaagaaaaccgtcggtgtggtgtttggtaaattttacccgttgcatactgggcatatttatttgatccagcgggcatccagtcaggtcgatgaattgcacgtcgtcctctgttatgacgaattgcgggatcgtgaattgttcatcaatagttctatgtctcagcaacccacagtcagtgaccgcctgagatggcttttacaaacattcaaatatcaaaaaaatatccacatccacgtttttgatgaacatggcatggagccttatccgaatggctgggaagtatggagccggggagtgaaggcattcatggcagagaagagcatcaatcctgaatatatctattccagtgaagcgcaggatgtagcatgttataaagaatatttcgatattgaaactatccttattgatccacaacgttcattcatgaatatcagcggcagccagatacggcaggcaccttttcgctattgggaatatattccaacagaagtgaagccattttttgtgcgcaccgtggcaattctgggtggtgagtcgagtggtaaatccacactggtaaacaagttagccaatatgtttaacacaaccagcgtatgggaatatgggcgagagtacgtgttctcccacttgggaggggatgaaatggctctgcaatactcagattacgataaaattgcattgggacatgcacaatatattgatttttcagtcaaatatgccaataaagttgcttttattgacactgatttcgtgacgacacaggcattttgcaagcgttatgaaggaaaagagcatccctttgtacaggcgatgattgatgaatatcgatttgatctggtcattctgttagaaaacaacaccccgtgggtggctgatgggctgagaagtttaggtagtgaacgggaacgtaaagagtttcagcagttacttgagagtttgttgaagaaaaataacgtcgattatgtttgtgtcaactcagcggactatgatcaacgttttctgcgctgtattgaattagttcaacacatgttaatggcgtaa

SEQ ID NO: 9827 - protein, 408 aa, Xenorhabdus bovienii
MGQFDYLKEAIKQASYTLQQVADACGMTKGYLSQLINGKIKSPSAQKLASIHQYLGLAYPMEKKTVGVVFGKFYPLHTGHIYLIQRASSQVDELHVVLCYDELRDRELFINSSMSQQPTVSDRLRWLLQTFKYQKNIHIHVFDEHGMEPYPNGWEVWSRGVKAFMAEKSINPEYIYSSEAQDVACYKEYFDIETILIDPQRSFMNISGSQIRQAPFRYWEYIPTEVKPFFVRTVAILGGESSGKSTLVNKLANMFNTTSVWEYGREYVFSHLGGDEMALQYSDYDKIALGHAQYIDFSVKYANKVAFIDTDFVTTQAFCKRYEGKEHPFVQAMIDEYRFDLVILLENNTPWVADGLRSLGSERERKEFQQLLESLLKKNNVDYVCVNSADYDQRFLRCIELVQHMLMA

SEQ ID NO: 9828 - DNA, 1272 bp, Actinobacillus actinomycetemcomitans; identical to SEQ ID NO: 6502
  CDS (1)..(1272): transl_table=11

SEQ ID NO: 9829 - protein, 423 aa, Actinobacillus actinomycetemcomitans; identical to SEQ ID NO: 6503

SEQ ID NO: 9830 - DNA, 1287 bp, Pasteurella multocida subsp. multocida str. Pm70; identical to SEQ ID NO: 6508
  CDS (1)..(1287): transl_table=11

SEQ ID NO: 9831 - protein, 428 aa, Pasteurella multocida subsp. multocida str. Pm70; identical to SEQ ID NO: 6509

SEQ ID NO: 9832 - DNA, 1233 bp, Escherichia coli CFT073
  CDS (1)..(1233): transl_table=11
atgtcgtcatttgattacctgaaaactgccattaagcaacagggctgcacgctacagcaggtagctgatgccagcggtatgaccaaagggtatttaagccagttactgaatgccaaaattaaaagccccagcgcgcaaaaactggaggcattgcaccgttttttggggcttgagtttccccggcagaagaaaacgatcggtgtcgtattcggtaagttttacccgctgcatactggacatatctaccttatccagcgcgcctgtagccaggttgacgagctgcatatcattatgggttttgacgatacccgcgaccgcgcattgttcgaagacagcgccatgtcgcagcagccaaccgtgccggatcgtctgcgctggttattgcagacctttaagtatcaaaaaaatatccgcattcatgcttttaacgaagagggcatggaaccgtatccacatggctgggatgtgtggagcaacggcatcaaaaagtttatggccgaaaaaggcattcagccggacctgatctacacctcggaagaagccgatgcgccgcagtatatggaacatctggggatcgagacggtgctggtcgatccgaagcgtacctttatgagtatcagcggtgcgcagatccgcgaaaacccgttccgctactgggaatatattcctacggaagttaagccgttctttgtgcgtaccgtggcgatccttggcggcgagtcgagcggtaaatccaccctggtaaacaaacttgccaatatcttcaacactaccagtgcatgggaatatggtcgcgattatgtcttttcacaccttggcggtgatgagattgcgttgcagtattccgactacgataaaatcgcgctgggacacgcgcaatatattgattttgcagtgaaatatgccaataaagtggcgtttatcgacaccgattttgtcactacccaggcgttctgcaaaaagtacgaagggcgtgagcatccgttcgtgcaggcgttgattgatgaataccgtttcgatctggtgatcctgctggagaacaacacgccgtgggtggcggatggtttacgcagcctcggcagttcggtggatcgcaaagagttccagaacttgctggtggagatgctggaagagaacaatatcgaattcgtgcgggttgaagaggacgattacgacagccgtttcctgcgctgcgtggagctggtgcgggagatgatgggggagcaaagataa

SEQ ID NO: 9833 - protein, 410 aa, Escherichia coli CFT073
MSSFDYLKTAIKQQGCTLQQVADASGMTKGYLSQLLNAKIKSPSAQKLEALHRFLGLEFPRQKKTIGVVFGKFYPLHTGHIYLIQRACSQVDELHIIMGFDDTRDRALFEDSAMSQQPTVPDRLRWLLQTFKYQKNIRIHAFNEEGMEPYPHGWDVWSNGIKKFMAEKGIQPDLIYTSEEADAPQYMEHLGIETVLVDPKRTFMSISGAQIRENPFRYWEYIPTEVKPFFVRTVAILGGESSGKSTLVNKLANIFNTTSAWEYGRDYVFSHLGGDEIALQYSDYDKIALGHAQYIDFAVKYANKVAFIDTDFVTTQAFCKKYEGREHPFVQALIDEYRFDLVILLENNTPWVADGLRSLGSSVDRKEFQNLLVEMLEENNIEFVRVEEDDYDSRFLRCVELVREMMGEQR

SEQ ID NO: 9834 - DNA, 1236 bp, Photorhabdus luminescens subsp. laumondii TTO1
  CDS (1)..(1236): transl_table=11
atggggcaatttgactaccttaaagaagcgattaaacagacaggttatacgttgcaacaggttgccgatgcaagtggtatgaccaaaggttatcttagccaattaattaatgacaaaattaaaagtcctagtgcccaaaaactggcggcgctccatcactatctgaggttgcaatatcctgtgcaaaataaaactgttggagtggtattcggcaaattctatccattgcatactgggcatatctatctgattcaacgggcctgtagtcaggtggatgagttgcatattatcctttgccatgatgagcctagagatcgggagctatttatgagtagttccatgtctcagcaacccacggtgagtgatcgcttgcgctggttgcttcaaacatttaagtatcagaaaaatattcatattcactcttttgatgaacagggaattgaaccctatccacatggttgggatgtgtggagtgatggcatgaaagcctttatgtcaaagaaaggcattcatcccacttatatatattccagcgaaactcaggattctccccgatataaagagcatttaggaattgagacaattcttatcgatccacaacgttcgtttatgaaaatcagtggtcggcatattcgccaagatccattccgtcattgggaatatattcctaccgaagtgaaacctttctttgttcgtaccgtagcgattcttggtggagaatctagtggtaaatctacattagttaacaaattggcaaatatttttaatacgacaagtgcttgggaatatggtcgtgattatgttttttctcatctggggggagatgagatggcgctacaatattcggactatgacaagattgcattgggacaagcccaatatattgattttgccgtaaaatatgcgaataaggttacatttatcgataccgattttgtcactacccaagcattctgtaagcgatatgaaggacgtgaacacccgtttgttcaggcattaattgatgaataccgatttgatttggtcattctactggaaaacaacactccttgggttgctgacggtttgcgtagccttggcagcgagcaggatcgtaaagcgtttcagcaactgctggaggatatgctgaaaagtaataatattgaatatgtcaatgtggattcacccgattatgatcagcgtttcctacgttgtattgagctcattcagcaacttttagcggctaatcctaaatga

SEQ ID NO: 9835 - protein, 411 aa, Photorhabdus luminescens subsp. laumondii TTO1
MGQFDYLKEAIKQTGYTLQQVADASGMTKGYLSQLINDKIKSPSAQKLAALHHYLRLQYPVQNKTVGVVFGKFYPLHTGHIYLIQRACSQVDELHIILCHDEPRDRELFMSSSMSQQPTVSDRLRWLLQTFKYQKNIHIHSFDEQGIEPYPHGWDVWSDGMKAFMSKKGIHPTYIYSSETQDSPRYKEHLGIETILIDPQRSFMKISGRHIRQDPFRHWEYIPTEVKPFFVRTVAILGGESSGKSTLVNKLANIFNTTSAWEYGRDYVFSHLGGDEMALQYSDYDKIALGQAQYIDFAVKYANKVTFIDTDFVTTQAFCKRYEGREHPFVQALIDEYRFDLVILLENNTPWVADGLRSLGSEQDRKAFQQLLEDMLKSNNIEYVNVDSPDYDQRFLRCIELIQQLLAANPK

SEQ ID NO: 9836 - DNA, 1233 bp, Klebsiella pneumoniae subsp. pneumoniae MGH 78578
  CDS (1)..(1233): transl_table=11
atgtcgtcatttgactatttaaaaagcgccattaagcagaaaggctgtaccctgcagcaggtggcggaagccagcggaatgaccaaggggtatcttagccagctgctgaatgccaaaatcaaaagcccgagcgcgcagaagcttgaagcgctgcatcgtttcctcgggctggagtttccccgccgacagaaaagcgtcggggtggtgtttggtaagttttacccactgcataccgggcatatctacctgatacagcgcgcctgtagccaggtcgatgagctgcatatcattatgggctatgacgatacccgcgaccgcgagctgtttgaagagagcgccatgtcgcaacagccgacggtgcctgaccgcctgcgctggctgctgcaaacctttaaatatcagaagaatattcgcatccacgccttcaatgaagaggggatggagccctatccgcacggctgggacgtctggagccatgggatccgcgcttttatgagcgaaaaagggatcgagccgaaccggatctatacctcggaagaggccgatgcgccgcagtaccttgagcatctggggatcgagacggtgcttatcgatcctaagcggacctttatgaatattagcggcgggcagatccgcgagaacccgttccgctactgggaatatattccgacggaagtgaaaccgttctttgtgcggacggtggcgatcctcggcggcgagtcgagcggtaaatcgacgctggtcaataaactcgccaatatcttcaataccaccagcgcctgggaatatggccgggattatgttttttcgcatctcggcggcgatgagatggcgctccagtattcggattacgataaaattgcccttgggcatgcgcagtatattgattttgcggtgaaatatgccaacaaggtggcgttcatcgataccgacttcgtcagcactcaggccttctgtctgaagtacgagggacgtgagcacccgtttgtgcaggcgctgattgatgaataccgcttcgacctggtgatcctgctggagaacaataccccgtgggtggccgatggactgcgcagtcttgggagctcggtggatcgtaaagagtttcagtcgttgctggtatcgctgctgaaagagaacgagatcgaattcgtccatgtgaaggagtcggactacgatgcccggttcctgcgctgcgtcgagctggtgaaacagctgatgggcgagcaggggtag

SEQ ID NO: 9837 - protein, 410 aa, Klebsiella pneumoniae subsp. pneumoniae MGH 78578
MSSFDYLKSAIKQKGCTLQQVAEASGMTKGYLSQLLNAKIKSPSAQKLEALHRFLGLEFPRRQKSVGVVFGKFYPLHTGHIYLIQRACSQVDELHIIMGYDDTRDRELFEESAMSQQPTVPDRLRWLLQTFKYQKNIRIHAFNEEGMEPYPHGWDVWSHGIRAFMSEKGIEPNRIYTSEEADAPQYLEHLGIETVLIDPKRTFMNISGGQIRENPFRYWEYIPTEVKPFFVRTVAILGGESSGKSTLVNKLANIFNTTSAWEYGRDYVFSHLGGDEMALQYSDYDKIALGHAQYIDFAVKYANKVAFIDTDFVSTQAFCLKYEGREHPFVQALIDEYRFDLVILLENNTPWVADGLRSLGSSVDRKEFQSLLVSLLKENEIEFVHVKESDYDARFLRCVELVKQLMGEQG

SEQ ID NO: 9838 - DNA, 1233 bp, Salmonella enterica subsp. arizonae serovar 62:z4,z23:--
  CDS (1)..(1233): transl_table=11
gtgtcatcgttcgactatctcaaaaccgcgattaagcagcaaggttgcactctgcaacaggtggctgacgccagcggtatgaccaaggggtatctgagtcagttacttaacgccaaaattaaaagccccagcgcgcaaaaactggaagcgctgcaccgttttcttggactggaatttccccgccagcaaaaaaacattggcgtggtgttcggtaaattttatccgttgcataccggacacatctatttgatccagcgcgcctgtagccaggtggatgagttgcatatcgttatgggatatgacgatacgcgcgatcgcgggctgtttgaggatagcgctatgtcgcagcagcctaccgtgtcggatcgactgcgctggttgctgcaaaccttcaaataccaaaaaaatattcgtatccacgcctttaatgaagaggggatggagccttatccgcatggctgggacgtctggagcaacggcattaaagcgtttatggcagagaagggaatacagccgagctggatctacacttccgaagaggctgatgcgccgcagtaccttgaacatttagggattgagacggtgctggtcgatcctgaacgcacgtttatgaatatcagcggggcgcaaatccgcgagaatccgtttcgctactgggaatatatccctaccgaagtgaagccgtttttcgtgcgcaccgtcgcgattctgggcggggaatcaagcggcaagtctacgctggtcaataagctcgccaatatttttaatactaccagcgcctgggaatatggccgcgactatgtcttttcgcatctgggcggcgatgagatggcgttacagtattccgactacgataaaatcgcgctgggccatgcgcaatatattgattttgcagtaaaatacgcgaataaagtggcatttatcgatactgatttcgtcaccacccaggcattttgcaaaaaatacgaagggcgcgagcatccatttgtccaggcgctgattgatgagtatcgcttcgacctggtgattttgctggagaacaatacgccgtgggtagctgacgggctgcgaagtctgggcagcgcagtggatcgcaaagcgttccaaagcctgttggtcgagatgctgaaagagaacaacatcgagtttgttcacgttaaagaggctgattacgatggccgctttttgcgctgcgtggagctggtgaaagagatgatgggcgagcagggataa

SEQ ID NO: 9839 - protein, 410 aa, Salmonella enterica subsp. arizonae serovar 62:z4,z23:--
MSSFDYLKTAIKQQGCTLQQVADASGMTKGYLSQLLNAKIKSPSAQKLEALHRFLGLEFPRQQKNIGVVFGKFYPLHTGHIYLIQRACSQVDELHIVMGYDDTRDRGLFEDSAMSQQPTVSDRLRWLLQTFKYQKNIRIHAFNEEGMEPYPHGWDVWSNGIKAFMAEKGIQPSWIYTSEEADAPQYLEHLGIETVLVDPERTFMNISGAQIRENPFRYWEYIPTEVKPFFVRTVAILGGESSGKSTLVNKLANIFNTTSAWEYGRDYVFSHLGGDEMALQYSDYDKIALGHAQYIDFAVKYANKVAFIDTDFVTTQAFCKKYEGREHPFVQALIDEYRFDLVILLENNTPWVADGLRSLGSAVDRKAFQSLLVEMLKENNIEFVHVKEADYDGRFLRCVELVKEMMGEQG

SEQ ID NO: 9840 - DNA, 1254 bp, Pectobacterium atrosepticum SCRI1043; identical to SEQ ID NO: 6518
  CDS (1)..(1254): transl_table=11

SEQ ID NO: 9841 - protein, 417 aa, Pectobacterium atrosepticum SCRI1043; identical to SEQ ID NO: 6519

SEQ ID NO: 9842 - DNA, 1260 bp, Mannheimia succiniciproducens MBEL55E; identical to SEQ ID NO: 6520
  CDS (1)..(1260): transl_table=11

SEQ ID NO: 9843 - protein, 419 aa, Mannheimia succiniciproducens MBEL55E; identical to SEQ ID NO: 6521

SEQ ID NO: 9844 - DNA, 1266 bp, Haemophilus influenzae 86-028NP
  CDS (1)..(1266): transl_table=11
gtgggctttaccaccggtagggaatttcaccctgccctgagaatgcgagctaagtataacgcaaaatacctaggcactaaatcagaacgtgaaaaatattttcatttagcctacaataaacacactcaattcttacgctatcaagagcagattatgtcaaaaacaaaagagaaaaaagtcggtgtcattttcgggaaattttatcctgtacacacaggtcatataaatatgatttatgaagcgttcagtaaagtcgatgaactacacgttatcgtgtgtagtgacacggtgcgcgatttgaaattattttacgatagtaaaatgaaacgcatgccaaccgtgcaagatcgtttgcgttggatgcagcaaattttcaaatatcaaaaaaatcagatttttattcatcatttgattgaagacggtattccaagttatccaaacggctggcaatcttggagtgaagcagttaaaaccctatttcatgaaaaacattttgaaccttcaatcgtatttagtagcgagcctcaagataaagcgccttacgagaaatacttaggtttagaagtatcgttagtcgatcctgaccgcactttctttaatgtgtccgcaaccaaaattcgcaccactccattccaatattggaagtttattccgaaagaagctcgtcctttctttgccaaaacggtggcgattttagggggagaaagcagtggtaaaagcgtgctagttaataagttagccgccgtatttaataccacttctgcgtgggaatacgggcgtgaatttgtatttgaaaagctcggtggcgacgagcaagcgatgcaatattctgactatccgcaaatggcgcttggtcatcaacgatacattgattatgccgtgcgccattctcataaaattgcatttattgatacggatttcattaccacgcaagcgttctgcattcaatatgaaggaaaagctcatccatttttagactcaatgattaaagaatatcccttcgatgtcactattttacttaaaaataatactgaatgggtggatgatggcttgcgcagcttaggctcacaaaaacaacgccaacaatttcaacaactactcaaaaaactgttagataaatataaagttccttatatagagattgaatctccaagttatcttgatcgctataaccaagttaaagcagtcattgagaaagtgttaaatgaagaggaaatcagtgaattacaaaacacaacctttcctataaaagggacatctcaatga

SEQ ID NO: 9845 - protein, 421 aa, Haemophilus influenzae 86-028NP
MGFTTGREFHPALRMRAKYNAKYLGTKSEREKYFHLAYNKHTQFLRYQEQIMSKTKEKKVGVIFGKFYPVHTGHINMIYEAFSKVDELHVIVCSDTVRDLKLFYDSKMKRMPTVQDRLRWMQQIFKYQKNQIFIHHLIEDGIPSYPNGWQSWSEAVKTLFHEKHFEPSIVFSSEPQDKAPYEKYLGLEVSLVDPDRTFFNVSATKIRTTPFQYWKFIPKEARPFFAKTVAILGGESSGKSVLVNKLAAVFNTTSAWEYGREFVFEKLGGDEQAMQYSDYPQMALGHQRYIDYAVRHSHKIAFIDTDFITTQAFCIQYEGKAHPFLDSMIKEYPFDVTILLKNNTEWVDDGLRSLGSQKQRQQFQQLLKKLLDKYKVPYIEIESPSYLDRYNQVKAVIEKVLNEEEISELQNTTFPIKGTSQ

SEQ ID NO: 9846 - DNA, 1278 bp, Haemophilus somnus 129PT; identical to SEQ ID NO: 6522
  CDS (1)..(1278): transl_table=11

SEQ ID NO: 9847 - protein, 425 aa, Haemophilus somnus 129PT; identical to SEQ ID NO: 6523

SEQ ID NO: 9848 - DNA, 1278 bp, Haemophilus somnus 2336; identical to SEQ ID NO: 6524
  CDS (1)..(1278): transl_table=11

SEQ ID NO: 9849 - protein, 425 aa, Haemophilus somnus 2336; identical to SEQ ID NO: 6525

SEQ ID NO: 9850 - DNA, 1224 bp, Haemophilus influenzae R2846
  CDS (1)..(1224): transl_table=11
atgcgagctaagtataacgcaaaatacctaggcactaaatcagaacgtgaaaaatattttcatttagcctacaataaacacactcaattcttacgctatcaagagcagattatgtcaaaaacaaaagagaaaaaagtcggtgtcattttcgggaaattttatcctgtacacacaggtcatataaatatgatttatgaagcgttcagtaaagtcgatgaactacacgttatcgtgtgtagtgacactgtgcgcgatttgaaattattttacgatagtaaaatgaaacgcatgccaaccgtgcaagatcgtttgcgttggatgcagcaaattttcaaatatcaaaaaaatcagatttttattcatcatttgattgaagacggtattccaagttatccaaacggctggcaatcttggagtgaagcagttaaaaccctatttcatgaaaaacattttgaaccttcaatcgtatttagtagcgagcctcaagataaagcgccttacgagaaatacttaggtttagaagtatcgttagtcgatcctgaccgcactttctttaatgtgtccgcaaccaaaattcgcaccactccattccaatattggaagtttattccgaaagaagctcgtcctttctttgccaaaacggtggcgattttagggggagaaagcagtggtaaaagcgtgctagttaataagttagccgccgtatttaataccacttctgcgtgggaatacgggcgtgaatttgtatttgaaaagctcggtggcgacgagcaagcgatgcaatattctgactatccgcaaatggcgcttggtcatcaacgatacattgattatgccgtgcgccattctcataaaattgcatttattgatacagatttcattaccacgcaagcattctgcattcaatatgaaggaaaagcccatccttttttagactcaatgattaaagaatatcccttcgatgtcactattttacttaaaaacaatactgaatgggtggatgatggcttgcgcagcttaggctcacaaaaacaacgccaacaatttcaacaactactcaaaaaactgttagataaatataaagttccttatatagagattgaatcaccaagttatcttgatcgctataaccaagttaaagcagtcattgagaaagtgttaaatgaagaggaaatcagtgaattacaaaacacaacctttcctataaaagggacatctcaatga

SEQ ID NO: 9851 - protein, 407 aa, Haemophilus influenzae R2846
MRAKYNAKYLGTKSEREKYFHLAYNKHTQFLRYQEQIMSKTKEKKVGVIFGKFYPVHTGHINMIYEAFSKVDELHVIVCSDTVRDLKLFYDSKMKRMPTVQDRLRWMQQIFKYQKNQIFIHHLIEDGIPSYPNGWQSWSEAVKTLFHEKHFEPSIVFSSEPQDKAPYEKYLGLEVSLVDPDRTFFNVSATKIRTTPFQYWKFIPKEARPFFAKTVAILGGESSGKSVLVNKLAAVFNTTSAWEYGREFVFEKLGGDEQAMQYSDYPQMALGHQRYIDYAVRHSHKIAFIDTDFITTQAFCIQYEGKAHPFLDSMIKEYPFDVTILLKNNTEWVDDGLRSLGSQKQRQQFQQLLKKLLDKYKVPYIEIESPSYLDRYNQVKAVIEKVLNEEEISELQNTTFPIKGTSQ

SEQ ID NO: 9852 - DNA, 1254 bp, Escherichia coli
  CDS (1)..(1254): transl_table=11
atgaggaatacggagggagatatgtcgtcatttgattacctgaaaactgccatcaagcaacagggctgcacgctacagcaggtggctgatgccagcggtatgaccaaagggtatttaagccagttactgaatgccaaaatcaaaagccccagcgcgcaaaagctggaggcgttgcaccgttttttggggcttgagtttccccggcagaagaaaaccattggtgtggtattcggtaagttctacccgctgcataccggacatatctaccttatccagcgcgcctgtagccaggttgacgaactgcatatcattatgggttttgacgatacccgcgatcgcgcgttgtttgaagacagcgctatgtcgcagcagcccaccgtgccggatcgtctgcgctggttattacaaacttttaaatatcagaaaaatattcgcattcatgctttcaacgaagagggcatggagccgtatccgcacggctgggatgtgtggagcaacggcatcaaaaagtttatggctgaaaaggggattcagccggacctgatctacacctcggaagaagccgatgcgccacagtatatggaacatctggggatcgatacggtgctggtcgatccgaaacgtacctttatgagtatcagcggtgcgcagatccgcgaaaacccgttccgctactgggaatatattcctacggaagtgaagccgttctttgtacgtaccgtggcgatccttggtggcgagtcgaacggtaaatccaccctggtaaacaaacttgccaatatcttcaataccaccagtgcgtgggaatatggtcgcgattatgtcttttcacacctcggcggtgatgagatcgcattgcagtattccgattacgataaaatcgcgctgggccacgcacaatacattgattttgcagtgaaatatgccaataaagtggcgtttattgacactgattttgtcactacccaggcgttctgcaaaaagtacgaagggcgtgagcatccgttcgtacaggcgttgattgatgaataccgtttcgatctggtgatcctgctggagaacaacacgccgtgggtggcggatggtttacgcagcctcggcagttcggtggatcgcaaagagttccagaacttgctggtggagatgctggaagagaacaatatcgaattcgtgcgggttgaagaggacgattatgacagccgtttcctgcgctgcgtggagctggtgcgggagatgatgggggagcagagataa

SEQ ID NO: 9853 - protein, 417 aa, Escherichia coli
MRNTEGDMSSFDYLKTAIKQQGCTLQQVADASGMTKGYLSQLLNAKIKSPSAQKLEALHRFLGLEFPRQKKTIGVVFGKFYPLHTGHIYLIQRACSQVDELHIIMGFDDTRDRALFEDSAMSQQPTVPDRLRWLLQTFKYQKNIRIHAFNEEGMEPYPHGWDVWSNGIKKFMAEKGIQPDLIYTSEEADAPQYMEHLGIDTVLVDPKRTFMSISGAQIRENPFRYWEYIPTEVKPFFVRTVAILGGESNGKSTLVNKLANIFNTTSAWEYGRDYVFSHLGGDEIALQYSDYDKIALGHAQYIDFAVKYANKVAFIDTDFVTTQAFCKKYEGREHPFVQALIDEYRFDLVILLENNTPWVADGLRSLGSSVDRKEFQNLLVEMLEENNIEFVRVEEDDYDSRFLRCVELVREMMGEQR

SEQ ID NO: 9854 - DNA, 1260 bp, Salmonella paratyphi A
  CDS (1)..(1260): transl_table=11
atgcgatttttccagcaggaggctcttgtgtcatcgttcgactatctcaaaaccgcgattaagcagcaaggttgcactctgcaacaggtggctgacgccagcggtatgaccaaggggtatctgagtcagttacttaacgccaaaatcaaaagccccagcgcgcaaaaactggaggcgctacaccgttttctcgggctggagtttccccgccgacagaaaaacattggcgtggtgttcggtaaattttatccattgcataccgggcacatctacttgatccagcgcgcctgtagccaggtggatgagttgcacatcattatgggatatgacgatacgcgcgaccgcgggctgtttgaagatagcgccatgtcgcagcagcccaccgtgtcggatcgcctgcgctggttattgcaaaccttcaaataccaaaaaaatattcgcatccacgcctttaatgaagaggggatggagccttatccgcatggctgggacgtctggagcaacggcattaaagcgtttatggcagagaagggaatacagccgagctggatctacacttccgaagaggctgatgcgccgcagtatcttgagcatttagggattgagacggtgctggtcgatcctgaacgcacgtttatgaatatcagcggggcgcaaatccgcgaaaatccgtttcgttactgggaatatattcctaccgaagtgaagccgttttttgtgcgtaccgtcgcgattctgggcggggaatcaagcggcaagtctacgctggtcaataagctcgccaatatttttaataccaccagcgcctgggaatatggccgcgactatgtcttttcgcatctgggcggcgatgagatagcgttacagtattccgactacgataaaattgcgctgggccatgcgcaatatattgatttcgcagtgaaatatgcgaataaagtggcgtttatcgataccgatttcgtcaccacccaggcattttgcaaaaaatacgaagggcgcgagcatccgtttgtccaggcgctgatcgacgagtatcgcttcgacctggtgattttgctggagaataatacgccgtgggtagctgacggactgcgaagcctgggcagttcagtggatcgcaaagcgttccagagcctgttggtcgagatgctgaaagagaacaacattgagttcgttcacgttaaagaggctgattacgatggccgttttttgcgttgtgtggaactggtgaaagagatgatgggcgagcagggataa

SEQ ID NO: 9855 - protein, 419 aa, Salmonella paratyphi A
MRFFQQEALVSSFDYLKTAIKQQGCTLQQVADASGMTKGYLSQLLNAKIKSPSAQKLEALHRFLGLEFPRRQKNIGVVFGKFYPLHTGHIYLIQRACSQVDELHIIMGYDDTRDRGLFEDSAMSQQPTVSDRLRWLLQTFKYQKNIRIHAFNEEGMEPYPHGWDVWSNGIKAFMAEKGIQPSWIYTSEEADAPQYLEHLGIETVLVDPERTFMNISGAQIRENPFRYWEYIPTEVKPFFVRTVAILGGESSGKSTLVNKLANIFNTTSAWEYGRDYVFSHLGGDEIALQYSDYDKIALGHAQYIDFAVKYANKVAFIDTDFVTTQAFCKKYEGREHPFVQALIDEYRFDLVILLENNTPWVADGLRSLGSSVDRKAFQSLLVEMLKENNIEFVHVKEADYDGRFLRCVELVKEMMGEQG

SEQ ID NO: 9856 - DNA, 1257 bp, Photorhabdus luminescens subsp; identical to SEQ ID NO: 6516
  CDS (1)..(1257): transl_table=11

SEQ ID NO: 9857 - protein, 418 aa, Photorhabdus luminescens subsp; identical to SEQ ID NO: 6517

SEQ ID NO: 9858 - DNA, 1254 bp, Shigella flexneri
  CDS (1)..(1254): transl_table=11
atgagagatacggagggagatatgtcgtcatttgattacctgaaaactgccatcaagcaacagggctgcacgctacagcaggtagctgatgccagcggtatgaccaaagggtatttaagccagttactgaatgccaaaattaaaagccccagcgcgcaaaagctggaggcattgcaccgttttttggggcttgaatttccccggcagaagaaaaccattggtgtcgtattcggtaagttctacccgctgcataccggacatatctaccttatccagcgcgcctgtagccaggttgacgagctgcatatcattatgggttttgacgatacccgcgaccgcgcgttgtttgaagacagcgccatgtcgcagcagcccacggtgccggatcgtctgcgctggctattgcaaacctttaaatatcagaaaaatatccgtattcatgctttcaacgaagagggcatggagccgtatccgcatggctgggatgtgtggagcaacggcatcaaaaagtttatggctgaaaaggggatccagccggacctgatctacacctcggaagaagccgatgcgccacagtatatggaacatctggggatcgagacggtgctggtcgatccgaaacgtacctttatgagtatcagcggtgcgcagatccgcgaaaacccgttccgctactgggaatatattcctaccgaagtgaagccgttttttgtgcgtaccgtggcgatccttggcggcgagtcgagcggtaaatccaccttggtaaacaaacttgccaatatcttcaacaccaccagtgcgtgggaatatggccgcgattatgtcttttcacacctcggcggtgatgagatcgcattgcagtattccgactacgataaaatcgcgttgggtcacgcacaatacattgattttgcagtgaaatacgccaataaagtggcgtttattgacaccgattttgtcactacccaggcgttctgcaaaaagtacgaagggcgtgagcatccgttcgtgcaggcgctgattgatgaataccgtttcgatctggtgatcctgctggagaacaacacgccgtgggtggcggatggtttacgcagcctcggcagttcggtggatcgcaaagagttccagaacttgctggtggagatgctggaagagaacaatatcgaattcgtgcgggttgaagaggacgattacgacagccgtttcctgcgctgcgtggagctggtgcgggagatgatgggggagcaaggataa

SEQ ID NO: 9859 - protein, 417 aa, Shigella flexneri
MRDTEGDMSSFDYLKTAIKQQGCTLQQVADASGMTKGYLSQLLNAKIKSPSAQKLEALHRFLGLEFPRQKKTIGVVFGKFYPLHTGHIYLIQRACSQVDELHIIMGFDDTRDRALFEDSAMSQQPTVPDRLRWLLQTFKYQKNIRIHAFNEEGMEPYPHGWDVWSNGIKKFMAEKGIQPDLIYTSEEADAPQYMEHLGIETVLVDPKRTFMSISGAQIRENPFRYWEYIPTEVKPFFVRTVAILGGESSGKSTLVNKLANIFNTTSAWEYGRDYVFSHLGGDEIALQYSDYDKIALGHAQYIDFAVKYANKVAFIDTDFVTTQAFCKKYEGREHPFVQALIDEYRFDLVILLENNTPWVADGLRSLGSSVDRKEFQNLLVEMLEENNIEFVRVEEDDYDSRFLRCVELVREMMGEQG

SEQ ID NO: 9860 - DNA, 1254 bp, Escherichia coli O6
  CDS (1)..(1254): transl_table=11
atgagagatacggagggagatatgtcgtcatttgattacctgaaaactgccattaagcaacagggctgcacgctacagcaggtagctgatgccagcggtatgaccaaagggtatttaagccagttactgaatgccaaaattaaaagccccagcgcgcaaaaactggaggcattgcaccgttttttggggcttgagtttccccggcagaagaaaacgatcggtgtcgtattcggtaagttttacccgctgcatactggacatatctaccttatccagcgcgcctgtagccaggttgacgagctgcatatcattatgggttttgacgatacccgcgaccgcgcattgttcgaagacagcgccatgtcgcagcagccaaccgtgccggatcgtctgcgctggttattgcagacctttaagtatcaaaaaaatatccgcattcatgcttttaacgaagagggcatggaaccgtatccacatggctgggatgtgtggagcaacggcatcaaaaagtttatggccgaaaaaggcattcagccggacctgatctacacctcggaagaagccgatgcgccgcagtatatggaacatctggggatcgagacggtgctggtcgatccgaagcgtacctttatgagtatcagcggtgcgcagatccgcgaaaacccgttccgctactgggaatatattcctacggaagttaagccgttctttgtgcgtaccgtggcgatccttggcggcgagtcgagcggtaaatccaccctggtaaacaaacttgccaatatcttcaacactaccagtgcatgggaatatggtcgcgattatgtcttttcacaccttggcggtgatgagattgcgttgcagtattccgactacgataaaatcgcgctgggacacgcgcaatatattgattttgcagtgaaatatgccaataaagtggcgtttatcgacaccgattttgtcactacccaggcgttctgcaaaaagtacgaagggcgtgagcatccgttcgtgcaggcgttgattgatgaataccgtttcgatctggtgatcctgctggagaacaacacgccgtgggtggcggatggtttacgcagcctcggcagttcggtggatcgcaaagagttccagaacttgctggtggagatgctggaagagaacaatatcgaattcgtgcgggttgaagaggacgattacgacagccgtttcctgcgctgcgtggagctggtgcgggagatgatgggggagcaaagataa

SEQ ID NO: 9861 - protein, 417 aa, Escherichia coli O6
MRDTEGDMSSFDYLKTAIKQQGCTLQQVADASGMTKGYLSQLLNAKIKSPSAQKLEALHRFLGLEFPRQKKTIGVVFGKFYPLHTGHIYLIQRACSQVDELHIIMGFDDTRDRALFEDSAMSQQPTVPDRLRWLLQTFKYQKNIRIHAFNEEGMEPYPHGWDVWSNGIKKFMAEKGIQPDLIYTSEEADAPQYMEHLGIETVLVDPKRTFMSISGAQIRENPFRYWEYIPTEVKPFFVRTVAILGGESSGKSTLVNKLANIFNTTSAWEYGRDYVFSHLGGDEIALQYSDYDKIALGHAQYIDFAVKYANKVAFIDTDFVTTQAFCKKYEGREHPFVQALIDEYRFDLVILLENNTPWVADGLRSLGSSVDRKEFQNLLVEMLEENNIEFVRVEEDDYDSRFLRCVELVREMMGEQR

SEQ ID NO: 9862 - DNA, 1254 bp, Escherichia coli O157
  CDS (1)..(1254): transl_table=11
atgagaaatacggagggagatatgtcgtcatttgattacctgaaaactgccatcaagcaacagggctgcacgctacagcaggtagctgatgccagcggtatgaccaaagggtatttaagccagttactgaatgccaaaatcaaaagccccagcgcgcaaaagctggaggcgttgcaccgttttttggggcttgagtttccccggcagaagaaaacgatcggtgtcgtattcggtaagttctacccactgcataccggacatatctaccttatccagcgcgcctgtagccaggttgacgagctgcatatcattatgggttttgacgatacccgtgaccgcgcgttgttcgaagacagtgccatgtcgcagcagccgaccgtgccggatcgtctgcgctggttattgcaaacttttaaatatcagaaaaatattcgcattcatgctttcaacgaagagggcatggagccgtatccgcacggctgggatgtgtggagcaacggtatcaaaaagtttatggctgaaaaggggatccagccggatctgatctacacctcggaagaagccgatgcgccacagtatatggaacatctggggatcgagacggtgctggtcgatccgaaacgtacctttatgagtatcagcggtgcgcagatccgcgaaaacccgttccgctactgggaatatattcctaccgaagtgaagccgttttttgtgcgtaccgtggcgatccttggcggcgagtcgagcggtaaatccaccctggtaaacaaacttgccaatatcttcaacaccaccagtgcgtgggaatatggccgcgattatgtcttttcacacctcggcggtgatgagatcgcattgcagtattctgactacgataaaatcgcgctgggccacgctcaatacattgattttgcggtgaaatatgccaataaagtggcatttatcgataccgattttgtcaccactcaggcgttctgcaaaaagtacgaagggcgggaacatccgttcgtgcaggcgctgattgatgaataccgtttcgatctggtgatcctgctggagaacaacacgccgtgggtggtggatggtttacgcagcctcggcagttcggtggatcgtaaagagttccagaatctgctggtggagatgctggaagagaacaatatcgaatttgtgcgggttgaagaggaagattacgacagccgtttcctgcgctgcgtggagctggtgcgggagatgatgggggagcagagataa

SEQ ID NO: 9863 - protein, 417 aa, Escherichia coli O157
MRNTEGDMSSFDYLKTAIKQQGCTLQQVADASGMTKGYLSQLLNAKIKSPSAQKLEALHRFLGLEFPRQKKTIGVVFGKFYPLHTGHIYLIQRACSQVDELHIIMGFDDTRDRALFEDSAMSQQPTVPDRLRWLLQTFKYQKNIRIHAFNEEGMEPYPHGWDVWSNGIKKFMAEKGIQPDLIYTSEEADAPQYMEHLGIETVLVDPKRTFMSISGAQIRENPFRYWEYIPTEVKPFFVRTVAILGGESSGKSTLVNKLANIFNTTSAWEYGRDYVFSHLGGDEIALQYSDYDKIALGHAQYIDFAVKYANKVAFIDTDFVTTQAFCKKYEGREHPFVQALIDEYRFDLVILLENNTPWVVDGLRSLGSSVDRKEFQNLLVEMLEENNIEFVRVEEEDYDSRFLRCVELVREMMGEQR

SEQ ID NO: 9864 - DNA, 1233 bp, Escherichia coli; identical to SEQ ID NO: 6500
  CDS (1)..(1233): transl_table=11

SEQ ID NO: 9865 - protein, 410 aa, Escherichia coli; identical to SEQ ID NO: 6501

SEQ ID NO: 9866 - DNA, 1266 bp, Haemophilus influenzae; identical to SEQ ID NO: 6528
  CDS (1)..(1266): transl_table=11

SEQ ID NO: 9867 - protein, 421 aa, Haemophilus influenzae; identical to SEQ ID NO: 6529

SEQ ID NO: 9868 - DNA, 1233 bp, Salmonella typhimurium
  CDS (1)..(1233): transl_table=11
atgtcatcgttcgactatctcaaaaccgcgattaagcagcaaggttgcactctgcaacaggtggctgacgccagcggtatgaccaagggatatctgagtcagttacttaacgccaaaatcaaaagccccagcgcgcaaaaactggaggcgctacaccgttttctcgggctggagtttccccgccgacagaaaaacattggcgtggtgttcggtaaattttatccattgcataccggacacatctacttgatccagcgcgcctgtagccaggtggatgagttgcacatcattatgggatatgacgatacgcgcgaccgcgggctgtttgaggatagcgccatgtcgcagcagcccaccgtgtcggatcgcctgcgctggttattgcaaaccttcaaataccaaaaaaatattcgcatccacgcctttaatgaagaggggatggagccttatccgcatggctgggacgtctggagcaacggcattaaagcgtttatggcagagaagggaatacagccgagctggatctacacttccgaagaggctgatgcgccgcagtatcttgagcatttagggattgagacggtgctggtcgatcctgaacgcacgtttatgaatatcagtggggcgcaaatccgcgaaaatccgtttcgttactgggaatatattcctaccgaagtgaagccgtttttcgtgcgtaccgtcgcgattctgggcggggaatcaagcggcaagtctacgctggtcaataagctcgccaatatttttaataccaccagcgcctgggaatatggccgcgactatgtcttttcgcatctgggcggcgatgagatggcgttacagtattccgactacgataaaattgcgctgggccatgcgcaatatattgatttcgcagtgaaatatgcgaataaagtggcgtttatcgataccgatttcgtcaccacccaggcattttgcaaaaaatacgaaggacgcgagcatccctttgtccaggcgctgatcgacgagtatcgcttcgacctggtgattttgctggagaataatacgccgtgggtagctgacggactgcgaagcctgggcagttcagtggatcgcaaagcgttccagaacctgctggtcgagatgctgaaagagaacaacattgagttcgttcacgttaaagaggctgattacgatggtcgctttttgcgctgtgtggaactggtgaaagagatgatgggcgagcagggataa

SEQ ID NO: 9869 - protein, 410 aa, Salmonella typhimurium
MSSFDYLKTAIKQQGCTLQQVADASGMTKGYLSQLLNAKIKSPSAQKLEALHRFLGLEFPRRQKNIGVVFGKFYPLHTGHIYLIQRACSQVDELHIIMGYDDTRDRGLFEDSAMSQQPTVSDRLRWLLQTFKYQKNIRIHAFNEEGMEPYPHGWDVWSNGIKAFMAEKGIQPSWIYTSEEADAPQYLEHLGIETVLVDPERTFMNISGAQIRENPFRYWEYIPTEVKPFFVRTVAILGGESSGKSTLVNKLANIFNTTSAWEYGRDYVFSHLGGDEMALQYSDYDKIALGHAQYIDFAVKYANKVAFIDTDFVTTQAFCKKYEGREHPFVQALIDEYRFDLVILLENNTPWVADGLRSLGSSVDRKAFQNLLVEMLKENNIEFVHVKEADYDGRFLRCVELVKEMMGEQG

SEQ ID NO: 9870 - DNA, 24 bp, Artificial sequence
  primer
atgagatatacggagggagatatg

SEQ ID NO: 9871 - DNA, 22 bp, Artificial sequence
  primer
ttatctctgctcccccatcatc

SEQ ID NO: 9872 - protein, 395 aa, Artificial sequence
  consensus sequence
  Variant (2)..(3): Xaa in position 2 to 3 is any amino acid
  Variant (5)..(5): Xaa in position 5 is any amino acid
  Variant (8)..(11): Xaa in position 8 to 11 is any amino acid
  Variant (14)..(27): Xaa in position 14 to 27 is any amino acid
  Variant (29)..(30): Xaa in position 29 to 30 is any amino acid
  Variant (32)..(33): Xaa in position 32 to 33 is any amino acid
  Variant (36)..(37): Xaa in position 36 to 37 is any amino acid
  Variant (38)..(38): Xaa in position 38 is any or no amino acid
  Variant (42)..(42): Xaa in position 42 is any amino acid
  Variant (46)..(46): Xaa in position 46 is any amino acid
  Variant (49)..(49): Xaa in position 49 is any amino acid
  Variant (53)..(54): Xaa in position 53 to 54 is any amino acid
  Variant (56)..(60): Xaa in position 56 to 60 is any amino acid
  Variant (61)..(63): Xaa in position 61 to 63 is any or no amino acid
  Variant (65)..(66): Xaa in position 65 to 66 is any amino acid
  Variant (69)..(69): Xaa in position 69 is any amino acid
  Variant (76)..(76): Xaa in position 76 is any amino acid
  Variant (82)..(83): Xaa in position 82 to 83 is any amino acid
  Variant (85)..(86): Xaa in position 85 to 86 is any amino acid
  Variant (88)..(88): Xaa in position 88 is any amino acid
  Variant (90)..(90): Xaa in position 90 is any amino acid
  Variant (96)..(96): Xaa in position 96 is any amino acid
  Variant (98)..(100): Xaa in position 98 to 100 is any amino acid
  Variant (102)..(103): Xaa in position 102 to 103 is any amino acid
  Variant (106)..(107): Xaa in position 106 to 107 is any amino acid
  Variant (110)..(111): Xaa in position 110 to 111 is any amino acid
  Variant (113)..(113): Xaa in position 113 is any amino acid
  Variant (115)..(117): Xaa in position 115 to 117 is any amino acid
  Variant (121)..(121): Xaa in position 121 is any amino acid
  Variant (127)..(128): Xaa in position 127 to 128 is any amino acid
  Variant (130)..(130): Xaa in position 130 is any amino acid
  Variant (137)..(137): Xaa in position 137 is any amino acid
  Variant (139)..(139): Xaa in position 139 is any amino acid
  Variant (142)..(144): Xaa in position 142 to 144 is any amino acid
  Variant (146)..(146): Xaa in position 146 is any amino acid
  Variant (148)..(150): Xaa in position 148 to 150 is any amino acid
  Variant (153)..(153): Xaa in position 153 is any amino acid
  Variant (156)..(157): Xaa in position 156 to 157 is any amino acid
  Variant (160)..(162): Xaa in position 160 to 162 is any amino acid
  Variant (164)..(167): Xaa in position 164 to 167 is any amino acid
  Variant (170)..(172): Xaa in position 170 to 172 is any amino acid
  Variant (174)..(178): Xaa in position 174 to 178 is any amino acid
  Variant (181)..(182): Xaa in position 181 to 182 is any amino acid
  Variant (184)..(186): Xaa in position 184 to 186 is any amino acid
  Variant (188)..(190): Xaa in position 188 to 190 is any amino acid
  Variant (192)..(193): Xaa in position 192 to 193 is any amino acid
  Variant (195)..(196): Xaa in position 195 to 196 is any amino acid
  Variant (198)..(198): Xaa in position 198 is any amino acid
  Variant (201)..(201): Xaa in position 201 is any amino acid
  Variant (203)..(203): Xaa in position 203 is any amino acid
  Variant (205)..(207): Xaa in position 205 to 207 is any amino acid
  Variant (209)..(211): Xaa in position 209 to 211 is any amino acid
  Variant (214)..(215): Xaa in position 214 to 215 is any amino acid
  Variant (218)..(218): Xaa in position 218 is any amino acid
  Variant (221)..(222): Xaa in position 221 to 222 is any amino acid
  Variant (225)..(225): Xaa in position 225 is any amino acid
  Variant (228)..(228): Xaa in position 228 is any amino acid
  Variant (232)..(233): Xaa in position 232 to 233 is any amino acid
  Variant (235)..(235): Xaa in position 235 is any amino acid
  Variant (247)..(247): Xaa in position 247 is any amino acid
  Variant (254)..(255): Xaa in position 254 to 255 is any amino acid
  Variant (267)..(268): Xaa in position 267 to 268 is any amino acid
  Variant (271)..(272): Xaa in position 271 to 272 is any amino acid
  Variant (278)..(278): Xaa in position 278 is any amino acid
  Variant (280)..(280): Xaa in position 280 is any amino acid
  Variant (286)..(288): Xaa in position 286 to 288 is any amino acid
  Variant (293)..(294): Xaa in position 293 to 294 is any amino acid
  Variant (298)..(298): Xaa in position 298 is any amino acid
  Variant (301)..(302): Xaa in position 301 to 302 is any amino acid
  Variant (304)..(304): Xaa in position 304 is any amino acid
  Variant (314)..(314): Xaa in position 314 is any amino acid
  Variant (321)..(322): Xaa in position 321 to 322 is any amino acid
  Variant (326)..(327): Xaa in position 326 to 327 is any amino acid
  Variant (331)..(334): Xaa in position 331 to 334 is any amino acid
  Variant (336)..(336): Xaa in position 336 is any amino acid
  Variant (339)..(339): Xaa in position 339 is any amino acid
  Variant (342)..(343): Xaa in position 342 to 343 is any amino acid
  Variant (347)..(347): Xaa in position 347 is any amino acid
  Variant (351)..(351): Xaa in position 351 is any amino acid
  Variant (354)..(354): Xaa in position 354 is any amino acid
  Variant (362)..(365): Xaa in position 362 to 365 is any amino acid
  Variant (367)..(368): Xaa in position 367 to 368 is any amino acid
  Variant (371)..(371): Xaa in position 371 is any amino acid
  Variant (374)..(376): Xaa in position 374 to 376 is any amino acid
  Variant (378)..(391): Xaa in position 378 to 391 is any amino acid
  Variant (393)..(394): Xaa in position 393 to 394 is any amino acid
MXXFXYLXXXXKQXXXXXXXXXXXXXXTXXYXXQLXXXKIKXPSAXKLXALHXXLXXXXXXXXKXXGVXFGKFYPXHTGHIXXIXXAXSXVDELHXIXXXDXXRDXXLFXXSXMXXXPTVXDRLRWXXQXFKYQKNXIXIHXXXEXGXXXYPXGWXXWSXXXKXXXXEKXXXPXXXXXSEXXDXXXYXXXLXXEXXLXDPXRXFXXXSXXXIRXXPFXYWXXIPXEVXPFFXXTXAILGGESSGKSXLVNKLAXXFNTTSAWEYGRXXVFXXLGGDEXAXQYSDYXXXALGHXXYIDXAVXXAXKVAFIDTDFXTTQAFCXXYEGXXHPFXXXXIXEYXFDXXILLXNNTXWVXDGLRSLGXXXXRXXFQXLLXXXLXXXXXXXXXXXXXXYXXR

SEQ ID NO: 9873 - protein, 59 aa, Artificial sequence
  protein pattern
  Variant (2)..(2): Xaa in position 2 is any amino acid
  Variant (5)..(5): Xaa in position 5 is Asp, Glu or Lys
  Variant (6)..(6): Xaa in position 6 is Phe or Tyr
  Variant (9)..(9): Xaa in position 9 is any amino acid
  Variant (11)..(11): Xaa in position 11 is Ala or Val
  Variant (12)..(12): Xaa in position 12 is Lys or Arg
  Variant (16)..(16): Xaa in position 16 is Ala or Val
  Variant (17)..(17): Xaa in position 17 is Lys or Arg
  Variant (19)..(19): Xaa in position 19 is Ile or Val
  Variant (30)..(30): Xaa in position 30 is Ser or Thr
  Variant (31)..(31): Xaa in position 31 is Thr or Val
  Variant (38)..(38): Xaa in position 38 is Ala, Asn or Thr
  Variant (39)..(39): Xaa in position 39 is Ile or Val
  Variant (51)..(51): Xaa in position 51 is Asp or Glu
  Variant (52)..(52): Xaa in position 52 is Phe or Tyr
  Variant (55)..(55): Xaa in position 55 is Asp, Glu or Ser
  Variant (56)..(56): Xaa in position 56 is His or Lys
FXYWXXIPXEXXPFFXXTXAILGGESSGKXXLVNKLAXXFNTTSAWEYGRXXVFXXLGG

SEQ ID NO: 9874 - protein, 60 aa, Artificial sequence
  protein pattern
  Variant (2)..(2): Xaa in position 2 is any amino acid
  Variant (5)..(5): Xaa in position 5 is any amino acid
  Variant (6)..(6): Xaa in position 6 is any or no amino acid
  Variant (8)..(8): Xaa in position 8 is any or no amino acid
  Variant (13)..(13): Xaa in position 13 is Ile or Val
  Variant (20)..(21): Xaa in position 20 to 21 is any amino acid
  Variant (25)..(25): Xaa in position 25 is Lys or Arg
  Variant (26)..(26): Xaa in position 26 is any amino acid
  Variant (30)..(30): Xaa in position 30 is Leu or Val
  Variant (31)..(31): Xaa in position 31 is Asp or Gln
  Variant (32)..(32): Xaa in position 32 is Ala or Ser
  Variant (33)..(33): Xaa in position 33 is Leu or Met
  Variant (34)..(34): Xaa in position 34 is Ile or Val
  Variant (35)..(35): Xaa in position 35 is Asp or Lys
  Variant (38)..(38): Xaa in position 38 is any amino acid
  Variant (41)..(41): Xaa in position 41 is Leu or Val
  Variant (42)..(42): Xaa in position 42 is Thr or Val
  Variant (46)..(46): Xaa in position 46 is Glu or Asn
  Variant (50)..(50): Xaa in position 50 is any amino acid
  Variant (53)..(53): Xaa in position 53 is Ala, Asp or Val
AXKVXXIXDTDFXTTQAFCXXYEGXXHPFXXXXXXEYXFDXXILLXNNTXWVXDGLRSLG

SEQ ID NO: 9875 - protein, 60 aa, Artificial sequence; identical to SEQ ID NO: 6535
  protein pattern
  Variant (3)..(3): Xaa in position 3 is Ile or Val
  Variant (10)..(10): Xaa in position 10 is Leu or Val
  Variant (16)..(16): Xaa in position 16 is any amino acid
  Variant (17)..(17): Xaa in position 17 is Leu or Met
  Variant (19)..(19): Xaa in position 19 is any amino acid
  Variant (20)..(20): Xaa in position 20 is Glu or Arg
  Variant (22)..(22): Xaa in position 22 is any amino acid
  Variant (24)..(24): Xaa in position 24 is any amino acid
  Variant (30)..(31): Xaa in position 30 to 31 is Ile or Val
  Variant (32)..(32): Xaa in position 32 is Leu, Met or Val
  Variant (33)..(33): Xaa in position 33 is Cys or Gly
  Variant (34)..(34): Xaa in position 34 is any amino acid
  Variant (36)..(36): Xaa in position 36 is Asp, Glu or Thr
  Variant (37)..(37): Xaa in position 37 is any amino acid
  Variant (40)..(41): Xaa in position 40 to 41 is any amino acid
  Variant (44)..(44): Xaa in position 44 is any amino acid
  Variant (45)..(45): Xaa in position 45 is Asp, Asn or Ser
  Variant (47)..(47): Xaa in position 47 is any amino acid
  Variant (49)..(49): Xaa in position 49 is any amino acid
  Variant (50)..(50): Xaa in position 50 is Gln or Arg
  Variant (51)..(51): Xaa in position 51 is any amino acid
  Variant (55)..(55): Xaa in position 55 is Pro, Gln or Ser

SEQ ID NO: 9876 - protein, 57 aa, Artificial sequence
  protein pattern
  Variant (2)..(2): Xaa in position 2 is any amino acid
  Variant (4)..(4): Xaa in position 4 is any amino acid
  Variant (5)..(5): Xaa in position 5 is any or no amino acid
  Variant (7)..(7): Xaa in position 7 is any or no amino acid
  Variant (10)..(10): Xaa in position 10 is any amino acid
  Variant (13)..(13): Xaa in position 13 is Asp, Glu, Gln or Arg
  Variant (14)..(14): Xaa in position 14 is Ala, Ser or Val
  Variant (17)..(17): Xaa in position 17 is any amino acid
  Variant (18)..(18): Xaa in position 18 is Ala or Gly
  Variant (19)..(21): Xaa in position 19 to 21 is any amino acid
  Variant (22)..(22): Xaa in position 22 is Phe or Leu
  Variant (23)..(23): Xaa in position 23 is Phe or Met
  Variant (24)..(24): Xaa in position 24 is any amino acid
  Variant (25)..(25): Xaa in position 25 is Glu or Lys
  Variant (27)..(27): Xaa in position 27 is any amino acid
  Variant (28)..(28): Xaa in position 28 is Phe or Ile
  Variant (29)..(29): Xaa in position 29 is any amino acid
  Variant (31)..(31): Xaa in position 31 is Asp, Glu, Asn, Ser or Thr
  Variant (32)..(32): Xaa in position 32 is any amino acid
  Variant (33)..(33): Xaa in position 33 is Ile or Val
  Variant (34)..(34): Xaa in position 34 is Phe or Tyr
  Variant (35)..(35): Xaa in position 35 is Ser or Thr
  Variant (38)..(38): Xaa in position 38 is any amino acid
  Variant (39)..(39): Xaa in position 39 is Ala or Gln
  Variant (41)..(41): Xaa in position 41 is any amino acid
  Variant (42)..(42): Xaa in position 42 is Ala, Leu or Pro
  Variant (43)..(43): Xaa in position 43 is any amino acid
  Variant (45)..(45): Xaa in position 45 is any amino acid
  Variant (46)..(46): Xaa in position 46 is Glu or Lys
  Variant (47)..(47): Xaa in position 47 is His or Tyr
  Variant (48)..(48): Xaa in position 48 is Phe or Leu
  Variant (49)..(49): Xaa in position 49 is Asp, Gly or Asn
  Variant (50)..(50): Xaa in position 50 is Ile or Leu
  Variant (51)..(51): Xaa in position 51 is Asp or Glu
  Variant (52)..(52): Xaa in position 52 is Ala, Thr or Val
  Variant (53)..(53): Xaa in position 53 is any amino acid
  Variant (55)..(55): Xaa in position 55 is Ile or Val
EXGXXPXYPXGWXXWSXXXXXXXXXKXXXPXXXXXSEXXDXXXYXXXXXXXXXLXDP

SEQ ID NO: 9877 - protein, 23 aa, Artificial sequence
  protein pattern
  Variant (2)..(2): Xaa in position 2 is any or no amino acid
  Variant (4)..(5): Xaa in position 4 to 5 is any amino acid
  Variant (6)..(6): Xaa in position 6 is any or no amino acid
  Variant (10)..(10): Xaa in position 10 is Asn or Ser
  Variant (14)..(14): Xaa in position 14 is Ala, Gln or Thr
  Variant (17)..(17): Xaa in position 17 is Ala, Glu, Ser or Thr
  Variant (21)..(21): Xaa in position 21 is His, Lys or Arg
  Variant (22)..(22): Xaa in position 22 is any amino acid
QXLXXXKIKXPSAXKLXALHXXL

SEQ ID NO: 9878 - protein, 40 aa, Artificial sequence
  protein pattern
  Variant (2)..(3): Xaa in position 2 to 3 is any amino acid
  Variant (6)..(6): Xaa in position 6 is any amino acid
  Variant (9)..(10): Xaa in position 9 to 10 is any amino acid
  Variant (11)..(11): Xaa in position 11 is Leu or Met
  Variant (13)..(13): Xaa in position 13 is any amino acid
  Variant (14)..(14): Xaa in position 14 is Glu or Lys
  Variant (15)..(16): Xaa in position 15 to 16 is any amino acid
  Variant (17)..(17): Xaa in position 17 is Ile or Val
  Variant (18)..(18): Xaa in position 18 is Glu or Pro
  Variant (19)..(19): Xaa in position 19 is Phe or Tyr
  Variant (20)..(20): Xaa in position 20 is Ile or Val
  Variant (21)..(21): Xaa in position 21 is any amino acid
  Variant (22)..(22): Xaa in position 22 is Ile or Val
  Variant (23)..(23): Xaa in position 23 is Asp, Glu or Lys
  Variant (24)..(24): Xaa in position 24 is Glu or Ser
  Variant (25)..(25): Xaa in position 25 is any amino acid
  Variant (26)..(26): Xaa in position 26 is Asp or Ser
  Variant (28)..(28): Xaa in position 28 is any amino acid
  Variant (29)..(29): Xaa in position 29 is Ala, Asp, Glu, Gly or Ser
  Variant (31)..(33): Xaa in position 31 to 33 is any amino acid
  Variant (34)..(34): Xaa in position 34 is any or no amino acid
  Variant (36)..(36): Xaa in position 36 is Glu or Lys
  Variant (37)..(37): Xaa in position 37 is any amino acid
  Variant (38)..(38): Xaa in position 38 is Ile or Val
  Variant (39)..(39): Xaa in position 39 is any amino acid
  Variant (40)..(40): Xaa in position 40 is Glu or Gln
RXXFQXLLXXXLXXXXXXXXXXXXXXYXXRXXXXVXXXXX

SEQ ID NO: 9879 - protein, 22 aa, Artificial sequence
  protein pattern
  Variant (2)..(2): Xaa in position 2 is any amino acid
  Variant (8)..(8): Xaa in position 8 is Asp or Pro
  Variant (9)..(9): Xaa in position 9 is any amino acid
  Variant (10)..(10): Xaa in position 10 is Ile or Met
  Variant (15)..(15): Xaa in position 15 is any or no amino acid
  Variant (17)..(17): Xaa in position 17 is any or no amino acid
  Variant (21)..(21): Xaa in position 21 is Phe or Tyr
AXQYSDYXXXALGHXQXYIDXA

SEQ ID NO: 9880 - protein, 23 aa, Artificial sequence
  protein pattern
  Variant (3)..(4): Xaa in position 3 to 4 is any or no amino acid
  Variant (6)..(6): Xaa in position 6 is any amino acid
  Variant (7)..(8): Xaa in position 7 to 8 is any or no amino acid
  Variant (10)..(11): Xaa in position 10 to 11 is any amino acid
  Variant (12)..(12): Xaa in position 12 is Gly, Asn or Ser
  Variant (13)..(14): Xaa in position 13 to 14 is any amino acid
  Variant (15)..(15): Xaa in position 15 is Leu or Val
  Variant (16)..(16): Xaa in position 16 is Asn or Gln
  Variant (17)..(17): Xaa in position 17 is Asp, Glu or Gln
  Variant (18)..(18): Xaa in position 18 is Ile, Leu or Val
  Variant (19)..(19): Xaa in position 19 is Ala or Cys
  Variant (20)..(20): Xaa in position 20 is Ala, Asp, Glu, Gln or Thr
  Variant (21)..(21): Xaa in position 21 is any amino acid
  Variant (22)..(22): Xaa in position 22 is Ala, Cys or Ser
  Variant (23)..(23): Xaa in position 23 is Gly or Asn
YLXXKXXXKXXXXXXXXXXXXXX

SEQ ID NO: 9881 - protein, 14 aa, Artificial sequence
  protein pattern
  Variant (2)..(2): Xaa in position 2 is Ser, Thr or Val
  Variant (4)..(4): Xaa in position 4 is Phe or Met
  Variant (5)..(5): Xaa in position 5 is any amino acid
  Variant (6)..(6): Xaa in position 6 is Ile or Val
  Variant (8)..(8): Xaa in position 8 is Ala or Gly
  Variant (9)..(10): Xaa in position 9 to 10 is any amino acid
  Variant (13)..(13): Xaa in position 13 is any amino acid
  Variant (14)..(14): Xaa in position 14 is Ala, Asp, Glu, Asn or Thr
RXFXXXSXXXIRXX

SEQ ID NO: 9882 - protein, 8 aa, Artificial sequence
  protein pattern
  Variant (2)..(2): Xaa in position 2 is any amino acid
QXFKYQKN

SEQ ID NO: 9883 - DNA, 564 bp, Saccharomyces cerevisiae
  CDS (1)..(564)
atgctacctttatatcttttaacaaatgcgaagggacaacaaatgcaaatagaattgaaaaacggtgaaattatacaagggatattgaccaacgtagataactggatgaaccttactttatctaatgtaaccgaatatagtgaagaaagcgcaattaattcagaagacaatgctgagagcagtaaagccgtaaaattgaacgaaatttatattagagggacttttatcaagtttatcaaattgcaagataatataattgacaaggtcaagcagcaaattaactccaacaataactctaatagtaacggccctgggcataaaagatactacaacaatagggattcaaacaacaatagaggtaactacaacagaagaaataataataacggcaacagcaaccgccgtccatactctcaaaaccgtcaatacaacaacagcaacagcagtaacattaacaacagtatcaacagtatcaatagcaacaaccaaaatatgaacaatggtttaggtgggtccgcccaacatcattttaacagctcttctccacaaaaggtcgaattttaa

SEQ ID NO: 9884 - protein, 187 aa, Saccharomyces cerevisiae
MLPLYLLTNAKGQQMQIELKNGEIIQGILTNVDNWMNLTLSNVTEYSEESAINSEDNAESSKAVKLNEIYIRGTFIKFIKLQDNIIDKVKQQINSNNNSNSNGPGHKRYYNNRDSNNNRGNYNRRNNNNGNSNRRPYSQNRQYNNSNSSNINNSINSINSNNQNMNNGLGGSAQHHFNSSSPQKVEF

SEQ ID NO: 9885 - DNA, 507 bp, Eremothecium gossypii; identical to SEQ ID NO: 7267
  CDS (1)..(507)

SEQ ID NO: 9886 - protein, 168 aa, Eremothecium gossypii; identical to SEQ ID NO: 7268

SEQ ID NO: 9887 - DNA, 711 bp, Brassica napus; identical to SEQ ID NO: 7269
  CDS (116)..(505)

SEQ ID NO: 9888 - protein, 129 aa, Brassica napus; identical to SEQ ID NO: 7270

SEQ ID NO: 9889 - DNA, 681 bp, Brassica napus; identical to SEQ ID NO: 7273
  CDS (131)..(520)

SEQ ID NO: 9890 - protein, 129 aa, Brassica napus; identical to SEQ ID NO: 7274

SEQ ID NO: 9891 - DNA, 763 bp, Glycine max; identical to SEQ ID NO: 7275
  CDS (98)..(547)

SEQ ID NO: 9892 - protein, 149 aa, Glycine max; identical to SEQ ID NO: 7276

SEQ ID NO: 9893 - DNA, 435 bp, Unknown; identical to SEQ ID NO: 7277
  Unidentified
  CDS (1)..(432)

SEQ ID NO: 9894 - protein, 143 aa, Unknown; identical to SEQ ID NO: 7278
  Unidentified

SEQ ID NO: 9895 - DNA, 838 bp, Glycine max; identical to SEQ ID NO: 7279
  CDS (54)..(500)

SEQ ID NO: 9896 - protein, 148 aa, Glycine max; identical to SEQ ID NO: 7280

SEQ ID NO: 9897 - DNA, 450 bp, Glycine max; identical to SEQ ID NO: 7287
  CDS (1)..(450)

SEQ ID NO: 9898 - protein, 149 aa, Glycine max; identical to SEQ ID NO: 7288

SEQ ID NO: 9899 - DNA, 441 bp, Zea mays; identical to SEQ ID NO: 7293
  CDS (1)..(441)

SEQ ID NO: 9900 - protein, 146 aa, Zea mays; identical to SEQ ID NO: 7294

SEQ ID NO: 9901 - DNA, 28 bp, Artificial sequence
  primer
atgctacctttatatcttttaacaaatg

SEQ ID NO: 9902 - DNA, 26 bp, Artificial sequence
  primer
ttaaaattcgaccttttgtggagaag

SEQ ID NO: 9903 - protein, 172 aa, Artificial sequence; identical to SEQ ID NO: 7299
  consensus sequence
  Variant (48)..(57): Xaa in position 48 to 57 is any amino acid
  Variant (62)..(62): Xaa in position 62 is any amino acid
  Variant (93)..(93): Xaa in position 93 is any amino acid
  Variant (94)..(94): Xaa in position 94 is any or no amino acid
  Variant (98)..(98): Xaa in position 98 is any amino acid
  Variant (113)..(124): Xaa in position 113 to 124 is any amino acid
  Variant (125)..(126): Xaa in position 125 to 126 is any or no amino acid
  Variant (128)..(128): Xaa in position 128 is any amino acid
  Variant (129)..(129): Xaa in position 129 is any or no amino acid
  Variant (131)..(131): Xaa in position 131 is any amino acid
  Variant (133)..(136): Xaa in position 133 to 136 is any amino acid
  Variant (137)..(140): Xaa in position 137 to 140 is any or no amino acid
  Variant (145)..(148): Xaa in position 145 to 148 is any amino acid
  Variant (150)..(150): Xaa in position 150 is any amino acid
  Variant (151)..(162): Xaa in position 151 to 162 is any or no amino acid
  Variant (165)..(165): Xaa in position 165 is any amino acid
  Variant (167)..(167): Xaa in position 167 is any amino acid
  Variant (168)..(168): Xaa in position 168 is any or no amino acid
  Variant (171)..(171): Xaa in position 171 is any amino acid

SEQ ID NO: 9904 - protein, 6 aa, Artificial sequence
  protein pattern
ELKNGE

SEQ ID NO: 9905 - DNA, 690 bp, SACCHAROMYCES CEREVISIAE
  CDS (1)..(690)
atggatcctatggagactttcagaaaagatatatgtcagagtatctctcctatatatattaaccctgaaacgttgcagtttcaatctagagtttatctgaaagtgccccttgatgcattttcgacccttactactgtgggaaaatttttctccttccaatactatatcgaggttatggttaacttatcaaaaaaaaacgtggtttacacagaatctaatagaataataggaactcctattggagaacaaaatggcttgggcgtagagaataatatcaaccgtatccaaaggaaaatgctacgtatggtcaatccagaaacgttggagaacgattctgagggttatgaatccagtatatttttcaaagatatggtaaatgtggaaaagctaaagagactgaggaatgtaactggtatgtccatagaaaccgtcataggaacgacgagatccgaacagcagcaatctgatgcaagcatcccatcccaatcctcaatcacggctcctcaaaattctccatcgaatttaagagattggttggccccattaaatgcatatgatagtgacgatgttccagttccaaagtattcgccaaatgataaagtcagtgtaccgtcggaagacaaacaagaacttgaacaaaaaagactacaacagttagaaagcgatcctcccccttgtgatgactattaa

SEQ ID NO: 9906 - protein, 229 aa, SACCHAROMYCES CEREVISIAE
MDPMETFRKDICQSISPIYINPETLQFQSRVYLKVPLDAFSTLTTVGKFFSFQYYIEVMVNLSKKNVVYTESNRIIGTPIGEQNGLGVENNINRIQRKMLRMVNPETLENDSEGYESSIFFKDMVNVEKLKRLRNVTGMSIETVIGTTRSEQQQSDASIPSQSSITAPQNSPSNLRDWLAPLNAYDSDDVPVPKYSPNDKVSVPSEDKQELEQKRLQQLESDPPPCDDY

SEQ ID NO: 9907 - DNA, 1539 bp, Saccharomyces pastorianus
  CDS (1)..(1539)
atgctggcccataacaacgtccggcaatttcgcattgacataaacgagccgcacagtgtgtggaagcccgatgaatgcataaccggtgagacagtcatcgacatcaagagagacatcactaatgtggccattaagctctctctggtgtgtgaggtacgagtgaagaccggcaatagtccaacctccaagaataaaagagtagagaagattttagaaaagtcaacctttctttacgggcaagagtacataaaggcagctcccgcggagaaaaaaccggccatcgacaagtctaccgttctcaacggtctaagcaagggcgaacacagattccccttcagaataaaaataccaaggggcaagggcatgttgagctccatcaaattcgaaagaggctccatcgcatacttcctgaactgcaccttggagtcccttaataacgttaatgctctgaaaaaaccagaggcgaggtgcgaacgtgagttctcggtcatagtgcccttggacgtctcgaggctgcccaaacagaagaccaagacggtggtgctgcagtccgcatccatggtccaaaacaaaaagggcaaatcctcggaggacgcatcctcctcctacacacaattaacccataagtccaacaattccaattcttccagcagtacggtaaactcctccaagacatcctccccaccaaacaaaacagtgaccatatccgtcgacataccgcacgccgggttcgtgatcggcgagacgatccccatcgacgtgaagatcgaacactataaacccttctaccacccagcgggcctcaccaccaccttggtgagaatctgcagggtgggcggtgcgggcaaagacgaccccatggagacttttagaaaggacatctgccagagtatctcccctatatacatcaatcctgaaacgctccagttccagcccagaattcatttgaaagtgcccctagacgcattttcgacactcacctccgtgagcaagttcttctccttccaatactacatcgaagtcatggtcaatttgtccaagaaaaacgtggtctatacggaatccaacagggtagtaggaacccccgtcgaggagcagaacggctcgggcgtagaacacaacatcaaccgcattcaaaggaaaatgctacgcatggtcaatccagaaactttggaaaacgtctccgagggctatgaatccagtatattcttcaaagacatggtcaacgtagaaaaactgaaaaggctcagaaacgtcacaggcatgtccatcgaaactgtcataggaacgacaagatccgagcagcaacagtacgatacgaacctccctcgccagcccgccaccactaccgcgcaagatccagtaccggacttgagagactggctagccccactgaatgcatacgaatgcgacgatgtccccgttccaaagtattcccccaatgatagagttaacgtagcgtcggaagacaagcaggagctggagcaaaaaagactacaacaactagaaagtgaccctccgtcctgtgatgactattag
